United States Patent Application Publication US 2005/0228172 A9 - sequence listing, part 53

SEQ ID NO: 218373 - DNA, 622 bp, Homo sapiens
ccctgtctccaaaaaaacaatggtgaaatttatggtatgctaattgtatctcagttttttaaaaaaataaatgtaacaagaggcttaataattgatcttatatacaagtgaaataggcttaaatatggagatgagagccagaagaaaacttttaatcctgtaaaataggtcccagtttgttttttaaaaaataaaggacatttgtactttctggtgaggtagttcctagatttatggagagatcctcaaaaggatagttgatgaaaataattttgttatgagaccctttctggactttttctgatgagtcagaacttagcatttgttggggagaataaatgattaaatctgtctacatatcacattttatttaatcatgtctacccattgtaktattctccaattacaacaataaaaattttaatagcactttataattttcaaggtgcttttctgtgtgtataaataaagaggtatataaaaatatataggggtaggtatttattaataatgttaattgtatattggttgagaattagttaaataatggaggttttgttttttaccctggataaaacacttcaagctttgggtaagttttatatgtaagtgtaatggtttt

SEQ ID NO: 218374 - DNA, 564 bp, Homo sapiens
gttgcagtgagcagtgatcacgccgctgcactccagcctaggtgaacagagcaagatcctgcctcaaaaaaaaaaaaaaaaaaaagatttatccatagggtagcttgttccccagattagttaacacattttttttttctaaaawttttttttttgtttttaattgacacacagtcttgctatgttgcccaggctggtcttgaactcccggcctcaactgatcctcctgcctcagcttcccaaaatgctagaattacaggcgtaagccatgacaccaagcttacacacatatttttttaatctacacagtcatttaaaaaatggctacaaatactatctatccaatctgaataactagggctaaatgtggaagaagcaccaaaagaaaactattctacttggccaatgttccaaggagacgtacctatataaataggtttaatatttttcatccttaaacttctatttggctatttcaatgtaaataccagatacagaaggtgttgaaagcagggaagtaatatatttttattaatgataatcagtcactattggtaataataa

SEQ ID NO: 218375 - DNA, 546 bp, Homo sapiens
catgattcacattcattattgaagaaaattatagatgggtatgtcatgggcttcatgagtaatcaaaatggagaatgttaaatctgtgaaagtcaagggcgcaaagtatatattttctgttatatgtgtttgccttggtgaaatacacaaaaaaaattttagtagggcccctrctatgctcattctgttttgtcatttatggaattttcacagagaaagcatgtgtctaaaaaacaaaaacaaaacaaaaaataccaccaccatcaccacacacacacacacacacacacacacacacacacacacatttatggaattttcacagagaaagcatgtgtctaaaaaacaaaaacaaaacaaaaaataccaccaccatcaccacacacacacacacacacacacacacacacacacgtgtgcgtgcaacaaacatcttaatgctattttcaacaaattgcctaaaaggaaaaggggctccagccctgtgttcccattttggcaccggcattaactagtcaacctttaggagcctgtttcctattctga

SEQ ID NO: 218376 - DNA, 188 bp, Homo sapiens
tgtccatctttttcatagaaaaattactctattatctatgacagtagaaaggaggaaaaagagcaattagytgggccaaagggtggttcatttggccttataaggttttcttccaatagagcacatgggaagcctcataattcccagccttgatcttgatcttctgttagaacttggaaaatgaattc

SEQ ID NO: 218377 - DNA, 579 bp, Homo sapiens
tcccatctctacaaaaaatacaaaattagccagccatggtggtgcatgcctgtaatcccagctacttgggaggctgaggcaggagaatcgcttcaacctgagaggtagaggttgcagtgagccgagatcgtgccattgcactccagcctgggcaacaagagaaaaactccatctcaaaaacaacaaaaaaagaagaagaggccatgtagacgttgttactgacattgacaatagctctggactgatgggcttgaatatctgatagaaagggttctggagagatgatgcagtgaagtgaaggcagagagyatagcaagtcttcccaggagttctgctacaaaggggagcggaagatccaagcagtaattagaaggcaaagactgtatcatacttgcatgctaatgagaacaatccagtaggctagaggaaagataataaatgacagagaaagaagaattgtaggaattgagaaagaataaaatatggtgcacagtagagaaattggctttaggtaagagtagggtcaattcacccattatatgtgaaaggaaaacggagaatatccacagttgcgtataa

SEQ ID NO: 218378 - DNA, 579 bp, Homo sapiens
tcccatctctacaaaaaatacaaaattagccagccatggtggtgcatgcctgtaatcccagctacttgggaggctgaggcaggagaatcgcttcaacctgagaggtagaggttgcagtgagccgagatcgtgccattgcactccagcctgggcaacaagagaaaaactccatctcaaaaacaacaaaaaaagaagaagaggccatgtagacgttgttactgacattgacaatagctctggactgatgggcttgaatatctgatagaaagggttctggagagatgatgcagtgaagtgaaggcagagagcatagcaagtcttcccaggagttctgctacaaaggggagcggaagatccaagcagtaattagaaggcaaagaytgtatcatacttgcatgctaatgagaacaatccagtaggctagaggaaagataataaatgacagagaaagaagaattgtaggaattgagaaagaataaaatatggtgcacagtagagaaattggctttaggtaagagtagggtcaattcacccattatatgtgaaaggaaaacggagaatatccacagttgcgtataa

SEQ ID NO: 218379 - DNA, 466 bp, Homo sapiens
ctatatggctctgtatagagaatgttggggcggacagcatctgaagtacataggtgctgcctatggaatgtttactctgtgccaggcactggactaaatcctttaagtattatgttatttgattctgtaaacaactacacaaagtgaatactattaatatgtccatttcaaagatgagaaaaytgaggtctagcaaaactaaataatttgtccaaggacacacagttgagaggtaataaaacccgattttgaatccaaatcatctaaaataaaaacactgctcttaatcattacagggcattccatggtccaaaccaccattttataaaagacaacatgaaaaccagaagcagggcactggctgccaatttgacgtaagataactggaaggaaaatgctgatgacttaaagtatgtgaaattttggcaaggctgccaagaccattcaacaaaaaggacaatcgttt

SEQ ID NO: 218380 - DNA, 458 bp, Homo sapiens
ctttgtccgggaggcccaggaaggttgatattcaagccagtcttttctgatcactccttcctctcatatccaaaattstatcactcagtgacttcagactgctgactcatagaccttgtgtcatagtccttcccttctgtgacaaaaattgatttgatagcgtgtgttaggttgatggcgacaaggtcaattgagttcgacttgctttcctctctaagtaatcaactgcgtttctctggtatgtggagaccttaaaaggcctggtgagttttaaatgtttctgctctgtaaatgtttattatttagatacaaagagttcatttaacctcatttgccaataatgtttcacaaaaattttttgtaatttcatgatgatcgcttaagtgtcttaattcattttaaaatgattacagcagtagaaactggttttaaaaaaatcttaaatgttcttagcttaa

SEQ ID NO: 218381 - DNA, 458 bp, Homo sapiens
ctttgtccgggaggcccaggaaggttgatattcaagccagtcttttctgatcactccttcctctcatatccaaaattctatcactcagtgacttcagactgctgactcatagaccttgtgtcatagtccttcccttctgtgacaaaaattgatttgatagcgtgtgttaggttgatggcgacaaggtcaattgagttcgacttgctttcctctctaagtaatcaactkcgtttctctggtatgtggagaccttaaaaggcctggtgagttttaaatgtttctgctctgtaaatgtttattatttagatacaaagagttcatttaacctcatttgccaataatgtttcacaaaaattttttgtaatttcatgatgatcgcttaagtgtcttaattcattttaaaatgattacagcagtagaaactggttttaaaaaaatcttaaatgttcttagcttaa

SEQ ID NO: 218382 - DNA, 393 bp, Homo sapiens
tgtttttgtttttgatgtttctatggatgaccaatttctcccacttcattaattaacatagtattttgtaggggaaagaaaagaaatatgccaataattttagtcaagacttgatctggactataagattatattatgtatatttatgctgatgattcttgaatagttatgtatttaattctttcagagtagtcttattgtccttagttctatattcttgaaggacattatgttatacccctaggaagtacctacattctctttyggacttaatgatgatagctgggcccctggactaaatatttattatagattctatatgataccgtgcttgaccaatcaagctgtacatgtgcctatctgtctagttccattcctgtgccttcccagtac

SEQ ID NO: 218383 - DNA, 393 bp, Homo sapiens
tgtttttgtttttgatgtttctatggatgaccaatttctcccacttcattaattaacatagtattttgtaggggaaagaaaagaaatatgccaataattttagtcaagacttgatctggactataagattatattatgtatatttatgctgatgattcttgaatagttatgtatttaattctttcagagtagtcttattgtccttagttctatattcttgaaggacattatgttatacccctaggaagtacctacattctcttttggacttaaygatgatagctgggcccctggactaaatatttattatagattctatatgataccgtgcttgaccaatcaagctgtacatgtgcctatctgtctagttccattcctgtgccttcccagtac

SEQ ID NO: 218384 - DNA, 470 bp, Homo sapiens
aaaatacttctaaatagatgtttataataaatataatgacataaacacatagtctggagatttaaaaaatataatagactatctgcccataaaaaatatagctgatttctctactgcctaaaatcaacaataaagcatatccaaaatgtcccaagactctaaaaagagttatatttttgtgaaaggaracaggcagtagatatatagacgatgatataattttaggtcgtgataactgctataaaaataaaactggatgatataatagaagataattagggaattagggctagcttagataaggctctaaggaaaattcatgcacttcatttattaaacacagatatagtccaattttctccttcttgtatcagattcattatatattctcagtagttttctaggaatttggctattacctgaatttttttctttaaaaataatattgtttatattataaatttcttatt

SEQ ID NO: 218385 - DNA, 570 bp, Homo sapiens
tcaccagtgagaatacctgaaatggacaaaacatgacagatcctatgaagctcagatgtgggtgtagctctttccatctctagcctcattcacctctgcctcctgccccmgtgaatgtcattctccaacaaagtatttgaaaaggtatttttctttgaaaaaagtacacagatggatagttagcaaaggaagagatgctcaacgtcgttagccatgagggaaatgtaaatcaaaaccacagtaaggttatacttcacaactactagggtggctgtaattaaaagacaagtaataactaatgttgatgaggatgtggagaaatggaaagcttcataattcctggtgagaatataaaataatgcaacccctttggaaaacagttggatgttcttcaaaaagctaaacatagttgctaaatgacccagcaattccacacgtaggtatatacttaagaaggatgaaaatgtgtgcacacaaaagcttgtacaggaattttcagagcaatatagtcataataatcatggaatgaaaacaacccaaacgtctgtccacttgaatgcataaacaaac

SEQ ID NO: 218386 - DNA, 570 bp, Homo sapiens
tcaccagtgagaatacctgaaatggacaaaacatgacagatcctatgaagctcagatgtgggtgtagctctttccatctctagcctcattcacctctgcctcctgccccagtgaatgtcattctccaacaaagtatttgaaaaggtatttttctttgaaaaaagtacacagatggatagttagcaaaggaagagatgctcaacgtcgttagccatgagggaaatgtaaatcaaaaccacagtaaggttatacttcacaactactagggtggctgtaattaaaagacaagtaataactaatgttgatgaggatgtggagaaatggaaarcttcataattcctggtgagaatataaaataatgcaacccctttggaaaacagttggatgttcttcaaaaagctaaacatagttgctaaatgacccagcaattccacacgtaggtatatacttaagaaggatgaaaatgtgtgcacacaaaagcttgtacaggaattttcagagcaatatagtcataataatcatggaatgaaaacaacccaaacgtctgtccacttgaatgcataaacaaac

SEQ ID NO: 218387 - DNA, 472 bp, Homo sapiens
cggacagctaaggtctatgagaaggaaagaagcaaagagtatcaagaatgtagagaaggkaaaggttgtgtgcaatttttctttgaaacaaatttggttatcttagcccagaatagaatcctattgaaagaaaaataatattgatcacagcatcaaaggtaaagagaaaaagctggctttgggaaacagcaactgaataggagctaagatgtatttgttgccacagcaacaaatgggtaaagcagctccaactgttttcagcctttccgactcaagatttacatttctgaggagagcatgtgcatggcccagatttctccctacccctcagccaagagagcattgggcattttgattgacagccccaggaagttagtacatcagacagggttggggtggaggggaggatggacgctgagcaggtaaacgcaacacatgtgcctgtagtcaacacagattattacgcagggat

SEQ ID NO: 218388 - DNA, 608 bp, Homo sapiens
atttgcattattagtttaaaaagttctttaaagaaaattccagttccaaatggtttaaccgttgaattctaccaaatatttaagaaagacacaatactaattttacaaatttactttaaaacattgaaaaaagaaactatgaggccaacatggccagaatacaaaaaaccagacaaaactttacaagaaaataaacctaaggactgatatccttcatgaacataarcataacaattctaaataaaattttagcaaactgaatctaacagtgtaaaaaaatcataatacctccagatccagtgttgctcatcttaggattgcctagttggtttaaaatttatatattcatcaattatttacttcatattaacaaacttaaaatgcaaagtcataagataatctcactagatgttaaaaagcatttggcaaaattcagcattcattcctgattaaaatataaataaataaacttctaaccaaactaatcatcaaggaagatccttgcaatctgtaagaggcatctactgaaaaaccagtagttggcatcattcttactggcaaagtctgaatgctttccccatgaaatcaaggacaagacaaaaatgcct

SEQ ID NO: 218389 - DNA, 336 bp, Homo sapiens
gagaaggaacacgatgaaatttattctgattgttagtggagaaattggagcaggagtaggaacacaggagctgcgayggtgagagatggtggtggcttggatcaaggcagtggccttgacaaaacaagaaatggaagaattggagaaatattgagtaagtcgagttgaaaagcattttgagaaagttactggatatgaaggcgtaggctctggagtgactggcaggtctgtgcaagggcaacctgacgtcttcttgatgccatttacagagcgagcaaatgcagcatgaagggcagcctggtgtttgtgtctttctatagattagaaaaaataatg

SEQ ID NO: 218390 - DNA, 336 bp, Homo sapiens
gagaaggaacacgatgaaatttattctgattgttagtggagaaattggagcaggagtaggaacacaggagctgcgatrgtgagagatggtggtggcttggatcaaggcagtggccttgacaaaacaagaaatggaagaattggagaaatattgagtaagtcgagttgaaaagcattttgagaaagttactggatatgaaggcgtaggctctggagtgactggcaggtctgtgcaagggcaacctgacgtcttcttgatgccatttacagagcgagcaaatgcagcatgaagggcagcctggtgtttgtgtctttctatagattagaaaaaataatg

SEQ ID NO: 218391 - DNA, 336 bp, Homo sapiens
gagaaggaacacgatgaaatttattctgattgttagtggagaaattggagcaggagtaggaacacaggagctgcgatggtgagagatggtggtggcttggatcaaggcartggccttgacaaaacaagaaatggaagaattggagaaatattgagtaagtcgagttgaaaagcattttgagaaagttactggatatgaaggcgtaggctctggagtgactggcaggtctgtgcaagggcaacctgacgtcttcttgatgccatttacagagcgagcaaatgcagcatgaagggcagcctggtgtttgtgtctttctatagattagaaaaaataatg

SEQ ID NO: 218392 - DNA, 595 bp, Homo sapiens
aattatgaggcatgctaagggaaaagtgggaataatttaagagggaggagtagttaattaatgcagagagatgtggataagagcggagagagagagagagccatgtcaaacaggaatataaaaaaatctgagatcagagattaagaccaaacaagagaaaaaaagtctcaactgcatatttccctggtgcccatgactttaatcagggggagaagctttggaaaactgatgatgaagatgtcaggttgctacttcttgggttccaggagccacgcaagtcttaaaaatagctgaacgatgatcaggaaagggcagaacttcattcaacccaatttaataataaggctgaattttctctgtatattctctatggaattaaaaaataaggcaacaagaaaagctcattttgactttttggcagcagggaaagttaagttccctgcctttcttcctgaagaatgagtaaaatcaagaacaagattagttatggggccaccgttaggtraagggtttttggtgtgctgattaaaggtgtttgtgctgtcattgttctgtctttcttcttggtttgacttttgggattaccttctgtact

SEQ ID NO: 218393 - DNA, 601 bp, Homo sapiens
agtaatagtgtgtgtgtgtctgtgtgcacgtccacatgcacacacacctgcgcctgtatctatagaattkgttcacagagtgttaggaattggttaattagttcttcagaatctatctccacatctgatgctaaagccttgagtccacagggaaggaagtcaggaagagatgagaatgaggagggtggaatccgtgagcacaaacttaaatgccccaacaatggactaaaacccatgtccattcctgctgcttctgaccttggtgagaacagtactgtataagtgtatcttcatgctggtaataaagataaacccgagactgagtaatttataaagaggaagaggtttaatggactcacagttccatgtggttggggaggtcccacaatcatggtggaaggtgaaggaggagcaaatccacatcttacctggtggcaggcaagagagtgtgtgcaggcgaactgccctttataaaaccatcagatcttgtgagacttattcactatcacaagaacagcaggggaaaaacctgctcccatgattcacttacctcccattgggtccctcccacaacatgtggggattattacaattcaaggtg

SEQ ID NO: 218394 - DNA, 601 bp, Homo sapiens
agtaatagtgtgtgtgtgtctgtgtgcacgtccacatgcacacacacctgcgcctgtatctatagaatttgttcacagagtgttaggaattggttaattagttcttcagaatctatctccacatctgatgctaaagccttgagtccacagggaaggaagtcaggaagagatgagaatgaggagggtggaatccgtgagcacaaacttaaatgccccaacaatggactaaaacccatgtccattcctgctgcttctgaccttggtgagaacagtactgtataagtgtatcttcatgctggtaataaagataaacccgagactgagtaatttataaagaggaagaggtttaatggactcacagttccatgtggttgggraggtcccacaatcatggtggaaggtgaaggaggagcaaatccacatcttacctggtggcaggcaagagagtgtgtgcaggcgaactgccctttataaaaccatcagatcttgtgagacttattcactatcacaagaacagcaggggaaaaacctgctcccatgattcacttacctcccattgggtccctcccacaacatgtggggattattacaattcaaggtg

SEQ ID NO: 218395 - DNA, 601 bp, Homo sapiens
agtaatagtgtgtgtgtgtctgtgtgcacgtccacatgcacacacacctgcgcctgtatctatagaatttgttcacagagtgttaggaattggttaattagttcttcagaatctatctccacatctgatgctaaagccttgagtccacagggaaggaagtcaggaagagatgagaatgaggagggtggaatccgtgagcacaaacttaaatgccccaacaatggactaaaacccatgtccattcctgctgcttctgaccttggtgagaacagtactgtataagtgtatcttcatgctggtaataaagataaacccgagactgagtaatttataaagaggaagaggtttaatggactcacagttccatgtggttggggaggtcccacaatcatggtggaaggygaaggaggagcaaatccacatcttacctggtggcaggcaagagagtgtgtgcaggcgaactgccctttataaaaccatcagatcttgtgagacttattcactatcacaagaacagcaggggaaaaacctgctcccatgattcacttacctcccattgggtccctcccacaacatgtggggattattacaattcaaggtg

SEQ ID NO: 218396 - DNA, 558 bp, Homo sapiens
acatatgtcaaggatattcatactaaccaggcccactgttccttgcaccccaattttcacatgaagttcacaatgccccatgaatactgcattctagtgaacccatgatcagaatttagcaagactctgaataaagaagtaagcatatgacattgttgtcttgttttctttccaaaccaaaacttcattcaaaagcagaaagaaaattattaatcatgcttcaagaaacacaaatgaccaaagaaccctgtatcctttattacttaagctacttcctttattactgaagctacttccaatcatttatgttgaaaatgatgacataaagaggaaacaaaagacagggcaaatcatacatccttttcctttcagacctttcctaytcatcaccaagtcaaaggtagagtgttggtagattgtttgcatatcaagaggtaaaatgaaagcagttgaattacttttgtgaagcatttcctctgttttggtaagaaagaaatacataatgcacatatgagctacaaaatgtgaactgtatacttttgatgatttgacatactg

SEQ ID NO: 218397 - DNA, 491 bp, Homo sapiens
tttttcccctaaggataaatgctttttcattttttttctaattctcaccaaatatttactcccatcttaaattcatgggtgattattctctgctttgaaataccagagcacaattttatgtgggacttattcgtgtttatattatatataactatgggcatgtacatgcacctacacatagactacagactggcaagatatttgtgtactgttttctagatgtagacaatacatagatrtagatggatgtaaagatctggaagaaaatgtattaaaatatgatataaaactacaatatgtaatgaagagtgtatgttgaggattcaaacacatgaaatttcaaacctagcccaattattattttgtgtaagatttttaatttttttacatcaaattgtgatagtattttcacataatttttactgtaaagtaaatttggatttatgtctcctttcaaatttttaatatattcatgctttcttacttattaa

SEQ ID NO: 218398 - DNA, 491 bp, Homo sapiens
tttttcccctaaggataaatgctttttcattttttttctaattctcaccaaatatttactcccatcttaaattcatgggtgattattctctgctttgaaataccagagcacaattttatgtgggacttattcgtgtttatattatatataactatgggcatgtacatgcacctacacatagactacagactggcaagatatttgtgtactgttttctagatgtagacaatacatagatatagatggatgtaaagatctggaagaaaatgtattaaaatatgatataaaactacaatatgtaatgaagagtgtatgttgaggattcaaacacatgaaatttcaaacctagcccaattattattttgtgtaagatttttaatttwtttacatcaaattgtgatagtattttcacataatttttactgtaaagtaaatttggatttatgtctcctttcaaatttttaatatattcatgctttcttacttattaa

SEQ ID NO: 218399 - DNA, 597 bp, Homo sapiens
gggaagcattctatgtaaatgaattccacatgggaatatcacgaaggtggaaagatctcagtcaaagcacgaaaagaaggtcattatggcagaagagaaaggtagagagaaatagaagattgatgagttagatagcagatcatgcagcaacttgttggccatgttaaggattttagacgtgctctaagtggaatgaaaaatcttgaaggaatttaaagatggggtttcatcattgtgtttagatttaaaaagtgtctgctctatagagaatggtttggcaagagacagaaaagcagtttagggtccaactagaacacacacsgatattagtctaggttagaggtattgctggattggaatacagcggtagcagaaaaattgggaaagtagagacttcagtatattttgatggtgtcacctaaaaggctgaagaaaatgttcctgttctagatgaggaagaaagataagtctagaggactcccagcccttaaccatgtaatagtgaagtactatataactagaaagtgaacactgaaaaagagaagacaacactttttttattggaggatacatgcacgcataataggtcatatttaa

SEQ ID NO: 218400 - DNA, 467 bp, Homo sapiens
agtagttttaagttaggattacaggaagtgtattttaatactaacagagaagggtagagattcaggatacttggcacaaaatcagtcctccaaatatactgcttcaattgaattaaaattgttgtaaacaatttgttatgctagttatataatatttctgattcaaaagaaacaagaacaaaaatattttatcttgaaaatctttcattaaagagtaaaaaagaaaattttaatgcatatcattggtgtttaatacatatcgtatatattattaatatgcttcccatataatacaatatatactgcttaaacttataatggttttattagataattgtttgttgtcatttctcaggcatttgtcaaatctaagaaaaagcagtcaggaaataaagattagaaaaaaattccaattatctggtgagaatgaaaacaaaggcagaartgttacttgattgaaagaattc

SEQ ID NO: 218401 - DNA, 510 bp, Homo sapiens
tcacactagttgaaaaataaactcctttttaattagtaacactagtagaaggtttaaaattctattgaaggtgtgagtatgtgtgcgtgtgtgttgtgttggatgcagcagaatatgtatgcccttacattgccaaataatattcayaagtcttttatcacacacaaacccacagacccatacgcccttatagccttaagtgtgcagtttggttgaaagatctaaatcactctttattctaatataatgagactattaattcaaattttgaggaaatgtcacagggaaatacttaaataatagaggatcaagagaatatgatgtaggaaatggacagagaaggtttatgggaagttgaaaattatgcagatagttgaaaaacaaataatgttcatgggagggtgaaaaaaaggctttagaacaaaaaatgtctgatgtttattttcagaaattctataatacacaatctcactattcacccaaacttgcaaacacttgaatatcttaagt

SEQ ID NO: 218402 - DNA, 408 bp, Homo sapiens
ttgaaaaaataaaacttgattttactagatagctagtaggtaaattaaatgatcctaagtgtttttataatggatattcatacatttttgctactagcttttgttccattaagtatgttaattttaaataataattttgctatttcaataaaaataatgacctcattgaacttaaaagaacaagtaaaaacagaataagcgatatttcataaatttcaaagaatttttcctatggatttgtttgttttagtagacacatatgattgataagtcattctctaatggaaatgttctgataagaaaatttagctaaatgtcttgagwttttctttccagatattcacaaatggaaatgtagacattacctatgtaaaaagcattactatcttcattatttctaaataacac

SEQ ID NO: 218403 - DNA, 578 bp, Homo sapiens
gatggaggttaaaaaaaaagagaaggaaacactggatagttgatcttcaacagaaataacttcaggaagtcacaaagcagtagatacatttatcccaataaaataaagctatataatctgtatacaaatagatagatacacatctgggaagtaaatgatgtagcagaaaagaaagaaagaaaaagagaaatgcaaaaatgataggtaatggcaaaagaggctatttggaaactgaatatattttttcaggcttttatgtggtgctttccattgtagtatctgaaagccacaccttcctatctatttscctgtctataaacctgtagtgaagtcttataattttattttgcctcagcattcattttgaatgtaagttgaactttcttatgcaggaaatagggcttagtcatccttgacacagtttttggctctccatctcctctcagttcctcaagatggtagatccagatgtctgccttatacaaccacctcctggtgaccatttccctacaggaagcttggtacaagctacttgagtcccccaccgagccccacatcctcacaaatatgctatagtg

SEQ ID NO: 218404 - DNA, 636 bp, Homo sapiens
agttcaggaaatttataataaaattatgtgagttggcttttaaaattaaactctattgataccattttcattgaaaaaaagtgtggtcccattttaaacaataaactaaaaaattaactttttaaaaataaatactttatacgttagaaattgcaaagtcttgaaaaaatgttctgcccaactattattcttttcaataccatcaagtaaattagttaagaactatataaatatattttcattatctttttaattatctaaacttttgtttttaaattagttcaaagaaagctatgtagatatactgaattaaaaaaaaatgagagcaatgaaaactcttatggtcwcccatgtgtccacataagaacaaaagagtaaaaacaaagggaacattttaaatgatgatttcctataccaagagtggtttttaaaaattaaataaatgaaagtctcaactgttgaaagtcacttaaaatgaagagggaattaaaataagccaaaatttttacttgtactgtttccttttcatgttatctctgcctttattattaaattacccatgtttttcagtcatttcaactattccaatcattatgcgtatcattaatacatatggtatagtttaaaaattcacta

SEQ ID NO: 218405 - DNA, 451 bp, Homo sapiens
aaatgtactgttaaatattttaggagaaagtacaaattattattgcattaaaatacggtattagatgcatttttgttgacatttatttaataatgttaagtaaattatatattwtatatatatatatttagtcattcaccacatgatgacattttggttaaaggtgaatagcctacatgatagtggtcctataaaattataatagagctgaatagttcctatcacctagcaaagtcatagacgttgtagcatcacagtgtaatgctttactcacatgtgtgtggtgatgctgtcgtaaatacacccacagtgatgctagtcctataaaagtgtagcacatataattatgcacactacctaatacttgatgatgataagtggccctgttactggtttatgtatttactatatcttttatcattgttttagaatatgctccttctactttaaa

SEQ ID NO: 218406 - DNA, 572 bp, Homo sapiens
  misc_feature (1)...(572): n = A,T,C or G
gtccttcatagaatgtatgctattgaaatttaatttggcattattcaattaacctatcttaagggacattacaataaatagctctagaatctcttcattacataaattttggcagtcatgtcaagaaacttgtccaataaattgttactcttgacaatgtagtctgcacataagtttagatctacgaaattttgttactggtccatgactagaaaaggaaagaaattcaagtaaagcrttttaccaatgtttgtggaataaagtaattttatgtctgttgattataataatanaataagactttatatatctttaatatttttactttcatcatcattgtgtcttgcaaaaaaaaaaatcagctacaaagtattggaactaaaaaaataacagtggaaaggtcattcactctagctagtttgaaaagcactgtaccacctgcttgtggtagtatgcctcagcagaatccatagacacttctcaggctcctcttgagggaaaactttcccaaaataaaatttcagcattatcatctgtttgttcatttctccttttacctttgttgtttgtgt

SEQ ID NO: 218407 - DNA, 572 bp, Homo sapiens
  misc_feature (1)...(572): n = A,T,C or G
gtccttcatagaatgtatgctattgaaatttaatttggcattattcaattaacctatcttaagggacattacaataaatagctctagaatctcttcattacataaattttggcagtcatgtcaagaaacttgtccaataaattgttactcttgacaatgtagtctgcacataagtttagatctacgaaattttgttactggtccatgactagaaaaggaaagaaattcaagtaaagcattttaccaatgtttgtggaataaagtaattttatgtctgttgattataataatanaataagactttatatatctttaatatttttactttcatcatcattgtgtcttgcaaaaaaaaaaatcagctacaaagtattggaactaaaaaaataacagtggaaaggtcattcactctagctagtttgaraagcactgtaccacctgcttgtggtagtatgcctcagcagaatccatagacacttctcaggctcctcttgagggaaaactttcccaaaataaaatttcagcattatcatctgtttgttcatttctccttttacctttgttgtttgtgt

SEQ ID NO: 218408 - DNA, 546 bp, Homo sapiens
tgcatatctttctttttttgacttgctctcttctstttgctgaattctgtaatctccacaatatatcttccaattcagtaatcattcatttcaataattctttcttcaccactatctaatctattgtttaatctatgcattgagcttttttaatgactacattttacatatttatgtttctagttagctgtattttaaacctgacattctttctttctttgtgattatgttgtctagcagttgatacaaaagagaaagtgcaaggtcttcaacatattacttcagtacatgcataacataaatggcactgagacaacctttagtgcttctcagcaaacactgcccttgcctcctctcctcttgggcgcattcatcattgctttgcttttcaaaaaataaaatgttaccacaccaatgtatatgttatttcaaaagtttttcttatactagagatttatgcaaaaaaagcatatatatatatatacacatctcttaaaatattttttcaatattatgcttctaccatacatccatattgtttcacct

SEQ ID NO: 218409 - DNA, 546 bp, Homo sapiens
tgcatatctttctttttttgacttgctctcttctctttgctgaattctgtaatctccacaatatatcttccaattcagtaatcattcatttcaataattctttcttcaccactatctaatctattgtttaatctatgcattgagcttttttaatgactacattttacatatttatgtttctagttagctgtattttaaacctgacattctttctttctttgtgattatgttgtctagcagttgatacaaaagagaaagtgcaaggtcttcaacatattacttcagtacatgcataacataaatggcactgagacaacctttagtgcttctcagcaaacactgcccttgcctcctctcctcttgggcrcattcatcattgctttgcttttcaaaaaataaaatgttaccacaccaatgtatatgttatttcaaaagtttttcttatactagagatttatgcaaaaaaagcatatatatatatatacacatctcttaaaatattttttcaatattatgcttctaccatacatccatattgtttcacct

SEQ ID NO: 218410 - DNA, 616 bp, Homo sapiens
gtgacagtggataaggcattctgtgagttcacagatgatagtcttggcagaagcattgcctgcaggataggcaaacccatatccagagtacatgtctatttgggtgaggacaaaatgctgcccattccatgatggacgagtccaatataatcaacctgccaccaagaaactggctgattatcccaaggaatggtgccatattgagggctcgctgatggtctctgctgctggcaaattgggcagtcagtgatggccgtagccaggtcagccttggtgagtgagagtccatgttgctgagtccatgcataacatccatctctgccaccatgccacttttttcatgggcacattgrgcaatgacggggtggctggggaaagaggctgagtagtgtccacagagcaagtcaacccatccacttgattattaaaatcctcctctgctgaggtcaccctttggtgagcattcatgtgagttacaaatttcttcacagtttttgaccacttagagaggtccattcacatacctcttccccaaatttccttttcaccaattttccaaccatactccttccaagtccctgaccattcagccaaaccattggctacagccatgaat

SEQ ID NO: 218411 - DNA, 616 bp, Homo sapiens
gtgacagtggataaggcattctgtgagttcacagatgatagtcttggcagaagcattgcctgcaggataggcaaacccatatccagagtacatgtctatttgggtgaggacaaaatgctgcccattccatgatggacgagtccaatataatcaacctgccaccaagaaactggctgattatcccaaggaatggtgccatattgagggctcgctgatggtctctgctgctggcaaattgggcagtcagtgatggccgtagccaggtcagccttggtgagtgagagtccatgttgctgagtccatgcataacatccatctctgccaccatgccacttttttcatgggcacattgggcaatgacggggtggctggggaaagaggctgagtagtgtccacagagcaagtcawcccatccacttgattattaaaatcctcctctgctgaggtcaccctttggtgagcattcatgtgagttacaaatttcttcacagtttttgaccacttagagaggtccattcacatacctcttccccaaatttccttttcaccaattttccaaccatactccttccaagtccctgaccattcagccaaaccattggctacagccatgaat

SEQ ID NO: 218412 - DNA, 613 bp, Homo sapiens
ggtttcaccatattggtcaggctgtctcgaaccctgacctcatgatccgccctccttggcctcccaaagtgctgggattacaggcgtgagccactgggcccggccgactcaatgtttcaaatcacttaatcagaaattaacatctcttgttattttgtttagccatggaatagtgattcttgcagcaattcmagagtttataaaacaaacatattttggttaaatgcaatatccccaaactgccaagccagtcaaaaaccacagctaatcatcgtaccctgtcatcatatctgtattttacctacagatttaaaataaatgtataccaattcgaataatagagttaaaataacaaaaaataaacaaacctattatagcatactgaatttcccccaaatataaattacaaatcaataatcataaatgaaagatattttatggcatttaaaaaaacttacctggtacgttaaaattcttcatcacttaatattatcttcttttctccaactagtgaagcattaggcttaaattatcatttctagtgcagtattctttacgtggtagaaaaaccaaaaataatgttcattacaccagaatgaatgtaaacgaacta

SEQ ID NO: 218413 - DNA, 442 bp, Homo sapiens
tgtgttcgatgcaacatggtaaatcttgaataacctatacaaagtaccactagttaagctggaagtgttcacaagaaggagagaaaagtcatggcattacgagaaaaagttgaattgcttgggatgtaccatagacagaggtctgcagctgccattgcccaccattttaagatatatgaactcagcataaatatcattgtgcaaaagaaaagaaaattcaggaagtcatagctgcacctcttccagcagtcatgaaaatcttacactgtttgggaaatacctttttatctcatattgaagatgcagcttttatgtgggtgcaggctggctacataaaaggcrtaactatagactcatatgatttgagaaaaagtaaagtcattatatgacaacttaaagcaaaaggaaggagaagaatctaaagctgaagaatttaatacca

SEQ ID NO: 218414 - DNA, 619 bp, Homo sapiens
catatctcagttttgtttaaaaaattatatatgrgaatataatggaaataaaaaatatatattatgctgtttttaaaatgtatgaaacagcatgatatttaccgatattccaattaagtctgggaattaaaaaaaatcctttaatgatattgtgaatatactacttaatggaattaaccaagaaaaagctataatcattataaaaattataatgtaggttaaaatgggaatgtgatggctaaattgatttcagtttttaaaacaataaaataattcaacaacttgaaaataactgtaatattcaatattttttcagcattcctttatacaaacaagaacaaattaaaaagaaaatggaagaaaatctattaaagtggcaacaaaatagttaacaaaaatttttaaactagaaataaaactaagacaatgacaaatataaaaaatatggaaaaatcacatgaaatgtatttaaaagaacattattgtacccaaattaaaacatttaatgtgatctcaaaactagtaagagacaatccactaattgaaacacaattgtgaagaacatactcagaatataattacaatagagaaagataaaaatgtgagagaccatgtaaga

SEQ ID NO: 218415 - DNA, 502 bp, Homo sapiens
caaaatgagttagcattatgtttctgagtgtaattgtacataatmtttcactagctgtcgtatctctgataatttacatggagaaaaatggtcaaacatttaaaaatgtttattgttgttgattatatttatttttataatgataaaatatagaaacaattgaaatgctcattaggaatgatcattttggttaattcacataatgaaatactactggtcactaaagcagataaatcaaacctatatctattgtgctaaaatatgtctataactcatattgttagatgtgttgatgttctccccaaatcccctttatctatggtgcaccttccccactatggtcacttgaaaacatgatcgtggtacttgcaagctaatccagaatttcctctcatctcctgacctatttcaactttccaatgacatggagcctaaagtagcaaataataaagactgatatatttggatcttcaggtttacatgtatctctagatctccaggt

SEQ ID NO: 218416 - DNA, 606 bp, Homo sapiens
tctccaggtggaataagaataattctgagccctrtatcttcctatttttttttggtagtcattctatataagattgtacaaagtttcacattatagtatctgatgagggtggtgaaatccaaattatctagtcatttattgcatgagtaaatccatataagactagaatttgctgaggagaaactgccattagtacctggaatcatgaggatgaaacccaaaccaaaaacaaacatgtgcaaccatgcatttatccccagttcaatgtaattactagcactaagcttgcagacaaaagagtgatgacagtttaaatgattggagatggagagggaagaggggaaggaacatagcccagactttgagtgatgagttttgcttcagagtgtaggtgatggtgtggtacaaagtaaagaagaaataattctcccgatttctgtaaactgatgaatgccatttcatttggtcatttggtatctcacacacctgcaactttggggaacatcagaaaacaaaacctaagcagagaattcacactctcatttctgacattgggaagtgcatgagatgagtgatggtgaaatcacatggagatcactaaatttc

SEQ ID NO: 218417 - DNA, 484 bp, Homo sapiens
ggtagtaatttgcaatacttaatatctagaactaaaaaacaaattcactttatcccttttcacattggctctattcctggagttagaaatatatatattattttcttgtttgcattcttctctctgagtcaacagttaacaagtagtaaaatcattcaccattctcayggtgggactttgtctagtaaatacttgtaagctctccacatgcatttcaggtaccaactttttctcaaaccttatctgttcctgtacttatattcctcacatcataatatactcacatacttaatttttttaaggtagtgtggcactgtttgtgttttatgtcacttcaaatgcttctgagaatgatttgaaaacgcctagatggagaaaaatttccaacaggaaagagcttgcagtagtatttaggaaggatagtggaaaggcaaaaacaagccgccagaccttcacaatctagcactatgaggtgaaaactttt

SEQ ID NO: 218418 - DNA, 458 bp, Homo sapiens
taaacgaaggtaaaacaaaaatttctatttcttattcttaattgacctaacagataacagtttgttcaaaatagtaatagcaataatatatttgattatatatacatatataatgcttatgtatactgaataacagcaacaatagaagaatttggaggaattaattaggaatactttatttttatgatgtacttgtgccacyccttaagcagcatagtgttaggtgacagtgcacttggatttgttgtaaatgtatattgcaaactctgggacaaccagtagcaaaattaaaaagagaagaaaaactgatatgcttgaaaatgagcaaaaattgaataatataaaatgctcaattgagaccacaataagcagaaaatgtgcagagacaaaaatagaaacaaagaacaagagcaacaattagaaaacagtaacaaatatagtggatattcatctaacta

SEQ ID NO: 218419 - DNA, 458 bp, Homo sapiens
taaacgaaggtaaaacaaaaatttctatttcttattcttaattgacctaacagataacagtttgttcaaaatagtaatagcaataatatatttgattatatatacatatataatgcttatgtatactgaataacagcaacaatagaagaatttggaggaattaattaggaatactttatttttatgatgtacttgtgccaccccttaagcagcatagtgttaggtgamagtgcacttggatttgttgtaaatgtatattgcaaactctgggacaaccagtagcaaaattaaaaagagaagaaaaactgatatgcttgaaaatgagcaaaaattgaataatataaaatgctcaattgagaccacaataagcagaaaatgtgcagagacaaaaatagaaacaaagaacaagagcaacaattagaaaacagtaacaaatatagtggatattcatctaacta

SEQ ID NO: 218420 - DNA, 518 bp, Homo sapiens
ctaggaatgtgattggtgtgtgagcaggttcaccatatcctgtggggttggaatggcagaggtctcttgaagtttatctcattctcccaatggtgtgtacttttwatttatttatattttccccagtattttatttaccgggttgaacagttcaggcttcaggccagtaggggatgtgtctatgggcaaatattgcttgtggctaaagcaggtgggctaatgcaatacccactgttgggcagaggtccagccttgacagaggctgctggggagctgccagtgaaatatactgaggtccttttgggcagaagggagagagccacattagctcctctactagtccagcaggaaagtgatccactcccattcacactcctgacccagtggtctggctattcagatcgaacaggtaaatgctttcatctcaggaaatgtaatgtttcatatagagatggattgtgactctaccccttgtgcaagcctgatcctgaaagcataacttctgcagggatatagtc

SEQ ID NO: 218421 - DNA, 518 bp, Homo sapiens
ctaggaatgtgattggtgtgtgagcaggttcaccatatcctgtggggttggaatggcagaggtctcttgaagtttatctcattctcccaatggtgtgtactttttatttatttatattttccccagtattttatttaccgggttgaacagttcaggcttcaggccagtaggggakgtgtctatgggcaaatattgcttgtggctaaagcaggtgggctaatgcaatacccactgttgggcagaggtccagccttgacagaggctgctggggagctgccagtgaaatatactgaggtccttttgggcagaagggagagagccacattagctcctctactagtccagcaggaaagtgatccactcccattcacactcctgacccagtggtctggctattcagatcgaacaggtaaatgctttcatctcaggaaatgtaatgtttcatatagagatggattgtgactctaccccttgtgcaagcctgatcctgaaagcataacttctgcagggatatagtc

SEQ ID NO: 218422 - DNA, 477 bp, Homo sapiens
ttactttggaatttattaaattcctttaataaatcagttgccttcatttcattttgttttgtttttaatgcaagcatttctcttattaaataattgcgttcattcctcaatcctgttttaattcttcattatataaaataaaatgcatcctgaaatatggtaaattttatagtgagagatttttgtaagctttggttctagacggttagctttctccacctaactatgtaaggactcatttttcttgcctttctggtttaggcccatgcttgactacaacagcacaggataaaagactttcgtaacttgaaagycacaggtaaataaagggacataaaataaatttattaaagagctcatattatttcttaggatagacaagaacatcctgatgctagactccccaggatcaaaactattcaaaaaagtgacgatagttattgttacaaagtaagtgttgtatttccatggcaatga

SEQ ID NO: 218423 - DNA, 440 bp, Homo sapiens
ttctatgactttactacaccaataatcctacccacccatccaatatgtctctaattgaagtgctcccctaaactctgcatttgtatatttaactttttacttgaccctctacatagatataaaatagtcatgtcaatgtcaaattctaccaaacagtactcttgattcatattccttccctgtgaatgaatctgcctttctttgatcgttcctatatcttctaccaatggtattgcctttaatctaatttttcaarctaaaccttaaagatgttttatttcttttcttctatcacaacactcatccaatcctttaacatgccctgttggttcttcatccgggagaccgcaagtggtatcgctttttaccttgcccattgctgttatgataacttgctcaattaccctcttctgttgtttagattactgccatggacccgt

SEQ ID NO: 218424 - DNA, 539 bp, Homo sapiens
gcaacagaccgagactccatctcacaaaaaaaaaaaaatagtttcaagaaattataatgaactttaagttgacattaatttattttatactttcatttgatatagagttgttgaaaaagttaggaacctaaaactcagtctagggatatgcaaacatatttcaagactcaaaaataaatcaaagatagttgggaagatatgctttggcaatgatgaaatattaatcagttgtaatttcatctgacagagcattcctgatcttttgaaactaacataatatcaagacatttgtataggaaaatacagcattattagccagttctaagaattgactctctcagtaacaaatactgattttkttttagtcttcatttttcaagtaaacactaacttttttcttttttttcaaggcaaaagttcataacaatcttacagaaaaagaacagatggttatacattatttccctgtgaatcagtacattttaatttggtacatgagtcagtgagcctaacatcatggttcattcttgatgatatat

SEQ ID NO: 218425 - DNA, 436 bp, Homo sapiens
cagagtggctatgagcacacccaagcctgaagagcaacatgaaaggctttggactgcatgggaagaatagatgccactatagtaatacagtcagttagttaaatttaaaaaaaagaaacaaaagaacaataacaagccccataagggtgaccagtgttgagttgctatattatataaaatgtccagattcagcaaaaaaaaaaaaaatatgagacatgcaaagaaacaggaaaacgtgacctacacactgggaaaaaatcaggcaaaagaaactgcctgttgagaggaaccagatgttaagtttaacagataaagtcttaaaagaagccattgtgaataacttcaaagaactaaaagaaaccacaattaaacaagtaaagaaatgtgtaatcacaagstcacatcaaataaagaatgtcaataaagatgtaacaat

SEQ ID NO: 218426 - DNA, 635 bp, Homo sapiens
caactggcacgaagacactgcaggaaaaaaaaaaagtggctcagtaactccagagtaagaagaggatacaggtacacattgyccctttattacatggaaagaaaagcaataatagcaaatacctaagagccataagtttaaaattgttttgttgaggatttttttttccaaactgagtcaagcctcaccgctgagatgaaaaacttagaaaaatggctagtaccttgaagaaactatcttaagtgatatcaatattgtgaattcctattgtacttattgtctagatacgctaatttaacaaaaacatatattgtcctgatttttatctgattgtttcatacttaaacacacatacttacacctgtatgttagtatattctaatttgattataaatttcttgagtggggaaatgattttatactgatttgacatataccagttttcaactcagaacaaagaagatagcagatagtccaaaatatttgttaaattgaattatgatgggtaaaacatctgattaaatgtatgaaaaatgcctttcaggagatctgactttcagaaatgtaaaatataatacactgtagcagcttctatttaatctcgattattctgatgatgtcttagatatatattt

SEQ ID NO: 218427 - DNA, 447 bp, Homo sapiens
taaaatataatacactgtagcagcttctatttaatctcgattattctgatgatgtcttagatatatattttcattataaacttaagggcttttagtttttaattttttgttaaatatgagggaaaacgcagaaagatttagtcaaagagggacttttcattgaaaaattgtagacaatcagtttggattgttcatatttttwaaaaaatcagcattcattgtatacctcatacaaccagtggacataaaatgattcaagtacagaaacaagagctgctatacccagaaaaggattttaactgcatttctcaaggggagcaatggcaatcattcgctttcagctctgacccaacctaggagttcctgttccatcaaaaaagcctccccagcccgctaggcaggcagaatgccgatcacgaagaacacaaagacagcatgcagagagct

SEQ ID NO: 218428 - DNA, 718 bp, Homo sapiens
gaattcatttgtataaacagataaaatgatttatgtccatgacattagcactatatagattttcattacattatttaacttaaattatggttagttccaacaaagagcacaaaataaaggtttttatataagtaaataagttagactgtttggaagagatgactcaagtctctctatatatatttctcatatgtatgtccaaactatgcagaaatgattgacaggatggccgaaaattacttctactctcataaaagcacatattaaacaataatgggaaaataatctcaatgcaccaactatacatgaaaactaggctgaaatcaaacctgacagctcagtcccaaaatgcacattcaatctaataggaaagagtgtcagcagaaaataattacctgttaccctcaccctgttttcagcaaaattaacactaacgtgtttcaagttgttgttggagaaaatttcaacacacaggttaatcttatctttaattataraaaaaatggtgcacacatttttaacatgcaaattcaatcatatatgctgagtttgaggaagttttgccaccatggagaaaatatctttcttttggaacaatggtaccaggtgctaataaatgcatttctattttcggttgtaatttgattctacccacaaaggaatgtgtaagacagaaacaaagataagagaaaattacatctaagtgttgtttagtttt

SEQ ID NO: 218429 - DNA, 318 bp, Homo sapiens
aatatatatttagcttaatcttttacaaactgactccaacaatgaaattttggcttttatttcttatatatttaaacatgtttaatgcaatgcttgaaagaagctatgtaattcgaagagaattgattctacaatgacactagaaagtggcagattaataaatatacttggttcacgtcaactattttgtagcttccttggacctctatcttgagaaatgaatgagctggcatcargttgtgcagtaaaaaacagggcctttcagggtaaaaggtcagaaaggacactttatattctaagacggcctaaaaattagaa

SEQ ID NO: 218430 - DNA, 318 bp, Homo sapiens
aatatatatttagcttaatcttttacaaactgactccaacaatgaaattttggcttttatttcttatatatttaaacatgtttaatgcaatgcttgaaagaagctatgtaattcgaagagaattgattctacaatgacactagaaagtggcagattaataaatatacttggttcacgtcaactattttgtagcttccttggacctctatcttgagaaatgaatgagctggcatcaggttgtgcagtaaaaarcagggcctttcagggtaaaaggtcagaaaggacactttatattctaagacggcctaaaaattagaa

SEQ ID NO: 218431 - DNA, 579 bp, Homo sapiens
ataagttggacatgggttagaagctgaggggtgtagaaaacagggcattgcttccatggaaaggagtaggtctgtgcttccccaaattggcatttcctgcattctttgcaggcctcatggggctctttagtatgttttcattatttcaaaaatcctataggatatttcatgttcacytgtaataaatcagcatagactaatcatgtgatctaacttgtttgctattagttggaattatattaattagatcgaaatactcaccccagatgtgatggtattaggatacaggccctttgaaaggtgattagggcatgatggtgaagttctcaagaatggaggcaggagagagtatgcttgctctccttctctgccatgtgaagatgcaaaaggcagctgtgcacaagccaggaagcacgccctggccagacactggctctgccaccaccttgatgttggtcaccccagcctccagaactgtgaggaatcagcgcttgttgtttaagccaccagtctatagtattttgtgatagcaacccaaactgacaacgacatgagatgtgtggtagctccggtgttctc

SEQ ID NO: 218432 - DNA, 613 bp, Homo sapiens
cctatgacatatttctggtcacaaaaccatcaccaaacttccaaataaagaccaagacacttctaatattaagtattgagataaatatgagctatacatacattacagaaagcttaataagacaagtaagataattatttacccacttattccagttgaggatcgctggtggctggatcctatccccgcagctccaggtgcatgatgggagcgacacctggacagctgccatactattgcagggacactcaacacacacacactcactcactcagacttagggacatagagatacgccgattcacctgccatgcacatctttgggatgtaggtggcaatggagtacccagagaaaacccatgcagaaatggggagaacatgcaatctccacacacacagtggccctggctgggaatcacatttttttctcattaattttaaaatgaaacaacattggatgaaaagacatwtttgaggacctgctggatatacttttttctcccagctttattaaagtcaaataaaaattttatatatatatataaaatcaacatctccccatttctctcacctcccagcccctggtaatgctgtttctataagtttaacttat

SEQ ID NO: 218433 - DNA, 613 bp, Homo sapiens
accccatgttctcacttgtaagtgggagctaaacaatgggaacacatggacatacagaatggaataatagacattagcgactctaaaatgtgggatagtgggagtggggaaagggctgataagttacctattgggtacaatgttcactattcgggtgatgggtatacaaaaggcccagacctcaccactatgcaatatatgcatgttagaaatctgtacttgcacctcctaaatatataaaaattacaggaaaattaaaataagcttatacatgtgtaggtagcaactaattgacctatacaagaaattattttattttatgaaataatgatcactagttggagacttaaatgtgtttattttaaaagctttactattaatctcaatcaaatctcatcttctcctcagctgttgccgtggaagctggatgtgaaggaggtgggggctgaggcctggtgcttagtcccctctcccctaagtcctttcctgggcattgacttctgtggcrtggtaggcaagatggaagcaagcatatggggaggcagaagtgtttttacttgactgcccatgtgtggtggttcacatcttcccttaggccaatctggttccagct

SEQ ID NO: 218434 - DNA, 666 bp, Homo sapiens
aatctatgatcatagcatagtttaactatctcaatcatttcagttgaaaagaaatcaaagattgccaacagtgtctttggacatttttttactctggcaatcatagcagcaaggggtctggctttctgaacatcagtgaatggaagtgtttactttagtaaatccagcccttgctttcaaaattcaagtgattcccttctaacccactaaggcttttgctctatggccacacatctgaacaggagaaaaaccttcaaaaaggtgatttctgtcacactcgggaccaatctgaaatttagacctaatgcaaaaagtaatttatttcatgcttttccatagttctattaaaaatgcaattagcctcaatcgtgcatatccaattcagcaaatttctacttaaaatctactttgggcacattgttttaaaacattttgcagttccaagtttatttaaatgtgttcgctaaggagtcatttstggatgctgctatccattttatagccccatattatatgcccttgcatgccttatcacacattctgtcaaagctgaccctctgaaacccttttaggctcagctatcccttacactacatacaggaaggttgatctaaaatgtttcaaatctctccatttgttaagtaatggtgatttactttgtcaatg

SEQ ID NO: 218435 - DNA, 556 bp, Homo sapiens
tctgactggtgaaaaatgtgactaattattgtttccatttgcatccccaagatcactagtaaggaagcctgagtgaagaaagcctccgtgactgggacataaagagatgacagcattgtcagcagctctgtctttgcaggaacttgtgtcatggtggattgcataaccccaaaggctcaaagaggtgccagagtaagatctccagcctccaaaaagtcctgcacattgtactatgtctagcaagtcttccagtgttgcataaaaatacgaagcaaagaacttgcctcctgtgtggagtgacrgagtgaagagcagcctaagtacaactgtctacccaagagtcacatttgaaaacatagaaatgttctgttcaaagcagtaggcaccagcatgcctcactgaagtaaaagtttgaaatgaggccacacacagtggctcatgcctttaatcctagcactctgggggccaaggcaggtggaccacttgagtccaggagttggagaccagcctgggcaacacagtgaaaccccgtctctacaaaaaaaaaaaaaataca

SEQ ID NO: 218436 - DNA, 487 bp, Homo sapiens
atcacaccccatgggagtcagatgrctccatcatggcctcagtaagactcggccattgccctcctcctccctttacagccaggctccctgtaccttccttggtgtcagtttatccaccttttgctgatcccctctatgggaagaaggtgaactagggaaaatcccaggacaccgttctatttccccatcacccgcaacagttggttctccatctgtcattaattccacaaggaactaggctaggcccttgagacacaaagacacaaagaattaagtaagattctacaagggaagagaaaatccatgaaaatgtgatttgtgtaaattactgtaatgaatttgtcaagcagtatgttcagagcactacacgaatgcaaaagctttactttacaaaggaagaagagggtccttccactggggaaaaaaacaggaaagcacaggaaaggaggttgcatatgcaaaagggtggaaccaaaaagaacatagc

SEQ ID NO: 218437 - DNA, 412 bp, Homo sapiens
atctcagctcaggtgacattgccccagagaaatctgctcttacctctggaagtagacctaatgcccagtgacaggtcctcagggtacgaawgatcaaacctactcaacacttgtcacagcttaacaatccattggcatgtgtgattacttgcttaatgtgagcttagtgactagcctctttctcagccatgtgagcagacacaaggacagattttgacttcccattgactttccagtaacttgtcagcattgagctgagagcttggcagatagtaaggttcaataagcattcattcaataaagaaaataaaatatatttgtctaaaataattgaagaaaatataagcccatgcctgaaagtcaggagacctgggtgtgaaccagctttccacttctgctcctcagcctcccc

SEQ ID NO: 218438 - DNA, 455 bp, Homo sapiens
tgggtgctgcctgagagagaagggagaaaggtggtccctgtcagcggttcttatctttctctaagacaggagactctgggaatcagccctgcctccctacagacagaatagtgaccaggtgtcactcaagcatgttcacactgatggtttagcaaagtatttttttcaacgacatcagaacgtcctgaaagacttgtgatgattgcgctacacaaacatcttgccagctttccgtgattatggactattgcccacaaaatggtttagwggcccaggggatgggaccacaaattgcttaatccaatactgatgagaaaatgatgttctgctcagagacgaggctgaaaacagaccctctgctttctctatgccctggtgagtctcaggttacaccagtaaataacccctcttctttattaaagaaccacgcagaagtgctcaggaaattactgttt

SEQ ID NO: 218439 - DNA, 470 bp, Homo sapiens
actcacttagatcgaagcaacgtgggatcaaagccacttacaaaattgcagtacactctgaattttagaataaagacattcttagggacacataaataaaatcacactgttctctgaagttagactgtcatgtagatggttggtgccaattaacgttattactggtaaatgttctactgaggaggacagattaaaccatctgtttagactgtgagatattccttcagcagtgaggtaggaatccttcctgccaccttttaacaaaggacratatcattctgtgtcttactggtatacacgttatgaaagattatttcacttccttacacatgctcaatggggtttccaagtttccagaaatgttttcttcttcctaagaaaattagttcttatccatcttaaatattttcttaccaattcattgaggttctcaaaacaatgaaatgaatcattgaagaaatgctcctaca

SEQ ID NO: 218440 - DNA, 470 bp, Homo sapiens
actcacttagatcgaagcaacgtgggatcaaagccacttacaaaattgcagtacactctgaattttagaataaagacattcttagggacacataaataaaatcacactgttctctgaagttagactgtcatgtagatggttggtgccaattaacgttattactggtaaatgttctactgaggaggacagattaaaccatctgtttagactgtgagatattccttcagcagtgaggtaggaatccttcctgccaccttttaacaaaggacaatatcattytgtgtcttactggtatacacgttatgaaagattatttcacttccttacacatgctcaatggggtttccaagtttccagaaatgttttcttcttcctaagaaaattagttcttatccatcttaaatattttcttaccaattcattgaggttctcaaaacaatgaaatgaatcattgaagaaatgctcctaca

SEQ ID NO: 218441 - DNA, 519 bp, Homo sapiens
gtttggttcttgttaaaacattttctattgattttttcattatgtttaattttctttaaatccttgggcttatttttacaaatgatttttaaagtcactcacttaartctttcctctctgctatctctgcatctgcctctgttgactgatttttctcctggttacaagtctacatttttctgctttcttgcatgttttgtaattttcagtggatgtcaaacataatttttaatttcaagtgtgtagctttaattttttccttcctttttttgtataaatctttacactatggcaaatttagccctgttactaagatgccaccctcctgaggtttccactaaatgtcccatacagtcaaggaggactctccacctggctggttagaactcatagtctcccagcccttgtgtcctctgcgaattgttcatcttacagctcctggtcattgttagcccagcctcatggtgttgcatcttacataggcactattggttttcctcaatagatgcaatgggagct

SEQ ID NO: 218442 - DNA, 552 bp, Homo sapiens
acctttcactgtgtgaggcactggggagatgcctctctccctccttcaatcgtcttgtggggtgaacatcccatatggcccttgggaactggtccctttaagtcattaccgaagcatcatctgttcttgtcctcctgtgtctcccagtttgctggatattccactccttgcagcataagtrtgtgggaataattttataacctcagtcagttgccattccggaaaaacccttgcaaagctgtctccggttccatagtttctgacacactgtgcagctctaaatttcctgaggttttatgccttcctagtaccgttccctgggaaaattgggtaaagataacttccactgtcaggtctcccaaatatgtcttgaaattttctgtcccttaggggccctgctccaaatcaggccacaggatccttttgttatgaactagtcctctatgtctggacatggtttgcatgtcttctgaacaaaggacattgagatcatcaatggatgatccaggatgtttgcatagcagatagtcttggcagtagaaagacaacgac

SEQ ID NO: 218443 - DNA, 554 bp, Homo sapiens
attacattctgctggcctagatctcttaatttcagagggaggaatgctgctaccaggagacacaacaaagatttcattaaattggaagttaagaatgccacttggacactttgggctcctcctacctttcagccaagagggtaagaagggagttacagtgttggctggggtgactgaactgggctatcaagatgaaatctacctactactttacaacagaggtaaagaaaagtatgcttggaatacaggagatccattagggmatctcttagtattaccatgctctgtgattaaggtcaatgagaaactgtaaaagcccaacccaggcaggactacaaatggcccagacccttcaggaatggagatttatgtcactccaccaggaaaaaacccacaacctgctgaggtgcttgctgaaggcaaagggaatacggaatgggtagtagaaggtagtcatcaataccagctatgaccacgtgaccagttgcagagacaaggactgtaattgttataagtatttcctccttcttttgttaaaaactatttgtgcctgt

SEQ ID NO: 218444 - DNA, 566 bp, Homo sapiens
tatttatttttaaaacttgatatttcttcagagagtaaactttgttatattatgacaacatgtcgggtatcatcaatttgaattttgttagattcatttttttttagaatcccaagataaattgctcagtttttatgcttagtttaaatttgagagccttaatataaacttgtacaatttwgtttcactgtatgttttgttattatttgggaggtgaggagagttcatttgcagtacaattttagcatattttataatatagtcagtcaaaaaaagcctcacatgtatatatttcttctttattttagactgtaggttatgtattttaaaaccaattgttagatgtcctgttatacagatttacttcttcctatttggtgattttttgatgcattaaaaagagaaaattgtataaacctaatgactattgacaagtgttcagagagataaaaaagatctataattagcacaatggaaggatttccaaatccacactgttttgacgttttctcacctgaaaagtatttattgcagttttactggttgattggttgtcatttttcttt

SEQ ID NO: 218445 - DNA, 566 bp, Homo sapiens
tatttatttttaaaacttgatatttcttcagagagtaaactttgttatattatgacaacatgtcgggtatcatcaatttgaattttgttagattcatttttttttagaatcccaagataaattgctcagtttttatgcttagtttaaatttgagagccttaatataaacttgtacaattttgtttcactgtatgttttgttattatttgggaggtgaggagagttcatttgcagtacaattttagcatattttataatatagtcagtcaaaaaaagcctcacatgtatatatttcttctttattttagactgtaggttatgtattttaaaaccaattgttagatgtcctgttatacagatttacttcttcctatttggtgattttttgatgcattaaaaagagaaaattgtataaacctaatgactattgacaagtgttcagagagataaaaaagatctataattagcacaatggaargatttccaaatccacactgttttgacgttttctcacctgaaaagtatttattgcagttttactggttgattggttgtcatttttcttt

SEQ ID NO: 218446 - DNA, 566 bp, Homo sapiens
tatttatttttaaaacttgatatttcttcagagagtaaactttgttatattatgacaacatgtcgggtatcatcaatttgaattttgttagattcatttttttttagaatcccaagataaattgctcagtttttatgcttagtttaaatttgagagccttaatataaacttgtacaattttgtttcactgtatgttttgttattatttgggaggtgaggagagttcatttgcagtacaattttagcatattttataatatagtcagtcaaaaaaagcctcacatgtatatatttcttctttattttagactgtaggttatgtattttaaaaccaattgttagatgtcctgttatacagatttacttcttcctatttggtgattttttgatgcattaaaaagagaaaattgtataaacctaatgactattgacaagtgttcagagagataaaaaagatctataattagcacaatggaaggayttccaaatccacactgttttgacgttttctcacctgaaaagtatttattgcagttttactggttgattggttgtcatttttcttt

SEQ ID NO: 218447 - DNA, 566 bp, Homo sapiens
tatttatttttaaaacttgatatttcttcagagagtaaactttgttatattatgacaacatgtcgggtatcatcaatttgaattttgttagattcatttttttttagaatcccaagataaattgctcagtttttatgcttagtttaaatttgagagccttaatataaacttgtacaattttgtttcactgtatgttttgttattatttgggaggtgaggagagttcatttgcagtacaattttagcatattttataatatagtcagtcaaaaaaagcctcacatgtatatatttcttctttattttagactgtaggttatgtattttaaaaccaattgttagatgtcctgttatacagatttacttcttcctatttggtgattttttgatgcattaaaaagagaaaattgtataaacctaatgactattgacaagtgttcagagagataaaaaagatctataattagcacaatggaaggatttccaaatccacactsttttgacgttttctcacctgaaaagtatttattgcagttttactggttgattggttgtcatttttcttt

SEQ ID NO: 218448 - DNA, 378 bp, Homo sapiens
gttatcacatgcttaattttaaataagcattaayagtggtagaaattaaggaaatttatatattagagaaaactcttagaaatatgaaggctctatctagttatatttgtttcttatgtatcacatcctcaattttaaataaaaagcattaataatagtagaaattaagaaaatacatttattagagaagtctattagaaatatcaaggcttaatctaattatatttgttaactgaacttgagacatatgaatattcacatactttaagatattttatcacctatttgaagagggactctggccactataagaacaactcgcacatagcaaaaactagtgattgaatacattctaaagagtaacatacattttgaaag

SEQ ID NO: 218449 - DNA, 378 bp, Homo sapiens
gttatcacatgcttaattttaaataagcattaacagtggtagaaattaaggaaatttatatrttagagaaaactcttagaaatatgaaggctctatctagttatatttgtttcttatgtatcacatcctcaattttaaataaaaagcattaataatagtagaaattaagaaaatacatttattagagaagtctattagaaatatcaaggcttaatctaattatatttgttaactgaacttgagacatatgaatattcacatactttaagatattttatcacctatttgaagagggactctggccactataagaacaactcgcacatagcaaaaactagtgattgaatacattctaaagagtaacatacattttgaaag

SEQ ID NO: 218450 - DNA, 561 bp, Homo sapiens
ggaatagaaaaggagttcctgttcattttaccactttcagaatagaaaattctggatctggtgaaaattgatcattttccttttgttttaattcaaggtatagactcrtgtctaaagacatggttaactgtttaaggagaatagaagatgaagaagggttaaatgacaagcaagttttaaaagtctgatatcaactaatttttaggcaaggaagatttaaaaatttcactgtgatttgagtgagaggccccttactttttatatcacattgtaagtttaaagaagaagagaataaaaacatcatggctaaatcacctgaaatgacttcaaattttctacaaatgataaacatatccaatgtgataattataattcaaggcccattttaatctgaccctaaattttccttcccattctaataatcaataagctaatcaataagctcataacatcctacagattctgcacacacacatgcacacacacacagagaaacacagtcacttcttcaaacacattgttttttcatttttcttcgcctttcatctatttatttattag

SEQ ID NO: 218451 - DNA, 561 bp, Homo sapiens
ggaatagaaaaggagttcctgttcattttaccactttcagaatagaaaattctggatctggtgaaaattgatcattttccttttgttttaattcaaggtatagactcatgtctaaagacatggttaactgtttaaggagaatagaagatgaagaagggttaaatgacaagcaagttttaaaagtctgatatcaactaatttttaggcaaggaagatttaaaaatttcactgtgatttgagtgagaggccccttactttttatatcacattgtaagtttaaagaagaagagaataaaaacatcatggctaaatcacctgaaatgacttcaaattttctacaaatgataaacatatccaatgtgataattataattcaaggcccattttaatctgaccctaaattttccttcccattctaataatcaataagctaatcaataagctcataacatcctacagattcwgcacacacacatgcacacacacacagagaaacacagtcacttcttcaaacacattgttttttcatttttcttcgcctttcatctatttatttattag

SEQ ID NO: 218452 - DNA, 292 bp, Homo sapiens
atttttgagtttttaatttaaaatactatgtttttatacaaactayttttcaaatttgctacatcaattttttagtctcctaaaaatatattcattttttttaaaattttttgaaagcaaatgtactttataatctaacagtgatatttctactaatgaacctttgtggatctgtttgtactctttttctgctttcctttcaaatggtggaatatcatttccttgtgtacttagatgcctttgaatgacaaatatttatttttctctgaaaattattatggtgcacttttgt

SEQ ID NO: 218453 - DNA, 292 bp, Homo sapiens
atttttgagtttttaatttaaaatactatgtttttatacaaactacttttcaaatttgctacatcaattttttagtctcctaaaaatatattcattttttttaaaattttttgaaagcaaatgtactttataatctaacagtgatatttctactaatgaacctttgtggatctgtttgtactctttttctgctttcctttcaaatggtggaatatcatttccttgygtacttagatgcctttgaatgacaaatatttatttttctctgaaaattattatggtgcacttttgt

SEQ ID NO: 218454 - DNA, 351 bp, Homo sapiens
tcataatattgttgcagatattgccagccacctaccccagaaccattcaccactgctacaaccccattactgacaccaccacctgtagctctcttaccctttgctgatttagcctgatattattaaagcatttacctttacactatgcacttttaactattagaatgattattggttttagccagccatataaatggcattttccttcacagtggttagtttagaagttagcaagaaacttaatcttcttgatttttcaaggaaaatgtatccayattttccaccctaataaaaaaaaactgcacagaagaaaatattcttcatgacaacatcactatgcctgcatgcatt

SEQ ID NO: 218455 - DNA, 223 bp, Homo sapiens
acattcttagacttctcaggctagctsagaagaagtctcatagcttccactagatttattagaatgttggttctcagatcattgagatgccatataagaagttagactatcctaagaaactacaggaagaccctgagatgacccgaagtgagagagagacatagtcgtccaacaagcctcagctgtttcaggccctaaagatttgagtcatcctagctgaggt

SEQ ID NO: 218456 - DNA, 223 bp, Homo sapiens
acattcttagacttctcaggctagctgagaagaagtctcatagcttccactagatttattagaatgttggttctcagatcattgagatgccatrtaagaagttagactatcctaagaaactacaggaagaccctgagatgacccgaagtgagagagagacatagtcgtccaacaagcctcagctgtttcaggccctaaagatttgagtcatcctagctgaggt

SEQ ID NO: 218457 - DNA, 223 bp, Homo sapiens
acattcttagacttctcaggctagctgagaagaagtctcatagcttccactagatttattagaatgttggttctcagatcattgagatgccatataagaagttagactatcctaagaaactacaggaagaccctgagatgacccgaagtgagagagagacatagycgtccaacaagcctcagctgtttcaggccctaaagatttgagtcatcctagctgaggt

SEQ ID NO: 218458 - DNA, 223 bp, Homo sapiens
acattcttagacttctcaggctagctgagaagaagtctcatagcttccactagatttattagaatgttggttctcagatcattgagatgccatataagaagttagactatcctaagaaactacaggaagaccctgagatgacccgaagtgagagagagacatagtcrtccaacaagcctcagctgtttcaggccctaaagatttgagtcatcctagctgaggt

SEQ ID NO: 218459 - DNA, 277 bp, Homo sapiens
atttcaactttcttagttttcaagatttttcaaatcatgtacatatttgatgatttttatgattcattgaggtaactatttgataatattgttcaaaatgaccacattaattatgtttttagtaatgatttactccccaaaaggtatatgtttccaccttaaattcctgtaaataaaattcttgtgatagcttcttaaaaagtaagagaaaagaaagacagagaaaactgattcstttctacttggagcttgatttcaaatatgtaaaccccaacta

SEQ ID NO: 218460 - DNA, 406 bp, Homo sapiens
tcttgccttattattttttctctgaaacgcacaaaatgagaatgtgttagtstagtctcatgctgttgataaagacatactgaagactaggcaatatacaaaggaaagaggtataatggagaactcacagttccacatggctggggaagcctcacaatcatggcagaagacaaggaggtgcaagtcacatcttacgtggatggcagcaggcaaaaagagagcttgtgcagagaaacttaacatttttaaaactatcaaatatcatgagactcattcactgtcttgagaacagcgtaggaaagatccacccccataattcaatcacctcccacccggttcctcccaggacatgtgggaattgtgggagttataatttaagatgagatttgggtggggacacagccaa

SEQ ID NO: 218461 - DNA, 406 bp, Homo sapiens
tcttgccttattattttttctctgaaacgcacaaaatgagaatgtgttagtctagtctcatgctgttgataaagacatactgaagactrggcaatatacaaaggaaagaggtataatggagaactcacagttccacatggctggggaagcctcacaatcatggcagaagacaaggaggtgcaagtcacatcttacgtggatggcagcaggcaaaaagagagcttgtgcagagaaacttaacatttttaaaactatcaaatatcatgagactcattcactgtcttgagaacagcgtaggaaagatccacccccataattcaatcacctcccacccggttcctcccaggacatgtgggaattgtgggagttataatttaagatgagatttgggtggggacacagccaa

SEQ ID NO: 218462 - DNA, 595 bp, Homo sapiens
aatgtgattttggccagagcaaacctttttcactatcaaatcatccatgtatagcarcgtctgcaaaagtgtttgacaaaggaagtcacatccatttccttttcactgttaacctagcagagcttcctagaccaaaattttattctgcaagagagctgcaatgacaggaatatctatttgggtttaaataggaagacatttgatcatcctgatcaacgtttgggatctagtgattcccaggttcaccttctgcaaggaaatcccttatcagagcatatcttgacgcttcatggcagggattttactggaaatgaatgttttattctcttaatcattttctccctcatgccaggtctcactaatccagcttacagatagaactccatatttactaatccttttgtgtgtaacccatttttaaaaacagcatcaaactggacactcaaatgtcattatatacatgtgatattttatgcagaacagacttctaaaatgcagaaaagagtcttgattaaaatggaaaccttttaaataatcacagggtataaaattaaatggaataagtctgaagtaatgcaagtcaaccaaaacagct

SEQ ID NO: 218463 - DNA, 595 bp, Homo sapiens
aatgtgattttggccagagcaaacctttttcactatcaaatcatccatgtatagcagcgtctgcaaaagtgtttgacaaaggaagtcacatccatttccttttcactgttaacctagcagagcttcctagaccaaaattttattctgcaagagagctgcaatgacaggaatatctatttgggtttaaataggaagacatttgatcatcctgatcaacgtttgggatctagtgattcccaggttcaccttctgcaaggaaatcccttatcagagcatatcttgacgcttcatggcagggattttactggaaatgaatgttttattctcttaatcattttctccctcatgccaggtctcactaatccagcttacagatagaactccatatttactaatccttttgtgtgtaacccatttttaaaaacagcatcaaactggacactcaaatgtcattatatacatgtgatattttatgcagaacagacttctaaaatgcagaaaakagtcttgattaaaatggaaaccttttaaataatcacagggtataaaattaaatggaataagtctgaagtaatgcaagtcaaccaaaacagct

SEQ ID NO: 218464 - DNA, 558 bp, Homo sapiens
ccaaacaggaattgtgcagtcttagaacaggattcctcaggccaaatcatttgatcatttttcataatcttgcagaattataattcttatatacaacaggcatccatagtttttgacaaaactttccattaagaaggaaaatcccaaagtgttttatcattttaggagagttacagtaattttgatatccagacaaatgtttttctattatgtgatgtaacactctaatgctttgcaaaatttgcaattattatttacttttaagaatyctattgaaaatactatttgtcttttgcacacattggtcttggagattgttcgtttaaaaaaaccacagcaaacaaaaccaagccatgtgagtctgagggaagctagcaagtgctgccttttcttcctaggaacctgtcactgggaccatgctccatttgccatcagtgcatggctggttctaagccatatgggatttcaaagtcctatatttcttccagcagtggatcttctttcttctttccctcccctggaagactcctaagagttccttgtcagtgcctccacagt

SEQ ID NO: 218465 - DNA, 558 bp, Homo sapiens
ccaaacaggaattgtgcagtcttagaacaggattcctcaggccaaatcatttgatcatttttcataatcttgcagaattataattcttatatacaacaggcatccatagtttttgacaaaactttccattaagaaggaaaatcccaaagtgttttatcattttaggagagttacagtaattttgatatccagacaaatgtttttctattatgtgatgtaacactctaatgctttgcaaaatttgcaattattatttacttttaagaatcctattgaaaatactatttgtcttttgcacacattggtcttggagattgttcgtttaaaaaaaccacagcaaacaaaaccaagccatgtgagtctgagggaagctagcaagtgctgccttttcttcctaggaacctgtcactgggaccatgctccatttgccatcagtgcatggctggttctaagccatatgggatttcaaagtcctatatttcttccagcagtggatcytctttcttctttccctcccctggaagactcctaagagttccttgtcagtgcctccacagt

SEQ ID NO: 218466 - DNA, 376 bp, Homo sapiens
gaattccaaactgtctctttaagattctttcagagtcgaccatgagcttctcaaagccttaacccttttacgaaatcaagattacctgtcaactctatttgtctgtgttttctgcaacatgatacattaattggcacaaatctaccctcaccctgaacccttttttagatgcactttgcaaggccaactgggcttctgttttatacgaggtgagggtggctggccacgcacattatctccagwggagcaaaggcttgctctatcccacttgtccagaagaggctcaactgcttgcccccagaatttgcaatagacttggtcattaaggtaagaattgctttccctgaagtatcacagatgcagtactccctttctt

SEQ ID NO: 218467 - DNA, 587 bp, Homo sapiens
aacagtccttttgaaagatatgccagaagaaacatgtactgttcatgttatatccatgaataaccacaatgttgagccctttccttcatgagcacaattcccacactgtcagtgagggtcttctgccctaattcaatgtccccacatcctcagctattcatcacatagctcatgtcagtccccttctctaccctatcatctcctgtgaatattctatattttattaatattaaacttgcagttttctcttattaaaattatgttgcctctccccaaacagacagccatatagtcctttattatagacgcttttggcctgtgcactctgatggtctgtgatttcctgtaactttctggaatctgtcttaacatgaaggacttgcatttgttacctggcagttttctcacacagaggtcaattcaagcaatggattatacattttggtcatcagttccccgatttcatccttgagtgacttccaaaytctctgggagatgctctctgatcttcatgatttatacacatttattctgccacgttgggcctagaacatcctgagtattgatcactgtttgatatagtattt

SEQ ID NO: 218468 - DNA, 594 bp, Homo sapiens
aaaagggaagattcttccctggggttttcagagatcatgtgtccctgttggaattatgcttctggacttctggcctccagaaatatgaaagaataattttcttttgcaaatcccccagtttgtggtaatttgttatggcaaccataggaaaacagtactctttaaatattcattattttgcaacctctgctattactcctcacttaactctgagctcctctgctagggtgtggccaccatgcactgaacacagcagcctgcacacaataatttgtattcctccaggrcacctagcacaatgccactgctggttcaatacgtccatgactggttatgcattgccaatcttctggatcattaagcctttgctcatactaccatcttcacctggaattctccttcaaattccccatactctcttgacacatacgtctccaccttctgtaaattcttcctcatctttcaagatctagttcagctctaatcccaggtctacaacaacacttctcctgattcaattacttcaagtaaaagtgatcctttgcacatctgcactccctttctcctttctgggtcatctcttcggacttggaa

SEQ ID NO: 218469 - DNA, 594 bp, Homo sapiens
aaaagggaagattcttccctggggttttcagagatcatgtgtccctgttggaattatgcttctggacttctggcctccagaaatatgaaagaataattttcttttgcaaatcccccagtttgtggtaatttgttatggcaaccataggaaaacagtactctttaaatattcattattttgcaacctctgctattactcctcacttaactctgagctcctctgctagggtgtggccaccatgcactgaacacagcagcctgcacacaataatttgtattcctccagggcacctagcacaatgccactgctggttcaatacgtccatgactggttatgcattgccaatcttctggatcattaagcctttgctcatactaccatcttcacctggaattctccttcaaattccccatactctcttgacacataygtctccaccttctgtaaattcttcctcatctttcaagatctagttcagctctaatcccaggtctacaacaacacttctcctgattcaattacttcaagtaaaagtgatcctttgcacatctgcactccctttctcctttctgggtcatctcttcggacttggaa

SEQ ID NO: 218470 - DNA, 638 bp, Homo sapiens
cagaagaacctccagctggaaaagacaatcaggtttttttttccgctggccagggaatggagaaggcactctcttgctctaaatgcacctctccccaaacattagaaagcatagggtttttaaggactgggtacatggccagagaggaatgtttgcatgtgcagagtgggactccagacgtgcagacttaattcataagtatgtcttcatacaacccacgtaaacaaaatagcagaagttttcttttagaggtggaatttttgcattataataatatgttaatgatctaaaggccactagggattgtctgctccagtgttgctggtttggggttcttatctccctctggtaatctggacagaggtcaagaagctctggcaccatcccaggccatctgacttctttaagcagctgtgcccataaataaagggactgtattaayccattttcatgctactgataaagacataccagagactgggaagaaaaagaggtttaatggacctacagttccatatggctggggtggcctcacaatcatggtggaaggcaaggaggagcaagtcacattttacatggacagtgtcaggcaaagagagagaacttgtgcagggaaactcctctttataaaaccatta

SEQ ID NO: 218471 - DNA, 408 bp, Homo sapiens
aaaaaaatttaaaaatttttaaaaatatttatttgctgaatcacaaactgactttattatattggtgggatttttaaacttaagaaataaaacaattttcaccaataaaattatttttaaaaactaaaataacaattattctttttgcttattcatatactttatactttagctctgtctctactacctcattattgcatttttctgaaaaacatatctttcaatatggtaatttttatagaaaactgcttacagttttcttcagaattatagtttaaaatttatatgttggaaattgttgacataactacctgyggcttctttgtagaccacgatattatttattctgtctttagatgctgagatctctgcaaaattcagaaaaacattgataagtggaggatattc

SEQ ID NO: 218472 - DNA, 408 bp, Homo sapiens
aaaaaaatttaaaaatttttaaaaatatttatttgctgaatcacaaactgactttattatattggtgggatttttaaacttaagaaataaaacaattttcaccaataaaattatttttaaaaactaaaataacaattattctttttgcttattcatatactttatactttagctctgtctctactacctcattattgcatttttctgaaaaacatatctttcaatatggtaatttttatagaaaactgcttacagttttcttcagaattatagtttaaaatttatatgttggaaattgttgacataactacctgcggcttctttrtagaccacgatattatttattctgtctttagatgctgagatctctgcaaaattcagaaaaacattgataagtggaggatattc

SEQ ID NO: 218473 - DNA, 530 bp, Homo sapiens
gttgtcagctgcatccatcagtggtggaaaaggaaagcaagtggagaaggagcacgctagcctggaagtggcacaaattattcccactcacattcttattggagagaacttgaccacatggccataaccatgaaagtatggaaagctgaaaactgccattaagccatgcactcactgcaattctaytaccaaagaaggaagagagaatggatattagtgactatctgccataactgccactgtattcataaaaaacacttaaaaatcacattccacaatagatgctgagcacattcccttccccttctttcctgcatttgaatcttctcaggaatggtgagaaaaaaaaaaagaaaaaaatcaaaacttttctcaaacaaaatctgctaagggctagctgcttactgaagaaaatcaaccacaatttgcaagatgtgcctttaagtcctctatttttccatccttaaagacagaataggattggctttatgcctctatcactctgtctgcattgcagtcctgtactatga

SEQ ID NO: 218474 - DNA, 534 bp, Homo sapiens
tgctggcacagtttatatctggtgcgggctttctgtttcatagatggcacctcctagctgtgtcttcacatggtctctggagattttttataagggcactaatctcatttatgagagcctcaccctcatgaactagtcacattccaaattgtgcacctcccrgtgttactgcattgttgattatgtttcaacatgtcagtactggggtagggaagacacaattattgagaccatagcaggggcttttcctcttagcccagtacttgtactttacctatgttctcattgttcagctcccacttataagtgagaatatgcggtgtttggttttctgttactggaacacaggatgttctaaatgccatgctgagggtgaggcctacaagagtaagccaagcagagctcttgcccttcagaagcttatagtttagcagaggaaccagataaatcaaaacaatgtataagttttgttaatagttccaaaaggaggaatggtggtttttcaaatataaaacaagtctttttccacaaggc

SEQ ID NO: 218475 - DNA, 562 bp, Homo sapiens
atccccatcctttgagatcttctccaaacatcccacaccaaaaagtttatgaacaaccagatctgtgtcatatggatttgttggcctgatgagatgggtaaataaaatgtgcactcaatttcattttcagatcttagtcagaaaacaaagatacctattggtgtttgcatttgaacatgcaaattccttaaagacaccaataaaaataaaacacaatccatgaaaacataggtatatatttacagcttttgttccaataaaatatgtctcaaaaaaagccaggcttctactgttatcattcagtagatgagaaggatctacttttgcaagataaacaatagacacatggagtggtatcctcccagagaatgagaagataaaaactcatgccggggtaaataacacatagtcartagtttatataaacaaaagttgagaaaatacttagaacaaactacccacagacatggaatttacatacgtaggtatatgtatacacaacatatgtgcatatacatgtgtgtaatacttgtatattgtttttaataactgtattatttaa

SEQ ID NO: 218476 - DNA, 439 bp, Homo sapiens
ttgccacatggattgactcttcctttcatgaaagatatttctgtagcatgtgatgctctttgatagccttttatccaaagtagaacgtttttcaaaatttgagtaaatcctctcaaattcatattctaaattctttgctgtcatttcaacaatgttcacagcctcttcaccaggagtggatgccatctcaagcaatcactttttttgctcatccataagtagcaacgtctcacactttagagtctatcatgaaattgcagcaattcagtcacatcttcaggttccacttttagttctatttctctagctctttccaccacatctayagttactttctctgctgaatctctcaaattcatccatcagggttggaatcaacttcttctaaactcctgttaatgttgatatttttacctcctttttgaatcacagatgttat

SEQ ID NO: 218477 - DNA, 439 bp, Homo sapiens
ttgccacatggattgactcttcctttcatgaaagatatttctgtagcatgtgatgctctttgatagccttttatccaaagtagaacgtttttcaaaatttgagtaaatcctctcaaattcatattctaaattctttgctgtcatttcaacaatgttcacagcctcttcaccaggagtggatgccatctcaagcaatcactttttttgctcatccataagtagcaacgtctcacactttagagtctatcatgaaattgcagcaattcagtcacatcttcaggttccacttttagttctatttctctagctctttccaccacatctatagttactttctctgctgaawctctcaaattcatccatcagggttggaatcaacttcttctaaactcctgttaatgttgatatttttacctcctttttgaatcacagatgttat

SEQ ID NO: 218478 - DNA, 564 bp, Homo sapiens
tttcaatttactctacccagatccatcagaagaaccactaactggcagctatagccttacaacacgtattttttaaataataagacttgaaagtcaaaattactrcttgatccatgggctgcagaatggatgttgtgttagcagacatgaaaacacactaacttccttgaacatttttatcagagatcttgggtaaccaggtgcattgtcaatgagcagtaatattttgaaatgaatctttttttttttttttcctgagcagtaaatctcaacagtgggctcaacatattcaggaaatcatgctatagatagatgtgctgccattcaggttttgttgttccatttatgaggcacaagtagattatatcagcatacttcttaagggccctagaattttcagaatggtaaatgagcattggtttcaatgttaagacaccagaggcatgaacccctagaaagagcctgttctgtgaagctttgaaaataggcattgacttctcctctctagctatgaaagtcctagatcacattctcttccaaaagaaaggctgttttgtctacatt

SEQ ID NO: 218479 - DNA, 564 bp, Homo sapiens
tttcaatttactctacccagatccatcagaagaaccactaactggcagctatagccttacaacacgtattttttaaataataagacttgaaagtcaaaattactacttgatccatgggctgcagaatggatgttgtgttagcagacatgaaaacacactaacttccttgaacatttttatcagagatcttgggtaaccaggtgcattgtcaatgagcagtaatattttgaaatgaatctttttttttttttttcctgagcagtaaatctcaacagtgggctyaacatattcaggaaatcatgctatagatagatgtgctgccattcaggttttgttgttccatttatgaggcacaagtagattatatcagcatacttcttaagggccctagaattttcagaatggtaaatgagcattggtttcaatgttaagacaccagaggcatgaacccctagaaagagcctgttctgtgaagctttgaaaataggcattgacttctcctctctagctatgaaagtcctagatcacattctcttccaaaagaaaggctgttttgtctacatt

SEQ ID NO: 218480 - DNA, 564 bp, Homo sapiens
tttcaatttactctacccagatccatcagaagaaccactaactggcagctatagccttacaacacgtattttttaaataataagacttgaaagtcaaaattactacttgatccatgggctgcagaatggatgttgtgttagcagacatgaaaacacactaacttccttgaacatttttatcagagatcttgggtaaccaggtgcattgtcaatgagcagtaatattttgaaatgaatctttttttttttttttcctgagcagtaaatctcaacagtgggctcaacatattcaggaaatcatgctatagayagatgtgctgccattcaggttttgttgttccatttatgaggcacaagtagattatatcagcatacttcttaagggccctagaattttcagaatggtaaatgagcattggtttcaatgttaagacaccagaggcatgaacccctagaaagagcctgttctgtgaagctttgaaaataggcattgacttctcctctctagctatgaaagtcctagatcacattctcttccaaaagaaaggctgttttgtctacatt

SEQ ID NO: 218481 - DNA, 564 bp, Homo sapiens
tttcaatttactctacccagatccatcagaagaaccactaactggcagctatagccttacaacacgtattttttaaataataagacttgaaagtcaaaattactacttgatccatgggctgcagaatggatgttgtgttagcagacatgaaaacacactaacttccttgaacatttttatcagagatcttgggtaaccaggtgcattgtcaatgagcagtaatattttgaaatgaatctttttttttttttttcctgagcagtaaatctcaacagtgggctcaacatattcaggaaatcatgctatagatagatgtrctgccattcaggttttgttgttccatttatgaggcacaagtagattatatcagcatacttcttaagggccctagaattttcagaatggtaaatgagcattggtttcaatgttaagacaccagaggcatgaacccctagaaagagcctgttctgtgaagctttgaaaataggcattgacttctcctctctagctatgaaagtcctagatcacattctcttccaaaagaaaggctgttttgtctacatt

SEQ ID NO: 218482 - DNA, 655 bp, Homo sapiens
tcttggtgttcagagattttactggagtttagtctactgcccatgtggctgatctttagkctctagctcctcccagagttttaggaaaatacctctagttgctagttcttccagagtttgcaactgataaggtatgtcctaagcccccatcatatatcacattgttaggctgtgtggtgaccgaagccctgaggcaaacaaaggtactcctattagtcaggacattgtgggtacttagatctcaccccccaccccaactcccagccaaggacagagaccagaacttcctttgggtaagctaattcttcactacacaaagggaattgaacagaggatctgctgcagttctcacatacttctggcatccaaatgtaccacccaccaattcatagtataaggtttctgcttaatgtggaagaacaccccctctgcacatccccctatttatatttttggccttgaactttgtctctcactcatatatttccctgtggtgcagtcaaacatctttcaacatcaccaacctaaaggagtatgaagcatgcttagcaccagaagacaaatgtcatttcaccagagtgtttctgcattgagccaaacctcctcaaggtcaggaagcaccctcatccttcactttcccttgacccactaatgc

SEQ ID NO: 218483 - DNA, 569 bp, Homo sapiens
gaaaactttacagaaacttgctgccttctctcaacctaatgttagcatcaaatattaccattaaagtcatgtaattttatttttatttttccttttaatgtttgtattgggttattccagagcaaaagtagttttgaggaaaaaaaatacttcggaaatattcttttatactcttactctttgatcagataaatagctataccagacctaccttgcaataggatattctccataatattttttaaggtttttagttttcaggtctcaatttccaattctagttttgattatctatagtagtatttcataccattttctactttgttttaaatgtacttagcttatcactaactctacgttaaccgtaacagttggttctaatctcaaaagtcaacatccttctcatctctttgcattgctatccactgagggagttggagaaagcagatggaatatgcaagctaatctcagataatgaggtaattttgtatagtgcatgcatttcaaaaaataattaastacacttattatcctttagatgcaagtctgagtacttgtgagggaagtgg

SEQ ID NO: 218484 - DNA, 549 bp, Homo sapiens
acatgcctcaccattctgtagctattgactttagccgaatatgaattatgccaatgggatggaatctccaaggatttttctatggatcccagggacaacttggaaggaacaaatgccaaatattactgacttgtgaattgctcttttttacaattatagcacaataaagcatcacattttcaatggtaatcagaaggacaggtaatgaaaggaaagatcactctatatggaaggattcaacaacatgattaagaatatattaaatattgtaattatggaggcttcacatactcagaggttgaattaaaaaaatactgctgtaactatgatgcttaaaactgagcrcaaatgaggcattggaatagaagcaggtaaacagtttcgaggactaaagcactttacaatactttaatgtagaaaatctctacttatctatttatctataatgaacaataatgagaatgtacaaatttttaggaaacaattattggcaagcatgcaagctaaagtattaaaaatggactataaggacaccatggggagattaag

SEQ ID NO: 218485 - DNA, 683 bp, Homo sapiens
ttactattgttaaaacaactgcacgccaagtctggaaacccaaggcagacaacaacactccgttttcaaaaccatttgaatttttttttgcttcagggtgagtttgaagagaataaaattcccatgttggctaaaagaagaggaatctagccagattccaagataattaaactggtcaaccggctctaagacattaacagctggtgttttaatcactratgagataatcagtttctataatctgggagatgggccaaaaaacatgggcttggtttttcctttcattttaaatcagttcattggagaggagctattcttctatcttagtgctgtcactctgcaagctgctgataacctgtagccgagaaagaacattgcagtttcaccagtacacatatgcacagaagacagggcacattcagttagaccgttcttaacaaaataaacagaaagcagacctaaaaatttatttctcggcactctaattttaaggacccatgtgactcccaacagacaaatacataaataaacaggatagctaccttttggaaatatttggaatgtgattcctcaaaaaaatgtgcaaacccctttatggttttttaacagcctctgcattactgaaattaatgttctgatttaatggacattatgttggtcttgcaatacagttctctgtcatt

SEQ ID NO: 218486 - DNA, 561 bp, Homo sapiens
tatgcaaaagcattatgttaagcaaaggtatcctgatgacattctaaggtatctagtcattggtagaacctagggcattcagtattaatctgatacaaaaygaagtaatgcatcacccgttagattagttacaaaaatgactatggagtgtgaactgtaatcgtggactcaagatcaaacagtcaagattataaaatcttttgattctcctcaaatatattgttacatatggttagcattctttccactagaaaaaaaaaggtatttgctttgaaaatacatagtcatgtcaaagccacaatgagataccatctcacgccagttagaatggcgatcattgaaaagtcaagaaacaacagatgctggagaggatgtagacaaataggaacacttttacactgttggtgggagttgcaaattaactcaaccattgtggaagagtgtggcgattcctcaaggatatagaaccagaaataccatttgatccagcaatcccattactgggtatatgcccaaaggattataaatcattctactataaagacacatgcacacatatgt

SEQ ID NO: 218487 - DNA, 561 bp, Homo sapiens
tatgcaaaagcattatgttaagcaaaggtatcctgatgacattctaaggtatctagtcattggtagaacctagggcattcagtattaatctgatacaaaacgaagtaatgcatcacccgttagattagttacaaaaatgactatggagtgtgaactgtaatcgtggactcaagatcaaacagtcaagattataaaatcttttgattctcctcaaatatattgttacatatggttagcattctttccactagaaaaaaaaaggtatttgctttgaaaatacatagtcatrtcaaagccacaatgagataccatctcacgccagttagaatggcgatcattgaaaagtcaagaaacaacagatgctggagaggatgtagacaaataggaacacttttacactgttggtgggagttgcaaattaactcaaccattgtggaagagtgtggcgattcctcaaggatatagaaccagaaataccatttgatccagcaatcccattactgggtatatgcccaaaggattataaatcattctactataaagacacatgcacacatatgt

SEQ ID NO: 218488 - DNA, 597 bp, Homo sapiens
gagatgtcacctgataacccaaagaattctccttgatcttacccaagtctaccaaggtgatgcctctaggaatcagcaagasagtgtttctatgcttagggcacttcctaatgtttatatggctgcattgaccacaggcttagatcataacacccaattcctttgaatatgatgaaagccttctcaagaaggatgggttcaaacaaacccatactgtgaacattgaaacaaatacctaactctttactgcccagacattaacaaaaatccataagcatcaagaatttccaagaaaacacaacctcgccaaacaagttaaataaggccccagttaccaatcttgcagtggcagatgtatgtgaacttacagagtaagaatttaaaatagctgtcttgaggaagctctatgaacttcaagataacagagagaaggaattcaaatttctttcagagaaattttttaaatgattaaaataataaaaaagtcaaacagaaaaactaaaaatgaaatatttaattgacattctgaaaatacatcagtacctatcaacagcagaattgatcaagcagaagaaagaattaatgagcttgaagcag

SEQ ID NO: 218489 - DNA, 599 bp, Homo sapiens
gcacctaacactggagctcccaaatytataaaacaattactaatagatctaagaaatgagatagatagtaacatagtaacagtggggacttcaatactccgctgacatcactagacaggtcatcaagagagaaagtcaacaaagaaacaatgcatttaaactatttctgaacaaatggacctaacagataaatacagaacatttcatccaacaactgcacagtacacattctatttctactcaacagcacatggaactttctccaagatagaccatatgataggccacaaaatgaacctcaataaatttaagaaaatcgaaattatatcaagcaccctctcagcccacagtgcaatgaaactggaaatcaactccaaaaggaaccttcaaaacatgcaaatacatggaaattaaataacctgcttctgaatgagcattgggtcaaaaacaaaatcaagatagaaataaaaattcttcaaactgaatgacaataataacacaacctatcaaaacctctgggatacagtaaaggtggagctaagaggaaaatgcatagccctaaacacctatatcaaaaagactgaaagagcacaaactga

SEQ ID NO: 218490 - DNA, 599 bp, Homo sapiens
gcacctaacactggagctcccaaatttataaaacaattactaatagatctaagaaatgagatagatagtaacatagtaacagtggggacttcaatactccgctgacatcactagacaggtcatcaagagagaaagtcaacaaagaaacaatgcatttaaactatwtctgaacaaatggacctaacagataaatacagaacatttcatccaacaactgcacagtacacattctatttctactcaacagcacatggaactttctccaagatagaccatatgataggccacaaaatgaacctcaataaatttaagaaaatcgaaattatatcaagcaccctctcagcccacagtgcaatgaaactggaaatcaactccaaaaggaaccttcaaaacatgcaaatacatggaaattaaataacctgcttctgaatgagcattgggtcaaaaacaaaatcaagatagaaataaaaattcttcaaactgaatgacaataataacacaacctatcaaaacctctgggatacagtaaaggtggagctaagaggaaaatgcatagccctaaacacctatatcaaaaagactgaaagagcacaaactga

SEQ ID NO: 218491 - DNA, 603 bp, Homo sapiens
gatgtcaggcaggtaagtaatagataataatgaattgctactactgtccatwtaagaacaaaaattggtaatgaaatactggatgttagagaacaaattattttttaatttttaaattatagttacataatagtatatatttgcagggtacatgtgatgttttgatgtaggcatacaatgtgtaataatcaaatcagggtattagagtatccatcaccttaagcatttatgatttccttgtattaggaacactccaattctactcttttagttattttaaaatatacaataaattattaactatagtcaccatattgtgctactgaataccagatcttattcattctaactatattttctacccattaaccatccccaatttaccccctccccggcttgctattctttcctgcttctgataaccatcattctgctctatatccatgagttaaattgtttttatctctcatatgtgagtgagaaggcgtgatatttgtctttctgtgcctgacttatttcacgtagcataatatccttcagatccatccatattgttgaaaatagcaagattttattcttgtggctgaataatattccattgtg

SEQ ID NO: 218492 - DNA, 603 bp, Homo sapiens
gatgtcaggcaggtaagtaatagataataatgaattgctactactgtccatttaagaacaaaaattggtaatgaaatactggatgttagagaacaaattattttttaatttttaaattatagttacataatagtatatatttgcagggtacatgtgatgttttgatgtaggcatacaatgtgtaataatcaaatcagggtattagagtatccatcaccttaagcatttatgatttccttgtattaggaacactccaattctactcttttagttattttaaaatatacaataaattattaactatagtcaccatattgtgctactgaataccagatcttattcattctaactatattttctacccattaaccatccccaatttaccccctcccyggcttgctattctttcctgcttctgataaccatcattctgctctatatccatgagttaaattgtttttatctctcatatgtgagtgagaaggcgtgatatttgtctttctgtgcctgacttatttcacgtagcataatatccttcagatccatccatattgttgaaaatagcaagattttattcttgtggctgaataatattccattgtg

SEQ ID NO: 218493 - DNA, 603 bp, Homo sapiens
gatgtcaggcaggtaagtaatagataataatgaattgctactactgtccatttaagaacaaaaattggtaatgaaatactggatgttagagaacaaattattttttaatttttaaattatagttacataatagtatatatttgcagggtacatgtgatgttttgatgtaggcatacaatgtgtaataatcaaatcagggtattagagtatccatcaccttaagcatttatgatttccttgtattaggaacactccaattctactcttttagttattttaaaatatacaataaattattaactatagtcaccatattgtgctactgaataccagatcttattcattctaactatattttctacccattaaccatccccaatttaccccctccccggcttgctattctttcctgcttctgataaccatcattctgctctatatccatgagttaaattgtttttatctctcatatgtgagtgagaargcgtgatatttgtctttctgtgcctgacttatttcacgtagcataatatccttcagatccatccatattgttgaaaatagcaagattttattcttgtggctgaataatattccattgtg

SEQ ID NO: 218494 - DNA, 551 bp, Homo sapiens
gggagccggttttccccctccaccatgagcaaacacggggagaagccttcatctctgaggagcaagccctaaccagacactgaatttgccagtgccttgatctgggacttcccagaccccagaactgggagaaataaaacatttttattcatatgccacccagttttatgttattttgttatagcagctcaaatggactaagtcaaatattgacttccaatttggggcaagatgaatttgaaatagtcaagagaaaacaagacaatatgttatttggagaattaagataatacttcaaatagccaactgtctttttaaaagtagaaactgtgtaactgcagtaatttcatttttaaaaccaaatgrtctcattttttaaatgaaaggtcagatcacatgagcacccaagtaaaatttaagataacagacagacattaagactagactttgaaatctgatgttttctggaaattagaggatatagggaaaccatgtctgctcattattttgttctatatttgaaatattacatatgattggtaaatactatt

SEQ ID NO: 218495 - DNA, 610 bp, Homo sapiens
gttctagcatctcatactcatttactataggcctcctttaagtccggatttcaattagtcaacatagaagactatgaatgctctttycagacacttaaaccaacatattaagttataaatccttcaggagtatacccatggtaatgaatattaccatatttagtcttatattacatcttcttttgtctaaaagccatagaatgtacatccatagttgttcctcggacttatgccaagaaaaatgtcaagacctacagctctcttagtacatgagccatattcctcagtgcatgttctctacttctccttctctgcgacgtggatctcaatctcctatgctttagaggaagtgaaagatgctggcaaacatgggaataacttacccagttgaagcaaacgaaaagacttacgtatagagttgctgattgtctcaaatcagggtggggggtatgaaattcttacacccaaaagtaatgttcagtgttttcagtttcaaagttgccactcttgtctttgtttatataactgtctgcaacccatttctcaggatcacactcctcccaatccatgtctttcctgtagcacaagagaacttggatggtcacatatt

SEQ ID NO: 218496 - DNA, 610 bp, Homo sapiens
gttctagcatctcatactcatttactataggcctcctttaagtccggatttcaattagtcaacatagaagactatgaatgctcttttcagacacttaaaccaacatattaagttataaatccttcaggagtatacccatggtaatgaatattaccatatttagtcttatattacatcttcttttgtctaaaagccatagaatgtacatccatagttgttcctcggacttatgccaagaaaaatgtcaagacctacagctctcttagtacatgagccatattcctcagtgcatgttctctacttctccttctctgcgacgtggatctcaatctcctatgctttagaggaagtgaaagatgctggcaaacatgsgaataacttacccagttgaagcaaacgaaaagacttacgtatagagttgctgattgtctcaaatcagggtggggggtatgaaattcttacacccaaaagtaatgttcagtgttttcagtttcaaagttgccactcttgtctttgtttatataactgtctgcaacccatttctcaggatcacactcctcccaatccatgtctttcctgtagcacaagagaacttggatggtcacatatt

SEQ ID NO: 218497 - DNA, 576 bp, Homo sapiens
ggtgtggtgttctcaaatgaaagagaatctgaaaataagcaagaaggtctgtaagaagacacatacaatrtcatgaaatcaagtattcaaataataaactatatttgcagagaaacctaccaggattcaaagccttttccttatttcaacattaattctaatagccttgattttctggtgtggggctagctatgcatcacaagctataaattacttgtatgtacatagacatggtattgttaaaataataggaaatgaatgagacagaaattattgagggaagagacagagccataaaaattgtgggaaaaattagtagtcagtaagatgggctctaagaatggaaagtctgttttcaggtctgactcttctaccttcttgtttatgcaaattatttcacctggtctccttattaaaaaaaactgggtaactgtgataggcagaatcatgaacctcaaagatgtccatgtcctaatatgtttattttaaagatctcatgagataatgcttgcaaaataatacagtttctagtacatagaatgttcattatagtagcatagtatagtcatgtaaggg

SEQ ID NO: 218498 - DNA, 588 bp, Homo sapiens
aaggaagaagcaaattagctgtattcacagatgacatgatcttatatttagaaaaacctaaatactccaccaaaaaaattgttaaaactgataaataaattcagtaaagttgcaggacacaaaatcaacatacaaaaaatagtaaatttatatgcatcaacagtgaacaatctgaaaaagaaatcaagaaagcaattccatttataataactacaaaaaattaaaatacctaggaatcaatctaacaaaagaagtaaaacatctataaaggaaaactacaaaactctgatgaaagaaatagaagatgaaacacatgaaaaatggaaagatactccacgctcatggattggaagagttaatattgttaaaatggcaatactacccaaagcaatttacagattcaatacagtccttatcaaaataccaatgatattcttcacagaaacagaaaataatcytaaaatatctatagagctacaaaagaccctgaatagctaaagcaatcttcagcaaaaagaacaaagctggaggcatcataccaacttacttcaaaatattacaaagctatagtcaccaaaacattatggt

SEQ ID NO: 218499 - DNA, 563 bp, Homo sapiens
caaaaaaagagagtgggagagagcatgtgtaagtacagaaggttcttgaactttcattgatgcagtggctcttcgctttgttgacaatgaaatgttctacactttctttaaaaacaaatggtttaaaaactaccacacttaactgaaaaaaaagcaaaaacaaaaagtaaatacttttcaagccagctgaccaccttttgttcacagctaggaatggtagcagaatgctatgtggttagatacagaaacaagacaacctgaagctaaatggatgcccagtgcatagtcaacaggcccagcctcacagtgcacagcctgagctacggccactcccagaggcatcttctaccacagcctcaacatcaagcaaagagcatcaagagtttgtcttggttgttttgttcgttttacaaactatggatatatgcaattgataactcaggatttctagctaataaccatgtagttaacactaccttacaaattaaaaaaaaaaaaatgccagragcacctttaaatgccttatcacactaacagcaaagcacacagagtgaggagagcat

SEQ ID NO: 218500 - DNA, 511 bp, Homo sapiens
tctccttatgacctttgcatatcaaaacgtttaatgtggaggctgataattgaaggtggtgtaagttaggaggatagactgagaaatggacagaagagatgatagggtatcctttcagtgggatatggggtgattttagaccttttgggggataatccaatttaagagtatactaagctattttgctactcaataggggtaggaaactgatcacttataggaaactacaggtaattcagatgaatcttttccataactatgcaaataaaattgatacttyagaaatacaatcaatttaaaggtttatatttcatagtctcaaagtgtgattcaccgtccacatgtgacccagagatccattccagaggcctaaaagatcaaaactatttacataataatactatgatgtatctgcctttttcacttctactcttttacaagtttacagtggagttgtccagctacagacatatgatatcaccacagatgattgccaaggcaaatatgagat

SEQ ID NO: 218501 - DNA, 651 bp, Homo sapiens
gccgcggcggcggctgcggtggcgagggcggcggcggggctgcttcagcctctgtggaaccagcaggaacccctacctgactccagagctggctgggtttattgactgccctgtccaatccaactggcagcattaagcttttgtcccttcgtggctgcttctgaacttttccctccccgcatttgtagtggggggctggaaaggcctttcaggacctcaggcccatcctcttcccaaaggcagcgcacgaggaagtcacagtgcccgtgacgcccgccccctccctcagcttcccggaaccctaaccttccccagacactttcttcccttttcttttagggtggtccaaaccaccggaggcttcttttatatatttatttttaartgatgtctccagctaacctttaaatttgcaggttagctggaaaaagacaagaaaagaatgggaaaaaagaaaaaaagttatttatttatttatttatctttttcccacagttaaaaatcttttcaatggggaagaagggaaggcacgttagggcagctctctctttgttagtcatcttctattctccaatgcacgcaaatatgcgtaaaagtagggagaaagctaagttcagaggacaactacaatatgatttacattcagtctac

SEQ ID NO: 218502 - DNA, 550 bp, Homo sapiens
tgtttaatagctgacaaaagtttcatatcatctacaagttctcaaatgtaaagttattgcttcaaattgtttagatcataggcttaattggtcttaactaatttcttttttttttatcccctacatcaccaaacccagaaaatttgattttcaggttaagagtaaaagaacaaagcaaatacaacaaaactatatgctctaatccttgggtttgaagggttctgaagatttacaaactgttggaatattacatgtactatattgatcagtgtattaggaaaactgatataatttgcttaatttggttcttataaaaagtacataccattttattttaaaaaccaatgaccttgctttcmaaattaatctatttcagatttttgccaactgatgcatagtatcatgatcagcaaaaacagtgtttttttctgtgcattgtttacatgaaagtgtgtgtcaggaaataacacttggtaattgcagagaataatagactagaataaacattctaaataaaagatttttagtaattcatttcaaatgacatgtc

SEQ ID NO: 218503 - DNA, 527 bp, Homo sapiens
ttttgaagaaggcacattgaaaaaatgaaatttcctatttctttttctttgtcaccattatacagacttgaaattgttaggtgcctcttctttgtaaataatttaccataaaattaagatttttccaggctattgtggcataagggacttagataaatccatgtgtgaatggaagcccgcagaagggcrtatcagtggccacaaaagcaaagccacccaccccacacgaccctcaggaactcaatgactaggtctcacacatcaaccaaagtaacagaagagaaaacacaaaacgaaggttatgattcttgttgatgaaataaatggcaccatgggaagaataataaaaacagctcttttaagtctatcaaaataaaaagtaatttctaaggtataaatgccacaatagggatgagttaatatgaaaatggagtctgaaaggctctgaagagaatggacttaatcgtgtctaagcttatgaatctgatgaatattcctatgcaataatatcacaacagattgaattc

SEQ ID NO: 218504 - DNA, 605 bp, Homo sapiens
aaaagctttagtatattgttattaattcaatgtagtcattataattttctcattggctaaatattcacagaacactttcagaattaaaaaaaaagacaaagatgatggtaatggctaacatgtacatgctccatttattctatgttgtgwatttttctaagcatttacatgtgttaattctaatcttctgttatgggatgcaacatgtccattaaaaaatatagacactccacaattttccttgcagctataaatgccattgttcctgtcctggccaatgacatgtaatcagaagtcattagactaagaatccagaaaaggcacagactcagctagtggacagtgtctgtaagtacagcagccctcataaggacctaaggaaggaaccccatactaagggtgatggggtctaaagataagcaatctggtactgtctacatgagaaaaaataactcctgtataaaccacagcaatcatgtttttgttacatgcaaaagaactctaaattcataactggtttagctgataataggaacattttcatccatcctttcatttcataaatatgtattgaacacttgctatgagccaggtactgttctagg

SEQ ID NO: 218505 - DNA, 346 bp, Homo sapiens
aaagttattgaagacaaatggttctttactgaagatgtttctcaaagataggatatgtgatagtcctaggagaaaagaaatcagttctagaaaagtcttcrcctaataatccttcaagaaaagttgacaacattcaaaatgtcaaggtttttaacaatccagaaaaataccgtttatgcctttgattttccaaagaagtcctcaaaagtaagttctaagaatttaatgataaaaagacttgccctttagaataccacaaaataataacaaaaatgtgatagataaagctcccatcaccctaggacagagcacctggggaaaggggtggctgtgggtgcagcttcag

SEQ ID NO: 218506 - DNA, 599 bp, Homo sapiens
taataattgattttttattaattcactttttattgattgactgtgatgtctgtgtgcacatcttgattgatgatgtctgtgtgcacatctgtgttaacagttttgattggtcacttaawataagttacttggtctgcctcatttctctgtttgttttgtgaacatgttaattttttgagagttaatggaatatatgcatggccacaaatgtgtatgtttaaggattttttagttgttacaaacttcatttagtaaggtagacattttacattgtgaattgtttaacctttcttccaagaaaaagtgatgctaatatagattggtcagggacaagagcattatagttgggccatagtgctaaggacatgatctgtctttcatctgggattctgtttctgcttctcaatgtcactttgtctttttggatgcctgccaatgcagctgaagtaagagggaccagggctgccccattacctcttgagccattatcatcactctttcccctagcactgtctttttttgtttttgtgtctgtatttgttgtgttttgtcttgtttttgccatcaaagaagtgcaatccaatatataaatatgaatt

SEQ ID NO: 218507 - DNA, 599 bp, Homo sapiens
taataattgattttttattaattcactttttattgattgactgtgatgtctgtgtgcacatcttgattgatgatgtctgtgtgcacatctgtgttaacagttttgattggtcacttaatataagttacttggtctgcctcatttctctgtttgttttgtgaacatgttaattttttgagagttaatggaatatatgcatggccacaaatgtgtatgtttaaggattttttagttgtyacaaacttcatttagtaaggtagacattttacattgtgaattgtttaacctttcttccaagaaaaagtgatgctaatatagattggtcagggacaagagcattatagttgggccatagtgctaaggacatgatctgtctttcatctgggattctgtttctgcttctcaatgtcactttgtctttttggatgcctgccaatgcagctgaagtaagagggaccagggctgccccattacctcttgagccattatcatcactctttcccctagcactgtctttttttgtttttgtgtctgtatttgttgtgttttgtcttgtttttgccatcaaagaagtgcaatccaatatataaatatgaatt

SEQ ID NO: 218508 - DNA, 631 bp, Homo sapiens
ctaaacagaatgcaagtttggttagtcaatatgagaagctctttaattagagtctaagataactttacttatcttagatcctttactttcagccatgttttaattacgttcatttgtcaaaaagctgaacaccacaaaagcttaaataaccataatctgctcatatcatataacacatgctcataataatggtcctaatgcactgtatgactgagataacctctgaatagtcaaagaaaaaatacttcatacttctagagttttaaaaattatattgcatttttatttcatgaaaatttacaatgcatgtaagatatgtgtgactctccattaacctcaatattaaattaacttcctatttcttaattattttaccaacacttgcttcttcttcccacctacccttccaatacattcacatgcacacacattcacacccatgacatacccatgtgggggtcacttttttgttttacatggttgaggctaacygcatcttaaaaaaaaaaaaggcaaagctgaatgagacaatttagaatattttaacagaaaaagggcttttcctctaagctctaaagttttaccaggcactagtaggaaaacttgcatttgctcttctcattcacagggt

SEQ ID NO: 218509 - DNA, 484 bp, Homo sapiens
atcacttgagaccagaagttcaaggctgcagagaactatgatgatgctactgacctccagcatgtgcaacagagcaagaatctctcttaaaaaaataaaaaataaaaaaagagtgttggttttggaaaatctactttgagtatrtaatatttatcttgcacctatatcgtgccaagtattaacagtctggctgtcattgccttcaacattatagttgttcttccatattcttggaggattggttctagaggctcccaaagatatgataccaaaatctgagaatgctcaagtccctgatataaaatggagtagtatttgcatataacctatgcacatccaccttatactttaagtaatctcagattacttatgatacctaatacaatgcctacacctcacttcattcatgtgaattcaatgtggtactcagcccacagcaaattcaagttttgttttttgcaactttctggaaattgttttccaa

SEQ ID NO: 218510 - DNA, 535 bp, Homo sapiens
caaattcctggaagatcaaaccccttccagcatggccaggtagcacagctgagccagggatgatggggccatattgggtttggctctgccttgcagctggcagtccaawcactgaggacatgcatatttctgcaggcctcactatggtcatctgtccaaaccccagaatccagagactcaaaacgaaatacagtcatacagtaagatatgtgcaaggtttcagggagcccagcagccagaccttacagctttagctcaatttagacaaatcaagcaagtttaagaaatattccagaagtagcagttttatgaccttaaaacatgtaataggctgggcacggtggcccatgcctgtaatcccagcactttgggaggccaaggtgggcagatcaattgaggtcaggagttcgagaccagcctggccaacatggtgaaatcctgtttctactgcaaatacaacaattagccaagtatggtggcatacacatgtagtttagctattcggaaggctgaggcaggagaatcacttgaacct

SEQ ID NO: 218511 - DNA, 519 bp, Homo sapiens
gcaaattcctggaagatcaaaccccttccagcatggccaggtagcacagctgagccagggatgatggggccatattgggtttggctctgccttgcagctggcagtccaatcactgaggacatgcatatttctgcaggcctcactatggtcatctgtccaaaccccagaatccagagactcaaaacgaaatacagtcatacagtaagatatgtgcarggtttcagggagcccagcagccagaccttacagctttagctcaatttagacaaatcaagcaagtttaagaaatattccagaagtagcagttttatgaccttaaaacatgtaataggctgggcacggtggcccatgcctgtaatcccagcactttgggaggccaaggtgggcagatcaattgaggtcaggagttcgagaccagcctggccaacatggtgaaatcctgtttctactgcaaatacaacaattagccaagtatggtggcatacacatgtagtttagctattcggaaggctgaggcag

SEQ ID NO: 218512 - DNA, 519 bp, Homo sapiens
gcaaattcctggaagatcaaaccccttccagcatggccaggtagcacagctgagccagggatgatggggccatattgggtttggctctgccttgcagctggcagtccaatcactgaggacatgcatatttctgcaggcctcactatggtcatctgtccaaaccccagaatccagagactcaaaacgaaatacagtcatacagtaagatatgtgcaaggtttcagggagcccagcagccagaccttacagctttagctcaatttagacaaatcaagcaagtttaagaaatattccagaagtagcagttttatgaccttaaaacatgtaataggctgggcacrgtggcccatgcctgtaatcccagcactttgggaggccaaggtgggcagatcaattgaggtcaggagttcgagaccagcctggccaacatggtgaaatcctgtttctactgcaaatacaacaattagccaagtatggtggcatacacatgtagtttagctattcggaaggctgaggcag

SEQ ID NO: 218513 - DNA, 543 bp, Homo sapiens
tgtgaagcaaattcctggaagatcaaaccccttccagcatggccaggtagcacagctgagccagggatgatggggccatattgggtttggctctgccttgcagctggcagtccaatcactgaggacatgcatatttctgcaggcctcactatggtcatctgtccaaaccccagaatccagagactcaaaacgaaatacagtcatacagtaagatatgtgcaaggtttcagggagcccagcagccagaccttacagctttagctcaatttagacaaatcaagcaagtttaagaaatattccagaagtagcagttttatgaccttaaaacatgtaataggctgggcacggtggcccatgcctgtaatcccagcactttgggaggccaaggtgggcagatcamttgaggtcaggagttcgagaccagcctggccaacatggtgaaatcctgtttctactgcaaatacaacaattagccaagtatggtggcatacacatgtagtttagctattcggaaggctgaggcaggagaatcacttgaacctg

SEQ ID NO: 218514 - DNA, 543 bp, Homo sapiens
tgtgaagcaaattcctggaagatcaaaccccttccagcatggccaggtagcacagctgagccagggatgatggggccatattgggtttggctctgccttgcagctggcagtccaatcactgaggacatgcatatttctgcaggcctcactatggtcatctgtccaaaccccagaatccagagactcaaaacgaaatacagtcatacagtaagatatgtgcaaggtttcagggagcccagcagccagaccttacagctttagctcaatttagacaaatcaagcaagtttaagaaatattccagaagtagcagttttatgaccttaaaacatgtaataggctgggcacggtggcccatgcctgtaatcccagcactttgggaggccaaggtgggcagatcaattgaggtcaggagttcgagaccagcctggccaacatggtgaaatcctgtttctactrcaaatacaacaattagccaagtatggtggcatacacatgtagtttagctattcggaaggctgaggcaggagaatcacttgaacctg

SEQ ID NO: 218515 - DNA, 444 bp, Homo sapiens
aagccaccattccgaccccagctccaaggccagaacgcgggagggatgccaccacgtctgtaactcactggcctgcttgcagtggcttgcctgattctctggtgctgaacacgtgagtcaaacccacacttgtgatctaagccaaagaagaaaagagatccacaaaacacagcccacatcccaacaccaccttagagaacacggyccagtttacggtattgttgtgggattttttctttcgactgacccatctgagtcaaagaaatgctttcctggtgaaaaagagtttaaagtctgtttagatttgctgctaattggaaaagccgccatgtatatattggtgggtcaaacatgtaggttacgttacaaatgttaataccgtaagatgaaaagtttgcagttagttctgtaacacacggcccgggcccgttgttatctcatcca

SEQ ID NO: 218516 - DNA, 444 bp, Homo sapiens
aagccaccattccgaccccagctccaaggccagaacgcgggagggatgccaccacgtctgtaactcactggcctgcttgcagtggcttgcctgattctctggtgctgaacacgtgagtcaaacccacacttgtgatctaagccaaagaagaaaagagatccacaaaacacagcccacatcccaacaccaccttagagaacacggtccagtttacggtattgttgtgggattttttctttcractgacccatctgagtcaaagaaatgctttcctggtgaaaaagagtttaaagtctgtttagatttgctgctaattggaaaagccgccatgtatatattggtgggtcaaacatgtaggttacgttacaaatgttaataccgtaagatgaaaagtttgcagttagttctgtaacacacggcccgggcccgttgttatctcatcca

SEQ ID NO: 218517 - DNA, 444 bp, Homo sapiens
aagccaccattccgaccccagctccaaggccagaacgcgggagggatgccaccacgtctgtaactcactggcctgcttgcagtggcttgcctgattctctggtgctgaacacgtgagtcaaacccacacttgtgatctaagccaaagaagaaaagagatccacaaaacacagcccacatcccaacaccaccttagagaacacggtccagtttacggtattgttgtgggattttttctttcgactgacccatctgagtcaaagaaatgctttcctggtgaaaaagagtttaaagtctgtttagatttgctgctaattggaaaagccgccatgtatatattgktgggtcaaacatgtaggttacgttacaaatgttaataccgtaagatgaaaagtttgcagttagttctgtaacacacggcccgggcccgttgttatctcatcca

SEQ ID NO: 218518 - DNA, 630 bp, Homo sapiens
ctcttattcaaccacaagtatctcttaggataatctcaaaaagcagaaaacagatcctttgtcctttgtttatatattttttaattttgaagtcattaacwtagctttttatgtaacccattcagtgtctggaaaatacttatttctcatgaaattaaattcacatttcatggtgattcatttttcatgtagatgattgtgaatttagtttggtaggttggactattttgattcataattagaaatcaggaatggcgtaatagaatggaaaactagtaatatgattactaattaaagagtaagcaaagatctggcttgtgaaaataaaattatgttaatgaaagtgataacttatttcaggatttaaggggctcaggtgggaaaaaattagacatctcaggatatgaccaagctgtggttgagcatttcatatagataaaatcaggtcagagtagcagctaacacaggtcagcaataaaagagtaagaaacaggggggaaaggaggctgctaggagacactgggctgggttatgagctccaagagtactgtagaggcatagtacaagagagctctgaactcctacaatcaagtgtaggcaatatattaggtttttttttttttttaattg

SEQ ID NO: 218519 - DNA, 630 bp, Homo sapiens
ctcttattcaaccacaagtatctcttaggataatctcaaaaagcagaaaacagatcctttgtcctttgtttatatattttttaattttgaagtcattaacatagctttttatgtaacccattcagtgtctggaaaatacttatttctcatgaaattaaattcacatttcatggtgattcatttttcatgtagatgattgtgaatttagtttggtaggttggactattttgattcataattagaaatcaggaatggcgtaatagaatggaaaactagtaatatgattactaattaaagagtaagcaaagatctggcttgtgaaaataaaattatgttaatgaaagtgataacttatttmaggatttaaggggctcaggtgggaaaaaattagacatctcaggatatgaccaagctgtggttgagcatttcatatagataaaatcaggtcagagtagcagctaacacaggtcagcaataaaagagtaagaaacaggggggaaaggaggctgctaggagacactgggctgggttatgagctccaagagtactgtagaggcatagtacaagagagctctgaactcctacaatcaagtgtaggcaatatattaggtttttttttttttttaattg

SEQ ID NO: 218520 - DNA, 632 bp, Homo sapiens
ggcctactgaatcagattctgcattttaataaggtctctaggcaatgactgtgctaattaaagttagggaggcattacgctaatctaccaaggtgatcagagactgggaataccatgcagagagaccttgggcacgagactcaatcaccatatgtgcattatagaagcctgtggctttatggcatkcagtcctctggatgagggtctgaacacctagacaaagctttccttgcagagaaatgtagattctggaaaggaatggcagtcactcttacatgggcagtcctaggagtacctgatgacccctttgtaacagatgaactgcacaggagacctggatctcttctggctccgagaatatgacagtagtggctttggcagcaaagaaactcaggagtagagcaatttcctaagtccttcagtgaaggactggtggctttccaactggtgtatcacagaaccacagggacagatacagataatttctacataagattccatagcatcttgggttgattctcatgaaacataagctcatgaggaaacacaaaaacaaacaaacaagaaaacaatgccattaagagcattgagaaattatacaaaggaaaaagaagaaaactaaacagcacaag

SEQ ID NO: 218521 - DNA, 598 bp, Homo sapiens
ttctttaaattatcagtataaaccccatatgcaataggtttaacttaattatatttttactgaaagtactatattgcctcaataaactgttctccaaaatacctattttgtgaattttgaaagtctcttcttttggaagaatcacagaattatagagactgggaagagagataattttgcctcattttatagactgaacaaataagcaaaattacactctgaaaacagaacagaaagtcttctacatgataacaacaaagagcccttgataaaaagatttttcaaatattaccttgtttgtcatatcaccgtgagacaggcattactgctataacaatgtaaatgtcgaaagtgaagttaaatgactttctggtagatactgatctggcaaataattgagcacagattataaaaccagaccctataaattttaaatcwatgatctttacaacagactccactgccaggaaattgaatgtgcatagtaggctcataatatatatttgtgtaactgaactgaaaagatagcttcatttctaggatgaggaaaaactggtcattgcttttctattctattaattcctgttggaaagagata

SEQ ID NO: 218522 - DNA, 625 bp, Homo sapiens
acaacaaattagcctaagtttcccagtcctttggcctcctgacttaaaatatccatgaagggatagaaaaaaataattaaacttatagtattataacacttgtcaagatgatttaacaggattatttggaaaagcatcatttaccttttaaatgagtcatttttctgtaactcaaatgttwtatgatttactgagtgtatttaaccaatatagacttcacatgtctttcatataaaatagaaaatttacaaacagccagtactatatttgaatacattttttgtttccttcaaccaagagtggaacatttaaaaccttttttcaattaatcacttttttattttttcaattaatttttattttttcaattaatcactttctcattctatttttcaattaatcactcctatctactggtttctggaaatcacttaaggaaggaaaaactctgaactcatttccatttattcttttattatagtttagcttctaaaacattttattcaatctctattttacaatattcctgagaaggaccttattgtcttcagcgagcttgtttatttaattttttaagaaataaaatgcattcttatcacaatttgaatatacattttttaataaa

SEQ ID NO: 218523 - DNA, 625 bp, Homo sapiens
acaacaaattagcctaagtttcccagtcctttggcctcctgacttaaaatatccatgaagggatagaaaaaaataattaaacttatagtattataacacttgtcaagatgatttaacaggattatttggaaaagcatcatttaccttttaaatgagtcatttttctgtaactcaaatgttatatgatttactgagtgtatttaaccaatatagacttcacatgtctttcatataaaayagaaaatttacaaacagccagtactatatttgaatacattttttgtttccttcaaccaagagtggaacatttaaaaccttttttcaattaatcacttttttattttttcaattaatttttattttttcaattaatcactttctcattctatttttcaattaatcactcctatctactggtttctggaaatcacttaaggaaggaaaaactctgaactcatttccatttattcttttattatagtttagcttctaaaacattttattcaatctctattttacaatattcctgagaaggaccttattgtcttcagcgagcttgtttatttaattttttaagaaataaaatgcattcttatcacaatttgaatatacattttttaataaa

SEQ ID NO: 218524 - DNA, 625 bp, Homo sapiens
acaacaaattagcctaagtttcccagtcctttggcctcctgacttaaaatatccatgaagggatagaaaaaaataattaaacttatagtattataacacttgtcaagatgatttaacaggattatttggaaaagcatcatttaccttttaaatgagtcatttttctgtaactcaaatgttatatgatttactgagtgtatttaaccaatatagacttcacatgtctttcatataaaatagaaaatttacaaacagccagtactatatttgaatacattttttgtttccttcaaccaagagtggaacatttaaaaccttttttcaattaatcacttttttattttttcaattaatttttatttttkcaattaatcactttctcattctatttttcaattaatcactcctatctactggtttctggaaatcacttaaggaaggaaaaactctgaactcatttccatttattcttttattatagtttagcttctaaaacattttattcaatctctattttacaatattcctgagaaggaccttattgtcttcagcgagcttgtttatttaattttttaagaaataaaatgcattcttatcacaatttgaatatacattttttaataaa

SEQ ID NO: 218525 - DNA, 404 bp, Homo sapiens
ttttacacgtaatcacatttttcctcttcttgacatcatttttttctctagaacatataccctatgtatcttcctccaaagtagaaataatcagaccacagtttctcactatgtgcacatgaatcatcagattycaggcaatgcctgagagtcctcatttctgagaaggtacctagaaatctggtctgtggatcacactttcagtagtaaagaccagacttcatatggaatgacactgctggttatttcagctgcatattttttttctaacttttctaatttgaggctctacttaacctggacagttgggacttgaataagtaccagtgactttaagtaaaatccataatatatcttggattcattctaaattctcagctctccacagattatgattaaaacaa

SEQ ID NO: 218526 - DNA, 396 bp, Homo sapiens
taacatgccttctatttctacaattttgtcattttttaatgttacgtaagtgaaatcatactacatgcaaccttttgggactgactttttttcccccttggtataattctctggatatttatccattgtttcatgtgtcaatagtttgctccttttttattaattaatagtatctcatggtatggatgtaccacagtgtattttaccattcaactgttgaaaaacatgtagacatttggaaacyagactgtttctcttttgggattatcacaaataaagtagctggaagtatttgtgcacatgtttttgtatgacaataagttttttatttctctgggataaatgccaaggagtgcaatcattatttcatctggtagttgtatgtttagtttttta

SEQ ID NO: 218527 - DNA, 542 bp, Homo sapiens
cccttctatatatatcaaaataaaaacaaacaaaatcttttcctctgtcaattgaagaatgtcaaggttcataaatttggaaacaagagatttatttttcataaagggttgcaacctgcatggtggacaytctgacaggcggagaagcatagctccttgccaaaaacctgaaacagtcaattggaaggtgggggtgggggggcagtggaggaggaaggtgaggaataggaattcatgctgagcagggtggctgaatatctacatttaataacctataggagaaatcatgaatatttttggaagaagaaacatgaacatgcacaatggagcttcatggcccctcatatgtagcatgtagattgaccagaaccactctgtggtcagtggtctcttattgggaaggaatgctggtcaactgtgtccaaactgctgaagggaggggacagtgtcaggggttggttgctatcagtgatggagtctttcacaagggctggtttctgtttagtgttggtttctgttaggtgtgtctgacctctcattct

SEQ ID NO: 218528 - DNA, 542 bp, Homo sapiens
cccttctatatatatcaaaataaaaacaaacaaaatcttttcctctgtcaattgaagaatgtcaaggttcataaatttggaaacaagagatttatttttcataaagggttgcaacctgcatggtggacattctgacaggcggagaagcatagctccttgccaaaaacctgaaacagtcaattggaaggtgggggtgggggggcagtggaggaggaaggtgaggaataggaattcatgctgagcagggtggctgaatatctacatttaataacctataggagaaatcatgaatatttwtggaagaagaaacatgaacatgcacaatggagcttcatggcccctcatatgtagcatgtagattgaccagaaccactctgtggtcagtggtctcttattgggaaggaatgctggtcaactgtgtccaaactgctgaagggaggggacagtgtcaggggttggttgctatcagtgatggagtctttcacaagggctggtttctgtttagtgttggtttctgttaggtgtgtctgacctctcattct

SEQ ID NO: 218529 - DNA, 542 bp, Homo sapiens
cccttctatatatatcaaaataaaaacaaacaaaatcttttcctctgtcaattgaagaatgtcaaggttcataaatttggaaacaagagatttatttttcataaagggttgcaacctgcatggtggacattctgacaggcggagaagcatagctccttgccaaaaacctgaaacagtcaattggaaggtgggggtgggggggcagtggaggaggaaggtgaggaataggaattcatgctgagcagggtggctgaatatctacatttaataacctataggagaaatcatgaatatttttgraagaagaaacatgaacatgcacaatggagcttcatggcccctcatatgtagcatgtagattgaccagaaccactctgtggtcagtggtctcttattgggaaggaatgctggtcaactgtgtccaaactgctgaagggaggggacagtgtcaggggttggttgctatcagtgatggagtctttcacaagggctggtttctgtttagtgttggtttctgttaggtgtgtctgacctctcattct

SEQ ID NO: 218530 - DNA, 509 bp, Homo sapiens
aagcatttaaaagtgaaagccaggagttacaccaaactgagcactgtaatagctttcttatagtgcatgacagtggaaagtgtcttttactcaagaatcagtatggttgactagaaaggaatttaaagatctggtatggttttatgagattaaggaataaaactgtacattatttcattcactaagtgagcaaattacttctctgcttgctcttgttacgtccttataaattggtgataaccttatcttccttgtgaaaatcaacagatgacatgagggttaaatggcgaatttagggggaaaatatctgtaaataattacaaaatagtgtcattctccttaagttaatttgatttttatatascactaagaatgtatgtagttgttttgaatctaccacaagcttgtcaagtaacttgaggttttgttattgttgttgggtttttgtcctgcctgtttcttcctttatacatgagaattctgaataaaaattgagaggattctgacca

SEQ ID NO: 218531 - DNA, 584 bp, Homo sapiens
agatctcataacccctagcctggaaattcctaaggaatttgactctgtaggactcctggggaataattatcaccaacctctcactcagagccactcgctstaggtagcatcagccttaataataatgacagacctaggactgtacataaggaggcagctactagctttttattaaagtggtatgtcccaaaatcatgagcccatttcttaaactctgcctctttccagttaaattcctttggtctctgcacactagaatacactacagtctagttccatagtgaagtatttaagagtttaagtatttaagaatgcagctatactatctgtattcaaatcttcatctgaaaagtagagatattaatagtacctaagattttgaagagacttaaatgaattatattcataaagcacatagaatggtagaatgatacttgtttcatagtaaggactaacaagtattaactacaatcatcatcactgtatgccacagatacgtttagaggtaattggtaacaaactgcttaatactgaaatcaatctttcctaggacttacaaatcttggtcttggagaaaagagaaa

SEQ ID NO: 218532 - DNA, 584 bp, Homo sapiens
agatctcataacccctagcctggaaattcctaaggaatttgactctgtaggactcctggggaataattatcaccaacctctcactcagagccactcgctctaggtagcatcagccttaataataatgacagacctaggactgtacataaggaggcagctactagctttttattaaagtggtatgtcccaaaatcatgagcccatttcttaaactctgcctctttccagttaaattcctttggtctctgcacactagaatacaytacagtctagttccatagtgaagtatttaagagtttaagtatttaagaatgcagctatactatctgtattcaaatcttcatctgaaaagtagagatattaatagtacctaagattttgaagagacttaaatgaattatattcataaagcacatagaatggtagaatgatacttgtttcatagtaaggactaacaagtattaactacaatcatcatcactgtatgccacagatacgtttagaggtaattggtaacaaactgcttaatactgaaatcaatctttcctaggacttacaaatcttggtcttggagaaaagagaaa

SEQ ID NO: 218533 - DNA, 533 bp, Homo sapiens
ttctctgtcaccttgagctgtaaagttgaggttttcaaatgctccctttcctatccctgtagctgtggtagttgaagagctcaccttttgttctttcctttstgcgatggcttgtgtctttatatgttaacccacagttctctaaactgtgttaatttttcttcattctagttgcagtttgttaagagtaagctcttccctagcttcctaaaaaaaagctttagtgactttagtttttcttttttatattttcctttagatttatttgataattaatatctggcagaagtttcacatgatcactttactctacccttttcctggaaatgtccccagtttccagcttcttaatgctgtttactcctgtgcgttctcaatctctctcccaggaggtagaatctagtagaatctaggcactgaccacttctaaaaattataaattacctcttagtttttacattttgtcctatatttatgactgcagtctttttcagaaggtttattcttcatgggacaggaaagatctaagatgt

SEQ ID NO: 218534 - DNA, 588 bp, Homo sapiens
atgggctatgtggctatccatatccctttttattacgcctctaagaagataaagtcaaaattgtgtagaaaaacttagtaaagtatttcaaagatgttatgtacaccaaccctaagtatttgtaacaaaaagctgcttcaagctaaaagtgtaaggtgagaggcactcagccaacaacacagagttttaaatttttcttaggcaaaagaaatctacagaacctctaaaaacttgatttcaggaaaaatagtttaattagaaataatgctgaactcttagaaataatattcccttaaagcaatgttatagctagcatttaattttatttgtgtctgtatatagactcataatttatacatagagaataactttagctaaggtgaccatttgccctataagcaacatctagtgaatcttcaaaaaatacrtacaaatcaggaatggaatctcaatatttttaggttgattttgccaagggaaaattaatttcaaagaaattggatgaccccagagaggaaagatcattctacatctccaaatttaaaaaaaagaaaaatgattttctttccttccctccccctcctcctc

SEQ ID NO: 218535 - DNA, 580 bp, Homo sapiens
cagcatgatcatgtcctggtggtagtggtatagataactgatattaaaggaaattaaaggtcatcagcaattaggagaatgaagaagtacgaatcagggtgttaaaaagtacttttttagtcattccttaggttccttttcctctgcttgccccataaggattgatattcttcaagtttcaggcttaggccttgttwtctcactaggtccagtgagatggttactcagccttcctctgttttatgtgagatgaatggatgtcctttaaattagatttggatttagtttcatatagttaggatcttgtgtccttattattgctgttacctggataaactcttttctactcccagggcttcagttactacctgtatgtggttagtaaaatctatgttgatagtccagctctctccctgaacttagacccacaaagccagtcacctttactagacctgtcttctggggtgtcatgcaggcactttacacttgacattcagaagactgaatttgtatctccaaaacagtacttctttctctccctgagttcattagtctactgaatttattcacttaacaaatg

SEQ ID NO: 218536 - DNA, 580 bp, Homo sapiens
cagcatgatcatgtcctggtggtagtggtatagataactgatattaaaggaaattaaaggtcatcagcaattaggagaatgaagaagtacgaatcagggtgttaaaaagtacttttttagtcattccttaggttccttttcctctgcttgccccataaggattgatattcttcaagtttcaggcttaggccttgttttctcactaggtccagtgagatggttactcagccttcctctgttttatgtgagatgaatggatgtcctttaaattagatttggatttagtttcatatagttaggatcttgkgtccttattattgctgttacctggataaactcttttctactcccagggcttcagttactacctgtatgtggttagtaaaatctatgttgatagtccagctctctccctgaacttagacccacaaagccagtcacctttactagacctgtcttctggggtgtcatgcaggcactttacacttgacattcagaagactgaatttgtatctccaaaacagtacttctttctctccctgagttcattagtctactgaatttattcacttaacaaatg

SEQ ID NO: 218537 - DNA, 530 bp, Homo sapiens
ttgtttccttgacatcttttcttagatgtctcatgattagctcaattttaaaaagctcaacagtacccccttgatccaccactacccacactgtccactaacctactcatgctagggatctgggaattagccttctcctcacctcacatctccagcacttgcagtacagtgrggaagtgagggtgaaggggaaagggagctaaggtacagacaatggctaatttacatctcttggtggcaagtgttacaacaggaatagtatacaacactatagagacatacaatgggaataaatccatgagttagtcatatgctcctttctagaccgttctctgggtactcactgcctgaaaaacatgattttttcttacaggtttcagctaattctgcatctcaccaagaaatttttccttgacaacctctccctaacagaattagttgtctctgttgtgttcctgtaaccgagtatccccatttttcttaagaaaaagggaatgaataactattattattttctcttctctttttcc

SEQ ID NO: 218538 - DNA, 558 bp, Homo sapiens
tgaatgaagattattataggagttcagtgcctcgcaaaattttcttgtacttaccctgtgcttcatactcttattgtcttgcctcctttgaataatcacaaaagaaaaagaaggcaaaggastatatagcacaacctattagaggaaatggctgaaatagtattctcttaatgtttaatgtgactattaagagggtattatgctggcatgtaaaacagttaattgtattcagtgtgttttaacatcactgattaattgatggcatagtgaatgttcatcttggagaaaataccacctttgtatctcaggggatctaaagaatgtcttttgctgctgaataaagtgcttcaaaaagttcaaagggagaaatgtgtatttttttttatggtaaggaagaatagattttaccacttgggaaagtaacagcttatgaaatcacgcagtgatgactgtaattcagctgtcgtctgtttctttcaccttctaaccagtgaaaaaagttaggttacttatttctttgactaagtaaattgaaaaggaataaattcagaaagatta

SEQ ID NO: 218539 - DNA, 558 bp, Homo sapiens
tgaatgaagattattataggagttcagtgcctcgcaaaattttcttgtacttaccctgtgcttcatactcttattgtcttgcctcctttgaataatcacaaaagaaaaagaaggcaaaggactatatagcacaacctattagaggaaatggctgaaatagtattctcttaatgtttaatgtgactattaagagggtattatgctggcatgtaaaacagttaattgtattcagtgtgttttaacatcactgattaattgatggcrtagtgaatgttcatcttggagaaaataccacctttgtatctcaggggatctaaagaatgtcttttgctgctgaataaagtgcttcaaaaagttcaaagggagaaatgtgtatttttttttatggtaaggaagaatagattttaccacttgggaaagtaacagcttatgaaatcacgcagtgatgactgtaattcagctgtcgtctgtttctttcaccttctaaccagtgaaaaaagttaggttacttatttctttgactaagtaaattgaaaaggaataaattcagaaagatta

SEQ ID NO: 218540 - DNA, 549 bp, Homo sapiens
cccaattacttgggaggctgaggcaggagaattgcttgaactcaggaggtggaggttacagtaagctgagatygtgccactgtactgcgccactgcactccagcctgggtgacagagcaagactctgcacccccaaccccccaaaaaaagcaaacaagcaagtgcaagtaagactttgtatctctgattagatgttgaacagtgaatgtctcttcccagacaatttagataatttacatacattctttctctggttagccttacagattaaaaaatggtggctttttaagttttaagttgagtgacttatcaaaaatactttaagacttgaagaccaccagtctagaagttagagatgaaatattagaatatggcagtaaacagtccagcctatgaactagaactagattgactgggttcaaatctcagcttagccacctactagtatgagacttgggttaagttaaaaaagcccttgtatctcagttctcttatttttaaaatgctgataacaataatgtttgtaagatgttgtgggcattaaatcaa

SEQ ID NO: 218541 - DNA, 549 bp, Homo sapiens
cccaattacttgggaggctgaggcaggagaattgcttgaactcaggaggtggaggttacagtaagctgagattgtgccactgtactgcgccactgcactccagcctgggtgacagagcaagactctgcacccccamccccccaaaaaaagcaaacaagcaagtgcaagtaagactttgtatctctgattagatgttgaacagtgaatgtctcttcccagacaatttagataatttacatacattctttctctggttagccttacagattaaaaaatggtggctttttaagttttaagttgagtgacttatcaaaaatactttaagacttgaagaccaccagtctagaagttagagatgaaatattagaatatggcagtaaacagtccagcctatgaactagaactagattgactgggttcaaatctcagcttagccacctactagtatgagacttgggttaagttaaaaaagcccttgtatctcagttctcttatttttaaaatgctgataacaataatgtttgtaagatgttgtgggcattaaatcaa

SEQ ID NO: 218542 - DNA, 549 bp, Homo sapiens
cccaattacttgggaggctgaggcaggagaattgcttgaactcaggaggtggaggttacagtaagctgagattgtgccactgtactgcgccactgcactccagcctgggtgacagagcaagactctgcacccccaaccccccaaaaaaagcaaacaagcaagtgcaagtaagactttgtatctctgattagatgttgaacagtgaatgtctcttcccagacaatttagataatttacatacattctttctctggttagccttacagattaaaaaatggtggctttttaagttttaagttgagtgacttatcaaaaatactttaagacttgaagaccaccagtctagaagttagagatgaaatattakaatatggcagtaaacagtccagcctatgaactagaactagattgactgggttcaaatctcagcttagccacctactagtatgagacttgggttaagttaaaaaagcccttgtatctcagttctcttatttttaaaatgctgataacaataatgtttgtaagatgttgtgggcattaaatcaa

SEQ ID NO: 218543 - DNA, 549 bp, Homo sapiens
cccaattacttgggaggctgaggcaggagaattgcttgaactcaggaggtggaggttacagtaagctgagattgtgccactgtactgcgccactgcactccagcctgggtgacagagcaagactctgcacccccaaccccccaaaaaaagcaaacaagcaagtgcaagtaagactttgtatctctgattagatgttgaacagtgaatgtctcttcccagacaatttagataatttacatacattctttctctggttagccttacagattaaaaaatggtggctttttaagttttaagttgagtgacttatcaaaaatactttaagacttgaagaccaccagtctagaagttagagatgaaatattagaatatggcagtaaacagtccagcctatgaactagaactagattgactgggttcaaatctcagcttagccacctactagtatgagacttrggttaagttaaaaaagcccttgtatctcagttctcttatttttaaaatgctgataacaataatgtttgtaagatgttgtgggcattaaatcaa

SEQ ID NO: 218544 - DNA, 517 bp, Homo sapiens
tccacagtagaaataaaacagaatatcatatatacgtgcatggattatatattttcattgctgtttttttaaaaaaagaagaaatacaagcaaattactccacataaaattacaaataccatatttctgtcctatcctctggaagataaaacacatctataagtatctgatagcatcagccaggcgcttgggctgaatcacaatgtttgcattccctaccataataattacggctagttctcatagagaagttacaaaacccagagtttaactatttctrtttagccaaccataaaacttacgtgacagtatctttcccttacctttaaaaggaggttgtgaagattgcatatgatatcaatagactttgttagataggtgtactacataaatattagtggcaactcaacagtaaggaatgtctctgacctccactgtgattatcatcaaggttttattaagttcccaactaaatatggtacagcacaggtgactacaaactgatatttaagttgac

SEQ ID NO: 218545 - DNA, 406 bp, Homo sapiens
gataggtgggttgcaaaaaaattaaagatattattaagtaattagttatgggtttatagacttaaactaagctactgaagtttgaattctactaatatatttgctttcttttcctcaaactctttttagttcaagataataaactggcattacctgagcaactttatacacaacaatatcccacagcaaagttaacgagcgatgccattgcagccaatcatagggaattttacacacttcaaartgtggaagaaaaataagaattaacaagcagtgtgctgatatcactgcaagtgtatcagaagaaaaatgattgagaaacctgagctagagacactcttgtggctgctaatatatagcttgagactttcagaaactttttaaaattttagctgtcttcctacca

SEQ ID NO: 218546 - DNA, 414 bp, Homo sapiens
ctacatacagataggtgggttgcaaaaaaattaaagatattattaagtaattagttatgggtttatagacttaaactaagctactgaagtttgaattctactaatatatttgctttcttttcctcaaactctttttagttcaagataataaactggcattacctgagcaactttatacacaacaatatcccacagcaaagttaacgagcgatgccattgcagccaatcatagggaattttacacacttcaaaatgtggaagaaaaataagaattaacaagcagtgtgctgatatcactgcaagtgtatcagaagaaraatgattgagaaacctgagctagagacactcttgtggctgctaatatatagcttgagactttcagaaactttttaaaattttagctgtcttcctacc

SEQ ID NO: 218547 - DNA, 517 bp, Homo sapiens
agagcagtttcaggatatattgttacgtgtaaaaggcaaagtttataagcctttctattatatgctaccttttaggtaagaaaagagatataagaaaatataactgtatctgcttttttgtgcaaaagaaatataggaattataaaccataaattaaagacattggttatctacaaagaatggcagggaaccaggtagaaaggatgagagaatgggaacaggctagcaagaacgaggaggaagtaaccyttctctgagcatagactttttataactttgattttagaatcatagcaaaatttcccataccttagaaaaacctaagtaaatttgaaaaacataattttgacttgatagtggaaggctaacgtctaaagaaacagtgtaaaattattgtaatgtagttagtaaatttgttttccaacaaggatactagaattatataccagatcagataaagagtcaagtttctcactgttggagaaagatgttatacataaggaaaggggcaaggcaa

SEQ ID NO: 218548 - DNA, 579 bp, Homo sapiens
gtaggtttattgtgtttgatgcagattatcctgaattgtaattttgccttcccacctatctatgttttacttcacttgtttcaacaagtgttattcaataaatgctttttaataaaaaagaaaaaagttctgaacctgaactattatgttaataggctaaacctattagattgtcttttcctcgtccttwcaaaggtacacgtgtctcttgcagagttgaacacctatgtggtgcaatagattggtaaagttgagagagcaccattcaattttgaattgatatgtgtggatctagatccccaattttctatcctcagccctgctagaaaggtttgaaactttttggttggaagattatacaaggcaacatccgggtatggaaaaacagatttaatcttggtcttattccttgagaaatctacaaagaggtaaattaatggcctcatgacattctcatgtatcaaataaatcaaaaccaactagatacacagccatccaaaagagaggatgctggagcatttagcaagttctaattagctggaaggtagactgggagccaagggagattagtgaaaggaa

SEQ ID NO: 218549 - DNA, 561 bp, Homo sapiens
gaattctttcctgggggaagtaaagaaccctcccagactaagccccaatttgcggcttgcctgccctgcatcacttgattctaaaaaaccccaggatcccttccttttctttgagacatcctgcattaatgaaggttttttcccaatgctatactctawataagttaatctctttaattttgaggtacattttgtcttgcacagtttggttctgtgacttggataggtttggacttcaccttctgttctccatgaactccatctaagcaacaagccccgtggagccttttgtgattctatacctgaccggtgaccagagacccagtggtgaatccaactcttggtcttatactccagattcttgtccattggtagattggtagcatagtcaagacttgattaggattatttttgagtgcttgctttgtttcgtgtgcctgcttcttttggttttatggcttgaccatttggtgacctctgtaaatggattgacggttcttagaaatctctattaggtaaaatctggtttgttagcttttcctgttgatttatttatttgtt

SEQ ID NO: 218550 - DNA, 561 bp, Homo sapiens
gaattctttcctgggggaagtaaagaaccctcccagactaagccccaatttgcggcttgcctgccctgcatcacttgattctaaaaaaccccaggatcccttccttttctttgagacatcctgcattaatgaaggttttttcccaatgctatactctatataagttaatctctttaattttgaggtacattttgtcttgcacagtttggttctgtgacttggataggtttggacttcaccttctgttctccatgaactccatctaagcaacaagccccgtggagccttttgtgattctatacctgaccggtgaccagagacccagtggtgaatccaactcttggtcttatactccagattcttgtccattggtagattggtagcatagtcaagacttgattaggattatttttgagtgcttgcttygtttcgtgtgcctgcttcttttggttttatggcttgaccatttggtgacctctgtaaatggattgacggttcttagaaatctctattaggtaaaatctggtttgttagcttttcctgttgatttatttatttgtt

SEQ ID NO: 218551 - DNA, 599 bp, Homo sapiens
tcagttggttattcgaatctgataatctgatcatcatgtctttaacagctttcagctctgacctacaagtcatgtctggattcttttatagcttttgaatccaaacaagctcctgaccttgctaactatagcccagcaccaggagatttctgacagtataaaattcaaggccgaatcttaagactatgtaatgaaattgataaccataaattccaagmtgggctcaggacaacaggacttggcatttctggccattacttccaaagcaaatcatatctgtatatgaaatacaacaaagtctgctagtccgaaagcatgttaaatatggcttgttatgttcagcctttccacactgctcttataaacaggagttggactgtttccatcagactctgaccaagtaaacttaaatgtaatgatgttacagtctgagtctttttgttttttaagaaaagcaacataagcaacaaaagcttccctgcctttttcccgcggttgctcccactccatctctcgcttccattttctttcagaacactctgaaactctcaagcattttctataagagaacttgcagttctccatagggatcaggagag

SEQ ID NO: 218552 - DNA, 522 bp, Homo sapiens
ggaaggggataaggagggaagtggraggggcgggaggagtcaggcagccagactaagatgcagagtgttgtgtggaatgagttagccagtgagaaacccctgtctgggcagacaaaggcaaataaaaggacttcaactacaggaatgacagaacaccctacaggtccatcagagggatcagtatatttgaatatgttcatacaatggaagacttggtagcagagaaaataaatgaattagaactacataaactagtatgactcttataagcataatagtgaatcaaacattttccaaagcagatgtaataagatgcaattgatatgaaatttacaaacatcaaaacaacatatcataaaaatatcagtaagttcatgggaataataaattccaaattcaggatagtagttacctctaaaagggaggtgagagtataactgatagaggggtatgcaagggacttcaactctatcgataagcatcactttctaagctgaggagtggacacatggtgttcatttt

SEQ ID NO: 218553 - DNA, 472 bp, Homo sapiens
tgttttctttttattgaattatgagaattctttatattttctgggtgcaaatcagagacagcatttgcagatattttctcccagtgtgtggctttccttttcattctcttaacggtgttttctgaagagcagaagttcttaattttgattgtttamtttacacattttaaagatctgtattgtgttgtatctggtgttgtatcttaagaattctttgcctaacttaaggtcacaaagattttctcctcttctaaaagttttatagttttatattcaagtttgtgatccattttgagttagttcttgtggttggtgcatggtatgtacttttcttatgggccaacaaatttatttgtaaaaaattcaaagaaatgattttgcataagaaaataacagttctcgcccttcgtggtgtgttaaagaggaaggaatgctctcctctgtgtagatctcttttcatagatgcaagata

SEQ ID NO: 218554 - DNA, 482 bp, Homo sapiens
gcagggcgcgcccactccggcactcaaccggctgggcgcgccagatccccagtgccgcagccaagggccacgtttccagcccaaggccagcaggaccgggtggcaaagrgaagtcaaactgtgggtgcgtccggacggcggcgggcggccggaccctcacctggtagcgagtcgccaactccattcttcctaaccgggctccagtctcctcccagcacgcggccacgggagcccggactcaccacggcccggcgcaccaagaacgccccgcgcccgagcagctagcggctccgcccggagcacaggcgggccccgggaggcgcacttgacgccctggacaggggagcgcgctgccccctcggtgccgcctcactgggcctcgtggctccgatcacgttccaacttcgcggccactgaccttgtcttcgcaggcggcgcgagagggggctgcagttgggcgcggcaagagcaattaccagtgt

SEQ ID NO: 218555 - DNA, 597 bp, Homo sapiens
aattcatgtttcatatctgctgtcattataaaagaagtcacagctacaagtctagacttttatgtttatttcaaaaggacttgtccttatgaaataatcattgttttatgccagctctgctttattgatctactatgtacctgaaattatttagatcagggaaataagactttcttctctttccagcatgcagggaaaaattgtcctagactcctgagaatattataaacatctgatattagaaacacattggagttatattttttatttattaagwtcagtttcatatatgccccatattgaaagattttactacttccctcattaagaaaaaaagttataccttcaattgtgagtcatttttgtttctacaaagtaagaaggaaaaagagagggcaaagtgaaggaggaggaaaaggaggaagaggaagaagaggggagtaaagagaagggagagggagtaaagaaagggaggagggaaagatgcaaggagagaaagagacagggaaggaaaaagaaaaaggagaagaaattatttatagttatctggattttatagttctcctgtgagctggtggtccatatgaggaagcaaag

SEQ ID NO: 218556 - DNA, 670 bp, Homo sapiens
gtgttttccatcgtgtgttccagtatcatttcaggataatttctgaccattatataaaatacttctatcctttgcttgtgttgtttaactttgtattgtttttcccataatgaagtatttttcaaaatgattctcccttgaacagtaaatggttatatggaaatactattctctgttctgagatgaatacatctgaggtctcagttcactttaggtcaaaatatgacagcaccatgggcaacaggccagggggtgctgggctctggcttaagaaatgtcagctgggtggttgccctccaaaacagaatcacctcgatccaacactaccacctsccaatgcacggaggtttgggataaagcaggattaacatctgcagcttacacacaattattgtgtggtcttggaaaagtcccctgagtccattcaatggaaaatgatggacttaactagatagacctctattagtaccttccagttttaaaccttaactccatgagttgacactagtgtagtcatgagactatttaaccctttcaagaagtgaaaactgctgcactagctgtgagggctgtggtggcggcactaatctctcatagactcctacacaacaactattctaatacgaacatgtttccttggctctcctttggtaagacttacctgtttctt

SEQ ID NO: 218557 - DNA, 400 bp, Homo sapiens
tgatattgctactctttcttcaatgtgacatgaacatgttaggtaaggtggtattttatctgtacattttaagtttttttaaaataaaataatgtataaaccataaatatataaggttgactaaaatatatacaggtgacttgtaaaatttctttccaactgtatggygggccagatatcttgactaaccctcctgttgaaaacaactaaaaattcaaaataaaatcctaaaaatactttatgactgaaaggtcaaaaccaagttaaagcaagaacccaaaaaggtaagccaagcactaaagatgaccttggtttcaagggaatttaccatcagaatgaaacttagcatccattttcacaaattaatgaaatgtacagagcagaagacaaagaaagccag

SEQ ID NO: 218558 - DNA, 557 bp, Homo sapiens
caccttgctgtaacaaatcagatgtgttctctacttggcttccatgttcagcctatggaagctcacttctcatgctcctgggtggagctctttgaacctcttctgattctgagtgctgcctggttcatgaatcattttttgctcaaataaattctgttaagtttaatttgtcaaaagtttttcttttcccagagtttacttcttaaagtaatgtagtgagtccttgttcaacagagccatggtttcttttagtgaggcacagcattagaatctaagattagagtgctaggtgtgttcatagttactgggatgcctttgtttctaggcctttttattgaatagagctagaaaatatctgcgtatatatacacacaggcaaatatatacctatgtggacacagacatgtatgcatacgctcatattrcatgcattacctacacaagtatgcttattgtagaaattatgaatttacactgattgctacattccaatccatcccacagggttctttctttttttgagacagggtctcactctgtcatgcaggctggagtgc

SEQ ID NO: 218559 - DNA, 563 bp, Homo sapiens
gggagtggatatggtgctttcaggtttgagtgtgtgcagtattagaaagaagaacgagagagttggaaatgaagctaaaacgatttctgtcattaaattaggacagatcatttcttcaggttactggtttcatcattgtttttccttagtctttgtttttggaaaacctgatggaaattgtaccttgaataaacaagttaacaaatatttatggattaactgaatatataatttgctttcacatgagagtcaatggaaaagcagagttcawacatagaatttcactttagtcaactttcaaggggtcattttttttaatttgcagaacaaattccatgaataataggacttggtcacggctcctaaccatctttcatccttgggtgtatccatcggcctaggaacacctaacaccacgtgatgtttaatcctacagcaaaccatcgacactttcagcttgaatgatcatgtatcacttagttttcaaggtaccaccttcacttctaaggataaaacaaaatccaaatgttagatttaatttttttccaaatattgataaactt

SEQ ID NO: 218560 - DNA, 563 bp, Homo sapiens
gggagtggatatggtgctttcaggtttgagtgtgtgcagtattagaaagaagaacgagagagttggaaatgaagctaaaacgatttctgtcattaaattaggacagatcatttcttcaggttactggtttcatcattgtttttccttagtctttgtttttggaaaacctgatggaaattgtaccttgaataaacaagttaacaaatatttatggattaactgaatatataatttgctttcacatgagagtcaatggaaaagcagagttcaaacatagaatttcactttagtcaactttcaaggggwcattttttttaatttgcagaacaaattccatgaataataggacttggtcacggctcctaaccatctttcatccttgggtgtatccatcggcctaggaacacctaacaccacgtgatgtttaatcctacagcaaaccatcgacactttcagcttgaatgatcatgtatcacttagttttcaaggtaccaccttcacttctaaggataaaacaaaatccaaatgttagatttaatttttttccaaatattgataaactt

SEQ ID NO: 218561 - DNA, 324 bp, Homo sapiens
gggagaggaggtgagagtgtgtttgcttgcatagggcgagggggagccaacatccgtgatcacagaatatggcacttgagatgactggcacccaggaggcccagctgccagtcccaggaacaaatgtaatgcccttgactggcttttggaaaaattgctggggttggtcaaggttgggcagaactctagccaggacctcccatggcccttccsaagatgagtccagggctcaagcaggatctctgggcttaaaccaatgtgcaccattggctctgcagggaggaaaatcaacaccagcccttccctcccctcccctcccccaag

SEQ ID NO: 218562 - DNA, 407 bp, Homo sapiens
aattcaagctatttccaaaagggcagcattttccaatctccatgctccaaatctctccatctaactgtacaaatagatgaattaaaaatactgggctagctgaattactgtcatagagaccttcaaccattttctcaccaaataagaaacagtggatggactgtcttcgaaattaggaagtaggcaatttctttttatctttgtagaatttaccatgctgtctatttctgctctaagatttcatacttcaagcaccatggtctacctttgcttactaaatagattaactgttaaaccctgcatatcatagactaaaccttattgytaagcattagtggtagatggttgccactttctttttacctttgtgtaaatacaaatcttttgccttcctcaaggtataggta

SEQ ID NO: 218563 - DNA, 358 bp, Homo sapiens
ctggttttataacaaatccactatcctgagaatgttattattatctccatgataatgacattctcaggagagaatcatggagataataatgacattattccatctcttaaagagcacacctttcaacattgtcacgttagggttacatttccaacacttaaactttggatggcacatttaaaccacagcagccactttytggatcatcaagagttatataggaattgtgttcacttgcataaatcctagaaaaaggcatataaatagaaaggatttttggctctccttttatgactctgtgcctaaggaaacctaaggattatatcatggaattcattgagggcataaatgtatgtat

SEQ ID NO: 218564 - DNA, 629 bp, Homo sapiens
gcttcttagctaatgtggctraaactatcacttaaagtgtcacacaaaccaaaaatttatttatataataattttgtttgaaaaacattttgctgaatcattgaaaatgttaaaattgatcatatatcccagctttgccaaaaattacactctgaaatcatagtaaagtgttcaagcagctaaactacatgagaattcaagaaagcccctggcatttattagcatacacaattcctttattagaacatatgtcagttctacatgcaatacaatgtcaccatagagaaaccattgacacataaaatactaaagaattatcacctgcatgctgtacattttataaagcatttcttactctttaaaatcatttttgcatttcatcccctcacaatcaccacttgagatgaacaaaatacttcattttacagaaggcaaaactaacctgaaaggtgacttggctggcagcagactctgtggaagggcctacatacccagaactctgcccaccagacctaactcaagtcaactgacaggtgaggagtcccttacttctttctcactgactactctactcagagccttaaaccgaagacgtattcaatgggagattcagagcctttacttgaaat

SEQ ID NO: 218565 - DNA, 629 bp, Homo sapiens
gcttcttagctaatgtggctaaaactatcacttaaagtgtcacacaaaccaaaaatttatttatataataattttgtttgaaaaacattttgctgaatcattgaaaatgttaaaattgatcatatatcccagctttgccaaaaattacactctgaaatcatagtaaagtgttcaagcagctaaactacatgagaattcaagaaagcccctggcatttattagcatacacaattcctttattagaacatatgtcagttctacatgcaatacaatgtcaccatagagaaaccattgacacataaaatactaaagaattatcacctgcatgctgtacattttataaagcatttcttactctttaaaatcatttttgcatttcatcccctcacaatcaccacttgagatgaacaaaatacttcattttacagaaggcaaaactaacctgaaaggtgacttggctggcagcagactctgtggaagggcctacatacccagaactytgcccaccagacctaactcaagtcaactgacaggtgaggagtcccttacttctttctcactgactactctactcagagccttaaaccgaagacgtattcaatgggagattcagagcctttacttgaaat

SEQ ID NO: 218566 - DNA, 364 bp, Homo sapiens
gaattccagtgtagattgctttgtgattgttttgccagattttgctttcacccacaaaaacactaagctctgccaaccagttcggccattttgtaagttagsaaaataaacactaaagtgaaatggcggcttttgggcggggctcccacaggctggctccttttaagtggaatgttgctgtgctgccctcttgtggccatttgggaaaccgcgattaaaaatggaacagtaagtgttaatggcacttcgtttcaaagtccagttccaagaaggttaatcactccgtttttacctacttcagaaagtattttgaagagataccaaattctttttatccacaagcaaaaggaagtggtaaaccttt

SEQ ID NO: 218567 - DNA, 364 bp, Homo sapiens
gaattccagtgtagattgctttgtgattgttttgccagattttgctttcacccacaaaaacactaagctctgccaaccagttcggccattttgtaagttagcaaaataaacactaaagtgaaatggcggcttttgggcggggctcccacaggctggctccttttaagtggaatgttgctgtgctgccctcttgtggccatttgggaaacsgcgattaaaaatggaacagtaagtgttaatggcacttcgtttcaaagtccagttccaagaaggttaatcactccgtttttacctacttcagaaagtattttgaagagataccaaattctttttatccacaagcaaaaggaagtggtaaaccttt

SEQ ID NO: 218568 - DNA, 509 bp, Homo sapiens
agttagccaacctcggcctcccaaagtgctggaattrtaaatgtgagccaccacgcccagccaagagaagcattttgaaatcagtattctgaaatctgaatgtcagactattttagttgcactgactgatatacaacaaaataaattaaactcacaggagcctcatgttcagaggcaaaaatgacctgcccaaattcagcagtgaggggttattagcagggctggacctgtgagggaatgccatcatgaacttcgtaacgtctacaggtgagcccagcctctaagctttgcttctctttttgctttgcttctctttttgctttgcttcccttgtatcaataaatgggagcccacctaggaaaatgcaattgcacaaaagaatctatttattatttatactttacctctttccataaaggatattaaactaaaatgtaaatgaaagcacattagacaccataacttccaaacaaatgttaattattattttcaaggtactaattattttg

SEQ ID NO: 218569 - DNA, 444 bp, Homo sapiens
acttattctccagaaaaggataaaagracctctgagcgggactgcacaggcacagatgagggctgagcccaccacactgaaaacaggattacctgagcacatgagcacagtcacacaggatgacccacacccaggtctctgcctctcacattccagagtggatggagccaggccttcacgctctggagagtcaggaaactggggcattcttcacaaaatgtgaccgccccagaggaaacaccaaatgatcctgactatctgtcagaagtttctgctacatcatcctataatgaaaactttcaaaggagatcaagccccaccacccacatgctcaaacttccaatcacatgtttcgtcctccactcttaaacatgagctgacaactgagggtcagcaaagccaccgaagcaaagtgtgtaacgtgaacaatggaaagcaaagaga

SEQ ID NO: 218570 - DNA, 458 bp, Homo sapiens
gatggagctggaaaccactatcctcagcaaagtaatgcaggaacagaaaaccaaacactgcatgttctcacttataagtaggagttgaacaatgagaacacatggacacaagcaggggcctgtcaggggtggtggcaaggggaggtagagcatcgggaaaaatagctaatgcaggctgggcttaatacctaggtgatgggttgayaggtgcagcaaatcaccatggcacatgttttcttatgtaacaaacctgcacatcctgcacatgtatcccagaacttgaaaagaaattcgaatgctacttttactcattaattctaacattactcacaaggggctagtgagattcgaattctatcatgagtgactaccacatttattacctggagtatgtgggtaaggaaaaactgcctcataataatcatttgtttaccctgatgtttagtttatacaagaat

SEQ ID NO: 218571 - DNA, 533 bp, Homo sapiens
agtgctttccatgaattagcttattttgtcattttgtttagaatcttatttttaaaaatcaaatataacaattaggactccactcaccaagattgctgataaattgcggtagtcttttggtgtcctgtacaaatcctctgtgtccaccctggaagtttctcacagaggatttcagcttcctgtgtttctctgagcgcattctctgcagtgcggataaccttgggggcaagttgactgcrtggtagaagttatgctcagcagtgactctcaattacaaagagagaagggttgatggataaactgcagattctttgccctccactgagttctacatggtctctcagagggtcaccagtaagactggaccccatttgcccacaacagtaacttgttctttactctccagtgcttctgctggcttttctttctgactacaaacttcctcatgttgcttcctggaatcacttccaaaataagctatttgtatcacaatactgactttgggtatattcaaagatacaagttcaacaatg

SEQ ID NO: 218572 - DNA, 399 bp, Homo sapiens
ctgtgaacctgtcaggaactgtcatagttcccagatctttgttatggtttttcctctgtcttgaatacctttcagaatagtacagtgattaagtacayatgaataagaatagtacagtgattaggcacagtgattaatacaatgattggaatcagacctagctcaaatccaagttttctcatttattagctgccttactggaatatttgggaaattaatttaacatctctgagcctacaaagtgtggactatagtaacaggagactcagtgagattatacttatagagagctgtatagtgcctagcaatgtaagtaaatattcaacaaatgtagattcctgtccctgccaaagacctatctatctttcaaaaccaacagaaaatactttacccccctcc

SEQ ID NO: 218573 - DNA, 399 bp, Homo sapiens
ctgtgaacctgtcaggaactgtcatagttcccagatctttgttatggtttttcctctgtcttgaatacctttcagaatagtacagtgattaagtacatatgaataagaatagtacagtsattaggcacagtgattaatacaatgattggaatcagacctagctcaaatccaagttttctcatttattagctgccttactggaatatttgggaaattaatttaacatctctgagcctacaaagtgtggactatagtaacaggagactcagtgagattatacttatagagagctgtatagtgcctagcaatgtaagtaaatattcaacaaatgtagattcctgtccctgccaaagacctatctatctttcaaaaccaacagaaaatactttacccccctcc

SEQ ID NO: 218574 - DNA, 399 bp, Homo sapiens
ctgtgaacctgtcaggaactgtcatagttcccagatctttgttatggtttttcctctgtcttgaatacctttcagaatagtacagtgattaagtacatatgaataagaatagtacagtgattaggcacagtgattaatacaatgattggaatcagacctagctcaaatccaagttttctcrtttattagctgccttactggaatatttgggaaattaatttaacatctctgagcctacaaagtgtggactatagtaacaggagactcagtgagattatacttatagagagctgtatagtgcctagcaatgtaagtaaatattcaacaaatgtagattcctgtccctgccaaagacctatctatctttcaaaaccaacagaaaatactttacccccctcc

SEQ ID NO: 218575 - DNA, 605 bp, Homo sapiens
tcaaaaccaacagaaaatactttacccccctcccctttccctacatcttttctttttacccattaatcattttcacctgccaaccatggtattcacaattccgtctaataatarctatatacatctcatttaacagtttataaatttcagatatgctaaaaacataatttattcatcctattagcttgaaaattcaacgtaagacctggcacaaagaagttatacaatgaactgtttctaacataacctaaaaaagccattcattgtgctgtttcctgtgtcatgaaaatagttacccataaaactaaatgtgtgcacatgcacataaactaaaccatcacaatttcggagtgttctaaatttctttccacttaatctttaaaactttctatgtcaatattgcacaacagaagcacaatattgcttctaacgatactatactctgtatgaacagaaacacaatcttaaaacagatgggcagatgaacggacagatacatagagacagaaagaacaaggtataacacacttaatatcagcatccctcacttaatgaagtatatgatccaattctaaatcagctagaaactgaattttatttcttct

SEQ ID NO: 218576 - DNA, 605 bp, Homo sapiens
tcaaaaccaacagaaaatactttacccccctcccctttccctacatcttttctttttacccattaatcattttcacctgccaaccatggtattcacaattccgtctaataatagctatatacatctcatttaacagtttataaatttcagatatgctraaaacataatttattcatcctattagcttgaaaattcaacgtaagacctggcacaaagaagttatacaatgaactgtttctaacataacctaaaaaagccattcattgtgctgtttcctgtgtcatgaaaatagttacccataaaactaaatgtgtgcacatgcacataaactaaaccatcacaatttcggagtgttctaaatttctttccacttaatctttaaaactttctatgtcaatattgcacaacagaagcacaatattgcttctaacgatactatactctgtatgaacagaaacacaatcttaaaacagatgggcagatgaacggacagatacatagagacagaaagaacaaggtataacacacttaatatcagcatccctcacttaatgaagtatatgatccaattctaaatcagctagaaactgaattttatttcttct

SEQ ID NO: 218577 - DNA, 622 bp, Homo sapiens
agtaccacctctagaatgcaacctaccttttatggtgactcttttggtctggcctcactctattttataaaaagattctacacttgttcatttaacatacaactaggactagttagttaaactctcaatatatactggaattaaactaaatctagattctataatttttatattctaaatcgttatatatttttcattagaaaatgtgtcaggggatagtggctcacacctgtaatcccagcattttgggaggccgaggagggcggattgcttgagctcaggagttcaagacaagcctatataacatggtgataccgcktctctacaaaaaaattttaaaactagccgggtgtggtagtgcactcctgtagttacagctactcgggaggctgaggtgggaggatggcttaagtcctttttgagtgggaccgtgtctcaaaaaagaaagcaacagtactgaccatttggagtatggcttcgtgttaggtactattttgaatcaccttccaatggtttaatgaacttgtactgaatggagatgtgccttggtgtgtgtttgtaaacaagtccaccagccaagacatacatgtgtaaacatcatcacacattatagcaggatgtc

SEQ ID NO: 218578 - DNA, 617 bp, Homo sapiens
ctcgttttttgcagataaaattttagatgtgttgcattcattgggtttctatgagatgtggttttatcagacaattttttcttttatttcacaattactttaatatctgtaaaataaagaattattttaattcattttcccagtcccaaaagttaaatacaggccacttacttctttaaccaaatgatatagtttggctctgtgtccccacccaaatctcatgtcaaattgtaatccccgcatgtcaggggagggacctggtgggaggtgattggatcatggggagggatttcccccttgctgttctgttgatagtgaacgagttctcacgaaatctgatggtttaaaagtgcagcacttctccctttgctctctctctcctgctgtgccatggtaagacgtgccttgcttcccctgtggcttccgccatgattgtacctttcctgaggcctctccagccatgtggaactgtgagccaattaaacttcttttctttagaaattatccagtcccgggtrgttctttatggcagtgtgaaagcagactaatacaccgaactatataaactcactaacggcatatgtcataagatttaaaagaaaataaaaaggttcagc

SEQ ID NO: 218579 - DNA, 604 bp, Homo sapiens
tgtcccccaccacctcccctggccctcttgttacacttyacatcctgaggcagcgctggtctgagcccggcccgccttagttctggcagttttcacatcacatattttgaagctttattttttggtgaatacacttttaaaattgctgtcttcttcatggattaaacctttgatcattatataatctctggttttggaagttttctttgctttatctgatatgcacacagacactcttgctttcctttcattaatgtttgtgtaatatatcttttttcatcctgttaatttggcctgccctgtattggtaaaattcaagtgagtttcttgtacacagcatacaagaaacatacaagaaagggtcatacttttaaatacactcttctattatctatctcttggtagaccattcataattaaatgaattattgatactttaatgcgtaagcctgacattttttgttttctctatcaattcttgtttctctgcttatttttcatgacttcatgtgggttacttgaacatttgttttagaattccattttgttatttatagtgtttatagtgtatcttcttttttatagtttttttggttgcatttta

SEQ ID NO: 218580 - DNA, 604 bp, Homo sapiens
tgtcccccaccacctcccctggccctcttgttacacttcacatcctgaggcagcgctggtctgagcccggcccgccttagttctggcagttttcacatcacatattttgaagctttattttttggtgaatacacttttaaaattgctgtcttcttcatggattaaacctttgatcattatataatctctggttttggwagttttctttgctttatctgatatgcacacagacactcttgctttcctttcattaatgtttgtgtaatatatcttttttcatcctgttaatttggcctgccctgtattggtaaaattcaagtgagtttcttgtacacagcatacaagaaacatacaagaaagggtcatacttttaaatacactcttctattatctatctcttggtagaccattcataattaaatgaattattgatactttaatgcgtaagcctgacattttttgttttctctatcaattcttgtttctctgcttatttttcatgacttcatgtgggttacttgaacatttgttttagaattccattttgttatttatagtgtttatagtgtatcttcttttttatagtttttttggttgcatttta

SEQ ID NO: 218581 - DNA, 604 bp, Homo sapiens
tgtcccccaccacctcccctggccctcttgttacacttcacatcctgaggcagcgctggtctgagcccggcccgccttagttctggcagttttcacatcacatattttgaagctttattttttggtgaatacacttttaaaattgctgtcttcttcatggattaaacctttgatcattatataatctctggttttggaagttttctttgctttatctgatatgcayacagacactcttgctttcctttcattaatgtttgtgtaatatatcttttttcatcctgttaatttggcctgccctgtattggtaaaattcaagtgagtttcttgtacacagcatacaagaaacatacaagaaagggtcatacttttaaatacactcttctattatctatctcttggtagaccattcataattaaatgaattattgatactttaatgcgtaagcctgacattttttgttttctctatcaattcttgtttctctgcttatttttcatgacttcatgtgggttacttgaacatttgttttagaattccattttgttatttatagtgtttatagtgtatcttcttttttatagtttttttggttgcatttta

SEQ ID NO: 218582 - DNA, 604 bp, Homo sapiens
tgtcccccaccacctcccctggccctcttgttacacttcacatcctgaggcagcgctggtctgagcccggcccgccttagttctggcagttttcacatcacatattttgaagctttattttttggtgaatacacttttaaaattgctgtcttcttcatggattaaacctttgatcattatataatctctggttttggaagttttctttgctttatctgatatgcacacagacactcttgctttcctttcattaatgtttgtgtaatatatcttttttcatcctgttaatttggcctgccctgtattggtaaaattcaagtgagtttcttgtacacagcatacaagaaacatayaagaaagggtcatacttttaaatacactcttctattatctatctcttggtagaccattcataattaaatgaattattgatactttaatgcgtaagcctgacattttttgttttctctatcaattcttgtttctctgcttatttttcatgacttcatgtgggttacttgaacatttgttttagaattccattttgttatttatagtgtttatagtgtatcttcttttttatagtttttttggttgcatttta

SEQ ID NO: 218583 - DNA, 516 bp, Homo sapiens
agtcccaaacccatgagaagccatgaggctgtttatttcacaggaatagacaggctgcctggctggcaagtggatagctaagcgtaacttcaagaaggggtccgggattctaaggtygtaaacctgacagccagcagggcagctttagtgagaggcaagaaatgtccctgaacaaggtattttttcctcctttggtatcttgggtctgtaccagttctgctggtggcttgatagatttttccaatgtttgagtctagggtcactggctcccaagaggggatgctctaccaagagtcctcagtgtatgggaagacaactctgtcttctgttcagagtgtggtgctcacaattttgctgttgcttccaggacatgagctcaccctcctgggctttgaagccatccttgtctctggtgtcccaggtgccctccaggtctggtgatgttagtgtcaaaaggagagccatgtcatggccagcaggttcctctatccttttggggcaacacactttaagctc

SEQ ID NO: 218584 - DNA, 511 bp, Homo sapiens
acccatgagaagccatgaggctgtttatttcacaggaatagacaggctgcctggctggcaagtggatagctaagcgtaacttcaagaaggggtccgggattctaaggttgtaaacctgacagccagcagggcagctttagtgagaggcaagaaatgtccctgaacaaggtattttttcctcctttggtatcttgggtctgtaccagttctgctggtggcttgatagatttttccaatgtttgagtctagggtcactggctcccaagaggggatgctctaccaagagtcctcagtgtatgggaagacaactctgtcttctgttcagagtgtggtgctcacaattttgctgttgcttccaggacatgagctcaccctcctgggctttgaagccatccttgtctctggtgtcccaggtrccctccaggtctggtgatgttagtgtcaaaaggagagccatgtcatggccagcaggttcctctatccttttggggcaacacactttaagctcact

SEQ ID NO: 218585 - DNA, 618 bp, Homo sapiens
ggggctgaatttggcataattatacttgactatacygtaaaagaaaccagatctaatataaggacatcaatacttagttattaattcatttgcttatatttatatgtcatttgaaaatgtgtattaacatacacaattaaagggatataaaaatgaacatgccctctccatttctttaaaagaaatcaaggctgaatcaaacaggactactgttctgaaagaatactcagactatgaggtaccttattttccttcttttacacctgtctttcagttggcttcaaaaaatcatggcttttactgtgtttcttttttcctttatgtcttccttttgagggaaatgaaaaattgagaaaggaaattattattttataagtgggtgggtttgaatacatctttcacagtcaaatatttttctatgccttatgagcttaaaaaataaatttagaaagtttgataaacacagaaattttttattttatgttattttatgagatgagggcttgccatgttatccaggctgtcctggaactcctgggctcaagctatcctcctgctttcagcctcccaagtagctggaactacaggtgcatatgacggcacctactgagaaatttt

SEQ ID NO: 218586 - DNA, 548 bp, Homo sapiens
ggtaggtatcattattcaaactttacagatgatgaaacaggctcacagttgacaggtaatttttkcagaaatcacaaagtcaaattggcttctggagtctgctgctctatcatgatgcctccatgtcaccactattaactttgcctgaaggaaccatgacttgcagtttctaccccacgtggtcagtgaccatgaatacaaatgacccttactccaggtgattctgaagtttcaggaggatgacagattccccctaaattttgaacagtaatattaattacaagtaataaaatataccaaaacatcactacaaaaatttagcattacttcatcaagaggaataaactgaaactgtcagtttcttggaagggtgagaggatagtttatcctgctttctaatacccaccacctatttgtgactataaacttcccaccacttatttatggttcaagcctagggcaagagctagcattttattttaaaaaagatttgtttaataatttttccatttggacagtgtgatggttaatactgggtgtcaacttga

SEQ ID NO: 218587 - DNA, 548 bp, Homo sapiens
ggtaggtatcattattcaaactttacagatgatgaaacaggctcacagttgacaggtaattttttcagaaatcacaaagtcaaattggcttctggagtctgctgctctatcatgatgcctccatgtcaccactattaactttgcctgaaggaaccatgacttgcagtttctaccccacgtggtcagtgaccatgaatacaaatgacccttactccaggtgattctgaagtttcaggargatgacagattccccctaaattttgaacagtaatattaattacaagtaataaaatataccaaaacatcactacaaaaatttagcattacttcatcaagaggaataaactgaaactgtcagtttcttggaagggtgagaggatagtttatcctgctttctaatacccaccacctatttgtgactataaacttcccaccacttatttatggttcaagcctagggcaagagctagcattttattttaaaaaagatttgtttaataatttttccatttggacagtgtgatggttaatactgggtgtcaacttga

SEQ ID NO: 218588 - DNA, 548 bp, Homo sapiens
ggtaggtatcattattcaaactttacagatgatgaaacaggctcacagttgacaggtaattttttcagaaatcacaaagtcaaattggcttctggagtctgctgctctatcatgatgcctccatgtcaccactattaactttgcctgaaggaaccatgacttgcagtttctaccccacgtggtcagtgaccatgaatacaaatgacccttactccaggtgattctgaagtttcaggaggatgacagattccccctaaattttgaacagtaatattaattacargtaataaaatataccaaaacatcactacaaaaatttagcattacttcatcaagaggaataaactgaaactgtcagtttcttggaagggtgagaggatagtttatcctgctttctaatacccaccacctatttgtgactataaacttcccaccacttatttatggttcaagcctagggcaagagctagcattttattttaaaaaagatttgtttaataatttttccatttggacagtgtgatggttaatactgggtgtcaacttga

SEQ ID NO: 218589 - DNA, 234 bp, Homo sapiens
acaaacaggtagtggaatattgaaagaaattttattggagcagcccaaaaaagcatatgtaccttagagtaatagtaattaaataagacagtgaaattaaagaagaagaacatatttagacagagtaacagaccaagtttagtttcgggagaattaagcagctrctctaaagactgtgtgtatgtgctggcggaagacacagactccgtatcagttgtctccatgccttctccc

SEQ ID NO: 218590 - DNA, 536 bp, Homo sapiens
ctttacctctgcagcttcttaattgttgctgctcacacctacagtgctcatacagttaagagcccagaatccagggcacggaactaatcaattacattgcctagcaagactttcctgtttgctgataaactgtaaagtgttattttttctgagacagggtctcactctgtcacacaggttggagtgcagtggcacgatcttggctcacagcaacctctgcctcccaggctcaggccatcctcccacctcagccccacaagtagctgggacttccaggtgcatgccatcccgcccagataatttttgtacttttaatagagatgggatttcaccaygttgttcagactggtctcaaactcctggcctcatgtgatccacctgccttggctcccaaagtgctcagattgcaggggtgagacaccacgcctggtctaaactgtaaagtttaccaggccctttgacatgtattggtttattgactcccaaaaatctgaagttcagagaaatttaatgactttgcccaaggtctcataact

SEQ ID NO: 218591 - DNA, 536 bp, Homo sapiens
ctttacctctgcagcttcttaattgttgctgctcacacctacagtgctcatacagttaagagcccagaatccagggcacggaactaatcaattacattgcctagcaagactttcctgtttgctgataaactgtaaagtgttattttttctgagacagggtctcactctgtcacacaggttggagtgcagtggcacgatcttggctcacagcaacctctgcctcccaggctcaggccatcctcccacctcagccccacaagtagctgggacttccaggtgcatgccatcccgcccagataatttttgtacttttaatagagatgggatttcaccacgttgttcagactggtctcaaactcctggcctcatgtgatccamctgccttggctcccaaagtgctcagattgcaggggtgagacaccacgcctggtctaaactgtaaagtttaccaggccctttgacatgtattggtttattgactcccaaaaatctgaagttcagagaaatttaatgactttgcccaaggtctcataact

SEQ ID NO: 218592 - DNA, 536 bp, Homo sapiens
ctttacctctgcagcttcttaattgttgctgctcacacctacagtgctcatacagttaagagcccagaatccagggcacggaactaatcaattacattgcctagcaagactttcctgtttgctgataaactgtaaagtgttattttttctgagacagggtctcactctgtcacacaggttggagtgcagtggcacgatcttggctcacagcaacctctgcctcccaggctcaggccatcctcccacctcagccccacaagtagctgggacttccaggtgcatgccatcccgcccagataatttttgtacttttaatagagatgggatttcaccacgttgttcagactggtctcaaactcctggcctcatgtgatccacctgcyttggctcccaaagtgctcagattgcaggggtgagacaccacgcctggtctaaactgtaaagtttaccaggccctttgacatgtattggtttattgactcccaaaaatctgaagttcagagaaatttaatgactttgcccaaggtctcataact

SEQ ID NO: 218593 - DNA, 577 bp, Homo sapiens
gaattcaagcagaaatttgaggaatgccagcggcttctgttagacataccacttcaaactccccataaacttgtagatactggcagagctgccaagttaatacagagagctgaagaaatgaagagtggactgaaagatttcaaaacatttttgacaaatgatcaaacaaaagtcrctgaggaagaaaataagggttcaggtacaggtgcggccggtgcctcagacacaacaataaaacccaatgctgaaaacactgggcccacattagaatgggataactatgacttaagggaagatgctttggatgatagtgtcagtagtagctcagtacatgcttctccattggcaagtagccctgtgagaaaaaatcttttccgctttgatgagtcaacaacaggatctaacttcagttttaaatctgctttgagtctatctaagtctcctgccaagttgaatcagagtgggacttcagttggcactgatgaagaatctgttgttactcaagaagaagagagagatggacagtactttgaacctgttgttcctttacctgatctagttgaagtatccagtggtg

SEQ ID NO: 218594 - DNA, 577 bp, Homo sapiens
gaattcaagcagaaatttgaggaatgccagcggcttctgttagacataccacttcaaactccccataaacttgtagatactggcagagctgccaagttaatacagagagctgaagaaatgaagagtggactgaaagatttcaaaacatttttgacaaatgatcaaacaaaagtcactgaggaagaaaataagggttcaggtacaggtgcggccggtgcctcagacacaacaataaaacccaatgctgaaaacactgggcccacattagaatgggataactatgayttaagggaagatgctttggatgatagtgtcagtagtagctcagtacatgcttctccattggcaagtagccctgtgagaaaaaatcttttccgctttgatgagtcaacaacaggatctaacttcagttttaaatctgctttgagtctatctaagtctcctgccaagttgaatcagagtgggacttcagttggcactgatgaagaatctgttgttactcaagaagaagagagagatggacagtactttgaacctgttgttcctttacctgatctagttgaagtatccagtggtg

SEQ ID NO: 218595 - DNA, 588 bp, Homo sapiens
cggcttctgttagacataccacttcaaactccccataaacttgtagatactggcagagctgccaagttaatacagagagctgaagaaatgaagagtggactgaaagatttcaaaacatttttgacaaatgatcaaacaaaagtcactgaggaagaaaataagggttcaggtacaggtgcggccggtgcctcagacacaacaataaaacccaatgctgaaaacactgggcccacattagaatgggataactatgacttaagggaagatgctttggatgatagtgtcagtagtagctcagtacatgcttctccattggcaagtagccctgtgagaaaaaatcttttccgctttgatgagtcaacaacaggatctaacttcagttttaaatctgctttgagtctatctaagtctcctgccaagttgaatcagagtgggacttcagttggcactgatgaagaatctgwtgttactcaagaagaagagagagatggacagtactttgaacctgttgttcctttacctgatctagttgaagtatccagtggtgaggaaaatgaacaagttgtttttagtcacagggcagaaatc

SEQ ID NO: 218596 - DNA, 465 bp, Homo sapiens
tgacacttttattacttaacgtcacaaccttatgaggtaggccagtctaagtgctgtcattttataagtgattaaaccaagactgagaataggaaatgagaaaaatcatgagctggccagggccaaacagaaagcaaggttggggccagctgaattcagaaacctcaattaaattccaagacaaaagggaacagccaacattgaaaataagttttatggatttcactttgaaataaaacaacaacaaaaaaattatgttaccattaaatgatattaaaatcgtcttttayggggcctcgattttgccaccaaggctttattcccaaaaattaaaataaaaaaaaatcaaacaggcaaatctattccaggttaaaaattccacttacacacaaaatcttgcattccatattgagaggttttttttcttaatttgcctattaatctgtattaagccaaaggtctttg

SEQ ID NO: 218597 - DNA, 541 bp, Homo sapiens
aattgcagtatcaaagtatatctgtgcatttataatttttagagctgttgccaaatatctaaccctaaagaggttgtatcaaattacatttccaccaccaattaagaaagtggtgatagaattaaaagccgatgctctagtcacccatatagttacttttggcatgtttctagtaagygggcattgcctatgactggacgttttcagtgatggacattcattacttttcaagatagcccagtgcatctttaggtggtttggctcttggtacttccttatatagaataaaaatattcttcaagccttctacctgttggtcttgtttcttcttttgatgatttcttttataaaataattttaatatttgaaggcagctgtcacgtcttcccttcgccattctattcatcatgctttttttttcttccataggttattgcatgaggatctctttaatttcctggttgtcccatttattctagtgctatcccctattatccatactctgaaaatgtgttatctacaatgtggcatttccaagtgt

SEQ ID NO: 218598 - DNA, 499 bp, Homo sapiens
caagcaaaaagaaaatttcctaggtaaaagktctaagatgctagaaagaaagacatgcaaaggaaacttaccaccatattacagatatggactgtcagtctgactggtcacactaggggcattttgttaccaaggccttgaaaataataaccaacactgcatacatgagggatgccagaagaaaggtctgagagccactcttcctggcactgaaggaaacagggcccatcagagcaaacaagtaccttttgcctctctcatctccttggaggcaaatgtttataatctctggttttgtgtaaagtttataacagtatttttcattcaggttgctacctattagtggatggtgaaattaatttggtggatcacattcaggatatattttttttaaatcaaaagaatacaagctgggctcaatgactcacacctgtaagcccaacagtttgggaagaccaggcaggaggattgcttgagaacaggagttcagaatcagcct

SEQ ID NO: 218599 - DNA, 574 bp, Homo sapiens
aagatctcttctggaaaacaaaaactttaagaatctgccttcactggaaattcttaatgatgtacttcaagcaaaaagaaaatttcctaggtaaaaggtctaagatgcyagaaagaaagacatgcaaaggaaacttaccaccatattacagatatggactgtcagtctgactggtcacactaggggcattttgttaccaaggccttgaaaataataaccaacactgcatacatgagggatgccagaagaaaggtctgagagccactcttcctggcactgaaggaaacagggcccatcagagcaaacaagtaccttttgcctctctcatctccttggaggcaaatgtttataatctctggttttgtgtaaagtttataacagtatttttcattcaggttgctacctattagtggatggtgaaattaatttggtggatcacattcaggatatattttttttaaatcaaaagaatacaagctgggctcaatgactcacacctgtaagcccaacagtttgggaagaccaggcaggaggattgcttgagaacaggagttcagaatcagcctgggcaaca

SEQ ID NO: 218600 - DNA, 559 bp, Homo sapiens
aaacaaaaactttaagaatctgccttcactggaaattcttaatgatgtacttcaagcaaaaagaaaatttcctaggtaaaaggtctaagatgctagaaagaaagacatgcaaaggaaacttaccrccatattacagatatggactgtcagtctgactggtcacactaggggcattttgttaccaaggccttgaaaataataaccaacactgcatacatgagggatgccagaagaaaggtctgagagccactcttcctggcactgaaggaaacagggcccatcagagcaaacaagtaccttttgcctctctcatctccttggaggcaaatgtttataatctctggttttgtgtaaagtttataacagtatttttcattcaggttgctacctattagtggatggtgaaattaatttggtggatcacattcaggatatattttttttaaatcaaaagaatacaagctgggctcaatgactcacacctgtaagcccaacagtttgggaagaccaggcaggaggattgcttgagaacaggagttcagaatcagcctgggcaaca

SEQ ID NO: 218601 - DNA, 567 bp, Homo sapiens
aagatctcttctggaaaacaaaaactttaagaatctgccttcactggaaattcttaatgatgtacttcaagcaaaaagaaaatttcctaggtaaaaggtctaagatgctagaaagaaagacatgcaaaggaaacttaccaccatattacagatatggactgtcagtctgactggtcacactaggggcatttkgttaccaaggccttgaaaataataaccaacactgcatacatgagggatgccagaagaaaggtctgagagccactcttcctggcactgaaggaaacagggcccatcagagcaaacaagtaccttttgcctctctcatctccttggaggcaaatgtttataatctctggttttgtgtaaagtttataacagtatttttcattcaggttgctacctattagtggatggtgaaattaatttggtggatcacattcaggatatattttttttaaatcaaaagaatacaagctgggctcaatgactcacacctgtaagcccaacagtttgggaagaccaggcaggaggattgcttgagaacaggagttcagaatcagcctg

SEQ ID NO: 218602 - DNA, 574 bp, Homo sapiens
aagatctcttctggaaaacaaaaactttaagaatctgccttcactggaaattcttaatgatgtacttcaagcaaaaagaaaatttcctaggtaaaaggtctaagatgctagaaagaaagacatgcaaaggaaacttaccaccatattacagatatggactgtcagtctgactggtcacactaggggcattttgttaccaaggccttgaaaataataaccaacactgcatacatgagggatgccagaagaaaggtctgagagccactcttcctggcactgaaggaaacagggcccatcagagcaaacaagtaccttttgcmtctctcatctccttggaggcaaatgtttataatctctggttttgtgtaaagtttataacagtatttttcattcaggttgctacctattagtggatggtgaaattaatttggtggatcacattcaggatatattttttttaaatcaaaagaatacaagctgggctcaatgactcacacctgtaagcccaacagtttgggaagaccaggcaggaggattgcttgagaacaggagttcagaatcagcctgggcaaca

SEQ ID NO: 218603 - DNA, 567 bp, Homo sapiens
aagatctcttctggaaaacaaaaactttaagaatctgccttcactggaaattcttaatgatgtacttcaagcaaaaagaaaatttcctaggtaaaaggtctaagatgctagaaagaaagacatgcaaaggaaacttaccaccatattacagatatggactgtcagtctgactggtcacactaggggcattttgttaccaaggccttgaaaataataaccaacactgcatacatgagggatgccagaagaaaggtctgagagccactcttcctggcactgaaggaaacagggcccatcagagcaaacaagtaccttttgcctctctcatctccttggargcaaatgtttataatctctggttttgtgtaaagtttataacagtatttttcattcaggttgctacctattagtggatggtgaaattaatttggtggatcacattcaggatatattttttttaaatcaaaagaatacaagctgggctcaatgactcacacctgtaagcccaacagtttgggaagaccaggcaggaggattgcttgagaacaggagttcagaatcagcctg

SEQ ID NO: 218604 - DNA, 574 bp, Homo sapiens
aagatctcttctggaaaacaaaaactttaagaatctgccttcactggaaattcttaatgatgtacttcaagcaaaaagaaaatttcctaggtaaaaggtctaagatgctagaaagaaagacatgcaaaggaaacttaccaccatattacagatatggactgtcagtctgactggtcacactaggggcattttgttaccaaggccttgaaaataataaccaacactgcatacatgagggatgccagaagaaaggtctgagagccactcttcctggcactgaaggaaacagggcccatcagagcaaacaagtaccttttgcctctctcatctccttggaggcaaatgtttataatctctggttttgtgtaaagtttataacagtatttttcattcaggttgctacctattagtggatggtgaaattaatttggtggatcacattcaggatatwttttttttaaatcaaaagaatacaagctgggctcaatgactcacacctgtaagcccaacagtttgggaagaccaggcaggaggattgcttgagaacaggagttcagaatcagcctgggcaaca

SEQ ID NO: 218605 - DNA, 466 bp, Homo sapiens
aagatgctagaaagaaagacatgcaaaggaaacttaccaccatattacagatatggactgtcagtctgactggtcacactaggggcattttgttaccaaggccttgaaaataataaccaacactgcatacatgagggatgccagaagaaaggtctgagagccactcttcctggcactgaaggaaacagggcccatcagagcaaacaagtaccttttgcctctctcatctccttggaggcaaatgtttataatctctggttttgtgtaaagtttataacagtatttttcattcaggttgctacctattagtggatggtgaaattaatttggtggatcacattcaggatatattttttttaaatcaaaagaatacaagctgggctcaatgactcacacctgtaagcccaamagtttgggaagaccaggcaggaggattgcttgagaacaggagttcagaatcagcctg

SEQ ID NO: 218606 - DNA, 497 bp, Homo sapiens
gttgtggaagacagacttttcagaattgtttgycctcattccctcctccagaaatgcatgcctttgtataatctcttccccttgagagccagtaggctaacctaatgagttatgtttaaccagtagaatacagcaagaatgatagattacaagagattgtggcttctatcttgctagcggcctctctctgtcttctctgcttgcacactttgttgaagcaagctaccatcccagaggcaaggaacacaggccatcagtttagcagccttgaggaactaaattcttccaactaccacataagtttggaagtagattcttctccagtccagccttcagatgagaccccagccatgccaacatcttgattgcagccctgtgagagaccttgaaatagaaccatttctgatctcctgacccacagaaactgtgaaataaatatgtgttaaggtactaagtttgtagtaatttgttacgcagcagattgtaaataacacgca

SEQ ID NO: 218607 - DNA, 479 bp, Homo sapiens
ttcagaattgtttgccctcattscctcctccagaaatgcatgcctttgtataatctcttccccttgagagccagtaggctaacctaatgagttatgtttaaccagtagaatacagcaagaatgatagattacaagagattgtggcttctatcttgctagcggcctctctctgtcttctctgcttgcacactttgttgaagcaagctaccatcccagaggcaaggaacacaggccatcagtttagcagccttgaggaactaaattcttccaactaccacataagtttggaagtagattcttctccagtccagccttcagatgagaccccagccatgccaacatcttgattgcagccctgtgagagaccttgaaatagaaccatttctgatctcctgacccacagaaactgtgaaataaatatgtgttaaggtactaagtttgtagtaatttgttacgcagcagattgtaaataacacgca

SEQ ID NO: 218608 - DNA, 479 bp, Homo sapiens
ttcagaattgtttgccctcattccctcctccagaaatgcatgcctttgtataatctcttccccttgagagccagtaggctaacctaatgagttatktttaaccagtagaatacagcaagaatgatagattacaagagattgtggcttctatcttgctagcggcctctctctgtcttctctgcttgcacactttgttgaagcaagctaccatcccagaggcaaggaacacaggccatcagtttagcagccttgaggaactaaattcttccaactaccacataagtttggaagtagattcttctccagtccagccttcagatgagaccccagccatgccaacatcttgattgcagccctgtgagagaccttgaaatagaaccatttctgatctcctgacccacagaaactgtgaaataaatatgtgttaaggtactaagtttgtagtaatttgttacgcagcagattgtaaataacacgca

SEQ ID NO: 218609 - DNA, 479 bp, Homo sapiens
ttcagaattgtttgccctcattccctcctccagaaatgcatgcctttgtataatctcttccccttgagagccagtaggctaacctaatgagttatgtttaaccagtagaatacagcaaraatgatagattacaagagattgtggcttctatcttgctagcggcctctctctgtcttctctgcttgcacactttgttgaagcaagctaccatcccagaggcaaggaacacaggccatcagtttagcagccttgaggaactaaattcttccaactaccacataagtttggaagtagattcttctccagtccagccttcagatgagaccccagccatgccaacatcttgattgcagccctgtgagagaccttgaaatagaaccatttctgatctcctgacccacagaaactgtgaaataaatatgtgttaaggtactaagtttgtagtaatttgttacgcagcagattgtaaataacacgca

SEQ ID NO: 218610 - DNA, 479 bp, Homo sapiens
ttcagaattgtttgccctcattccctcctccagaaatgcatgcctttgtataatctcttccccttgagagccagtaggctaacctaatgagttatgtttaaccagtagaatacagcaagaatgatagattacaagagattgtggcttctatcttgctagcggmctctctctgtcttctctgcttgcacactttgttgaagcaagctaccatcccagaggcaaggaacacaggccatcagtttagcagccttgaggaactaaattcttccaactaccacataagtttggaagtagattcttctccagtccagccttcagatgagaccccagccatgccaacatcttgattgcagccctgtgagagaccttgaaatagaaccatttctgatctcctgacccacagaaactgtgaaataaatatgtgttaaggtactaagtttgtagtaatttgttacgcagcagattgtaaataacacgca

SEQ ID NO: 218611 - DNA, 223 bp, Homo sapiens
gccaggctcagcttactagttaccctcagtcagcgggcacagtcatagaaacccacgagtcacaagtttattgagctccttctatgcataacacaccatgctggcttggggacagtgaaaaagtaatgtggcccctgctctgaagaagcatggagtctgtgtggagagaaaccagtatcygtgaaatagctatagagtctgggctcttagactgttagatctg

SEQ ID NO: 218612 - DNA, 223 bp, Homo sapiens
gccaggctcagcttactagttaccctcagtcagcgggcacagtcatagaaacccacgagtcacaagtttattgagctccttctatgcataacacaccatgctggcttggggacagtgaaaaagtaatgtggcccctgctctgaagaagcatggagtctgtgtggagagaaaccagtatctrtgaaatagctatagagtctgggctcttagactgttagatctg

SEQ ID NO: 218613 - DNA, 223 bp, Homo sapiens
gccaggctcagcttactagttaccctcagtcagcgggcacagtcatagaaacccacgagtcacaagtttattgagctccttctatgcataacacaccatgctggcttggggacagtgaaaaagtaatgtggcccctgctctgaagaagcatggagtctgtgtggagagaaaccagtatctgtgaaatagctatagagtctggrctcttagactgttagatctg

SEQ ID NO: 218614 - DNA, 569 bp, Homo sapiens
acatcccaagttccactcttttcccattcctccatggcctggtctctgtcactgtcatgaggactggaagctaacacaccaagtcacactcacgtggggctgctgggtggccagcttgccacatcccatgccactgcctggaggcaccacacagagggactcctggcattgaggcaaacacatggcagcagtatttcagaagaccactcttctggggatccctcaggtcaaaccatgtaggtaggtgattgtttactgtacctcagcagaatttaaagggattcaaaggtgtgtggtgaaacagcacacargtatagtcactaaggagacaaaagaatcagaagctcagggactgactggcctttgtggttcctaaaggagaaacttttactcaagtaaaggttgtgaaaggaaaataaatctcaggaccccaaagtcactaagccaagagaaaagtcaagctgggaactatgtcaggaaaacctgcctccgttttattcctgagtaagatagctacaaagatacctccctcacaatttgcccacaggaaattccttgtggacaaagag

SEQ ID NO: 218615 - DNA, 545 bp, Homo sapiens
agcttttagttttcttcaccctgttcagtacttctgagtatctcctatgagctcattaatctttaattttaatcatcttattttwaaaaaacaaggaccatcttgatatatgtttacttttattaaggaaaaagaatctatgaacacaggaacagaaatcaggagatcttggctctcgccctttcagtgccacaaagctgttttgtgaacctgtaaataatccatttggagtctccatgtttctcaattgtaaaatgacgatgtgctgcttctacacatttcacagggtcattgcaagaataaaatgagacaatgagaatgttggatttacatgcttgtataagaacagaagaccttttatgcctgtacacagaagaaatggaaatcatgacccacaaggcaccaaataactgactgcacacatcactaaaaaagccccaggaaaggctagccggtttgtttatcctcttacaaggacctatatgatgtgtaaggttttaagaaaacaaggtttgaacgttagacatttcatatacttatctatg

SEQ ID NO: 218616 - DNA, 545 bp, Homo sapiens
agcttttagttttcttcaccctgttcagtacttctgagtatctcctatgagctcattaatctttaattttaatcatcttattttaaaaaaacaaggaccatcttgatatatgtttacttttattaaggaaaaagaatctatgaacacaggaacagaaatcaggagatcttggctctcgccctttcagtgccacaaagctgttttgtgaacctgtaaataatccatttggagtctccatgtttctcaattgtaaaatgacgatgtgctgcttctacayatttcacagggtcattgcaagaataaaatgagacaatgagaatgttggatttacatgcttgtataagaacagaagaccttttatgcctgtacacagaagaaatggaaatcatgacccacaaggcaccaaataactgactgcacacatcactaaaaaagccccaggaaaggctagccggtttgtttatcctcttacaaggacctatatgatgtgtaaggttttaagaaaacaaggtttgaacgttagacatttcatatacttatctatg

SEQ ID NO: 218617 - DNA, 545 bp, Homo sapiens
agcttttagttttcttcaccctgttcagtacttctgagtatctcctatgagctcattaatctttaattttaatcatcttattttaaaaaaacaaggaccatcttgatatatgtttacttttattaaggaaaaagaatctatgaacacaggaacagaaatcaggagatcttggctctcgccctttcagtgccacaaagctgttttgtgaacctgtaaataatccatttggagtctccatgtttctcaattgtaaaatgacgatgtgctgcttctacacatttcacagggtcattgcaagaataaaatgagacaatgagaatgttggatttacatgcttgtataagaacagaagaccttttatgcctgtacacagaagaaatggaaatcatgacccamaaggcaccaaataactgactgcacacatcactaaaaaagccccaggaaaggctagccggtttgtttatcctcttacaaggacctatatgatgtgtaaggttttaagaaaacaaggtttgaacgttagacatttcatatacttatctatg

SEQ ID NO: 218618 - DNA, 339 bp, Homo sapiens
ccactccatgtggcccctgttgtgttgggaaggcaagggccaaaaatgtgaacacgaagctcatgctgcttcccttgatataagaaacacagttcttccctctaactcaggagtctaatgtctcctgttgacatgaaggtttgcatgaaacatgacttcagttacgttgaaagtatggtaaatttcagacccttcagaggtctttaaaaggaagacaaagtccaagagaacactgtaataatcatcrctcatgacaagaaggttttttttttttaatttgtctatgtgtgggaagcagatttatagtgaagccgttaactgggctacagagcgcagaaa

SEQ ID NO: 218619 - DNA, 339 bp, Homo sapiens
ccactccatgtggcccctgttgtgttgggaaggcaagggccaaaaatgtgaacacgaagctcatgctgcttcccttgatataagaaacacagttcttccctctaactcaggagtctaatgtctcctgttgacatgaaggtttgcatgaaacatgacttcagttacgttgaaagtatggtaaatttcagacccttcagaggtctttaaaaggaagacaaagtccaagagaacactgtaataatcatcactcatgacaagaaggttttttttttttaatttgtctatgtgtgggaagcagatttatagtgaarccgttaactgggctacagagcgcagaaa

SEQ ID NO: 218620 - DNA, 537 bp, Homo sapiens
atagcaggcggtacactggtgagtacctcatgtcgaggggattgggaccaaagtgaaatatatgaaaaggtttctgcattaaaattgagatttttcatttttgaaacacacatttgttaaacaccttctttgatggagagagtattgtatttgaaaatagaaaaatgagaaaaagtctctgtcttcatgtggtttctagcagtaaagaaagcatgcgtacatgtaagtaatccacaagatgatgtgattatttccagaaatcagatatataaggcaggccrtgagagttcatggaggaaaagaagggtctttttgctgatatatccaagaaagactttgcagttacattaaacgtaaatgtactttatgatacatccattgtacccctggatatttatccaagaaaaagtgaaaactgatatatacactactatttacagcagctatatcatccaagtctaaaattaggggaaaattttattaacagtaagtaaattaggtactataaataaacaataaaaatagcaaactttgctg

SEQ ID NO: 218621 - DNA, 550 bp, Homo sapiens
aatcagctagagtaataatttatacatgctagaaacttcatttcttttattccttcttacctgactttcataaggaaaattttgaaattcaggtgttagagatcagttagagttttcttagtagaggaattaaaaatttcaacaaagtttataaaaccctggagttgtattaaaagaaaatcaaaccttaaaaagtgaagaatctaaacctcaggtcraaacagatacaaggaattggataaactgcaagcataactaaaggcttttagccctggaagtacgtcagtgaagaaccaagagttaaattgggtctggtccctgagaggtgaactgttgtactgatattttatacctttgacttaggatcgttggctctgttagtcttagtaatcatgaaaactgaaatgctgcctggctgaatcttagggcaaatactgacacctgtacctagcgaggaaattactaaacagttgacagggatataaaataggaaaaatctatctgattaagaattagaatacagaagagtggttagcatcagagttagaag

SEQ ID NO: 218622 - DNA, 519 bp, Homo sapiens
ttcaaaagtactaaacaaccacaaaccttttgttcacatatttttaaatgtacagagggagataaaaagcaatgaagaatatacatttccatttatttattactctctatattactatttttaagaactttgttataaatactgctctacgtaaaaatgatggaaaatacttactagagggtagcatggtatagcacaatatgcaatgcatcaggcttgggtagctctaggctaatttttgttgctcctcggttataagtctgaacatgtcatttaaggtgtttygttttcccatttataaagtgggaataagaaaatctaatccccattatttattgattgagttatactatgtttatttcccaaaaggatatctaggaacttcatagtatttacatacaaattttgcttgtttgctagacaatgccactgcttgttaacatactaattcacattaactagtgagaggattttagctttcactgttaataagctcaatacaagccaatggtgtcctgt

SEQ ID NO: 218623 - DNA, 510 bp, Homo sapiens
aattttttttttcactgacttttgctgtctaattagaatgtgtctttaattagttttctttgtatttctgcacttgagctttcttgtattattcggatctgtggatttacagctttcatgaaatttgggaaaaaatgcatattattttgttaaatatttgttctgcaactctttctcatatctctttcacattaagtatattaagctgcttaaagttactgcacagctttctgakgccttttaactctttgagttttattttatatagtttctatagttatatcttcatgtacactattcattttttggcaacatctactctgtctttatttcagtcattatatttaccatctcatatattgtagttattacaacttatatctagaatttatatttgcattttttttacctttcaggactctttaaatttttgatcctttggagtacaattatacttactatttcaatattcttgtctgctaattctaacatttctatcagttcttatta

SEQ ID NO: 218624 - DNA, 563 bp, Homo sapiens
tccaggctggctatcaggttgctgtaagttgggtcacaccccaccatatcatgcacatgacagcagattataggtgatatggtttggctgtgccttcacccaaatcttatcttgaattgtagttcccataaactcgatgtgtcatgagagggaccttgtgggggggtaattgaatcatgggagagttacccttatgctgttctcctgacagtgagtgagttctcctgagatgatggttataacgggcttttcccctttgctcagcacttctctctcctgccaccatgtraagaagaacgtgtttccttccccttctaccatgattttaaatttcctgaagcctccccaatcatgcagagctatgagtcaattcaacctctttttttttttttttaataaataacaagtcttgggtatttcttcatagcagcatgagaacagactaattacaataagcttgagttgatatctcctgagtaatcatacacagagctgcatttgaaaacatttgttgtggcacaaagtaggcactgaagaggtattggtggaataaattaatgaat

SEQ ID NO: 218625 - DNA, 523 bp, Homo sapiens
tgtacactcccaccaacagtgtaaaagtgtacccttttcaccacatctgtgccaatatctattattttttgaatatggccattcttgtaggagtgagatggtatcgcattatggttttgatttgcatttccctgataattagtgattttgagcatttttccatatgcttgytggccatttttgtatcttcttttgagaattgtcttttcatgtccttagaccactttctgatggggttgtttttttcttgctgatttgtttgggttccttgtagattctggatattagtctgttgttggattatagattgttaatattttcccccactctgtgggttgtctgttaactctgctgattattattatttttgctgtgtggaagctttttagtttaagtcccatctatttatctttgtttttattgcatttgctttggggttcttgatcatgaagtctttgcctaagccaatgtctggaagagtttttccgatgttatcttctagaatttctatggtttcagatct

SEQ ID NO: 218626 - DNA, 566 bp, Homo sapiens
ctgaaatcttcacatcactcaagctaaatattttccatcggaaaaaggatagttactttcccctctaccacccacatccccaagctgaagatacaaaaataaaggttccagatgtttgtcttgttttgaggtcagaccccaagatgggcatttctgacagccttatcaggtatctgccagaatcaagtattttggtcgacatttgactcaacttgtctgatttaaccatctctaaaatagaactgagaggaggtgagagaacacataacttttgattsaatttctctgaatttttggaagaactagatcagggctgtccaatgttttggcttccctggccacactggaagaagaacaattgtcttgggccacacataaaatacactaaaaacagctgatgagaaaaaaaaaatactaaaaaaaacccctcacattttaagaaagtttacaaatttgtgttgggttgcattcaaagccatcctgcatgtggcccatgggctgtgggttggacaagcttgaaccagacatatggctctcaaacctcactatacattagactcacagag

SEQ ID NO: 218627 - DNA, 566 bp, Homo sapiens
ctgaaatcttcacatcactcaagctaaatattttccatcggaaaaaggatagttactttcccctctaccacccacatccccaagctgaagatacaaaaataaaggttccagatgtttgtcttgttttgaggtcagaccccaagatgggcatttctgacagccttatcaggtatctgccagaatcaagtattttggtcgacatttgactcaacttgtctgatttaaccatctctaaaatagaactgagaggaggtgagagaacacataacttttgattgaatttctctgaatttttggaagaactagatcagggctgtccaatgttttggcttccctggccacactggaagaagaacaattgtcttggrccacacataaaatacactaaaaacagctgatgagaaaaaaaaaatactaaaaaaaacccctcacattttaagaaagtttacaaatttgtgttgggttgcattcaaagccatcctgcatgtggcccatgggctgtgggttggacaagcttgaaccagacatatggctctcaaacctcactatacattagactcacagag

SEQ ID NO: 218628 - DNA, 582 bp, Homo sapiens
atgtcaatgtacctcctaataaaatttctataaccagtgacaaagaggacatcctgaaaatagccagaaataaaagatacagtatgtacagagaagaagaacaacaaaaagaatggtagcagacttckcataaaaaacaaggaagtcagaagacaatataagacatgatgaggtacaagaaggaactgtcaatctagaattgtttaccccgtaaaaatatctttcacaattgaataaaaaacagagtttaaacagttttgccagcagatctgcactataagaaatgttaaaggaagttcttcatgaaaaagtaaaaggacactagacagaaattttgatctacacaaagaaataaagagctctagaaatggtaaatatgtcagtaaatctaaaagttattttcccaaaatttgaaactctttaaaagcaaatactctttaaaagataatatatgactgtttaaagcaaaatggataaccatgtattaagggcttgtagctatgtacagaaaaaaaggtatgaaaacattaacacaaatgaaaggaaagcagaagtgagaatacattgtgtaaaattcttaca

SEQ ID NO: 218629 - DNA, 533 bp, Homo sapiens
tatgcccagttgtttacatatcatccttggctcttttcytctcataatatttactgtctgtatgtttataggaaaaggtttgctttagcttatgcatagacaattattttaatgtcactattaaaaataataatttcttaatagtttaaatatcacatttacatagattaatttccaatcatgcatattgttttgtaccactactatttgttttgttctctcatctgtttattcctgtgtcaatactgctcttataatacctttgtgtacatttaaaaccttgaaaagcaaattacttttcattatttactttcaaattttttctaggaatttcccatgcatttattttttacataaagtttagaaaaaaaatttccactttaaaaaactgagatcctgattactgttatagtaagatgacatatcggtttaaataaaattggaaatattgtgatattaaaagtcttccaatccagaaacatgctatgtctttctatttattcatgttttagtttatgtccttttataacttt

SEQ ID NO: 218630 - DNA, 631 bp, Homo sapiens
tttcagaataaggagttggtataccacaaagctagagcccaggaccgtgtgacactaagccttattaaattgctctttaactggagagtttaaaatgttgtaagaataaaagcaaagtctaaatgtcccagttcttttttggcagtcaggtggctgtggagccaggatccctgagattccctggtgcggctgtttcagaagaaatgtcagaggtcacgaggcgtcacttggttgcacttcatagcagttactgccctttgcaggctgattagccatcgcgatcaacctggagtttcaacacctagayggccaagagtcaggtttaattaatagcttggtgtctgagtcatatccatttattgcctcactccccctgcccatgctcctggccacaagggctggaagagcgtgagagcacgtctgctcatctccttctcactagctttccagggaagtcaggtgcctttggaagaagagaattatgtgagtaaatacagtgtttcttctccatccccatgggggtgggcctttgtcagcatcagcagaaaatcatagattggaagcgactcgatgattctgctgagctcggcctagcatagcagctggaacaaaacacatttctatgtgccca

SEQ ID NO: 218631 - DNA, 589 bp, Homo sapiens
aagcttctctgttctagaaacatttrttttgttaattttacacaaaatgtcatagtttaaaaaatatctgcatatctggaatatagggagtacttaatgagtgtttattgaatgaatgagtgtgtgaagggagcaataacaaaaattacaacagaaaacaattccacaacggcacttccagaataaatggattaaatctcaatccttcttttctagggctcttgtatggttggagctgcttacttagatagtagtgataattctcatgcacggagaccaacaggagccaattcccatagacacactgtctctgtcaacctaaataacagaaagactctctaaaagaaaatgatatttatttgggaatagggcattgcaatgagaagatgagtgccacagtgaactatgtgtatgttcagggagataaaagaagacaaaggtttttaaaggaaaaatgaggaggattacaccactgttttgagataattatcttcggctacaagggtcaataacaacggtgatgccagttgaggttgcacaggaagttcctgggcaggtgtccttacagaagtatttttcgtgggaagta

SEQ ID NO: 218632 - DNA, 505 bp, Homo sapiens
tctcataagtgtttccttgaccaggtcattttatgcctctatttttatttcatcttgcagtttattaactcctcaaaggcaagatttcttgactacgttctttgcggccccttttttttcatttaatccctttttcaaaatggtcattggtatttgtataccagaaagcaatggatatttgttcatrtctacatgcatatacacacagtttctaaacaatgctaatatcatcacctctggtgataaaattaagaaacaaattaataactaggccccttttttcagataatttgtttacatctgtgagatgaaaattctgtctcaattttctatataattttggtccagaaattctatcctctttcatccttgcttactaacatgcagagtgtttttctttctattgtttttaacaataagtactgaagccctcctaactgtcccctcaaaactgtgaactgttagttggttaatatttcaaaacttttacatgaaatgcatatat

SEQ ID NO: 218633 - DNA, 472 bp, Homo sapiens
gcagacaagttagaggacatttctgaagccacacagcaattgaaaggtgaagccaaaattgtaacccaataccgtctgactctagaactcaagttcttcccactacatattgatgcctgctgaatatcaatgaatgctcaatcattacattttcaagatgaaccaaacccatacagcagtctaataagcatgcaaaccagtaagaccacatacatattctttcaagcttttcctaattttcacttaaatgtccaagcaaagaatcattctcaagttccctaaggaatacaatccatgcaatatacttgaytggtttattaagtatctcctcttcccttgttgtctctctctttttctttctctctctcttttatacagttcctagcatagtaccagatgcaccagaagttccaaagagctgaagattcttaaagcatttaaaccattgaatgtaatcactccttctctcttt

SEQ ID NO: 218634 - DNA, 472 bp, Homo sapiens
gcagacaagttagaggacatttctgaagccacacagcaattgaaaggtgaagccaaaattgtaacccaataccgtctgactctagaactcaagttcttcccactacatattgatgcctgctgaatatcaatgaatgctcaatcattacattttcaagatgaaccaaacccatacagcagtctaataagcatgcaaaccagtaagaccacatacatattctttcaagcttttcctaattttcacttaaatgtccaagcaaagaatcattctcaagttccctaaggaatacaatccatgcaatatacttgattggtttattaagtatctcctcttcccttgttgtctctctctttttctttctctctctcttttatacagttcctagcatagtacmagatgcaccagaagttccaaagagctgaagattcttaaagcatttaaaccattgaatgtaatcactccttctctcttt

SEQ ID NO: 218635 - DNA, 440 bp, Homo sapiens
gaacacagtgaaaaagagggcagaaacaagaaagttcagtacatgtttgaggaactgcaaacaatgcagagtggctgaaataaagatatactgaggaaagtttgtgactcaggccctggagggaacctgggctgagttgtcaggagccatccacaaataacgcactatgagttyttctctggtttgtatgttctttcaattaaatactcagctatttgaggacagaagaatgctgtagtcaggtccagctcacttctcaagagtcggagaaagcaaaccaggcaacaggaaagccaaagacagaagacaacaagcacaactcatggagccgactcacaagagcacaaagtaaggaactgaaaattgcaggtggcagcaaggcctgggaaaggggagagaagcttcatgtctaagctaggttctgtgtgagacattctcct

SEQ ID NO: 218636 - DNA, 448 bp, Homo sapiens
ataaattgtttgtctaggagggtatttcctaggttttcttctaggatttttatagtttgaggtcttaacatttaactctttaatccatctttttctaaaacaaaattatcatttttaatttttgtgggtacatagtagatattaatacttatgggttatataaggtatttcratacaggcatgcaatatgaaataatcacatcaagataaatggggtgtccatcacctcaagcatttattctttgtgtgtcaaacacttctcattagaagtgtgcttctctgggtgaagcaggttggcacttcaattgaaccaagtacctttctctttggcttccttctttatctgatcattttccttcatacgtttcaggaagcgatctcctctcttagagtgcttaatgtgctccacacacacattctcttggcaagaatcttgccctaaattgtt

SEQ ID NO: 218637 - DNA, 452 bp, Homo sapiens
caccatggaatactactcagccataaaaaagaatgaaatattttgcagcagcatggagatggaagccactattttaaagtgaaataactcaaaaatagaaaaccaaataccatacagtcttacttataagtgggagctaagatataggtttgcaaaggcatacagagtggtgtaatggacattatagactcagaaggggggagtgtggaatggggttaagggataaacagttgcttattgggcataatgtacacttctcaggtgatgggtgccctgcaatctcagacttcacaattctacaattcatccatgtaaccaaaaacaaccacttgtgccccaaaagttattgaaattatatatatgtgtayttttttaaataaatatgtttcatattctcaagtaatcaccttgcagacagttctatgtcttggcatccctggggtccacaacag

SEQ ID NO: 218638 - DNA, 574 bp, Homo sapiens
aaagcttcatacgctgcttgtttttcttaggataactttgatttcagtaatagaaaacctgtctgtagtagctttaaaaatgaagaaaatgtagtatctcatgtaggaagtaccaaggtagcagatgctaagtttggttaatttagtgggtcaaaaatgtttaatgttgtcaagtttttctcgtctttctgaaattctgccatcctcagcttgctgaccttgtccttagctagttctcctcaaggtctcaaaatggctgccatagttccaggcatcactttaagacatggcaaaggccagccaaaaaagttgactgttctcaaatttttaagagtggagaaattataccaaagatccctcagatcttttctcattggccagaaccagggcacgtgactatctctaaactaycactggcaagagaggcaagattatcagaattgataactaatcaggatttagtcttgaattattttgagggtaaggggagcggtgcaggagagcagggaattgacaggacaggcaatgccaaaacaaaagctgaattttagtccgtttcccagtcatcaatttc

SEQ ID NO: 218639 - DNA, 534 bp, Homo sapiens
atggagaacagcagggacagttagtctaaatttttaattccactctgcctggctttctcatactacatatagtcattaggcccaagaagtcattaaagtgtttaataaggttattaaattgactaactgcagctgctgaagcaattttcctaggaaatccatatgattctaggtaaggggctgtggaactgtcctctgtggctgacagcctgtcaacattcctttgaaggatggcgggcagtgtcgtgagggatgcgtctaattaagagattagaggtgaaccttggcttcctgggtgtgctatttgtagctgagagtatggggaaacttcactaattcctactaattgcagaktgggggaggaggagacccatgtgaattatagaatattttaaaataagtgtacttttattactttcaagtacatattttaactcccactaggccaacaaattgttgcctggtacaagtcttaggggactaagttactgaagctatcagaaggattttcaattatttctatgtaaataggtg

SEQ ID NO: 218640 - DNA, 534 bp, Homo sapiens
atggagaacagcagggacagttagtctaaatttttaattccactctgcctggctttctcatactacatatagtcattaggcccaagaagtcattaaagtgtttaataaggttattaaattgactaactgcagctgctgaagcaattttcctaggaaatccatatgattctaggtaaggggctgtggaactgtcctctgtggctgacagcctgtcaacattcctttgaaggatggcgggcagtgtcgtgagggatgcgtctaattaagagattagaggtgaaccttggcttcctgggtgtgctatttgtagctgagagtatggggaaacttcactaattcctactaattgcagattgggggaggaggagacccatgtgaattatagaatattttaaaataartgtacttttattactttcaagtacatattttaactcccactaggccaacaaattgttgcctggtacaagtcttaggggactaagttactgaagctatcagaaggattttcaattatttctatgtaaataggtg

SEQ ID NO: 218641 - DNA, 603 bp, Homo sapiens
atttttgttttcagtatttggggaaagaaaatttccataatataaactaaaatgctacctagtgtcatcaactattagcctaaacttttagagtattttcacatgattgtatcacaatgtgagtactctctaatttaaaataaatcctgcccaacctatacagcatgaaaagaaaattaaaaatcccataattagaaaaatgtgctgacccccaaacaattagggaattcccacataattatatagttttcaggcaaaattacttaatatgtattgwaactgataactggtttgactgatattttcaaggaggattttaggatcagaaagaagtgtcattaatgttatcatttccagaaaaagaataaatgtaaaataaatattacacttacttataatttttgacttatttatcataggtcaggaacttgtcttgacttttttacttaaacttatgaattattagtggccaacatttaatcaatacattggagcaaatgccaaaggctgatgtcagagtaattagaaatgatgtgtgctgtaatgttttgagatcccaggagcaaacacataattgataaatgatagctcccaagcattacc

SEQ ID NO: 218642 - DNA, 506 bp, Homo sapiens
ccaatagctaggaatgcaaggcaaattgtttgccatcaaccatttaactgggatgatatataaccatttttttaagtgggaggaagaattatattttctatttgaagatggcaagatctacttttcaaaagtctttacatgtaagtgaattagctgctgtagttttaaagaagtagaacatctgggaaacaagttttattgcttaaacatgtggtgcttccctactggagaaaaactacattaccaagtgaaacagcagaaaagttacagtgtatttaggattagaaataaagaaatataaaagcaatatattgaattcaagtgaaaytagagactgtttactatttaaaacagtgaaggttttattaccaagtattacatattggcaaataatagaaatacagaatgtggtgtggaaggtggttgctatcacacttcaacacatgccaaaaaagctttgtgttgcactttgaccatctccaatacatatttatagggaacagcat

SEQ ID NO: 218643 - DNA, 506 bp, Homo sapiens
ccaatagctaggaatgcaaggcaaattgtttgccatcaaccatttaactgggatgatatataaccatttttttaagtgggaggaagaattatattttctatttgaagatggcaagatctacttttcaaaagtctttacatgtaagtgaattagctgctgtagttttaaagaagtagaacatctgggaaacaagttttattgcttaaacatgtggtgcttccctactggagaaaaactacattaccaagtgaaacagcagaaaagttacagtgtatttaggattagaaataaagaaatataaaagcaatatattgaattcaagtgaaactagagactgtttactatttaaaacagtgaaggttttattaccaagtattacatattggcaaataatagaaatacagaaygtggtgtggaaggtggttgctatcacacttcaacacatgccaaaaaagctttgtgttgcactttgaccatctccaatacatatttatagggaacagcat

SEQ ID NO: 218644 - DNA, 542 bp, Homo sapiens
tgagaaaatattatttcagtgttgaaaattattatctgattcaacaaagaagttgctcatgtctttgacaagggagggaatttccgacgtacatctgccttgttacaccttcaccatacyctttaacataagcaaaaccttcatggcagacttgcactcattcattgatgacattagtgacatatttgctgaatcagatagtaatcaagcctttatttgtagtcttgttttaacaaataacgatagaattgcaccagagattggttacataggcaagagtttagccaaaatcaatgaaagctttcatttaaaataaattggctagaagaatttacaatacagagtatgatatattttagagtaatttgtaaattcagtgccatgcatgttaatatcagcaaaattttttaaatatactcttgtgtgtataaacacacacatacacatttttttttctagagaatcagttgttaaatatttactaacactaacactaaaaacttttattgcctgtgacaacggagaattcccaatttgaatag

SEQ ID NO: 218645 - DNA, 648 bp, Homo sapiens
gcccaaggagagtgaaaaagacaaaaagagtcttctggtctgggccatatgttctgtgggtcttgcgaggaagagtctgtgatgtggcagagccttcagtggcagatgccaagttcttatcatgagtgagagcaaaacagttgtggattaagatggccatttggagctactgaaggcctgctctttttatgaccacagagtcatctggtgacggttgatagtggaagagtgtgcttgtttatgttcatacctggttggatacagtctctatatttttatttgtttattaagtaaaatatcaaatccttgttggcaaagttccctatgacatacaaaatagagtctttttctaagatgaagtgagttatgtcaagggtgctctatacagttttcaagatctgtggtgaagataataactttatgtttttctcttttaatttgttagtgaggaaatgcaaattgaattctttaagtaagatctagtttattataaagcattattcttttcctattaaaatttattttmgttttctacatttatattaataagtataattagtctatatctttatttgtactccttctgtctgatttccatatgaggttaatgctaagctagtctcttttggatatttgagaatcatttca

SEQ ID NO: 218646 - DNA, 607 bp, Homo sapiens
tatttattatacaatttcagaagcactgtaataaaaaatcacaatgcaaactgtaattcttacctgttaatgccaaatttctgctatttacagacttagctactagactaatttaacatttttctctttcagatatacctaatgtagataatttattttgatgctttyggtgttgaatttcttgtttaaattgtaaggtaaaatagttgtttgtcgggggttgctcatgtttctattgcctcatgaaattaagtagtggttttatagaacaatggggctaattgactgcaaactagatttatgttacataagaagaagagtgacacaaaggatttgtttttaaatatgaaatgcatttttctgagctatttaacatgagaattatcaaatttgtgagtcccttttttctaaatttttgtaggtacatagtaggtgtatatatttatggggtatatgagatgttttgatacaggcacgcaatgtgaaataagcacatcatagggaatgaggcacccagaccctcaagcatttaccctctaagttacaaaaaatccaattacattctttaatgtgaatgtaatccaattacattctttaatgtgaatgt

SEQ ID NO: 218647 - DNA, 422 bp, Homo sapiens
ataaatctggtcctagagttggtaggttgaatgacaatgctgctggctgttttctgaaaataccattgagatgaagaaatacagtatcttctttagctaaagaaacaggccaggtgcagtggctcatgcctggaatcccagcactttgggaagccgaggcaggaggatctcctggagaccaagaatttgaaaccatcctgggcaacatagtgagatcccatttccacaaaaatattaaaaattagctgagcttgatgyttcatgcctgtggttccagctactcaggcagctgaggtggaagtatcccttgagacgaggaagttggggctgccgtgagccatgattctgccactgcactccagcctgggtgtcagagtgaggccctgtctcaaaaaataaataaataaaaatagctcaaaaaa

SEQ ID NO: 218648 - DNA, 425 bp, Homo sapiens
cctgttgtggggtggggggaggggggagggatagcattaggagatatacctaatgctaaatgacaagttaatgggtgcagcacaccagcatggcacaygtatacatatgtaactatcctgcacattgtgcacatgtaccctaaaacttaaagtgtaataataattaaaaaaaaaaaaaaagaaatgggatgtcaccaatcaatggtcacagaattcatcctggtgggattccagctcagtgctgagatggaagtgctcctcttttggagcttctcccttggaatagccttggaactcatctgtctggaccacagtctgcacactctcatacttcttcctctcacacctggccgtcattgacatggcctatgcttccaacaatgttcccaagatgctggtggatcttgcaaactagaaaagcacca

SEQ ID NO: 218649 - DNA, 502 bp, Homo sapiens
tccattgctgtttgattactgtttaatcatccatatatttgtgtytttataaagatattgaaagagatggaagatgctttcaaggtcccttataaaagtcaaagtgtcaattatcagtaaatacaaaagaagtctacaattgaatgaggtggtagacagcctgatcaaacacagagcacaatgagaagtgctctttcagggaattacttcattgaaaccacagacctcacctgaggtatgtagtctaagctgaagttattttgtcccatcacattagctgcttaagcctgtcctttaattgtacactaaaatgctcactcacatttgcatcttagccctagctccctcaacaatgagattatttcccacatcagtactgatccatttgatcctcaactgatattatttcatcagagaaaatgaaaattgggcaggccagcacttacttcttcttgacctcttgcttatagtatcacacaaagtgattaaaggcataagtgtt

SEQ ID NO: 218650 - DNA, 502 bp, Homo sapiens
tccattgctgtttgattactgtttaatcatccatatatttgtgtctttataaagatattgaaagagatggaagatgctttcaaggtcccttataaargtcaaagtgtcaattatcagtaaatacaaaagaagtctacaattgaatgaggtggtagacagcctgatcaaacacagagcacaatgagaagtgctctttcagggaattacttcattgaaaccacagacctcacctgaggtatgtagtctaagctgaagttattttgtcccatcacattagctgcttaagcctgtcctttaattgtacactaaaatgctcactcacatttgcatcttagccctagctccctcaacaatgagattatttcccacatcagtactgatccatttgatcctcaactgatattatttcatcagagaaaatgaaaattgggcaggccagcacttacttcttcttgacctcttgcttatagtatcacacaaagtgattaaaggcataagtgtt

SEQ ID NO: 218651 - DNA, 502 bp, Homo sapiens
tccattgctgtttgattactgtttaatcatccatatatttgtgtctttataaagatattgaaagagatggaagatgctttcaaggtcccttataaaagtcaaagtgtcaattatcagtaaatacaaaagaagtctacaattgaatgaggyggtagacagcctgatcaaacacagagcacaatgagaagtgctctttcagggaattacttcattgaaaccacagacctcacctgaggtatgtagtctaagctgaagttattttgtcccatcacattagctgcttaagcctgtcctttaattgtacactaaaatgctcactcacatttgcatcttagccctagctccctcaacaatgagattatttcccacatcagtactgatccatttgatcctcaactgatattatttcatcagagaaaatgaaaattgggcaggccagcacttacttcttcttgacctcttgcttatagtatcacacaaagtgattaaaggcataagtgtt

SEQ ID NO: 218652 - DNA, 569 bp, Homo sapiens
tgatcttggttttttatcttctgttcaagagtcttgtcttttaacagaaatcctgtccctgtccaatcccaagtaaacacacataacacatcccatgggaatgctgaaagaacaaaatgaataaacatgggcaatgccttcactggtttgcctgctaataggaaagtagcaaatatctttaattgtctctggagagatatgattagaagtattaccactgggttctgttctctcaattattatttttctctgcagggagtgagtgtctagtcaaatgatggtagaaaaagcctggcttacacaactaattgtatcataaagttcaggagagctttgtgtctgggcttcacctcccaagaaggcctcattagcgaggagaatcaatcccagtctatccattctgcctttcctgtctttgaggttcctagcaagcccaagggtatgttagaagaaaagaccacagattattstactgtaagtaaatgtggtgtatttgccttgagaaagggtttacagatgggaatgggaaaggggcagtgaatgaaatcactggctccagagagtagcga

SEQ ID NO: 218653 - DNA, 569 bp, Homo sapiens
tgatcttggttttttatcttctgttcaagagtcttgtcttttaacagaaatcctgtccctgtccaatcccaagtaaacacacataacacatcccatgggaatgctgaaagaacaaaatgaataaacatgggcaatgccttcactggtttgcctgctaataggaaagtagcaaatatctttaattgtctctggagagatatgattagaagtattaccactgggttctgttctctcaattattatttttctctgcagggagtgagtgtctagtcaaatgatggtagaaaaagcctggcttacacaactaattgtatcataaagttcaggagagctttgtgtctgggcttcacctcccaagaaggcctcattagcgaggagaatcaatcccagtctatccattctgcctttcctgtctttgaggttcctagcaagcccaagggtatgttagaagaaaagaccacagattattctactgtaagtaaatgtggtgtatttgccttgagaaagggtttacagatggraatgggaaaggggcagtgaatgaaatcactggctccagagagtagcga

SEQ ID NO: 218654 - DNA, 559 bp, Homo sapiens
gtcacccaaaaataacacacacagaccagttctagttcatcaagctggcgctggctgaaagtctcattgtccaggagaaaccacagccatagcagctctcctcttgcccaaggcctgtgactggggaaaacacaattccagtgcctactgttgagatgttttccacagttctagctgtggaggaccctaccctgatccagagcaggtgctccaatctctatcaataatgtttgatatgagttggcccatactcaactgaaaataagaaaaatttttatgtgcaaggatagtctctgaggttgagcatttttgttcagtgatgaggcatttgaattaccaacatgcttaatgctatggaaatctatggaacccatttctttaagaaatggattcatatcttaataaagaacaacttttttattgtttaattgccgaaacaagatgtcarcctattaccctaagtaaccagttcaatcatagccattcacatcatctagtaccaagtgatatttttcacggaaatgaacatgtggaggaaaagtccttgactggaaaaaaa

SEQ ID NO: 218655 - DNA, 608 bp, Homo sapiens
gttacttgtatattttctacaagttatttttttatatttgttttgtaaatatttcttctagtctgtggcttatcttttcatttttttaaacttcagttttaatgaagttcaacctatcaatttgttttttgatggattattcttttaatccaaaraggcattgccaatcacaaggtcacctgtaaagtcttctgttttcctctaaggattttataattttgcacttaacatgtaagtctatgatccagctgagttaactgcataaaatgtagtatctctgttcaggtttggggcttttgtttgtctgtcttttgtatttttgcatgttcagttatcccagcatcatttactgaaaatattagcttttctccattaaatttccactgctcctttgtctaagaccagttgactataattgtttggaatttttcaggggctctctcttctatccttttgacctatttacctattctttgccaatatgacacagctgtaattactgcagctttataaaaaggcttgaagttggatagtgtatcgtcccattttcacactgctataaagaactgcccgagattgggctatttataagagaaagaagttcaatt

SEQ ID NO: 218656 - DNA, 519 bp, Homo sapiens
gtaatatacgcccatatttttctgctcccatgacttcgatggtaacattmaagaaggaaatgtggacttttgagtttcccgtgactcttcttatatcttaagtggagtttttgttacggcttttttattttattttagccatctccctaccgcaggcctctccacaggcacagtctccagtgaggaaagtgaaactatgggacgatgttagtaggacctgccttggtagacttcaatattaccctttccttatgatctcaatggaccaaacttgacctcttcaactctttctgccgttagaaaggaaaatctttctcatatgcctctgaggtttcttgcatattaggcctctgttggacctcagactttgtgagctgcagggtactcaaggttacgctcttaagcaggggctcctgctatgcttgagtttgcgttgtttttagagggctttccaatctgcaataagacagaatttgtgaaccggtgcccccactcacaaaacacattgcctccaagtgc

SEQ ID NO: 218657 - DNA, 519 bp, Homo sapiens
gtaatatacgcccatatttttctgctcccatgacttcgatggtaacattaaagaaggaaatgtggacttttgagtttcccgtgactcttcttatatcttaagtggagtttttgttacggctyttttattttattttagccatctccctaccgcaggcctctccacaggcacagtctccagtgaggaaagtgaaactatgggacgatgttagtaggacctgccttggtagacttcaatattaccctttccttatgatctcaatggaccaaacttgacctcttcaactctttctgccgttagaaaggaaaatctttctcatatgcctctgaggtttcttgcatattaggcctctgttggacctcagactttgtgagctgcagggtactcaaggttacgctcttaagcaggggctcctgctatgcttgagtttgcgttgtttttagagggctttccaatctgcaataagacagaatttgtgaaccggtgcccccactcacaaaacacattgcctccaagtgc

SEQ ID NO: 218658 - DNA, 519 bp, Homo sapiens
gtaatatacgcccatatttttctgctcccatgacttcgatggtaacattaaagaaggaaatgtggacttttgagtttcccgtgactcttcttatatcttaagtggagtttttgttacggcttttttattttattttagccatctccctaccgcaggcctctccacaggcacagtctccagtgaggaaagtgaaactatgggacgatgttagtaggacctgccttggtagacttcaatattaccctttccttatgatctcaatggaccaaacttgacctcttcaactctttctgccgttagaaaggaaaatctttctcayatgcctctgaggtttcttgcatattaggcctctgttggacctcagactttgtgagctgcagggtactcaaggttacgctcttaagcaggggctcctgctatgcttgagtttgcgttgtttttagagggctttccaatctgcaataagacagaatttgtgaaccggtgcccccactcacaaaacacattgcctccaagtgc

SEQ ID NO: 218659 - DNA, 550 bp, Homo sapiens
tgggctgggggtattaatttgggagtttgaaaaagatggcatctaaattattgaattgcctcaccaatgaagaaagagcacatagagaagagatttaagaatggagtcctaggacactccatactttagggatcagaaggaggaggaaactagcaaagaagacagtgagtgaccattcagttaggagtaaaactaagggcttgtggtattgtaggagccaaaagtttctagaaagagagagaaatgaaggatgtcaaaggctttgcttgtaggccatgtgacatgagaactgacaaatgcttgttagatttcatcttgggatgactataaaccagtggaaattatccaggaaagatacaggaactggtgctgtgagagtggggagacttcttggagcctccagtgagtgggagaccrtgggcccaaatacctaagtggaggggctggctcagataggagaagctcagacaaatgactgtggctgtggttctcaaagcatggttcccagatcaacagtatagccattacccgggagcctgttagaaacctg

SEQ ID NO: 218660 - DNA, 550 bp, Homo sapiens
tgggctgggggtattaatttgggagtttgaaaaagatggcatctaaattattgaattgcctcaccaatgaagaaagagcacatagagaagagatttaagaatggagtcctaggacactccatactttagggatcagaaggaggaggaaactagcaaagaagacagtgagtgaccattcagttaggagtaaaactaagggcttgtggtattgtaggagccaaaagtttctagaaagagagagaaatgaaggatgtcaaaggctttgcttgtaggccatgtgacatgagaactgacaaatgcttgttagatttcatcttgggatgactataaaccagtggaaattatccaggaaagatacaggaactggtgctgtgagagtggggagacttcttggagcctccagtgagtgggagaccgtgggcccaaatacctaagtggaggggctgkctcagataggagaagctcagacaaatgactgtggctgtggttctcaaagcatggttcccagatcaacagtatagccattacccgggagcctgttagaaacctg

SEQ ID NO: 218661 - DNA, 395 bp, Homo sapiens
attcattttctcctaagatttccatgtggtaagtactattattttaccttatacacataaggaaattaaggcaaagagaagttatgaaatttgcctgaggtcactcagctagtgaatcgaaaagctggtattgtaatccaggcagtgtgaacacagagtccgtactattgactactagacttgcataaagaggaactcaatttctttcactttctcatgttaaatttaaaataagatgacaaayaaatcagaatgacagttcatcaaatgtgaattgtgatcttgaagtcacccttgtgagttgattagcacaagtttttcatatcaaaatcttcttgggaaaccaaattcagataataaaattgcttgcctggtgaatatagaatgagaataaa

SEQ ID NO: 218662 - DNA, 578 bp, Homo sapiens
  misc_feature (1)...(578): n = A,T,C or G
aagcttttccaagtagcagttgtatatcacacttcttgatatgactccagagaacctagaacttttttggcacataggatactccctctgtcactctgggtgcatctccattcccttagcaaatatcctgcatccaggcaaagcatgcttttaacttactcaaaatctattctacgcctgctctcatttattaaaaatattcttattatattttgattattgactttatcatatcatccaaattgatatatgaagttgtatgacatattactactgcacatagttgtatctgtaatacaacatatattgtactntcatgaaaaatttataatatttttcaaggattattttgactacgtgtgtgttgtactttaygcattgactttaaatcacagtcctcacctcaaatgtgctccactatatttgcaagactattctgtgtgttgtatgtaggtaggtaagattgtgtattggtgaatggcataaattttaagtcaggaattcctaggtttgaatttcagctctgcttaacctgttgaagctcagttttcatagatatagaatgagaataatgattg

SEQ ID NO: 218663 - DNA, 448 bp, Homo sapiens
caaaacaaaacaaaactgatcctcaaattcatatggaattgcagtgcscccaaatagccaaaacaacctgagaaaaggaggaataacttcttgatttcaaaatttatgatagagctacaataatcacaacagtgtgaaattgttgcaagggtagataaatagaccagtaggatagaactgagagttcagtagtaaacccatctttctatgaccaattgattcttgacaagagttccaagacctttccgtgggagaaagactagactcttcaacaaatgagagatgggacaactggatatctacatacaaaagtataaagctggaccctcaccttaacactatatataaaaattaactcaaaatagatcacacacctaaataaatataagagctaaagccataaaagtaattatttataacggctatgaatgcttagatttgacaccaa

SEQ ID NO: 218664 - DNA, 460 bp, Homo sapiens
  misc_feature (1)...(460): n = A,T,C or G
ggaaggatccaaggtttttgatgcagggcactgactctgtgtttgtttttccccttcatcctcagaatccccttaaaaaatggttggtaggcattggtaagaatccacatttcttcccttntgttccctggcttcattccaggatttcacttgtcacactgatgggtgagatgcctttcatattggcataagacactgagcggatgcctcctcttatcttatcaaacagaaacccggcgagtgaatctacccagagctgaagcttcctttgcaacttgggaacaccagggccacagtgactttgtggcttggctttagataaatttgaccatggctgtagaacccagcagctcagaatccattaaaaggagagctgggaggaggtgagtgatagagacaaggggatttygatgttacaattgttgaggggactgtggctggcgggcaacttgctgtgggg

SEQ ID NO: 218665 - DNA, 460 bp, Homo sapiens
  misc_feature (1)...(460): n = A,T,C or G
ggaaggatccaaggtttttgatgcagggcactgactctgtgtttgtttttccccttcatcctcagaatccccttaaaaaatggttggtaggcattggtaagaatccacatttcttcccttntgttccctggcttcattccaggatttcacttgtcacactgatgggtgagatgcctttcatattggcataagacactgagcggatgcctcctcttatcttatcaaacagaaacccggcgagtgaatctacccagagctgaagcttcctttgcaacttgggaacaccagggccacagtgactttgtggcttggctttagataaatttgaccatggctgtagaacccagcagctcagaatccattaaaaggagagctgggaggaggtgagtgatagagacaaggggattttgatgttacaattgttgaggggactgyggctggcgggcaacttgctgtgggg

SEQ ID NO: 218666 - DNA, 610 bp, Homo sapiens
tttaatatgtgttaggaaatacatattgtatttttacatacatattgtacgtaaaatactatgcaagctacgatagaatgggacatctctaatatcagtcttgattgtgaggtataatgcaaaaagactctgtcaaggagacacataattcccgattcaaatcctgactcctccattcactgaccatgtatccttgggcagggtatttaacgtctcagatggtaatatctatcttgaagaggtgctgtaaagagcagattaaataatatatgtaatgtgattaccacaataccaggtatattgtggatgctctgatagtggtagctattgktattgtgctctgacttatctccagataaaatcattcatgctttcactaccaactgaaaaactcttagatgtctcactattaagaccaaacttctataagcccaaataaatgtcttctgtatttacaacctgtacaatctgagcatactaccctccatctaagagcacacactcatcttttaaatcagtttatctgtggattcatacacatgagccaataactctcacaggttcacaagtcagacagtaaaacaatggtgacagctctcttaatattgtg

SEQ ID NO: 218667 - DNA, 535 bp, Homo sapiens
atcttgaggtatgtaaggggaggaagaataacattatacacaaaatcctgcacttttgagtttaaaaaatctgactgaattctgcttcctccatttttgggttgtgcaatctagcaatttatttagattttctgaatctcaattttctcatttgtaaaatggaaacaatatcaacagctaccttccataactcttgaaaggattaaatttgatcgtattatgggaagcactgggacagacacataattacccaaaaatgcttgtccatgagtattactcttgcctgtgagtattctacatctggtgcttgtttctctggtctctctctrcccaccctgggaactgcatgttttcttgtactggagttcttttcacattcagtgagaactagaaatccacagaattctcagctgccatacacaaggcatctgccagatttcctactcatctgataatgtcttccacagtcttgccctggtccactgacttgatcaattcagccaatgttcccttctgcagcaagaggccctctgaa

SEQ ID NO: 218668 - DNA, 491 bp, Homo sapiens
atggcaaagaaaaaaaggcattgggggtcactggcttgaaaggcttgctcctttgaatagatttgggctgctttcacgataaaattcccttaaaatttttatagccaagtagatttaaagcaggaattacaaagcttttgtgttaaatacaatcctaatcatatctgcatttttttaagaaaagaggactgttgtaaattttagataacctgtactttaattcatggatatggtatacattaattatggtataattaatacatgcttattctggattttgaacagcgatatcatataagaactcatgtttacacattttgcttaatgctttaaaacataatccttcctgtttctytgatataaaagtaatatatgcatgttcactaaaaacctagaaaactttatttgcaacttagaaaataccaaaattcgcaatgctaaaaattaaaatcacctataatcccatgactgtgaaagaaattaacattaac

SEQ ID NO: 218669 - DNA, 491 bp, Homo sapiens
atggcaaagaaaaaaaggcattgggggtcactggcttgaaaggcttgctcctttgaatagatttgggctgctttcacgataaaattcccttaaaatttttatagccaagtagatttaaagcaggaattacaaagcttttgtgttaaatacaatcctaatcatatctgcatttttttaagaaaagaggactgttgtaaattttagataacctgtactttaattcatggatatggtatacattaattatggtataattaatacatgcttattctggattttgaacagcgatatcatataagaactcatgtttacacattttgcttaatgctttaaaacataatccttcctgtttctttgatataaaagtaatatatgcatgttcaytaaaaacctagaaaactttatttgcaacttagaaaataccaaaattcgcaatgctaaaaattaaaatcacctataatcccatgactgtgaaagaaattaacattaac

SEQ ID NO: 218670 - DNA, 491 bp, Homo sapiens
atggcaaagaaaaaaaggcattgggggtcactggcttgaaaggcttgctcctttgaatagatttgggctgctttcacgataaaattcccttaaaatttttatagccaagtagatttaaagcaggaattacaaagcttttgtgttaaatacaatcctaatcatatctgcatttttttaagaaaagaggactgttgtaaattttagataacctgtactttaattcatggatatggtatacattaattatggtataattaatacatgcttattctggattttgaacagcgatatcatataagaactcatgtttacacattttgcttaatgctttaaaacataatccttcctgtttctttgatataaaagtaatatatgcatgttcactaaaaacctagaaaactttatttrcaacttagaaaataccaaaattcgcaatgctaaaaattaaaatcacctataatcccatgactgtgaaagaaattaacattaac

SEQ ID NO: 218671 - DNA, 600 bp, Homo sapiens
tttgcactatgccttcttctgacttcacttcgaaaattctttgaaatgtaacaccctagaacattatgttacctttatccacataaagaaaggatcttttcatttagagrtgaacttattgaagatgagccgtcagtgttgtgtgtaatcaataccacacattttcagagtggtctgaatccagaacaaagaatgagacaggtactctgatgatatcaacttggctaattgggtaaaagtctctacactagttgggaaaaatcacttcatgcatctttgtattttttaatcagtggtgtgtaagaagatctgtattccgtgcactttgaagagagaaagggctaaatttgtgttccatatttgatctttccatttttgtcttgttaatattttaaaagaaaaacaaaaacctttgcagatccattcagtaacccaaagtcatatttccttggcaacagtagccagtacactagatttacaaaatatcaaaatagaaaaatttaaatgcattcaaaataaaatgtcacatagttcaagaccattctttggtgcattaaaactgatcttccaacatgtaataatacagttgcctttctcctg

SEQ ID NO: 218672 - DNA, 600 bp, Homo sapiens
tttgcactatgccttcttctgacttcacttcgaaaattctttgaaatgtaacaccctagaacattatgttacctttatccacataaagaaaggatcttttcatttagagatgaacttattgaagatgagccgtcagtgttgtgtgtaatcaataccacacattttcagagtggtctgaatccagaacaaagaatgagacaggtactctgatgatatcaacttgrctaattgggtaaaagtctctacactagttgggaaaaatcacttcatgcatctttgtattttttaatcagtggtgtgtaagaagatctgtattccgtgcactttgaagagagaaagggctaaatttgtgttccatatttgatctttccatttttgtcttgttaatattttaaaagaaaaacaaaaacctttgcagatccattcagtaacccaaagtcatatttccttggcaacagtagccagtacactagatttacaaaatatcaaaatagaaaaatttaaatgcattcaaaataaaatgtcacatagttcaagaccattctttggtgcattaaaactgatcttccaacatgtaataatacagttgcctttctcctg

SEQ ID NO: 218673 - DNA, 522 bp, Homo sapiens
cagttacatatttccagggaagactttgttttctgcctagaacccacatgaaggcagacaggcttctttgtcctgttcctctgtgatttttattttaaaaataattccattatttcactarggatttgacatttgaaagcccccactttgaatattgtattgttttcaaattcatccaaggcaacatcagctgttatttttggtccttaatataccagtttactatttcttgatactagcaaaattctccaatggcaaaaatgccttcagagttagcttaccgctctgatacttttaactcacattatttttttttcccaagggttttttttttactctctcctgatcaaaagtgtttatgtaacagaaaattatacatttcaatattttgaggtatcttttcaagataaatccttttgctaaaaatggaatactattcagccttaagaagggggaaaatcctgtcattggcaataacatggatggatctacaggatattatgacaaatgaaataagccaga

SEQ ID NO: 218674 - DNA, 522 bp, Homo sapiens
cagttacatatttccagggaagactttgttttctgcctagaacccacatgaaggcagacaggcttctttgtcctgttcctctgtgatttttattttaaaaataattccattatttcactagggatttgacatttgaaagcccccactttgaatattgtattgttttcaaattcatccaaggcaacatcagctgttatttttggtccttaatataccagtttactatttcttgatactagcaaaattctccaatggcaaaaatgccttcagagttagcttaccrctctgatacttttaactcacattatttttttttcccaagggttttttttttactctctcctgatcaaaagtgtttatgtaacagaaaattatacatttcaatattttgaggtatcttttcaagataaatccttttgctaaaaatggaatactattcagccttaagaagggggaaaatcctgtcattggcaataacatggatggatctacaggatattatgacaaatgaaataagccaga

SEQ ID NO: 218675 - DNA, 562 bp, Homo sapiens
  misc_feature (1)...(562): n = A,T,C or G
atcaggagttcaagaccagcctggccaacattgtgaaacactgtcagtgctgaaaatacaaaaattagctgggcctagtggcatgcgcctgtgatcccagctactcaggaggctgaggcatgagaatcgcttgaaccccaggtggcggaggttgcagtgagatgagatcaagccactacactccagcctgggtgataagagcaaaacttcatctaaaaaaaaaaaaaaaagaagaatacacatctaaaactgctaatattttatcagttattgttaataattgctagaaagccatatataaactttttctaaatattccatcaggatktatgtgttgaaaacagggtccatggccaagatgaccaattagcttatcccagatactaaaaaaaatccactcactaatactcttctaaatgtaaaatattattaggttaattcagttaattattactttataatataatgatttaataagggtatatgtattaaatattttaaaacatttcagatcacctgtagattatanagtataacgaggatccttccaataatcaattat

SEQ ID NO: 218676 - DNA, 575 bp, Homo sapiens
tcctttttctcctttgtttagaataagagtcatctactgcaggttcccacgtctcttccctttgtatgtcaggtgtgaggaggacagatgacttgctcctatagtttgcaactttaggtaaacagaaataatacttaagaatccaaatacgaaaaattgttccaaaatagccttattgtcacctggagctggtttaaatgacaagatctgggaactaaaaactgaaattgacttcattacaggatgaaattttgggaattttaggagggggtgaatgtattttgcatttacaagaaatgcaaataatgtatgtccagagggtaggttaaagatggatgtcctccacmaaaagctgaatttgcctcagacctgtgactactctataactaacagaatgtgtccgagccttgctgtgccagtttcagttctagcatttgagagtaagtggggaggggcacagtggatcatgtctctaatcccagtgctttgggaggctgaggtgggaggataacttgagcaacacagcaagaccttatctcaaaaaaaaaaaaaaagaaaaatgaaaacagaatgaa

SEQ ID NO: 218677 - DNA, 575 bp, Homo sapiens
tcctttttctcctttgtttagaataagagtcatctactgcaggttcccacgtctcttccctttgtatgtcaggtgtgaggaggacagatgacttgctcctatagtttgcaactttaggtaaacagaaataatacttaagaatccaaatacgaaaaattgttccaaaatagccttattgtcacctggagctggtttaaatgacaagatctgggaactaaaaactgaaattgacttcattacaggatgaaattttgggaattttaggagggggtgaatgtattttgcatttacaagaaatgcaaataatgtatgtccagagggtaggttaaagatggatgtcctccaccaaaagctgaatttgcctcagacctgtgactactctataactaacagaatgtgtccgagccttgctgtgccagtttcagttctagcatttgagagtaagtggggaggggcacagtggakcatgtctctaatcccagtgctttgggaggctgaggtgggaggataacttgagcaacacagcaagaccttatctcaaaaaaaaaaaaaaagaaaaatgaaaacagaatgaa

SEQ ID NO: 218678 - DNA, 573 bp, Homo sapiens
cgtctggtgctgggcaccataggacctgttcacagttttgtctcatctcccatcctgcaccttctcttcgcgacatcaaagcggttggacggttrctaggaatattcctgaaagttattcttattcttgcatgtttagctataatctagctgaaatataagagactatgaatcacataaatatgcaacacgaaattcaaactaaatgaacagccagctcacatcagccatagtctctctcataccatatagagttatagaaagtgtaaaacatggaaaattagagtttgaagaatatgtcttaaacaattgccattattatcttacttttgcaaatttcacaaaaaatatatgaccatgagagtatattgttatagcgattctctaggcctagaaaagaacccttataaaagtgaggggcttggtaggttaagcttcgttaatccatatgcctttgaacagcagctggccatagccaagctatgaaacaaacggagggaaaagcaacagataaaaagctgaaatagacaagtctggatttaaagatactgagaatgagtatcacgatttaggc

SEQ ID NO: 218679 - DNA, 588 bp, Homo sapiens
gctcattctttgatatatttgaattcatgtggtttggtttatggggattctgggttagcagcatactccatactcttgatattattatccgaataatcataataatattctccctgctgcatagtattctctcaaatattttaaaagtttgcatgcagccatgtctagaatgtaaaataatctctcttaaactgtaatgacaagagctgaaagaaatgtgcgaccatgtggacactgtaacctatgaatgacatgctgagacgggaaatccaaaataatggtaactgagagtggcgctaaggccctaagttttgtcacactgtcacttaagtgagaactttactacaaatagagaatttttaaaaacaaaattatgggaggtcactgttttggactgacctcacgtactaggcaccaacagactaaacaaacaaacaaaaaaatagaatcgcttttgctaaatgtaacawaatcaaattaaaattttaaggaaacacataggtcctagaacagaccaggctttgtttttctcttgtaagaaaacattcaagcataaggaggtacctttactcagtctttgttcctact

SEQ ID NO: 218680 - DNA, 534 bp, Homo sapiens
  misc_feature (1)...(534): n = A,T,C or G
aaatccatgcaaataatatgcaaagaggcagtagcctcagattgtggggagggggagtgtgtagtccagcacaaagggccttgaatgaaaatttgcatngtgttcagggaagccctggggttgaaggcctcagatgtttattgtgacagtgtgcatagcattcagttgttaaccttttgtgccaaagaagagaggtaaatgcttgtctgatttccatattgaaggtgacagtagaggttggrggtggtatttggctagcacaacattgtagggatttttattatacaaatgaaaagttgctttgaaataatggctgtggtccaggctgtgtccccaaccagcaatgtgttcttggacaagtcacttccctccttctgttgcccactctgtgaaatgaggggattggattaggtgaaatgccagatcccctctcactgtaacatgtaaacatcatcctccaggtaaaaatcccttggcacccacggtggcagtatccgttcattgtgccaaagatgatgtactctaaagtccaaa

SEQ ID NO: 218681 - DNA, 584 bp, Homo sapiens
cattgtaatcaaactttcaaaagtcaaagacaaagaacaaayagtgagagacaagaagctcttcacacacaagggatattcaataagattatcagcagatttctcatcagaaatgttggaagcctgaatgccgtggggcaatatagtcaaagtgctaaaagaaaaaaatgaagaccaatgaaccaagaattctatatttaaaaaacctgtcttttataagtgaggaaaaaattaagacattcccagataaacaaaagccgagatagtttgctactggtagaccttctctgcaaggaattctcaagagactcctgcagagtgaaatgaaagaacactagacaataacaaaaagctgcatgaaaaaaaattcagataaagataaatgtgtgggcaattataaaaggcagtgctatagtaacaatgcttttttaaaagaattctactctgtttttacatgactaaggagattaatatttttgagaaaactatttaattatttcaaaagctagtattattataactttggtttgcaattccacacttcattttcttctttcttggagtttaagaaaataatgtgtgta

SEQ ID NO: 218682 - DNA, 584 bp, Homo sapiens
cattgtaatcaaactttcaaaagtcaaagacaaagaacaaatagtgagagacaagaagctcttcacacacaagggatattcaataagattatcagcagatttctcatcagaaatgttggaagcctgaatgccgtggggcaatatagtcaaagtgctaaaagaaaaaaatraagaccaatgaaccaagaattctatatttaaaaaacctgtcttttataagtgaggaaaaaattaagacattcccagataaacaaaagccgagatagtttgctactggtagaccttctctgcaaggaattctcaagagactcctgcagagtgaaatgaaagaacactagacaataacaaaaagctgcatgaaaaaaaattcagataaagataaatgtgtgggcaattataaaaggcagtgctatagtaacaatgcttttttaaaagaattctactctgtttttacatgactaaggagattaatatttttgagaaaactatttaattatttcaaaagctagtattattataactttggtttgcaattccacacttcattttcttctttcttggagtttaagaaaataatgtgtgta

SEQ ID NO: 218683 - DNA, 568 bp, Homo sapiens
ttctttttatgcacaggtagttttcaaacttgtgcatttttttctttctctaagattttctaatacaagttaaataagcttaatttacagttacccaaaactccagaaaaaaattcttctggaggacggcaatgggaaagagcgggaaagataggcagcaactgatggtcaaatagcattttttgattctatttcattaactttaaatttcattgagtagtatttgcagtgcagttgactcttcacctatggaatcttccaggtgactgtttagggtctatgccactgaaagtctttaccagtgacatgtcattttgtactttgtcatacagtagaatttaattttcaatcaacacgtatgatgtcttgaaattgctgatgttttakatttattttcatgggctacaagtgcttatttctttgcttacttctatttataaacttccttaaatttactagacctaggaatacctcttttctgactctctcatttctttcttatcaatctggattattctctgaagccctgtacaatacacctgtccttaaacaataatctcctttgtta

SEQ ID NO: 218684 - DNA, 569 bp, Homo sapiens
cctgggcaacgtggttaaaaccctgtctctactaaaataataataataataaaaaaaaagccaggcatggtggcccgtgcctgtagtcccagctactctggaggctgaggcaggagaattgcttgaacctgggaggcggaggttgcagygagctgagatggtgccactgcactccagcctggcgacagagtgagacaccgtctcaaaataaacaaccccaccccaccctccaaaaaaaaaaacacacacacttcaaaatgcctatggatcaaagaagaatttagaagataaattataaaatatttctaactgaatgatgaagttatataaaaatgtatgagatgtgacaaaacagtgcttagggttagtttatattttaaatgcttatattagaaaagaaaaaagttgcaaatcattgctctgtttttattgtaaggggttgggaaaagaacaaattgaatcaaaagtaagtaggaaggaggaaataataaagcaaataagagcagaaataaaaaaggaaaaggaaaaagaaaaccaatagagaaaattaataaatccacatgttgatt

SEQ ID NO: 218685 - DNA, 569 bp, Homo sapiens
cctgggcaacgtggttaaaaccctgtctctactaaaataataataataataaaaaaaaagccaggcatggtggcccgtgcctgtagtcccagctactctggaggctgaggcaggagaattgcttgaacctgggaggcggaggttgcagtgagctgagatggtgccactgcactccagcctggcgacagagtgagacaccgtctcaaaataaacaaccccaccccaccctccaaaaaaaaaaamacacacacttcaaaatgcctatggatcaaagaagaatttagaagataaattataaaatatttctaactgaatgatgaagttatataaaaatgtatgagatgtgacaaaacagtgcttagggttagtttatattttaaatgcttatattagaaaagaaaaaagttgcaaatcattgctctgtttttattgtaaggggttgggaaaagaacaaattgaatcaaaagtaagtaggaaggaggaaataataaagcaaataagagcagaaataaaaaaggaaaaggaaaaagaaaaccaatagagaaaattaataaatccacatgttgatt

SEQ ID NO: 218686 - DNA, 560 bp, Homo sapiens
gtatttcaaagtgattgtatttcactgctctcataaacacatcttgtaaaagaaacaaggttgtcttttaaactgtgctcttgcttgacaggaaaaataaaacccagtctactttcaggaccttatggcctaataagaagtcaacccttttcatttttgttaagaatasttttgtatcaacttgccattcttcatgtaaaagtataatttattatgaaagaagagaatctggatgataaataggacttttatgttcttgttacctgtgattcagaaaattctaactcacagagctggttgaatagagaattctaaaaccgacaacaaggagatgcttgttaaatctactttttaatgcttgtttattttattatacacatgacatgtactattcactgttcatcttatgtatatgggaacttgcaatttttggtctattatacatgcctatatattttatgtttggtgctatcaggaacatagatattattaaacaaggctaggatttattttactttactttatatttgtaggttattatgcagtccaaagattacaga

SEQ ID NO: 218687 - DNA, 560 bp, Homo sapiens
gtatttcaaagtgattgtatttcactgctctcataaacacatcttgtaaaagaaacaaggttgtcttttaaactgtgctcttgcttgacaggaaaaataaaacccagtctactttcaggaccttatggcctaataagaagtcaacccttttcatttttgttaagaatagttttgtatcaacttgccattcttcawgtaaaagtataatttattatgaaagaagagaatctggatgataaataggacttttatgttcttgttacctgtgattcagaaaattctaactcacagagctggttgaatagagaattctaaaaccgacaacaaggagatgcttgttaaatctactttttaatgcttgtttattttattatacacatgacatgtactattcactgttcatcttatgtatatgggaacttgcaatttttggtctattatacatgcctatatattttatgtttggtgctatcaggaacatagatattattaaacaaggctaggatttattttactttactttatatttgtaggttattatgcagtccaaagattacaga

SEQ ID NO: 218688 - DNA, 440 bp, Homo sapiens
atggttttgagaaaccagttcaccatgctgtttcgccagtctgcagtggtttacaaagatttaatccctaaacaccatggagaacattattttaaataacaatgtaaatgatgtaaatgcaaaggtactgaaggcctaagatagaaggtggaaatgaagaagttggggaggggtagagaggaagcaagactgggggygcaaagagcttcgtttcacataggtggggagtcaaggagactgtctaaagatgattgaccaagaagcagagatataattataacatttaaagctaaataagtaaccatgaatagagcttaataataatacccctgtcaaacataggttaggggaggagaaggtaaggtcagggtgatgtaagtaagtcaattctttgtctttcaagaggtggtccataatatcatccaaagttggtaagtcaa

SEQ ID NO: 218689 - DNA, 563 bp, Homo sapiens
gattaccctaaaataaggtttgtactagagaagcaagagaaaaattttaaattttcttccctttcattaccaatttccagaatcagaagtttggtttttgaatattgttttccatggaaaggaaccaagtattcttgcgatttgaccaattcaaggtctgggtcaggaacggacgaagtgaactagaacatcttgtctcagatatagcaaagatgatggggaatacgtcagaaggataaaggtcccagtttaaaatgattactattgccagacgcggtagcatatctataaacctggcgactgggaggctaacacaggaggatcatttgagcccaggagtttgaggtcagcctgggcaacatagtgagacccccgtctctcaaaagcaaaattaattaattaattaagaagtggctactattgattaaaggtaggacagtgtgaacatcaaaaattaatgcaaatttagttgcctgaaatgtaccaaatatgtaaaaatcagtgagtccataytgatactcaacaaaatgaaaacctgaacaaaacaaaactcgcttgaattc

SEQ ID NO: 218690 - DNA, 600 bp, Homo sapiens
agatctaaaatcagtaaaattcaatcttgaatatgggcttcagtcctgccatcaaaatagtgcatccaggtggataggttttgccaccttgaagagttgtttattcaaacttttgtttgaagagkaggaaagcagtgttacctttaggcctgacttagcccttgccccacaatctattgttttttctcaccatagatttccctgacagcagagagagagttctgtgctcaagagatacacacagcttctgacaatagagcagcagagtatttggttcctaattgagcaggaatggtgtttgactcatcatcatttccctactttgtctagcacagtaccttgcacagagtagattctcaataatgtttgttgaatgactgtgggagcatataattcataatggagacaaagctcaatgaggctttaaatttctaaatccacaaaatgccctcatgtaacattgctggatgatatggtttagctgtgtccccacctaaatctcaccttgaattgtagctcccataatccccacgtgttgtgggagggacccagtgggaggtaattgaatcatgggggcgggtttttcccatgctgttctca

SEQ ID NO: 218691 - DNA, 422 bp, Homo sapiens
aacatgccaagttgctccggggatggaaactccaataattatgatgtgctgacctgtgcaggtcaggattttattagtgctaagyccataggtgagcttcttgtgacaatgggacttttttcattgcactcattttagtcaagttatgacttcaggatcaggttatatagaataattcaactagcagatgaattgttaaatatgctgaactttaaccagcataaccacacctttctcaagtatttatggggcaggaggatgaggtgggctcaagtcacttgctcctaagttattcatctggaagcagagcccatgcattcaagttcaactccccaacatgcctcacttggaactcctcaccagagtaccctgaaaggatgctattccctccatgtgtggtccagcaaagataagtatggaac

SEQ ID NO: 218692 - DNA, 443 bp, Homo sapiens
gtgctcatggtatcacaggaagagagggatagaaatacatgcaattcaagataacacagcacatgcgactaagcactaggctgaatgaagtggtatggcaacacagagaaggaacccactcactctccctgcagaggtcagtgaaggccttgtgaagaagtcacatttgaaacagaccttggcaaatgagtgaacttttgccaagtggagaaagggaacaatgacattctaaaaagtgcacacagtgtgagcaagggtgtagagaggtgaaagccccactgtgtgtctggaaaaggatgagcagtctaggrttctgatgaatggggtacacattacggaggagcaagaaatgcatgccctcgggcctaaaaaatgtcttctatttttggctgacaattacattggtggtttgctctgggttaagataaaaaaacgcacttcta

SEQ ID NO: 218693 - DNA, 471 bp, Homo sapiens
tgactatgagccacctggaaatggaatggcctccttcaggtgggttgcatgggggcccctgctcacctaaatgcttaagccatagctggtgggataattcgtggtgaaggatgttgccaagcagaccaacaagtaggcatccctactgctttgaggaaggggtaggtactcccacagaagtcacatgttggttgcccattggccaaatttggtctgctattgtgtagtttttgttctatgtgaaatattttttttttcttgtatatctggattccttgtcaaaatttaaaaatcaggagatttcacacaaaaaaaattctttttctttttttttgctttctttgaaagataagatgatctagcagcacatggtggatctgtattgtcacagatggctggagttgagcagtagccatcacctttaaatggaatgtgcstcctccaattatccaacatcctcacctggcccac

SEQ ID NO: 218694 - DNA, 609 bp, Homo sapiens
gccatgctttttcatcttttcctgtctttcaattctgacttaattttgaaagcctaggratgtgtcagaatcattacatcatattattctttgaagagaaagagagtcacaaagttcccatcagtatcagtctttgcaatccagattttcaagttggtttctggagtcagagaatctgccttttttgctaaaaagtgatatgtaaacacgtctagtaagttagaaaagaatgagtattttagagggtggcttgaagaaagaaggccacacatttccctcctaacagtagcttgttttgtgtcactctgaatttccattctgggatgtttgaagatttcaaagcacaaaaaagctaattaaactttgggaccctcccaggagaaaggcaaggggtttgtttctctctttctttacttgaaactctttggggactgtgacaccatggttaatagcatgtgacaaaaaccacacaataaatgtcagaaagggctcccatgggcagccaagtgcagtttacctgcttgtgcaattacttaggtgaacattctttctgggacccaaagtctgtcccttcctcgccagaagcatcatccttctcaccaccatcat

SEQ ID NO: 218695 - DNA, 434 bp, Homo sapiens
tgtatgtagggtttcaaattagatctgtttactaatttgttagtatccttaagccagcctttcaatatgtgggattcaattttagctaagccctttccttatattatttcatttaaatttctcaacaaccttattcaattagcagcatgtattgattggaagctgggtgcaaggcagcctgctagactctgggaatayagtggtggaccagacagatctggcccttacgctcatagagctaagctcctttatcaagtagatactctaataatcgctattataaattatcacttgctgtggacttcagggttgcctatgtcaatggagcattctagttctttgaggctgagaaagtgagaggaagcctcttgtcactggattccctgccactgctctcaggaggcagcaggtaggttctcccacaccacatacct

SEQ ID NO: 218696 - DNA, 547 bp, Homo sapiens
tgggagcatacactgctgtatccccggtactcagcacagtgcctggcacatcaccggcgatctgtaaatccttgttgaatgagtgaatgaatgatagatttgaagaagccagggataactgtcacaatcctggccttggatattgattagatgatggggttattggggggaatatgataaatgtagatattacaggttctctgatttacatttattgcctaatcctgtgctttctttttatgcctgattccataccttcccctgaccctccactatctcccctacacacaccctgtatggttttcttgaggtggctagtgtttcagggagtttcaaatgaattttgagactgtgtcagtaagaattaartctgttgatgccaccctgacattcctatctaataacctatagttgagatgctaggttttctgtttttctgcaggtgtctgtgaagtgtggcaaatgctcaggagtgatgagtccgggtttagaggggcctcattgcacatagatacataaaatgagaataattaaattgggtgagggg

SEQ ID NO: 218697 - DNA, 547 bp, Homo sapiens
tgggagcatacactgctgtatccccggtactcagcacagtgcctggcacatcaccggcgatctgtaaatccttgttgaatgagtgaatgaatgatagatttgaagaagccagggataactgtcacaatcctggccttggatattgattagatgatggggttattggggggaatatgataaatgtagatattacaggttctctgatttacatttattgcctaatcctgtgctttctttttatgcctgattccataccttcccctgaccctccactatctcccctacacacaccctgtatggttttcttgaggtggctagtgtttcagggagtttcaaatgaattttgagactgtgtcagtaagaattaaatctgttgatgccaccctgacattcctatctaataacctatagttgagatgctaggttttctgtttttctgcaggtgtctgtgaagtgtggcaaatgctcaggagtgatgagtccgggtttagaggggcctcattgcacatagatacataaaatgaraataattaaattgggtgagggg

SEQ ID NO: 218698 - DNA, 525 bp, Homo sapiens
aaattggagctccaaaaaacacttcaaaatgtacggctttttggctgccagcatggtatcaaagtggaaaatccacacatgacttcatgtgacgagttgcattcaaaatacagtcacaactttgtttcaggcacaaacttattaattaaaaatattgtttaaaattaccttcagactatrtgcatatataaggtatatgtgaaagttaaatgaatttcatgtttagacttggctctcacatttagactcaagatttctaagatatctcattatttatttgaaaatattccaaaatttgaaaaaatccaaaatctgaaattttggattttttggaaaaggttcctcaacctctactggattctgtacttacaggttaggaaattgttttttttctgtaacatctttatgtgaagcaaaaagcagagtttatgcatattgagctttattaaaccatgccttaacatttgtacatgtcaccttacttgagtttccacaacctctgtttaacataataaattaagcatc

SEQ ID NO: 218699 - DNA, 525 bp, Homo sapiens
aaattggagctccaaaaaacacttcaaaatgtacggctttttggctgccagcatggtatcaaagtggaaaatccacacatgacttcatgtgacgagttgcattcaaaatacagtcacaactttgtttcaggcacaaacttattaattaaaaatattgtttaaaattaccttcagactatatgcatatataaggtatatgtgaaasttaaatgaatttcatgtttagacttggctctcacatttagactcaagatttctaagatatctcattatttatttgaaaatattccaaaatttgaaaaaatccaaaatctgaaattttggattttttggaaaaggttcctcaacctctactggattctgtacttacaggttaggaaattgttttttttctgtaacatctttatgtgaagcaaaaagcagagtttatgcatattgagctttattaaaccatgccttaacatttgtacatgtcaccttacttgagtttccacaacctctgtttaacataataaattaagcatc

SEQ ID NO: 218700 - DNA, 525 bp, Homo sapiens
aaattggagctccaaaaaacacttcaaaatgtacggctttttggctgccagcatggtatcaaagtggaaaatccacacatgacttcatgtgacgagttgcattcaaaatacagtcacaactttgtttcaggcacaaacttattaattaaaaatattgtttaaaattaccttcagactatatgcatatataaggtatatgtgaaagttaaatgaatttcatgtttagacttggctctcacatttagactcaagatttctaagatatctcattatttatttgaaaatrttccaaaatttgaaaaaatccaaaatctgaaattttggattttttggaaaaggttcctcaacctctactggattctgtacttacaggttaggaaattgttttttttctgtaacatctttatgtgaagcaaaaagcagagtttatgcatattgagctttattaaaccatgccttaacatttgtacatgtcaccttacttgagtttccacaacctctgtttaacataataaattaagcatc

SEQ ID NO: 218701 - DNA, 617 bp, Homo sapiens
taaatgtaaaacccaaaactataaaaaccatggtagaccagctaggtaacatcattctcgacataggaatgggcaaaaatttcatgacgaagatgccaaaataatcacagcaaaagcaaaacttggtaagtggcatttaattaagcttaaaagcttctgccctgcaaaagaaaacattaatatcaatagacaacctatagaatgggagaaaatttttgcaaagtatgcctcttacaaagttctaacatgtagtgtctataaagaatgtaaacaaatttgcaaggaaaaacaaacaactttttaaacagtgggcaaaggacatgaacagacagttttcaaaagaagacatgcatgtggacaagaagcacatgygaaaaaagttcaatatattgatcattagagaaatgcaaatcaaaaccacaaggagataccatctcacaccagtcagagtggctattactaaaaagttaaaaattaacagatgctgaccaggttttacagtaaaaggaaaacttattcattgttggtgagagtgcaaattagttcaaccactgtggaaagcagtgtgttgattccttaaaaagctaaaaacagaaataccatttgacccagcaatt

SEQ ID NO: 218702 - DNA, 561 bp, Homo sapiens
agctttctaaagccatgcaactcaaaccatagtccacgggccaacagtattcagctgggagcttgttaaaaaggcagaatctcaggccctcttccagaaccttcattttagcaaaatttccctggtaatttgtgtacacatagaagtttaaaaggcactgttatgaggaataaggcattctgggactacagagcctgttccaaatattttgcataaatttaaacttctgcatctaccatttgtgtcaccctccatttgaggacagaccttgtgagctagaatcaatccactgcattacatacctcacctcaaatatattctrtaatatttttcttcacaatccatttcaactcaaatatttaactattttaattatttcttttcagacctatacttcacagctataaataagaatgactaagaagaaaacatacagcacaatacattgttgaaccattccttcagattaatttcaaaactccaagtaatatactaaaatggtaaatatcatgagggcagatgtctgccttttttgtatactaagatagcccaaacacctag

SEQ ID NO: 218703 - DNA, 542 bp, Homo sapiens
gctgctatttgcattacttgtggttttctctatcaaaacagcattagcattatgaagcttatcaaggttatgtataatttmtctggcttgagtaagtccctttattttgtgcacaatcaaaacatgattagggagaaaaattaggaaatgttttaaacattttagcaaataatttctaaatttagaaatgtagtgaattttacatttctagacaaatatcatcaaattactaagcctttgtaaatcagcctatgtttagaaagagagtaaaaatgttagatgaattcaacacttaattttttccccagagtttcatcttaaagagtattaattgtaacgatgctgatggtgttattaacagagtacttatgaatatggaaaaatgtcagacttccaaataatctgagatatgctatttttacaagtcacactatataaacaatctagacaaaattgttttgtatgtttgagagcatttactgactacatggaagtattaaaacattatgggggacagtacattttaaaagcaaaaatatctg

SEQ ID NO: 218704 - DNA, 542 bp, Homo sapiens
gctgctatttgcattacttgtggttttctctatcaaaacagcattagcattatgaagcttatcaaggttatgtataatttatctggcttgagtaagtccctttattttgtgcacaatcaaaacatgattagggagaaaaattaggaaatgttttaaacattttagcaaataatttctaaatttagaaatgtagtgaattttacatttctagacaaatatcatcaaattactaagcctttgkaaatcagcctatgtttagaaagagagtaaaaatgttagatgaattcaacacttaattttttccccagagtttcatcttaaagagtattaattgtaacgatgctgatggtgttattaacagagtacttatgaatatggaaaaatgtcagacttccaaataatctgagatatgctatttttacaagtcacactatataaacaatctagacaaaattgttttgtatgtttgagagcatttactgactacatggaagtattaaaacattatgggggacagtacattttaaaagcaaaaatatctg

SEQ ID NO: 218705 - DNA, 542 bp, Homo sapiens
gctgctatttgcattacttgtggttttctctatcaaaacagcattagcattatgaagcttatcaaggttatgtataatttatctggcttgagtaagtccctttattttgtgcacaatcaaaacatgattagggagaaaaattaggaaatgttttaaacattttagcaaataatttctaaatttagaaatgtagtgaattttacatttctagacaaatatcatcaaattactaagcctttgtaaatcagcctatgtttagaaagagagtaaaaawgttagatgaattcaacacttaattttttccccagagtttcatcttaaagagtattaattgtaacgatgctgatggtgttattaacagagtacttatgaatatggaaaaatgtcagacttccaaataatctgagatatgctatttttacaagtcacactatataaacaatctagacaaaattgttttgtatgtttgagagcatttactgactacatggaagtattaaaacattatgggggacagtacattttaaaagcaaaaatatctg

SEQ ID NO: 218706 - DNA, 609 bp, Homo sapiens
tctaattagtttctatccactgactcactccctcagctctttgcttataaatttccagctccatgctgggagaaattttagttcaatctctctctactatagctatattattcccccattgctatagtcctgaatagtcttccttgctatttttaacaagcaaccagtgtacacrtttccttttgacaaaacatagtgtccatatgtagagggaagaggaaagctaacaaaatataaagtcatccaaaccacacacaccttggacaagcttatcatgtgtgggaataaaatgctggaggtgggtttggcttcccccccaaaaaaagtgtgtagtttgaaatttcatatcaagaacagttaaattcccagattctttatcattactgaataccttagtaattattcttcatttaacacaacaggaaataggagatttattttctggagagacttgtccaattaaagtggggatatggttgctccgttgagcagaaatttggcttatatagacccaaagctcagaaaaagagttatagatctaaaatgacaatcattgagacaataaagtccatggaaaccacgatgggaagcatctacgtggaaataaaa

SEQ ID NO: 218707 - DNA, 609 bp, Homo sapiens
tctaattagtttctatccactgactcactccctcagctctttgcttataaatttccagctccatgctgggagaaattttagttcaatctctctctactatagctatattattcccccattgctatagtcctgaatagtcttccttgctatttttaacaagcaaccagtgtacacgtttccttttgacaaaacatagtgtccatatgtagagggaagaggaaagctaacaaaatataaagtcatccaaaccacacacaccttggacaagcttatcatgtgtgggaataaaatgctggaggtgggtttggcttcccccccaaaaaaagtgtgtartttgaaatttcatatcaagaacagttaaattcccagattctttatcattactgaataccttagtaattattcttcatttaacacaacaggaaataggagatttattttctggagagacttgtccaattaaagtggggatatggttgctccgttgagcagaaatttggcttatatagacccaaagctcagaaaaagagttatagatctaaaatgacaatcattgagacaataaagtccatggaaaccacgatgggaagcatctacgtggaaataaaa

SEQ ID NO: 218708 - DNA, 567 bp, Homo sapiens
tagttgaaagactatgagtataaagacttatattttctctgtgttgcagtagcaaagtcatctgcagagagagagaagtgagaagggagaagagagtgtcagaaattagaggattgtagagattgaaaaagttatgtcaggcacaattgaaaacccggtttccaatggtgatcattgtcttaaaatattatcagtttgttttcttgcatgrcattcttcagcagcagtcatggactgagaaatatgcagaaatcagatagttgagttcatctagagaagaggttgcaatgtgcttctaaaaaggacaaaaccaaaagcaaccgagggagagagagagagagggagaaagagagagagaaaaatgaagatgtgaaaggggataggtcaaaactcattaatttttttttaagcaaagggccagatagtaaatatttttattttgtgagccatattgtctctgtaggaagtactcagttctcccatgttctgcaaaagcaaccatggacaataagaaaatgtggctgcgttccaataagaatttatttaaaaaataggtgatggattgta

SEQ ID NO: 218709 - DNA, 571 bp, Homo sapiens
tttatatttattttatgcccttttattgtgatttttttaataaataacatttttttggtaaatactggaagttaatattctatagttyagaaaagcaattttgaacactcaactagtgagcccatataaaactacataacagcacagaatatagtaaaataataatataatgaactgggagacaaactaggcactgtgtgccaagtttttcaaggaagatacaatttcaataccaatgaaataaactcccacaaattgatttttctttgtgtgcactcatcagtgtaaatacaattaagtaataaagcctgtacttgttcaggaaagatgttttctattcatagtctgatatctgggtgctttggtttctgataatttgttatgtaaaaaccctgcaaattaaaaaaaaaaaaatcagcagctccaagttcatgggcccttatcacagaggatttaaaacctgtgcattttctttaaactgagaatattattacattttttaatccagtgatgagaccataatagttttctgaaataattcagaataattatatacctaaaagttaatttg

SEQ ID NO: 218710 - DNA, 509 bp, Homo sapiens
aaaaattaattttctccttaaagttttttaagatatttaaagtaaacattttaaaaattatttaatctgtgacccaatttgaatcactttgctcttcagattccgatgtctccacaaaaattccgatgtctccttgaaattagctgatacattataagaaatgaatgactgtcctgtcctatttgggatacacataaaagttaccccaaaggtttaattagatagtgaagtacaaaaatacagatttgtaaaatattamatatataaacaatataaatctctattttgacaagtgacttgataaactaggttaaataattgttaatagagttgggtaaaggcagtgatgttggtaaactagtgatccaaatgaaaagaaagtcggctgggcacggtggctcacgcctgtaatcccagcactttgggaggccaaggcgggtggatcacaaggtcaggagttcgagaccagcccggccaatattgtgaaaccccgtctctaataaaaaata

SEQ ID NO: 218711 - DNA, 509 bp, Homo sapiens
aaaaattaattttctccttaaagttttttaagatatttaaagtaaacattttaaaaattatttaatctgtgacccaatttgaatcactttgctcttcagattccgatgtctccacaaaaattccgatgtctccttgaaattagctgatacattataagaaatgaatgactgtcctgtcctatttgggatacacataaaagttaccccaaaggtttaattagatagtgaagtacaaaaatacagatttgtaaaatattaaatatataaacaatataaatctctattttgacaagtgacttgataaactaggttaaataattgttaatagagttgrgtaaaggcagtgatgttggtaaactagtgatccaaatgaaaagaaagtcggctgggcacggtggctcacgcctgtaatcccagcactttgggaggccaaggcgggtggatcacaaggtcaggagttcgagaccagcccggccaatattgtgaaaccccgtctctaataaaaaata

SEQ ID NO: 218712 - DNA, 614 bp, Homo sapiens
attattccacttttaagtaaatgagaccattaagctctttaaaataaccagtaaataaaaactcaaagcaatgatagctacatcaaaaagtgagggaagaggggaaattatatgttgcaatgttacagagtacattaaagcattcagtatatttcctgaaaatttcataagcacagttcttaatgtttattcataaataaacaaaaccamaccaaaagccatagttcatttgtttctaactaagagtacaaattatttatgcggaaaagtacatataagctcacataaataacacgaataatgttttcattgtgaagatattcataacgttcaaatgacaaggtcttaggaactctgcaccttcattaattttaatcaatatttaacaatcaagattgttttcaataaatcatgatctaataatgaaagggggaaactatttgttttaactttcatttcagttttaccctttactcacaagttgaaattcattctcactctttgcaaactattttgaaacacttccaggtaaaattcatataaatattttatttttcctaatttttggaaaaattttagactattacaatctgagttaatagcctagttccttt

SEQ ID NO: 218713 - DNA, 614 bp, Homo sapiens
attattccacttttaagtaaatgagaccattaagctctttaaaataaccagtaaataaaaactcaaagcaatgatagctacatcaaaaagtgagggaagaggggaaattatatgttgcaatgttacagagtacattaaagcattcagtatatttcctgaaaatttcataagcacagttcttaatgtttattcataaataaacaaaaccacaccaaaagccatagttcawttgtttctaactaagagtacaaattatttatgcggaaaagtacatataagctcacataaataacacgaataatgttttcattgtgaagatattcataacgttcaaatgacaaggtcttaggaactctgcaccttcattaattttaatcaatatttaacaatcaagattgttttcaataaatcatgatctaataatgaaagggggaaactatttgttttaactttcatttcagttttaccctttactcacaagttgaaattcattctcactctttgcaaactattttgaaacacttccaggtaaaattcatataaatattttatttttcctaatttttggaaaaattttagactattacaatctgagttaatagcctagttccttt

SEQ ID NO: 218714 - DNA, 614 bp, Homo sapiens
attattccacttttaagtaaatgagaccattaagctctttaaaataaccagtaaataaaaactcaaagcaatgatagctacatcaaaaagtgagggaagaggggaaattatatgttgcaatgttacagagtacattaaagcattcagtatatttcctgaaaatttcataagcacagttcttaatgtttattcataaataaacaaaaccacaccaaaagccatagttcatttgtttctaactaagagtacaaattayttatgcggaaaagtacatataagctcacataaataacacgaataatgttttcattgtgaagatattcataacgttcaaatgacaaggtcttaggaactctgcaccttcattaattttaatcaatatttaacaatcaagattgttttcaataaatcatgatctaataatgaaagggggaaactatttgttttaactttcatttcagttttaccctttactcacaagttgaaattcattctcactctttgcaaactattttgaaacacttccaggtaaaattcatataaatattttatttttcctaatttttggaaaaattttagactattacaatctgagttaatagcctagttccttt

SEQ ID NO: 218715 - DNA, 484 bp, Homo sapiens
cagtttgggtaacaccagctgttttaacaaacaatcctcaaagttaaagtggctgaaagtttaaaatgtgtttctcattaataacattcaaataaaggcatttcttgtctgggtggcttttaccagggagtaattcaggaaactggcctccagtattgtagctccaacttcctagagggcttcagagttctcctttttcaaatgacacatgttgaaagaactggaagaaacatttatatgtaccaccctctaaaagtggtacacattaaccgggacacagttgcatggaaatatagccaagctatgtatccagaaagaagaaaaaacaagtgtggtaaagagctatcagtctatgcctyagcttttcaaaatccagtcttacggcgcacagatctagagagaatatgtagaccttatattatgtaaaggcattcacagaactatttttgttgttgttaacatacttgagcttccctacggcaat

SEQ ID NO: 218716 - DNA, 484 bp, Homo sapiens
cagtttgggtaacaccagctgttttaacaaacaatcctcaaagttaaagtggctgaaagtttaaaatgtgtttctcattaataacattcaaataaaggcatttcttgtctgggtggcttttaccagggagtaattcaggaaactggcctccagtattgtagctccaacttcctagagggcttcagagttctcctttttcaaatgacacatgttgaaagaactggaagaaacatttatatgtaccaccctctaaaagtggtacacattaaccgggacacagttgcatggaaatatagccaagctatgtatccagaaagaagaaaaaacaagtgtggtaaagagctatcagtctatgcctcagcttttcaaaatccagtcttacggcgcacagatstagagagaatatgtagaccttatattatgtaaaggcattcacagaactatttttgttgttgttaacatacttgagcttccctacggcaat

SEQ ID NO: 218717 - DNA, 596 bp, Homo sapiens
ctgcaagtccccgtctttccctacctatctctacttttctctacttacttatctctacttacttttctstacttacctccacttatctctgtttatccctgcaggcctcttcaggtccctccaggtcctttcaggtctctgtatgtccctgatagtctctgaaatgtccctgttcaggcaccatttgtagttgactgtcactgctactacatgagaccatcacaagtatgttgaattgagcctggaactcctagatgataaacatttttttataccaaccttcaactttttcattaaaattagattgggtagatactataaatagtgtcccaagcactagtggaaagattctaccatgtcttacactggttactatgagtttggagtcagaggtataaggcttgaagaaaaaagcacaatgaaatacaattttatccaccaatctgacatttttaagttttaggaaaattgtgtcttaattcaagctgctataacaacaacaaaaacaacatacactgactggtttaaacaatagaaatttacttctcggagttctggaggctgagagtccaagataaaggtgccagtcaatggtt

SEQ ID NO: 218718 - DNA, 596 bp, Homo sapiens
ctgcaagtccccgtctttccctacctatctctacttttctctacttacttatctctacttacttttctgtacttacctcyacttatctctgtttatccctgcaggcctcttcaggtccctccaggtcctttcaggtctctgtatgtccctgatagtctctgaaatgtccctgttcaggcaccatttgtagttgactgtcactgctactacatgagaccatcacaagtatgttgaattgagcctggaactcctagatgataaacatttttttataccaaccttcaactttttcattaaaattagattgggtagatactataaatagtgtcccaagcactagtggaaagattctaccatgtcttacactggttactatgagtttggagtcagaggtataaggcttgaagaaaaaagcacaatgaaatacaattttatccaccaatctgacatttttaagttttaggaaaattgtgtcttaattcaagctgctataacaacaacaaaaacaacatacactgactggtttaaacaatagaaatttacttctcggagttctggaggctgagagtccaagataaaggtgccagtcaatggtt

SEQ ID NO: 218719 - DNA, 593 bp, Homo sapiens
tggtgtcttaaaatttcaataaatctactgagttaaattaacagcaaagcagaaaaatttsccaaagctatttatagctccattaaaatggaagacaagttaagaaaatgtgtgttctaaataatcatgtcagaagttagtgtttccttcaaatataatcataggcctaagaatttttatccaagattgatgaaattttattttacgcaacaataaatggaacacaaaggctgcacatcatttttttgtcttctgtacatatcactaaaaaaaaaaagcatcaaactaaaacaatgaatataatattaaatagggatttgttaattgctaatatttttaatatagagaaagaataatgtttaatgattaattacaaaattgatgaactagaatagtgagaaatcaaggagagctgaaatttatggaactttatgataaactaataaaggacaattttattcctagcattttaattatttgctttatcattgcattttaaatgcaattatcaaaaataaaggttataactaagaatttcaaaaattctaattatagcagaattggtaacaaagaattgaatacagagggtgaat

SEQ ID NO: 218720 - DNA, 593 bp, Homo sapiens
tggtgtcttaaaatttcaataaatctactgagttaaattaacagcaaagcagaaaaatttgccaaagctatttatagctccaytaaaatggaagacaagttaagaaaatgtgtgttctaaataatcatgtcagaagttagtgtttccttcaaatataatcataggcctaagaatttttatccaagattgatgaaattttattttacgcaacaataaatggaacacaaaggctgcacatcatttttttgtcttctgtacatatcactaaaaaaaaaaagcatcaaactaaaacaatgaatataatattaaatagggatttgttaattgctaatatttttaatatagagaaagaataatgtttaatgattaattacaaaattgatgaactagaatagtgagaaatcaaggagagctgaaatttatggaactttatgataaactaataaaggacaattttattcctagcattttaattatttgctttatcattgcattttaaatgcaattatcaaaaataaaggttataactaagaatttcaaaaattctaattatagcagaattggtaacaaagaattgaatacagagggtgaat

SEQ ID NO: 218721 - DNA, 593 bp, Homo sapiens
tggtgtcttaaaatttcaataaatctactgagttaaattaacagcaaagcagaaaaatttgccaaagctatttatagctccattaaaatggaagacaagttaagaaaatgtgtgttctaaataatcatgtcagaagttagtgtttccttcaaatataatcataggcctaagaatttttatccaagattgatgaaattttattttacgcaacaataaatggaacacaaaggctgcacatcatttttttgtcttctgtacatatcactaaaaaaaaaaagcatcaaactaaaacaatgaatataatattaaatagggatttkttaattgctaatatttttaatatagagaaagaataatgtttaatgattaattacaaaattgatgaactagaatagtgagaaatcaaggagagctgaaatttatggaactttatgataaactaataaaggacaattttattcctagcattttaattatttgctttatcattgcattttaaatgcaattatcaaaaataaaggttataactaagaatttcaaaaattctaattatagcagaattggtaacaaagaattgaatacagagggtgaat

SEQ ID NO: 218722 - DNA, 593 bp, Homo sapiens
tggtgtcttaaaatttcaataaatctactgagttaaattaacagcaaagcagaaaaatttgccaaagctatttatagctccattaaaatggaagacaagttaagaaaatgtgtgttctaaataatcatgtcagaagttagtgtttccttcaaatataatcataggcctaagaatttttatccaagattgatgaaattttattttacgcaacaataaatggaacacaaaggctgcacatcatttttttgtcttctgtacatatcactaaaaaaaaaaagcatcaaactaaaacaatgaatataatattaaatagggatttgttaattgctaatatttttaatatagagaaagaataatgtttaatgattaattacaaaattgatgaactagaatagtgagaaatcaaggagagctgaaatttatggaactttatgataaactaataaaggacaattttattcctagcattttaattatttgctttatcattgcattttaaatgcaattatcaaaaataaaggttataactaagaatttcaaaaattctmattatagcagaattggtaacaaagaattgaatacagagggtgaat

SEQ ID NO: 218723 - DNA, 551 bp, Homo sapiens
tttattgactcaaatactttatgccttctatttcacattttttacaggtttataagtctagatacctatgtcaattagtgaattttctaccaagagttcatgttttgttgcttaaaggcagataatttttttatttaaataatattaaaaagaggaaaatatttcaaaatascaagattgggaggtgtctgggagatttatatgtattgcttttattaactgtctagcactggatttataaaccagcttatttttttaatttaaaagctctctgccttgcaatttaattcacatgatctgcattaaccatgccatattcaaaatttcattgataaattctatccagtagtcaatatcgaattgtaaactgatgtaatgtgctttaaaatatgaagatttaatctttaaaatatgaatatttgattgaataattactaccactaaaatcatgtttacttattagaattatcatataggaattgttttataatgtatatgttaattgaatgtgatttcttaatacttaggatatacgttaagtatacataaac

SEQ ID NO: 218724 - DNA, 551 bp, Homo sapiens
tttattgactcaaatactttatgccttctatttcacattttttacaggtttataagtctagatacctatgtcaattagtgaattttctaccaagagttcatgttttgttgcttaaaggcagataatttttttatttaaataatattaaaaagaggaaaatatttcaaaataccaagattgggaggtgtctgggagatttatatgtattgcttttattaactrtctagcactggatttataaaccagcttatttttttaatttaaaagctctctgccttgcaatttaattcacatgatctgcattaaccatgccatattcaaaatttcattgataaattctatccagtagtcaatatcgaattgtaaactgatgtaatgtgctttaaaatatgaagatttaatctttaaaatatgaatatttgattgaataattactaccactaaaatcatgtttacttattagaattatcatataggaattgttttataatgtatatgttaattgaatgtgatttcttaatacttaggatatacgttaagtatacataaac

SEQ ID NO: 218725 - DNA, 551 bp, Homo sapiens
tttattgactcaaatactttatgccttctatttcacattttttacaggtttataagtctagatacctatgtcaattagtgaattttctaccaagagttcatgttttgttgcttaaaggcagataatttttttatttaaataatattaaaaagaggaaaatatttcaaaataccaagattgggaggtgtctgggagatttatatgtattgcttttattaactgtctagcactggatttataaaccagcttatttttttaatttaaaagctctctgccttgcaatttaattcacatgatctgcattaaccatgccatattcaaaatttcattgataaattctatccagtagtcaatatcgaattgtaaactgatgtaatgtgctttaaaatatgaagatttaatctttaaaatatgaatatttgattgaataattactaccactaaaatcatgtttacttattagaattatcatatargaattgttttataatgtatatgttaattgaatgtgatttcttaatacttaggatatacgttaagtatacataaac

SEQ ID NO: 218726 - DNA, 551 bp, Homo sapiens
tttattgactcaaatactttatgccttctatttcacattttttacaggtttataagtctagatacctatgtcaattagtgaattttctaccaagagttcatgttttgttgcttaaaggcagataatttttttatttaaataatattaaaaagaggaaaatatttcaaaataccaagattgggaggtgtctgggagatttatatgtattgcttttattaactgtctagcactggatttataaaccagcttatttttttaatttaaaagctctctgccttgcaatttaattcacatgatctgcattaaccatgccatattcaaaatttcattgataaattctatccagtagtcaatatcgaattgtaaactgatgtaatgtgctttaaaatatgaagatttaatctttaaaatatgaatatttgattgaataattactaccactaaaatcatgtttacttattagaattatcatataggaattgttttataatgtatatgttaattgaatgtgatttcttratacttaggatatacgttaagtatacataaac

SEQ ID NO: 218727 - DNA, 615 bp, Homo sapiens
gagacgtcatgctccaatgatataatttagtccactttctgcttgaaaatatgcaaagaagaaatctcttgttggtattaatttcagaagtcgtctttgcacacacaatgatgatcattctgttttccttagataattcatggtagtgtaacccaataatataatcttagatgtgtaacttacatacatgcacgtggcacatgaagcatgtggtgtactgagatgaaaataagcttgtaaaagtcattggttacctaactgyggcttggtacctagcacaccctacctgcaacggtcccaacagttacactggctctatttgacttagatgatgtaggggtgggttcaaaatccctctctttttcctaattacatacgactgagcatcccttcccttgtctcaatctgggattttgagagtttattataagatccccagtgaaaatccacccaggtggttcttccctaccctctttaaatgttcacaccctagtgtgaacaagctagaagtggattctttgaggcagtgacaacagaccatgttcaacttctacactccttgatgtttgtgtattggaagaaggtgtgacaagatgccaggcaccagaatttcag

SEQ ID NO: 218728 - DNA, 615 bp, Homo sapiens
gagacgtcatgctccaatgatataatttagtccactttctgcttgaaaatatgcaaagaagaaatctcttgttggtattaatttcagaagtcgtctttgcacacacaatgatgatcattctgttttccttagataattcatggtagtgtaacccaataatataatcttagatgtgtaacttacatacatgcacgtggcacatgaagcatgtggtgtactgagatgaaaataagcttgtaaaagtcattggttacctaactgtggcttggtacctagcacaccctacctgcaacggtcccaacagttacactggctctatttgacttagatgatgyaggggtgggttcaaaatccctctctttttcctaattacatacgactgagcatcccttcccttgtctcaatctgggattttgagagtttattataagatccccagtgaaaatccacccaggtggttcttccctaccctctttaaatgttcacaccctagtgtgaacaagctagaagtggattctttgaggcagtgacaacagaccatgttcaacttctacactccttgatgtttgtgtattggaagaaggtgtgacaagatgccaggcaccagaatttcag

SEQ ID NO: 218729 - DNA, 562 bp, Homo sapiens
gagtgtaactgattggttaatagtaaaagttttgatttcagtaaaatagttgaattattctaaaccataactttgtagctacatgatttgggtgagatgatttttttttttttttttgagaaggactctcgctctgtcacccagactagagggcagtggtgtgatcttggctcactgcaacctcctcctcatgggttcaagtgattctcctgcctcagccccccgagtagctgggattacaggtgtgcaccaccatgccggaccggttttgtactttagtagagatgaggtttcaccatgttggccaggctggtctcaaactcctgatctcaggcgatccacctgctttggacccccaaagtgctgggattacatgagttagccaccacaccctgcctgaggtgatgtttttgagccacagtattcccatcagtaaaccggacatactaattgtaatttcaggtatttttgtgacacatatattrttgaaattattattattaaattactgactttaataatacattcttaaattagttattattataataacataattaat

SEQ ID NO: 218730 - DNA, 581 bp, Homo sapiens
gaacttggagctgctgattttttttttttttaatttgcagggtttttacataacaaattatcagaaaccaaagcacccagatatcagactatgaatagaaaacatctttcctgaacaagtacaggctttattacttaattgtatttacactgatgagtgcacacaaagaaaaatcaatttgtgggagtttatttcattggtattgaaattgtatcttccttgaaaaacttggcacamagtgcctagtttgtctcccagttcattatattattattttactatattctgtgctgttatgtagttttatatgggctcactagttgagtgttcaaaattgcttttctaaactatagaatattaacttccagtatttaccaaaaaaaagtatttatttaaaaaatcacaataaaagggcataaaataaatataaatactcaacattttcaaggttcttgtggaatcattctgaaagcattaaaaggagaggctggaaatctgcgtttataatattggtcatttccctacctacttaatagtaacattaaagcttcctcagtatgctttctgaaacaagtaaaaat

SEQ ID NO: 218731 - DNA, 581 bp, Homo sapiens
gaacttggagctgctgattttttttttttttaatttgcagggtttttacataacaaattatcagaaaccaaagcacccagatatcagactatgaatagaaaacatctttcctgaacaagtacaggctttattacttaattgtatttacactgatgagtgcacacaaagaaaaatcaatttgtgggagtttatttcattggtattgaaattgtatcttccttgaaaaacttggcacacagtgcctagtttgtctcccagttcattatattattattttactatattctgtgctgttatgtagttttatatgggctcactagttgagtgttcaaaattgcttttctaaactatagaatattaacttccagtatttaccaaaaaaaagtatttatttaaaaaatcacaataaaagggcataaaataaatataaatactcaacattttcaaggttcttstggaatcattctgaaagcattaaaaggagaggctggaaatctgcgtttataatattggtcatttccctacctacttaatagtaacattaaagcttcctcagtatgctttctgaaacaagtaaaaat

SEQ ID NO: 218732 - DNA, 581 bp, Homo sapiens
gaacttggagctgctgattttttttttttttaatttgcagggtttttacataacaaattatcagaaaccaaagcacccagatatcagactatgaatagaaaacatctttcctgaacaagtacaggctttattacttaattgtatttacactgatgagtgcacacaaagaaaaatcaatttgtgggagtttatttcattggtattgaaattgtatcttccttgaaaaacttggcacacagtgcctagtttgtctcccagttcattatattattattttactatattctgtgctgttatgtagttttatatgggctcactagttgagtgttcaaaattgcttttctaaactatagaatattaacttccagtatttaccaaaaaaaagtatttatttaaaaaatcacaataaaagggcataaaataaatataaatactcaacattttcaaggttcttgtggaatcattctgaaagcattaaaaggagaggctggaaatctgcgtttataatattggycatttccctacctacttaatagtaacattaaagcttcctcagtatgctttctgaaacaagtaaaaat

SEQ ID NO: 218733 - DNA, 581 bp, Homo sapiens
gaacttggagctgctgattttttttttttttaatttgcagggtttttacataacaaattatcagaaaccaaagcacccagatatcagactatgaatagaaaacatctttcctgaacaagtacaggctttattacttaattgtatttacactgatgagtgcacacaaagaaaaatcaatttgtgggagtttatttcattggtattgaaattgtatcttccttgaaaaacttggcacacagtgcctagtttgtctcccagttcattatattattattttactatattctgtgctgttatgtagttttatatgggctcactagttgagtgttcaaaattgcttttctaaactatagaatattaacttccagtatttaccaaaaaaaagtatttatttaaaaaatcacaataaaagggcataaaataaatataaatactcaacattttcaaggttcttgtggaatcattctgaaagcattaaaaggagaggctggaaatctgcgtttataatattggtmatttccctacctacttaatagtaacattaaagcttcctcagtatgctttctgaaacaagtaaaaat

SEQ ID NO: 218734 - DNA, 299 bp, Homo sapiens
ctcacccaaacaacacaaaatacccacaccttctccaattcaagcaatcatttaattaatcraaagagctgagatgcactccctctctacctcataagggcttccatcatgaacttgattgtgtcctaaattcagtcctccaggagaagctcatcaccctccccatgtcctgaatgtcagaatccaaagctggaaactgcatcctacttaatctttatgttttttgaaaaagtttatctttcttcccgggaataaaaacatctattctctgaggcacatgtaagcatttatccttcagt

SEQ ID NO: 218735 - DNA, 585 bp, Homo sapiens
catcgtggtttccatgaactttattgtctcaatgattgtcattttagatctataactctttttctgagctttgggtctatataagccaaatttctgctcaacggagcaaccatatccccactttaattggacaagtctctccagaaaataaatctcctatttcctgttgtgttaaatgaagaataattactaaggtattcagtaatgataaagaatctgggaatttaactgttcttgatatgaaatttcaaattacacactttttttkggggggaagccaaacccacctccagcattttattcccacacatgataagcttgtccaaggtgtgtgtggtttggatgactttatattttgttagctttcctcttccctctacatatggacactatgttttgtcaaaaggaaatgtgtacactggatgcttgttaaaaatagcaaggaagactattcaggactatagcaatgggggaataatatagctatagtagagagagattgaactaaaatttctcccagcatggagctggaaatttataagcaaagagctgagggagtgagtcagtggatagaaactaattaga

SEQ ID NO: 218736 - DNA, 423 bp, Homo sapiens
taacccatatactcctctatatacctctacagcctccccaaatcaagttgatatattcccctagcagtctgtgcaatggagaccaacaytacattcttttagattgttttaaattacatttttgaacttccagtttattacataccaagagttgattacaacctccttgtttcataagtggaagctatgttagggttggatgtgggtgccataatttcttcaaggatcctggacagagacccacatcaggatcagaaaccctacgatagcattgcagatctcatggctcactaatccttgaagattataattttcatcctactatcagttgcactttctgtcacttttactgcattaagtctcccggtatcaaacagagctctgtggtgtcactgactgaggaatggaatagagatgtccaca

SEQ ID NO: 218737 - DNA, 423 bp, Homo sapiens
taacccatatactcctctatatacctctacagcctccccaaatcaagttgatatattcccctagcagtctgtgcaatggagaccaacactacattcttttagattgttttaaattacatttttgaacttccagtttattacataccaagagttgattacaacctccttgtttcataagtggaagctatgttagggttggatgtgggtgccataatttcttcaaggatcctggacagagacccacatcaggatcagaaaccctacgatagcattgcagatctcatggctcamtaatccttgaagattataattttcatcctactatcagttgcactttctgtcacttttactgcattaagtctcccggtatcaaacagagctctgtggtgtcactgactgaggaatggaatagagatgtccaca

SEQ ID NO: 218738 - DNA, 394 bp, Homo sapiens
agatgaagcctttcattcaatgtgtgattttcagttcaaaaaaacacactgatgttcaagaacaaagactggtacaataactatctacaaaatgcttttgttactagattttaattccttcatcaaacagacacagtcaaagttgatagtgtcactagatctagaggtctatcaatatccttcccaccatttaatatgttcttaatctcagggaaattctaaatcatattcttctaaaytgtacagttgactcctgaaaaacacaaggtttagggccatcaaacctccctaacccctccccaccaccccagcacagtcaaaaattcacatataactttggactccccaaaactaaactaacagcctactgttgactggacaatccttaacacat

SEQ ID NO: 218739 - DNA, 501 bp, Homo sapiens
ggaaaatgtatcactctcatggcaaacacaatcatctgcttctactggtaccaggaagaatgtcttccaaacaccaaggagggaggggtcaaggagaccactggcttattaattttcatccttcattccactgaatcccagaaccaccggacastgccactgaggatcctgaaagccaagctctacctctttgaggaaaaatttcttgtcacttaccaccctaaagcaatgagaatgagagtgtcctgtggccccagacagcctccattctcagtttacaccataaacatgctgggggaacactaaagggactccctaaaatcgatgccattattttttattttgaaaattttctaccagaaatggaccaggtgctgtggctcatgtctgtaatcccaacactgctggacaccaaggcaggcagttcacttgaggtcaggagttcgagaacagcctggcctacataatgaaacgatgtctctactacatacaaaaaaatta

SEQ ID NO: 218740 - DNA, 483 bp, Homo sapiens
actctcatggcaaacacaatcatctgcttctactggtaccaggaagaatgtcttccaaacaccaaggagggaggggtcaaggagaccactggcttattaattttcatccttcattccactgaatcccagaaccaccggacagtgccactgaggatcctgaaagccaagctctacctctttgaggaaaaatttcttgtcacttaccamcctaaagcaatgagaatgagagtgtcctgtggccccagacagcctccattctcagtttacaccataaacatgctgggggaacactaaagggactccctaaaatcgatgccattattttttattttgaaaattttctaccagaaatggaccaggtgctgtggctcatgtctgtaatcccaacactgctggacaccaaggcaggcagttcacttgaggtcaggagttcgagaacagcctggcctacataatgaaacgatgtctctactacatacaaaa

SEQ ID NO: 218741 - DNA, 527 bp, Homo sapiens
ctctagaagacaaatccagggaaaatgtatcactctcatggcaaacacaatcatctgcttctactggtaccaggaagaatgtcttccaaacaccaaggagggaggggtcaaggagaccactggcttattaattttcatccttcattccactgaatcccagaaccaccggacagtgccactgaggatcctgaaagccaagctctacctctttgaggaaaaatttcttgtcacttaccaccctaaagcaatgagaatgagagtgtcctgtggccccagacagcctccattctcagttyacaccataaacatgctgggggaacactaaagggactccctaaaatcgatgccattattttttattttgaaaattttctaccagaaatggaccaggtgctgtggctcatgtctgtaatcccaacactgctggacaccaaggcaggcagttcacttgaggtcaggagttcgagaacagcctggcctacataatgaaacgatgtctctactacatacaaaaaaattaagaatca

SEQ ID NO: 218742 - DNA, 501 bp, Homo sapiens
ggaaaatgtatcactctcatggcaaacacaatcatctgcttctactggtaccaggaagaatgtcttccaaacaccaaggagggaggggtcaaggagaccactggcttattaattttcatccttcattccactgaatcccagaaccaccggacagtgccactgaggatcctgaaagccaagctctacctctttgaggaaaaatttcttgtcacttaccaccctaaagcaatgagaatgagagtgtcctgtggccccagacagcctccattctcagtttacaccataaacrtgctgggggaacactaaagggactccctaaaatcgatgccattattttttattttgaaaattttctaccagaaatggaccaggtgctgtggctcatgtctgtaatcccaacactgctggacaccaaggcaggcagttcacttgaggtcaggagttcgagaacagcctggcctacataatgaaacgatgtctctactacatacaaaaaaatta

SEQ ID NO: 218743 - DNA, 527 bp, Homo sapiens
gtaaacctgctggggcctcagggctcagaaaaagcyctggacctatctcccagtcatgcctctcccactcccaagtgcctctggccctggaactgtcagagacccctgtgtcttttccatgtgctcttcttctcctttcactcagccctgcctctgccaatgctccctgcatttgcctccatgtaaggcccccaaccccaagctctggcagtggctggggagctaggggtttttgtgcccacctggagaaagcctcactcagcatgggcccgtgtgggttctgcagtcttttcctacacagggtcacctacaggtgttatggttgcatctcccctagaagagccaatggggatgggtgaggaatctgaaatcactcaggcaccccacatacaaatgagagccagggtccctgcaagcacaggccccggggtaggtcctggcccttgttgttgccttctgatcccagaggccttgggtttgtggtcacaggagccctacctacttcccatgcacccccagcccaagat

SEQ ID NO: 218744 - DNA, 538 bp, Homo sapiens
aaacctgctggggcctcagggctcagaaaaagctctggacctatctcccagtcatgcctctcccactcccaagtgcctctggccctggaactgtcagagacccctgtgtcttttccatgtgctcttcttctcctttcactcagccctgcctctgccaatgctccctgcatttgcctccatgtarggcccccaaccccaagctctggcagtggctggggagctaggggtttttgtgcccacctggagaaagcctcactcagcatgggcccgtgtgggttctgcagtcttttcctacacagggtcacctacaggtgttatggttgcatctcccctagaagagccaatggggatgggtgaggaatctgaaatcactcaggcaccccacatacaaatgagagccagggtccctgcaagcacaggccccggggtaggtcctggcccttgttgttgccttctgatcccagaggccttgggtttgtggtcacaggagccctacctacttcccatgcacccccagcccaagataaacaaattcctg

SEQ ID NO: 218745 - DNA, 555 bp, Homo sapiens
gaagtaaacctgctggggcctcagggctcagaaaaagctctggacctatctcccagtcatgcctctcccactcccaagtgcctctggccctggaactgtcagagacccctgtgtcttttccatgtgctcttcttctcctttcactcagccctgcctctgccaatgctccctgcatttgcctccatgtaaggcccccaaccccaagctctggcagtggctggggagctaggggtttttgtgcccacctggagaaagcctcactcagcatgggcccgtgtgggttctgcartcttttcctacacagggtcacctacaggtgttatggttgcatctcccctagaagagccaatggggatgggtgaggaatctgaaatcactcaggcaccccacatacaaatgagagccagggtccctgcaagcacaggccccggggtaggtcctggcccttgttgttgccttctgatcccagaggccttgggtttgtggtcacaggagccctacctacttcccatgcacccccagcccaagataaacaaattcctgcagcctccccgg

SEQ ID NO: 218746 - DNA, 556 bp, Homo sapiens
gaagtaaacctgctggggcctcagggctcagaaaaagctctggacctatctcccagtcatgcctctcccactcccaagtgcctctggccctggaactgtcagagacccctgtgtcttttccatgtgctcttcttctcctttcactcagccctgcctctgccaatgctccctgcatttgcctccatgtaaggcccccaaccccaagctctggcagtggctggggagctaggggtttttgtgcccacctggagaaagcctcactcagcatgggcccgtgtgggttctgcagtcttttcctacacagggtcacctacaggtgttatrgttgcatctcccctagaagagccaatggggatgggtgaggaatctgaaatcactcaggcaccccacatacaaatgagagccagggtccctgcaagcacaggccccggggtaggtcctggcccttgttgttgccttctgatcccagaggccttgggtttgtggtcacaggagccctacctacttcccatgcacccccagcccaagataaacaaattcctgcagcctccccggt

SEQ ID NO: 218747 - DNA, 554 bp, Homo sapiens
ctgctggggcctcagggctcagaaaaagctctggacctatctcccagtcatgcctctcccactcccaagtgcctctggccctggaactgtcagagacccctgtgtcttttccatgtgctcttcttctcctttcactcagccctgcctctgccaatgctccctgcatttgcctccatgtaaggcccccaaccccaagctctggcagtggctggggagctaggggtttttgtgcccacctggagaaagcctcactcagcatgggcccgtgtgggttctgcagtcttttcctacacagggtcacctacaggtgttatggttgcatctcccctagaagagccaatggggatgggtgaggaatctgaaatcactcaggcaccccayatacaaatgagagccagggtccctgcaagcacaggccccggggtaggtcctggcccttgttgttgccttctgatcccagaggccttgggtttgtggtcacaggagccctacctacttcccatgcacccccagcccaagataaacaaattcctgcagcctccccggtccatgta

SEQ ID NO: 218748 - DNA, 554 bp, Homo sapiens
ctgctggggcctcagggctcagaaaaagctctggacctatctcccagtcatgcctctcccactcccaagtgcctctggccctggaactgtcagagacccctgtgtcttttccatgtgctcttcttctcctttcactcagccctgcctctgccaatgctccctgcatttgcctccatgtaaggcccccaaccccaagctctggcagtggctggggagctaggggtttttgtgcccacctggagaaagcctcactcagcatgggcccgtgtgggttctgcagtcttttcctacacagggtcacctacaggtgttatggttgcatctcccctagaagagccaatggggatgggtgaggaatctgaaatcactcaggcaccccacatacaaatgagagccagggtccctgcaagcacaggccccggggtaggtcctggcccttgttgttgccttctgatcccagaggccttgggtttgtggtcacaggagccctacctacttcccakgcacccccagcccaagataaacaaattcctgcagcctccccggtccatgta

SEQ ID NO: 218749 - DNA, 554 bp, Homo sapiens
ctgctggggcctcagggctcagaaaaagctctggacctatctcccagtcatgcctctcccactcccaagtgcctctggccctggaactgtcagagacccctgtgtcttttccatgtgctcttcttctcctttcactcagccctgcctctgccaatgctccctgcatttgcctccatgtaaggcccccaaccccaagctctggcagtggctggggagctaggggtttttgtgcccacctggagaaagcctcactcagcatgggcccgtgtgggttctgcagtcttttcctacacagggtcacctacaggtgttatggttgcatctcccctagaagagccaatggggatgggtgaggaatctgaaatcactcaggcaccccacatacaaatgagagccagggtccctgcaagcacaggccccggggtaggtcctggcccttgttgttgccttctgatcccagaggccttgggtttgtggtcacaggagccctacctacttcccatgcacccccagcccaagataaacaaattcctrcagcctccccggtccatgta

SEQ ID NO: 218750 - DNA, 527 bp, Homo sapiens
agatcttcatccatgaatttttccttgaggcaaacatccatgaacaccttcaagggctgcttctctcctgtccttggacagtcctccactgtctgyctcttactcatggcctctggggagcaggacaggggcctggctccagaccatatggtccaaaaattctcatcaacatcccgcaattccagcacttgaagtttccgcctcctgtgagtaacataggggaaaagctcagaacgtagacaaggacccacccctgacctgggctttcactccacatcaaggacttcagctgcttttttcctcagcgcccctccttctgtctcttctccatccctttcccccttggattctgcctggtacccacttctagtgcctttaccttccactgggagcaggcaggttcctgtttcctcagtggaccctgtatggtgagcagtcctttcccagaggagctgggcaatagccaagaacgttcccagctttctcactggcaccatcagaagcccctgggccaccccgggttccca

SEQ ID NO: 218751 - DNA, 617 bp, Homo sapiens
gaatttttccttgaggcaaacatccatgaacaccttcaagggctgcttctctcctgtccttggacagtcctccactgtctgcctcttactcatggcctctggggagcaggacaggrgcctggctccagaccatatggtccaaaaattctcatcaacatcccgcaattccagcacttgaagtttccgcctcctgtgagtaacataggggaaaagctcagaacgtagacaaggacccacccctgacctgggctttcactccacatcaaggacttcagctgcttttttcctcagcgcccctccttctgtctcttctccatccctttcccccttggattctgcctggtacccacttctagtgcctttaccttccactgggagcaggcaggttcctgtttcctcagtggaccctgtatggtgagcagtcctttcccagaggagctgggcaatagccaagaacgttcccagctttctcactggcaccatcagaagcccctgggccaccccgggttcccaatttgtctgacccagctgtttagtccctggacacctgggccctccccacctgggtcacctcacctggggcgaaccttttgggcaagcaggcaatcaatcccatc

SEQ ID NO: 218752 - DNA, 527 bp, Homo sapiens
agatcttcatccatgaatttttccttgaggcaaacatccatgaacaccttcaagggctgcttctctcctgtccttggacagtcctccactgtctgcctcttactcatggcctctggggagcaggacaggggcctggctccagaccatatggtccaaaaattctcatcaacatcccgcawttccagcacttgaagtttccgcctcctgtgagtaacataggggaaaagctcagaacgtagacaaggacccacccctgacctgggctttcactccacatcaaggacttcagctgcttttttcctcagcgcccctccttctgtctcttctccatccctttcccccttggattctgcctggtacccacttctagtgcctttaccttccactgggagcaggcaggttcctgtttcctcagtggaccctgtatggtgagcagtcctttcccagaggagctgggcaatagccaagaacgttcccagctttctcactggcaccatcagaagcccctgggccaccccgggttccca

SEQ ID NO: 218753 - DNA, 527 bp, Homo sapiens
agatcttcatccatgaatttttccttgaggcaaacatccatgaacaccttcaagggctgcttctctcctgtccttggacagtcctccactgtctgcctcttactcatggcctctggggagcaggacaggggcctggctccagaccatatggtccaaaaattctcatcaacatcccgcaattccagcacttgaagtttccrcctcctgtgagtaacataggggaaaagctcagaacgtagacaaggacccacccctgacctgggctttcactccacatcaaggacttcagctgcttttttcctcagcgcccctccttctgtctcttctccatccctttcccccttggattctgcctggtacccacttctagtgcctttaccttccactgggagcaggcaggttcctgtttcctcagtggaccctgtatggtgagcagtcctttcccagaggagctgggcaatagccaagaacgttcccagctttctcactggcaccatcagaagcccctgggccaccccgggttccca

SEQ ID NO: 218754 - DNA, 595 bp, Homo sapiens
tccatgaacaccttcaagggctgcttctctcctgtccttggacagtcctccactgtctgcctcttactcatggcctctggggagcaggacaggggcctggctccagaccatatggtccaaaaattctcatcaacatcccgcaattccagcacttgaagtttccgcctcctgtgagtaacataggggaaaagctcagaacgtagacaaggacccacccctgacctgggctttcactccacatcaaggacttcagctgcttttttcctcagcgcccctccttctgtctcttctccatccctttcccccttggattctgcctggtacccacttctagtgcctttaccttccactgggagcaggcaggttcctgtttcctcagtggaccctgtatggtgagcagtcctttcccagaggagctgggcaatagccaagaacgttcccagctytctcactggcaccatcagaagcccctgggccaccccgggttcccaatttgtctgacccagctgtttagtccctggacacctgggccctccccacctgggtcacctcacctggggcgaaccttttgggcaagcaggcaatcaatcccatc

SEQ ID NO: 218755 - DNA, 619 bp, Homo sapiens
aaacatccatgaacaccttcaagggctgcttctctcctgtccttggacagtcctccactgtctgcctcttactcatggcctctggggagcaggacaggggcctggctccagaccatatggtccaaaaattctcatcaacatcccgcaattccagcacttgaagtttccgcctcctgtgagtaacataggggaaaagctcagaacgtagacaaggacccacccctgacctgggctttcactccacatcaaggacttcagctgcttttttcctcagcgcccctccttctgtctcttctccatccctttcccccttggattctgcctggtacccacttctagtgcctttaccttccactgggagcaggcaggttcctgtttcctcagtggaccctgtatggtgagcagtcctttcccagaggagctgggcaatagccaagaacgttcccagctttctcactggcaccatcagaagcccctgggccaccccrggttcccaatttgtctgacccagctgtttagtccctggacacctgggccctccccacctgggtcacctcacctggggcgaaccttttgggcaagcaggcaatcaatcccatccactacataatgtaagatc

SEQ ID NO: 218756 - DNA, 473 bp, Homo sapiens
ttggtccatcaaagttataactgagtgtggcacccgcacagttagctgctgtcccagagttaatttgctagcttcttgtgttaacaagatggtggcagctaatgccttaaggcaaggagaccatcctagcaccacagagtccagttgtwtgtataaatacgccactgggcaatgccatgatgctataatttgagtcagaacccctataaccattccttttcattcatgaatacatagaaagagaggcttaattatatctggtagtcctaaggttgggcctgacctaaagcttccttgagctgtttgaatgctatttcctgattagtttcccaaaggaggggctctttttctccgattttgtggcttcatataatgtcttagccatcactgaaaaatttggaatccagatgtggcagaatcctgctgcccctaaaggaagggggccagcccctccacacctgtgggtatacctc

SEQ ID NO: 218757 - DNA, 599 bp, Homo sapiens
cagtggcgcgatcttgtctcattgcaaccttcgcctcccgggttcaagtgattgtcctgccycagcctcctgaatacctgggattacaggcgaatgccaccactcccagcaaattttgtgtatttttagtagagacggggtttcaccatgttggcaaggctggtctcaaaatcccgaggctgccttggcctcccaaagtgctgggattagaagtgtgagacaccatgcccggccataataataaattttattttatctttttttttttgagacggagttttgctactgttgcccaggctggagtgcaatggctcagtctgagctcaccgcaacctccacctcccaggttcaaacgattctcccgcctcagcctatcgagtagctgcaattacagacgtgcgccaccacgcctggctaattttttgtattttaagtagagaaggggtttcttcatgttgctcaggctggtctcaaactcccaacctcaggtgatccacctgcctcagcctcccaaagtgctggaattacaggcgtgagccactgcacctggctcataatagtacatttttaaaaacaccataaaatataatccttgcaac

SEQ ID NO: 218758 - DNA, 599 bp, Homo sapiens
cagtggcgcgatcttgtctcattgcaaccttcgcctcccgggttcaagtgattgtcctgcctcagcctcctgaatacctgggattacaggcgaatgccaccactcccagcaaattttgtgtatttttagtagagacggggtttcaccatgttggcaaggctggtctcaaaatcccgaggctgccttggcctcccaaagtgstgggattagaagtgtgagacaccatgcccggccataataataaattttattttatctttttttttttgagacggagttttgctactgttgcccaggctggagtgcaatggctcagtctgagctcaccgcaacctccacctcccaggttcaaacgattctcccgcctcagcctatcgagtagctgcaattacagacgtgcgccaccacgcctggctaattttttgtattttaagtagagaaggggtttcttcatgttgctcaggctggtctcaaactcccaacctcaggtgatccacctgcctcagcctcccaaagtgctggaattacaggcgtgagccactgcacctggctcataatagtacatttttaaaaacaccataaaatataatccttgcaac

SEQ ID NO: 218759 - DNA, 599 bp, Homo sapiens
cagtggcgcgatcttgtctcattgcaaccttcgcctcccgggttcaagtgattgtcctgcctcagcctcctgaatacctgggattacaggcgaatgccaccactcccagcaaattttgtgtatttttagtagagacggggtttcaccatgttggcaaggctggtctcaaaatcccgaggctgccttggcctcccaaagtgctgggattagaagtgtgagacaccatgcccggccataataataaattttattttatctttttttttttgagacggagttttgctactgttgcccaggctggagtgcaatggctcagtctgagctcaccgcaacctccacctcccaggttcaaacgattctcccgcctcagcctatcgagtagctgcaattacagacgtgcgccaccacgcctggctaattttttgtattttaagtagagaaggggtttcttcatgttgctcargctggtctcaaactcccaacctcaggtgatccacctgcctcagcctcccaaagtgctggaattacaggcgtgagccactgcacctggctcataatagtacatttttaaaaacaccataaaatataatccttgcaac

SEQ ID NO: 218760 - DNA, 388 bp, Homo sapiens
attatgaatgaatccagtccagaaatgcccaccctgccccctgctggctcctggggctctgctctttgggggaatcgtgatgaaattgtggcagagagtagaagttgagccccattgcatgccctgagttcttgttgcctctctattatcaggaaaaggaggtgagattgaaagatgaaaartgctgggacttctgctgagaagagaaaaaagaacaagatgtattgatcttactgtatgccagaccccatgccaagccctaaacatgaaccatctcattggatcctacctaggtcccataagctgttggacatcatcatcctcattttacaggaagctgaggctcttggctaacatccctgacagcaacaccagcccctgagtactc

SEQ ID NO: 218761 - DNA, 617 bp, Homo sapiens
gaagaattcagaaaggcaccctcactagatctgaaccccccagtagctagcttcctagtatggcaacctctctatagcatctccsctagctgatccctctgcctctattgggatggttgcatgatacccatttcaggacagggccgccaacaggacaatgtatggacattctagtgtccccttcactgtttcatcctcataggctggctcacagtagatgcccactagcgtttagtgaaacaggctctgctgtggtctgcagagaaagctcaccaccctccctcacctgagcagctggtccaggtggccttcgaggaaagaaacagagttcatataaagcttttggaggcagtgcagcttgaggaactgagtggtgaactgggtaacaatctccttcttctgctctggggaaacgtagcgagagacatccatgtgggagagaacgagcttctgaagattcctcatgtggcccaggtatggggtaaactgtgtcaggatgggcagtacccacttgcaattcacttccacctcctggatacagtctaggttcaccattttcaggatgcttctgatattgcggaagggcattcccaaaattttcagcttcttacagcaca

SEQ ID NO: 218762 - DNA, 617 bp, Homo sapiens
gaagaattcagaaaggcaccctcactagatctgaaccccccagtagctagcttcctagtatggcaacctctctatagcatctcccctagctgatccckctgcctctattgggatggttgcatgatacccatttcaggacagggccgccaacaggacaatgtatggacattctagtgtccccttcactgtttcatcctcataggctggctcacagtagatgcccactagcgtttagtgaaacaggctctgctgtggtctgcagagaaagctcaccaccctccctcacctgagcagctggtccaggtggccttcgaggaaagaaacagagttcatataaagcttttggaggcagtgcagcttgaggaactgagtggtgaactgggtaacaatctccttcttctgctctggggaaacgtagcgagagacatccatgtgggagagaacgagcttctgaagattcctcatgtggcccaggtatggggtaaactgtgtcaggatgggcagtacccacttgcaattcacttccacctcctggatacagtctaggttcaccattttcaggatgcttctgatattgcggaagggcattcccaaaattttcagcttcttacagcaca

SEQ ID NO: 218763 - DNA, 617 bp, Homo sapiens
gaagaattcagaaaggcaccctcactagatctgaaccccccagtagctagcttcctagtatggcaacctctctatagcatctcccctagctgatccctctgcctctattgggatggttgcatgatacccatttcaggacagggccgccaacaggacaatgtatggacattctagtgtccccttcactgtttcatcctcataggctggctcacagtagatgcccactagcgtttagtgaaacaggctctgctgtggtctgcagagaaagctcaccaccctccctcacctgagcagctggtccaggtggccttcgaggaaagaaacagagttcatataaagcttttggaggcagtgcagcttgaggaactgagtggtgaactkggtaacaatctccttcttctgctctggggaaacgtagcgagagacatccatgtgggagagaacgagcttctgaagattcctcatgtggcccaggtatggggtaaactgtgtcaggatgggcagtacccacttgcaattcacttccacctcctggatacagtctaggttcaccattttcaggatgcttctgatattgcggaagggcattcccaaaattttcagcttcttacagcaca

SEQ ID NO: 218764 - DNA, 406 bp, Homo sapiens
tcccaaaattttcagcttcttacagcacaggtgtagtaaatctttcctctgcttgacccatagaaggaggcaggtgaggtgttcatccagagtcctgttcttgagccaaagttctacgaacacagtcaagggctgccgtcctctcatccttggacagtcctgcactggttttttgttcctcttggcattgaggaagcacccacgggccatagcttcagaccaaaccatccagaagttctcacagacatcctgtaaatccagcacttgaagtttccacctcctgtgggaaaatagaggtragactgagaatttcagaactcatttctgaacttaaactccacatcctggatagcagctcctcccctccctgcttcttgtccctgtctctgacatttctccaccctgt

SEQ ID NO: 218765 - DNA, 406 bp, Homo sapiens
tcccaaaattttcagcttcttacagcacaggtgtagtaaatctttcctctgcttgacccatagaaggaggcaggtgaggtgttcatccagagtcctgttcttgagccaaagttctacgaacacagtcaagggctgccgtcctctcatccttggacagtcctgcactggttttttgttcctcttggcattgaggaagcacccacgggccatagcttcagaccaaaccatccagaagttctcacagacatcctgtaaatccagcacttgaagtttccacctcctgtgggaaaatagaggtgagactgagaatttmagaactcatttctgaacttaaactccacatcctggatagcagctcctcccctccctgcttcttgtccctgtctctgacatttctccaccctgt

SEQ ID NO: 218766 - DNA, 592 bp, Homo sapiens
  misc_feature (1)...(592): n = A,T,C or G
ggaagcctgcccaatgtgacctgcaagtcttgcttcactcccaggttcccattaaaaacccagctcaacgcctgaccgagctcgcaccctcacttccatttgtaattttgacatgacttttttamaggaccatcaggttcctatgcctgctgcacagtagtttagcaatattctgagacagcagggttcgcagcagagagtttatgcatcacaggtggctgatngagaagctgggagagatcttcacatcatctccccaacgagtactgaagtnttccagtgaatcctggatagcaagaggccggaaagttggggtagcggtaagagcgaagaagtcaacaggatgtagaaactgcattctntggtgagttggtgcatcgcatgccccttcagatcagctggcatcagcagtttcactgacatgcagaacctgaaagaatatctcagatgaaaaagttaatgttttacaatgcttaaatggttgtctgcagggaagttaaggggaactgtaatctaaggtctatatgattttggaacagtaggctgccagtaaccatgaggaaccaggtcagagagcaagaagacctcctga

SEQ ID NO: 218767 - DNA, 371 bp, Homo sapiens
  misc_feature (1)...(371): n = A,T,C or G
ttccagtgaatcctggatagcaagaggccggaaagttggggtagcggtaagagcgaagaagtcaacaggatgtagaaactgcattctntggtgagttggtgcatcgcatgccccttcagatcagctggcatcagcagtttcactgacatgcagaacctgaaagaatatctcagatgaaaaagttaatgttttacaatgcttaaatggttgtctgcagggaagttaaggggaactgtaatctaaggtctatatgattttggaacagtaggctgccagyaaccatgaggaaccaggtcagagagcaagaagacctcctgatgaatgctgaatgtgttgcaagcttggtttatttttgtttctctccctccctt

SEQ ID NO: 218768 - DNA, 384 bp, Homo sapiens
tggagtctcactgtgttgcccagactggagtgcagtggcacgatctcaactcactgcaacctttacctcccgggttcaagcaattctcatgcctcagtctccatcctcagaagctggtgtcacagacatctgaaaccatgcctggctaatttttgtatttttagtagaggtggggtttcaccaygctggccaggtttgtctcgaacacctgacctcaagtgatccacctgccttggcctcccaaagtgctgggattacagctgtgagtcactggtgcttggcctctacttttttttattttaattagccgagcatggtgacatgcatctgtagtcccagctatttgggtggctggtgtgggagaatcacttgagcccagaagat

SEQ ID NO: 218769 - DNA, 384 bp, Homo sapiens
tggagtctcactgtgttgcccagactggagtgcagtggcacgatctcaactcactgcaacctttacctcccgggttcaagcaattctcatgcctcagtctccatcctcagaagctggtgtcacagacatctgaaaccatgcctggctaatttttgtatttttagtagaggtggggtttcaccacgctggccaggttkgtctcgaacacctgacctcaagtgatccacctgccttggcctcccaaagtgctgggattacagctgtgagtcactggtgcttggcctctacttttttttattttaattagccgagcatggtgacatgcatctgtagtcccagctatttgggtggctggtgtgggagaatcacttgagcccagaagat

SEQ ID NO: 218770 - DNA, 384 bp, Homo sapiens
tggagtctcactgtgttgcccagactggagtgcagtggcacgatctcaactcactgcaacctttacctcccgggttcaagcaattctcatgcctcagtctccatcctcagaagctggtgtcacagacatctgaaaccatgcctggctaatttttgtatttttagtagaggtggggtttcaccacgctggccaggtttgtctcgaacacctgacctcaagtgatccacctgccttggcctyccaaagtgctgggattacagctgtgagtcactggtgcttggcctctacttttttttattttaattagccgagcatggtgacatgcatctgtagtcccagctatttgggtggctggtgtgggagaatcacttgagcccagaagat

SEQ ID NO: 218771 - DNA, 520 bp, Homo sapiens
ccttttctctgggtttgtcctctggaagttttccctgcagattcatgaagatgagcatccggactccacccagactcctggagcttgcggggcggagcctgctgagggaccaagccttggtcatgtccaccctggaggagctgcccacagaacttttccccccactgttcatggaggccttcagcaggagacgctgtgaggccctgaagctgatggtgcaggcctggcccttccgccgcctccctctgaggcctctgataaagatgccttgtctggaggccttccaagctgtgctcgatgggctkgatgcactgcttacccaaggggtttgtcccaggtgaggtgggccaggtgggctggtggggagggcccaggtgtccaactgaaggaacagctgggtcatgtgaagtgaggaggcccaagggggatggtggtggtgaggaagccgagaggacttggccattcaccagctcctcagggaaagcactgctcaccacccaaggtccatggaggtaacagg

SEQ ID NO: 218772 - DNA, 520 bp, Homo sapiens
ccttttctctgggtttgtcctctggaagttttccctgcagattcatgaagatgagcatccggactccacccagactcctggagcttgcggggcggagcctgctgagggaccaagccttggtcatgtccaccctggaggagctgcccacagaacttttccccccactgttcatggaggccttcagcaggagacgctgtgaggccctgaagctgatggtgcaggcctggcccttccgccgcctccctctgaggcctctgataaagatgccttgtctggaggccttccaagctgtgctcgatgggctggatgcactgcttacccaaggggttygtcccaggtgaggtgggccaggtgggctggtggggagggcccaggtgtccaactgaaggaacagctgggtcatgtgaagtgaggaggcccaagggggatggtggtggtgaggaagccgagaggacttggccattcaccagctcctcagggaaagcactgctcaccacccaaggtccatggaggtaacagg

SEQ ID NO: 218773 - DNA, 520 bp, Homo sapiens
ccttttctctgggtttgtcctctggaagttttccctgcagattcatgaagatgagcatccggactccacccagactcctggagcttgcggggcggagcctgctgagggaccaagccttggtcatgtccaccctggaggagctgcccacagaacttttccccccactgttcatggaggccttcagcaggagacgctgtgaggccctgaagctgatggtgcaggcctggcccttccgccgcctccctctgaggcctctgataaagatgccttgtctggaggccttccaagctgtgctcgatgggctggatgcactgcttacccaaggggtttgtcccaggtgaggtggsccaggtgggctggtggggagggcccaggtgtccaactgaaggaacagctgggtcatgtgaagtgaggaggcccaagggggatggtggtggtgaggaagccgagaggacttggccattcaccagctcctcagggaaagcactgctcaccacccaaggtccatggaggtaacagg

SEQ ID NO: 218774 - DNA, 534 bp, Homo sapiens
tctcctgtcactcaggctacagtgcagtggcacaatcatacctcactgcaacctaaatttcctgggttcaagtgatcctcccacctcagcctcctgagtagctaggactacagctgtgtgagccaccacacctggatacttccttttagtagagacaaggcctcgctgtcttccccaggctgatctggaactcctgagcttgtgattctcctgccttggcctcccaaaatgcagggagtataggcgtggaccaccacgcttggsttggcctcctctagttcttcacttctttagatgtctgttaactccttgttagtttctgtggctgttcagtgggttaatacacactaggtggacaccaaaggcctggaacattactgggcaagaacagtgagccaatccacgtggaaagcaccttcttctcagggtctttcaccgctagccagatgctgagaccctgcccactccctgtgagtctccacatgcttccagaagccttatttggtggatgtcagcttcactgcacaaggagcc

SEQ ID NO: 218775 - DNA, 519 bp, Homo sapiens
gaattcacttatcgcatctatgagtcttggtggaatctttccagttttctaagcacatatgatcacatcattggcaaacacaggtagtttcacttccttctttccaatttaattatactttattccttttgcttaccagattgctctgacaaaaattttcagtcctatgttgattacaagtggataaagtgaggatttttgtctgcttgtagttcctagcaggaatactttcaacgtttcttcattcaatatgatgttgcatgtggatttgtcatttttggcttctattattttgatgtatgttctttctaggcatagtttgtgtaagsgtagtctattattttacaagctcagatttgtattctgttttatctgagtgcattgtgagatttggcatctattttacctgatataagtacagctactcttgctgtttttggtttccagttgcatggaatatcttattctaccccttcactttccatctacatgtatgtgtataggtgaattaagtttctg

SEQ ID NO: 218776 - DNA, 519 bp, Homo sapiens
gaattcacttatcgcatctatgagtcttggtggaatctttccagttttctaagcacatatgatcacatcattggcaaacacaggtagtttcacttccttctttccaatttaattatactttattccttttgcttaccagattgctctgacaaaaattttcagtcctatgttgattacaagtggataaagtgaggatttttgtctgcttgtagttcctagcaggaatactttcaacgtttcttcattcaatatgatgttgcatgtggatttgtcatttttggcttctattattttgatgtatgttctttctaggcatagtttgtgtaagggtagtctattattttacaagctcagatttgtattctgttttatctgagtgcattgtgagatttggcatctattttacctgatataagtacagctactcttgctgtttttggtttccagttgcatggaatatcttattctaccccttcactttccatctacatgtatgtktataggtgaattaagtttctg

SEQ ID NO: 218777 - DNA, 601 bp, Homo sapiens
agggtgagtgagataaagaggagctttactgarcaatagaacagctcagagacccacagtgggtaacttctttctgcagccagggcgtcctgatgagtgtttagtactgagcagagaggaggccctggggtgggtgacccctccctcctggcaggttattccatcatcaccactgctctcagtagagagaaggccctggagtgggttgctgctctctgcaggaaagtcatctcatcatctctacagctctcagcagagaaaaggacccggagggggttgcttgtctctacaggaaaatcatccccacagtgggtagttcctctctgccactggtcttcctaatgttctccctgagtctggggtttttttgacatcagacaggagaaagtatgcactcattgggtcataggtggccatgagcaggcacagaaaaggcaacacatgttcccactctggtccataggactggtggcccagcccacgggcttcaggccctccttgatcagaaggtggagcttcaccagtgaccctcaccttcctgtccaggattctgtctgcctcccaccaccaaccatggagcccaggtcacttgtaccaagga

SEQ ID NO: 218778 - DNA, 428 bp, Homo sapiens
ctaatacaatgtaaatgctatggaaatagttgttatattgttaggggataatgacaaggaaaacacctatacatgttcaatacacagcaattatttttttctgaatatttttgatctgccattgattgaatctatggatgtggaacccacagatatgggacccacagatgcagagggccaactgtgtttattttttccaaatttgtttccctgttatgactcttctttatacacatttttaaactctgttgtcttgtatttsttttctaatcatcttacgtccttttggaaaccaagtggggcataaatagtacatgtttgcatttgaggcaacacagaggcatcgcaggagctggagacagcaaagttcaaagccagtccaccacttacctacagagtggccttgggcaagttacctccattttctg

SEQ ID NO: 218779 - DNA, 392 bp, Homo sapiens
agttgttatattgttaggggataatgacaaggaaaacacctatacatgttcaatacacagcaattatttttttctgaatatttttgatctgccattgattgaatctatggatgtggaacccacagatatgggacccacagatgcagagggccaactgtgtttattttttccaaatttgtttccctgttatgactcttctttatacacatttttaaactctgttgtcttgtatttcttttctratcatcttacgtccttttggaaaccaagtggggcataaatagtacatgtttgcatttgaggcaacacagaggcatcgcaggagctggagacagcaaagttcaaagccagtccaccacttacctacagagtggccttgggcaagttacctc

SEQ ID NO: 218780 - DNA, 192 bp, Homo sapiens
ctctcttcttgaacagcgatgtggccaagaatgtggggtgacataaatgatggctgctaccattggmtctcatggctaaaactaggagaagaagttcctccaaaggaatgtgatagacaggtaaaatataattgtctactaaaaatacttctaaaagattaagaacatgaaagcactttcaaactggaattc

SEQ ID NO: 218781 - DNA, 501 bp, Homo sapiens
tatgaagtctccagagccaaaaacctaggagtgaccctagactctttcactctccccacttcaacctagcatccagttagacttgttaattctacaatttaaatattactttctcccctacgccatttctgcaattcctgcatacttttttttttttttttttttgagatggagtcttctttcatccaggctggagtgcagtggcgcgatcttggctcactgcaacctctgcctcccagattcaagtgattcttgkgcctcagcctcctgagtagctggggttacaggtacacaccaccacacccaactaatttttttatttttagtagagatggagttgtgccatgttggccaggctagtctggaactcctgacctcaagtgatccacctgcctcagcctccccaagtgctgggattacagatgtggaacaccatgcccagccctcctatatactcttataattccatatatccaaagatttagcaattatttacttgta

SEQ ID NO: 218782 - DNA, 501 bp, Homo sapiens
tatgaagtctccagagccaaaaacctaggagtgaccctagactctttcactctccccacttcaacctagcatccagttagacttgttaattctacaatttaaatattactttctcccctacgccatttctgcaattcctgcatacttttttttttttttttttttgagatggagtcttctttcatccaggctggagtgcagtggcgcgatcttggctcactgcaacctctgcctcccagattcaagtgattcttgtgcctcagcctcctgagtagctggggttacaggtacacaccaccacacccaactaattttttwatttttagtagagatggagttgtgccatgttggccaggctagtctggaactcctgacctcaagtgatccacctgcctcagcctccccaagtgctgggattacagatgtggaacaccatgcccagccctcctatatactcttataattccatatatccaaagatttagcaattatttacttgta

SEQ ID NO: 218783 - DNA, 397 bp, Homo sapiens
tcaacattagggagccagttaagggtatttaaacagatgactaacatgctaaaagtgagtataatgagattattgagcagtgggatgcagaatgcatgggggaaaagtggccacagggtggaaaattaattagggggctgttatggtagttcagggtgaagtaataatagcctagaagaaggtggtgacaatagaaagagaaaacaggccctgaatgtgcaggaatcatctartaaaagttccacttctttctttctgcaggcccaagccttgcacagtgcccaacactaagtaaacacatgtgtttatcaactataaggaactatggaaacattgtcagggatacaaaggtaaattgagagacctgagtatttaagaaagaaacagaatattaaag

SEQ ID NO: 218784 - DNA, 611 bp, Homo sapiens
aaatgggtctctactacctctcttccactgttcctgtgcctgtccggggctgcttatttccactcttgtgatccttattttctgaactggcactttggaaagaacctctcaagagaggaggttgtaaggctgtcctcagcccctgccagtggaaacacctggcagcaactatggatgacagagtgattttctgtcctatcaactcaaacgcaaacaggagagagtaagtaatatatagtgaaacacgcatgggtttgggagtcaacagacataggtttgaatagcatctctgcctccacaaccttggacaactgacctaacttcttggagctctgattccctcaccagtgaaacagggacaccagtgtctaccccaaagtgttaaaggaataaataaaataacatgcttcataggggctcagttcacattaattctttamccttaagagttcattaagagaagatgctgcattttatattttaagctttaagcagaatgatttagtgggaaatttaaatactgcttatttttagcctggagaacagggaagtagtgtaacatctctgttcaatgtcctaagctacgtggtgtttttgcacagaggcacaaa

SEQ ID NO: 218785 - DNA, 617 bp, Homo sapiens
gagagtgacagtggagacagggagggattttatatgaaaaatatacaggtggtaacgttgacagacagtaactgatgggatggaatgatacctacatttctgttggacagctgaaaaatagaaccgatggagacaggtttgggaagaaaataataagctcaggttttgttgtttggtttgaggcaccataggacagagccgtaaacttttcttctccttttcctttttttttttagacagagttttgctcttgttgcccaggctctagtgcaatggcacaatctcggctcacggcaacctccacctcccgggttcaagcgattcttctgcctcagcctcccgagtagctgggatyacaggcatgtgccaccacacccagctacttttgtatttttagtagagatgccattttaccatgttggtcaggctgatctcgaactcctgacctcaggtgatccacctgcctcagcctcccaaagtgctgggattacaggtgtaagccaccgcactcagccctaaacttttctttttcaatgaatgcatgtagttgccttcttgttctctttggagttgtttgcattttgggctgttggcgctttattgattgtgtaaagctt

SEQ ID NO: 218786 - DNA, 600 bp, Homo sapiens
tctaaagcttatggttttctgggctttgacaaatgaaaacacctgtgcaacttcaacccttaccaggatatgcatgagtttctacctgaaatcaccagtattctaacaaacagctttgcgttttttgaattgttcagtgcctgtgaggattccttactgcaagtttatgaaaaatatattcagaaggcatagtctacaattactgtttgggtaagtgttttcatcaattgtctgaatatttgctgtgaatttaagtatgctgatttttatgtagttatcctcggagaaacttgtgccatttttcgtgtggaaacacttgtagaataaacagagattatkaccgcacgagttggttgtgatgggcacgtcacctgtggctgccatttgagtggaaggtggaatccgactctggatcatcggcagcctgagctggtactgggctcacactgaccctgggagtgctctatgcgtgcttcaccttatgaggggtgcagcaggaacaaaaatagaaaagtgtgctctactttcacatgttaccaagggacagaggataccaccaaggaattagaaaactgttaagtgaggatgtattcttcttaa

SEQ ID NO: 218787 - DNA, 491 bp, Homo sapiens
ggttcctccccacccctttcgttactccctgaggaaccagctctgaactgtggatccctggagtcccacatggagcccctcctcaagtgtaccatgatggccccacctcaggacccacacacacaggtggctgagaaacagggcaacatgcagagggaaaaccaggcaccacgttccgggattcaaaggcaaatttgacccaagcagttcttcatccagcaaggcattaggctgaaacccctgtctgcttctccgcagctaatctttccaggcttccctgctgatttcaggatccaaacctcctctcttaagggctctcaccactcccccaggacagtgccctctgccacaccaggtcccctctcctggccttccttcctgacatggsctttcccctctcccaggaagcccctcatgctcacctgatgtgattcactgaatcaccccagggcctcacacactgcccactccataaacatgtgacctgaagt

SEQ ID NO: 218788 - DNA, 540 bp, Homo sapiens
aagcacatgcacagaatgcagctctttgctctggggaccctttccacttctggctatagggaagaacctgaatactgaacttggttcaggcagagggccataccctgggggtcaggggaaggcatgggggggaccagaaaccaggagaacaatcaagactgcaattaaaaaaaaatggatacattaggggcttcaaacacataatttctcaagaaatttccagatatctcatgctgcatagggcaggaggctgaaaagctaatttgagaagaaaacaagtaggatttttgttttgttttgcattttgcaatatggaggagaaatgattagaccttaggaagtgccagtgggttggtcctttcatgaacatgccatcagtaaaagccctggaaacaaggtcataccagagattcattgtrccttgtcacaactgcaaacaatatctgagtggaatattcaaaaacttgcttagaaagaaaactctaggacagatggctccactgaagttattccaaatatttaataaataaagcataccag

SEQ ID NO: 218789 - DNA, 591 bp, Homo sapiens
tgttttgtaatactttcagaactcttattaaataaagactgagaaattatactgtacgtgctttagtactgttctgacactagtgacccctgttgacacaccacacaaattcccatttgttaaacagacattttatcatttgtgacactgaataagaggctgggcaaataaatattcatctctcagaaacatgacatatttcctgcgggaggaagaatggataaacatcaatctcaagtagccatcctcaacgtcccttgcaggaagtgtctagggtcacaagggacagtatccatgtacataacctactcagctgatgggagagttgctggcagactgtgttttcatgcctgagttattaagcatttccctttttccctagatttgcttgcagtatgtgctactgaaagaaatgaattgttctgagacatgacagttaaaaaatactaacttcgggtaggaaaaaartgaaaatggaagtgacatacttgggtgttatttcaatatcaaattgatcttcaaattgcagccgtatgcatgtttccggtggagccgctaagatccaaatgcaatcagcgtgcaggggataat

SEQ ID NO: 218790 - DNA, 591 bp, Homo sapiens
tgttttgtaatactttcagaactcttattaaataaagactgagaaattatactgtacgtgctttagtactgttctgacactagtgacccctgttgacacaccacacaaattcccatttgttaaacagacattttatcatttgtgacactgaataagaggctgggcaaataaatattcatctctcagaaacatgacatatttcctgcgggaggaagaatggataaacatcaatctcaagtagccatcctcaacgtcccttgcaggaagtgtctagggtcacaagggacagtatccatgtacataacctactcagctgatgggagagttgctggcagactgtgttttcatgcctgagttattaagcatttccctttttccctagatttgcttgcagtatgtgctactgaaagaaatgaattgttctgagacatgacagttaaaaaatactaacttcgggtaggaaaaaagtgaaaatggaagtgacatacttgggtgttatttcaatatcaaattgatcttcaaattgcagccgtatgcrtgtttccggtggagccgctaagatccaaatgcaatcagcgtgcaggggataat

SEQ ID NO: 218791 - DNA, 622 bp, Homo sapiens
cgaattctcaatttgctatcgaggcagctaccaggtgtgacactttttaatttgccagatcatctatctattctcattggatatttcwttctttcttaaatctaatcaaatgattatgtcacattgtgcatggggcagaacatcacagaagcacgaataaatatccagcacttcgataagcatgtaagtatgctagcagttacagcttcccactgagcgttcagtacagcagaatgatgcagagctatgatcttggtatacttaaaagactaagcagatgtatctttgcacaactctgggggcattcattcatcacatttcttcaggatttagatgcatttgagaaacaaggtcaatggcatgagacaatttataagccatgttttgctagatgataacggagctttttaatacttcttttctaaaaaaaaaaaaaagtattatggaaaaatacttttctattgtcaataaatattctttggcattttcaacaaacaaaccagacaggaataaatgtacttacaatgccaatgccaatgaaattaacctgtccaatcacttagccacacagatacttgatctgctcaactctagcaacatttatgtccactgtcactcatcc

SEQ ID NO: 218792 - DNA, 521 bp, Homo sapiens
cccagaggcctgaagcaggacacttttgtacgacttggccacagtgctttggatcaggaatcakcattgacataaggggagccagccatccagaacctgggcagagacccatgtcctctgacgtggcttgtgtcctcgtgcccagaaagctatattaggaagagagaaagagagaggaaagcagaggagatgggataacatgggattaaaaaaatatttaaactcattactcttgtgaaaggatgcactgaagcctgccctggttacactggagtccaaggtgaagcggatgaccgtgtactctcagtagaccggatgggcccagggatctctctgccacagagaactgctagcttctgggccaagtcattttctcctacattgaaagaaaggaaacagcatgaaaatacagtcttgagaatctgctctatcatcatttgcaacttagccgaagcatctcacacatttttttcagaacatcaggattcacaggagataatgggattctcaaaaagaaggac

SEQ ID NO: 218793 - DNA, 521 bp, Homo sapiens
cccagaggcctgaagcaggacacttttgtacgacttggccacagtgctttggatcaggaatcatcattgacataaggggagccagccatccagaacctgggcagagacccatgtcctctgacgtggcttgtgtcctcgtgcccagaaagctatattaggaagagagaaagagagaggaaagcagaggagatgggataacatgggattaaaaaaatatttaaactcattactcttgtgaaaggatgcactgaagcctgccctggttacactggagtccaaggtgaagcggatgaccrtgtactctcagtagaccggatgggcccagggatctctctgccacagagaactgctagcttctgggccaagtcattttctcctacattgaaagaaaggaaacagcatgaaaatacagtcttgagaatctgctctatcatcatttgcaacttagccgaagcatctcacacatttttttcagaacatcaggattcacaggagataatgggattctcaaaaagaaggac

SEQ ID NO: 218794 - DNA, 384 bp, Homo sapiens
aagtatatctctgcacttctggcctgagaagaggggcgcagacgtccccatcaggggccggagaactcggaaacgactggctcagcggggcgtcgggagggcttcctggaggaggtgccagcgccgggcgcgggggtcggagcgtgcgctggcgcccaccggcacgcaccgccggcgggccttgtggtctcatcgcgcgcaggatccgggccggcgggggcgggggcggggcgcgtcccggaggggggcggttggcggctcccgagcccagcgccgcgctcagtccggaccccgtgaccggcggccgaggcccgcctccgtcagtctgtccttcgggycctcagcacagccgtgccggtgagcgggcgacgggggaacgcggct

SEQ ID NO: 218795 - DNA, 384 bp, Homo sapiens
aagtatatctctgcacttctggcctgagaagaggggcgcagacgtccccatcaggggccggagaactcggaaacgactggctcagcggggcgtcgggagggcttcctggaggaggtgccagcgccgggcgcgggggtcggagcgtgcgctggcgcccaccggcacgcaccgccggcgggccttgtggtctcatcgcgcgcaggatccgggccggcgggggcgggggcggggcgcgtcccggaggggggcggttggcggctcccgagcccagcgccgcgctcagtccggaccccgtgaccggcggccgaggcccgcctccgtcagtctgtccttcgggtcctcagcrcagccgtgccggtgagcgggcgacgggggaacgcggct

SEQ ID NO: 218796 - DNA, 359 bp, Homo sapiens
ctctggccggcctggggcagtgagcgcggcggatcccgatatggagggagtgggccaccgggaccgtctgtgttaccgtcactcccgtccctttcagctgctggagatcgtgggccgggagggggtgtctctgaccgctgtgctgaccacccaccaycactggtgagcgccggcggcgcggggaggcacgaggacgccgccttgtcccaacccgacctaacccggcccccgcccgcccgcccgcagggaccacgcgcggggaaacccggagctggcgcggcttcgtcccgggctggcggtgctgggcgcggacgagcgcatcttctcctgacgcgcaggctggcgcacggcgaggagct

SEQ ID NO: 218797 - DNA, 359 bp, Homo sapiens
ctctggccggcctggggcagtgagcgcggcggatcccgatatggagggagtgggccaccgggaccgtctgtgttaccgtcactcccgtccctttcagctgctggagatcgtgggccgggagggggtgtctctgaccgctgtgctgaccacccaccatcactggtgagcgccggcggcgcggggaggcacgaggacgccgccttgtcccaacccgacctaacccggcccccgcccgcccgcccgcagggaccacgcgcggggaaacccggagctggcgcggcttcgtccsgggctggcggtgctgggcgcggacgagcgcatcttctcctgacgcgcaggctggcgcacggcgaggagct

SEQ ID NO: 218798 - DNA, 422 bp, Homo sapiens
cattcttagctcatgggccgcacaaaaacaggcagcaagggatgggcccttagactaacattggttgactgctggattggagcattagagcttgggtatgagtcccaccccagggcttccaggagagggggcccaggctgatgccatctccaccctcattgctctaggygggaaggcagagctggtgctgtatgaggtgtggctgtagatcctgggccagcccttcaccaaggccttggaagataaaaccagtcctgagtcccgggtgcttcaggggcagctgatgaaatgagtgaagtggcaggatggagtgggagatcagggaagaggcctcgaggggatggaggatgactggacaaggctttggtagaactgtgaccctcttcacccgctcctgactccccagctgaccaccatcctca

SEQ ID NO: 218799 - DNA, 585 bp, Homo sapiens
tttcaaaggcaccaagctctttcctacctcaagcatgaaaacacacagtatttcccttggctcagcaattctctttttttgttttttgttttttttgagacagagtctagctctgtcgcccaggctggagtgcagtggcgtgatmgcggctcactgcaagctccgcctcccaggttcacaccattctcctgcctcagcctcctgagcagctaggactacaggcgcccgccaccacacccagctaatttttttttgtatttttagtagagacgaggtttcaccgtgttagccaggatggtcttgatctcctaacctcaggatctgcccgcctcggcctcccaaagtgctgggattacaggcgtgagccaccgtgcccagcctctcctctttcttaataattgccttacaaatggcttacaataagcaacagaaatcagatgtgatcgattctacagagtgactctctcaactctttattctatcctccttctagatggaaattagaaatctaaaaactacattccccagacacatttttggctagaattcttgcgatgtggaagtcctaaatgagatttggaagac

SEQ ID NO: 218800 - DNA, 585 bp, Homo sapiens
tttcaaaggcaccaagctctttcctacctcaagcatgaaaacacacagtatttcccttggctcagcaattctctttttttgttttttgttttttttgagacagagtctagctctgtcgcccaggctggagtgcagtggcgtgatcgcggctcactgcaagctccgcctcccaggttcacaccattctcctgcctcagcctcctgagcagctrggactacaggcgcccgccaccacacccagctaatttttttttgtatttttagtagagacgaggtttcaccgtgttagccaggatggtcttgatctcctaacctcaggatctgcccgcctcggcctcccaaagtgctgggattacaggcgtgagccaccgtgcccagcctctcctctttcttaataattgccttacaaatggcttacaataagcaacagaaatcagatgtgatcgattctacagagtgactctctcaactctttattctatcctccttctagatggaaattagaaatctaaaaactacattccccagacacatttttggctagaattcttgcgatgtggaagtcctaaatgagatttggaagac

SEQ ID NO: 218801 - DNA, 585 bp, Homo sapiens
tttcaaaggcaccaagctctttcctacctcaagcatgaaaacacacagtatttcccttggctcagcaattctctttttttgttttttgttttttttgagacagagtctagctctgtcgcccaggctggagtgcagtggcgtgatcgcggctcactgcaagctccgcctcccaggttcacaccattctcctgcctcagcctcctgagcagctaggactacaggcgcccgccaccacacccrgctaatttttttttgtatttttagtagagacgaggtttcaccgtgttagccaggatggtcttgatctcctaacctcaggatctgcccgcctcggcctcccaaagtgctgggattacaggcgtgagccaccgtgcccagcctctcctctttcttaataattgccttacaaatggcttacaataagcaacagaaatcagatgtgatcgattctacagagtgactctctcaactctttattctatcctccttctagatggaaattagaaatctaaaaactacattccccagacacatttttggctagaattcttgcgatgtggaagtcctaaatgagatttggaagac

SEQ ID NO: 218802 - DNA, 585 bp, Homo sapiens
tttcaaaggcaccaagctctttcctacctcaagcatgaaaacacacagtatttcccttggctcagcaattctctttttttgttttttgttttttttgagacagagtctagctctgtcgcccaggctggagtgcagtggcgtgatcgcggctcactgcaagctccgcctcccaggttcacaccattctcctgcctcagcctcctgagcagctaggactacaggcgcccgccaccacacccagctaatttttttttgtatttttagtagagacgaggtttcaccgtgttagccaggatggtcttgatctcctaacctcaggatctgcccgcctcggcctcccaaagtgctgggattacaggcgtgagccaccgtgcccrgcctctcctctttcttaataattgccttacaaatggcttacaataagcaacagaaatcagatgtgatcgattctacagagtgactctctcaactctttattctatcctccttctagatggaaattagaaatctaaaaactacattccccagacacatttttggctagaattcttgcgatgtggaagtcctaaatgagatttggaagac

SEQ ID NO: 218803 - DNA, 406 bp, Homo sapiens
gaattccagttgcagaaatatttttggcaagtaaacagcagggggctgagagcctggtctgtgccagccttgctgactccaccaaccggggtggaaatatctgacctatgggtaagcaaaagcccatgcaaggaagggaaatgtttgctggctgggccctccagcctgctccctagactccaaggcatagagtattgcgacactgaaaggtgaatgttggagacaggcagctgggggagagggaaaagaggtattagatgctaaggccatatacaagctacttcctaggcccagtgaatctgaagcgggtacagtgggagaataagcctgggccakccaaagctgtgctaagggccactccgatccggcctttggaggagccctgtcttagagctgctcagagcct

SEQ ID NO: 218804 - DNA, 439 bp, Homo sapiens
ttgacgtcacagcgttgccatttgcctactgctgcttggatacagaatgcagcacttaacccttgtcctgcggggagggagtgattgagttgggtgctgtagttctggattacacaaccttttctttcttccttatctttrcttctgtctttgcttttttccttgttatttgcttttgatagaggagaaaaaggattatgattaagcattttgctgtggttttgtgtgttttgcttgttttaacagctctgtagcctgatttcctttaactgtttagtgcctgataggaaagttgggcttttaaatgtatggacagggcaacaaggctaattcctgcagttgtgtacccactccctccctggccccctcctaccacatatacttcttttcaataatactgtttttcagtggcttttctccaagtaccctggcattttta

SEQ ID NO: 218805 - DNA, 568 bp, Homo sapiens
tgtagctaactggagagacagtcttgcaggcacagagaggaacaagtgcaatggcccttgggtgggaggctgtttggccctttagaggcacagtggatggacagagtgcgccagcaggagataaagttagaggtgtgatggactcagatagtgtagggccttgtaggccatgccaaagactttggtttaactctgagtgagaggggaaggccctagagtgtttcaggagggggagtaacaccatctctcttattttttttttttacaagaaccgctctgaccatggcattgagaatagaatgttgggggcaaaggcaagagagccaaatagaagacccttataatgatccawgaatgatgggaaaggagatggtgaggagaggctggcttctggatatactttgaaggtagagctgatgggatttgctgatacattggatgtgaggtttaagaataaagaaagaggagttaaggatgattttaaggtttttggtgtgagacaatggaaagatggagttgacactgagatgggaaaaactaggagaaaaaagtttggatgggaggggtt

SEQ ID NO: 218806 - DNA, 406 bp, Homo sapiens
agatgggtggaggaatattaatgagaagagaaagaaaatgattgcaaagggcatgagagaatttgggggtgactgatgtgttcactgtcttgattgtagtgatggtttcccagatgtagacatctgtcaaacttattaaattgtatactttaaatatgtttagtttattctgtgtcaattatacctccatcagccagaaaaaaataccctcttctcccccctgcacctccctacccaggataacttgtatatcataaacattttatttatatttaaatsagtaatacactttcatttgacagatttggttctttagaccctctagttgtaggactacactttcttgcaaaccttcatttatgatgcactgtaagaatgcttcctatttggttctctttaaagtgga

SEQ ID NO: 218807 - DNA, 378 bp, Homo sapiens
aaatgtcttcgccttcacgacttaaaaaaacaaaacaaaaaaccagaaaaaaaaaaagaaacgccaaagctaacatcacccacatattttgagacctctagtggtatcaataatgaaattaagctaagtctgaatgggcaacagtaattcattatcttcctccacggacccactgccctccccgggaagtctccctttaattaactaccktcatcatttcttctgattttcagaatttcttgacttcactctctctttcacccctcatttttggtgtccaagtggccaccaaagcaatatcccagtgtgtaagctgctatggtgaggaaggtgcagggagtatctggggacaagtctagttttgggttgtcacagatt

SEQ ID NO: 218808 - DNA, 378 bp, Homo sapiens
aaatgtcttcgccttcacgacttaaaaaaacaaaacaaaaaaccagaaaaaaaaaaagaaacgccaaagctaacatcacccacatattttgagacctctagtggtatcaataatgaaattaagctaagtctgaatgggcaacagtaattcattatcttcctccacggacccactgccctccccgggaagtctccctttaattaactaccttcatcatttcttctgattttcagaatttcttgacttcactctctctttcayccctcatttttggtgtccaagtggccaccaaagcaatatcccagtgtgtaagctgctatggtgaggaaggtgcagggagtatctggggacaagtctagttttgggttgtcacagatt

SEQ ID NO: 218809 - DNA, 574 bp, Homo sapiens
cctgctaatttcttttctagtacagtgtgatcccattatatgcaaattgaattatgcaaatttcaaytactcacatataaataatattaataaaagcttcacattgtgtgcaaaatttcaacaagcatgttttcccaaattatgtgtgaagccatttcatattttcaaagctgtcaggtcaactgaattataaaagtgctttcttacccagtggcaccatttatattttttatattttatatgtttctattttataaatatgtttatattttatatgtttatattttcttataaacaaatactaacttgtggcagtattatgtgaactcttcttgttgctagaacttctgtaaggattttggtgacgtttgtattattattttttacattcactgttacaatttaaaatctttactatagctttttcttttttttttctttgacagggtctggctctgtcacacaggctgtggtgtagtagcatgatcttggctcactgcagcttccgcctcccaggctcaagccaatgcttccacctcggcctcctgagtagctgggactacaggcacgtgcc

SEQ ID NO: 218810 - DNA, 574 bp, Homo sapiens
cctgctaatttcttttctagtacagtgtgatcccattatatgcaaattgaattatgcaaatttcaactactcacatataaataatattaataaaagcttcacattgtgtgcaaaatttcarcaagcatgttttcccaaattatgtgtgaagccatttcatattttcaaagctgtcaggtcaactgaattataaaagtgctttcttacccagtggcaccatttatattttttatattttatatgtttctattttataaatatgtttatattttatatgtttatattttcttataaacaaatactaacttgtggcagtattatgtgaactcttcttgttgctagaacttctgtaaggattttggtgacgtttgtattattattttttacattcactgttacaatttaaaatctttactatagctttttcttttttttttctttgacagggtctggctctgtcacacaggctgtggtgtagtagcatgatcttggctcactgcagcttccgcctcccaggctcaagccaatgcttccacctcggcctcctgagtagctgggactacaggcacgtgcc

SEQ ID NO: 218811 - DNA, 511 bp, Homo sapiens
ccagctaaacaagggaggggatggaaataaaagaagtgaagaagcaagaaggctggtcaaagccacctaagtgcccatagacggacgaatggataaacaaaatgcactccattcatacaatggaatattattcagccttgaaaaggaaagaaattctgacatatgctacaacacagatgaacctcgaggacatcatgccaagtggagtaagccagacacaaaaggacaaatactgtatgattccacttatatataaggcacccagtgcagttaaattcacagagacagaaagtaggatrggggctgccaggggcagggagagagacgatggaaagtgaatgtactatgggactgtacttactgcccctgaacagtgcacttgaaaacagttacaatgttaaatttcatgttacgtatatttaaacccaagttaaaaagttaattacaaaaaaaggaaacaagaaggccttatgtgccatcatgcttttgagagagagggcttctttgcact

SEQ ID NO: 218812 - DNA, 511 bp, Homo sapiens
ccagctaaacaagggaggggatggaaataaaagaagtgaagaagcaagaaggctggtcaaagccacctaagtgcccatagacggacgaatggataaacaaaatgcactccattcatacaatggaatattattcagccttgaaaaggaaagaaattctgacatatgctacaacacagatgaacctcgaggacatcatgccaagtggagtaagccagacacaaaaggacaaatactgtatgattccacttatatataaggcacccagtgcagttaaattcacagagacagaaagtaggatargggctgccaggggcagggagagagacgatggaaagtgaatgtactatgggactgtacttactgcccctgaacagtgcacttgaaaacagttacaatgttaaatttcatgttacgtatatttaaacccaagttaaaaagttaattacaaaaaaaggaaacaagaaggccttatgtgccatcatgcttttgagagagagggcttctttgcact

SEQ ID NO: 218813 - DNA, 503 bp, Homo sapiens
aattgctctcttaagatttttttcccttctggagctaatattgagctatgagcagaattcartcagatgcagagaaaacagacaaattattattaaagtaattatttcaccgtatatcattgtataggtgacaattgtgaaaaacgtgactgattttgtgcaagaatgtatttatatttttttagaaaaagagaaagatacacactaattctcctttcccaaattagtttaataaaccattctgttttagagacatccacaaagacttataaagtaagataatgagaggccttgtccaactgaacctcacatgtgtgttgaataatttatatataaaacatattttatgtaaaatatcatttcagtctagcagtccacataaaactggtgaaagcaaaactgtgaaatatgctatttgttccacatggaatgttatttcctccactctttacaggccaagcccttcctgcccttcacatctcaccttaaatgtcacttcctta

SEQ ID NO: 218814 - DNA, 503 bp, Homo sapiens
aattgctctcttaagatttttttcccttctggagctaatattgagctatgagcagaattcaatcagatgcagagaaaacagacaaattrttattaaagtaattatttcaccgtatatcattgtataggtgacaattgtgaaaaacgtgactgattttgtgcaagaatgtatttatatttttttagaaaaagagaaagatacacactaattctcctttcccaaattagtttaataaaccattctgttttagagacatccacaaagacttataaagtaagataatgagaggccttgtccaactgaacctcacatgtgtgttgaataatttatatataaaacatattttatgtaaaatatcatttcagtctagcagtccacataaaactggtgaaagcaaaactgtgaaatatgctatttgttccacatggaatgttatttcctccactctttacaggccaagcccttcctgcccttcacatctcaccttaaatgtcacttcctta

SEQ ID NO: 218815 - DNA, 503 bp, Homo sapiens
aattgctctcttaagatttttttcccttctggagctaatattgagctatgagcagaattcaatcagatgcagagaaaacagacaaattattattaaagtaattatttcaccgtatatcattgtrtaggtgacaattgtgaaaaacgtgactgattttgtgcaagaatgtatttatatttttttagaaaaagagaaagatacacactaattctcctttcccaaattagtttaataaaccattctgttttagagacatccacaaagacttataaagtaagataatgagaggccttgtccaactgaacctcacatgtgtgttgaataatttatatataaaacatattttatgtaaaatatcatttcagtctagcagtccacataaaactggtgaaagcaaaactgtgaaatatgctatttgttccacatggaatgttatttcctccactctttacaggccaagcccttcctgcccttcacatctcaccttaaatgtcacttcctta

SEQ ID NO: 218816 - DNA, 415 bp, Homo sapiens
aatgccttctgggtcaaaacaaccccaaacctggtatctgtggcatagcacagggacccaataaggcggaaatctcaatgaaagaggcagaggtgggcagcagtcctaaatgtggtcttgtcaaaaccagaagacacaggactgagttgtttaagctaacgagtagccaaatgtcccatgtgccactgtccatgtggtcccatcaggaaggctgcaggcctgccmctgcatggcagtttacagctaaagagcctgggtttagtgggggcacttggggtttcgaccttctgcactaacggcagatatcctcagaaatgctctcaggaacttcaaaatgtgtgaaaattctcttttccttctcccccacacccccttctctctttctctctagctgaataaaggcaaatttgaattc

SEQ ID NO: 218817 - DNA, 580 bp, Homo sapiens
caccgggctgtgagtcttccaggggggtgggggtgggagtcattgcgccggctctgaccagagccacctcgatcagaaagtgctggaaagaaacagacctggcttcccctctgcagaacctgacttgaggcgatgagtcacttctaaaaaatgcagaggcaactgagactgggggaacggctcggaaaaacggcacccgccgctggctctctgactgctttgggtagaggggtgttcgtggaagtagccgccgtatcatcacttttagggccaaaaatcaacctgcagatggccttttctttattctcatcagagtggtgttcgctgcaagttgtagcaatatttgaatggatgcattcttaaaaatgagtatgtatgggtgactgcatttaggaarttgaaccgggactaggtccaaacagccagagtggagatgaacacttggtaaaaacatctaggacctttggttttatagttatggaaatgcagaagcttctgggacttgagcactgtagtttactgagtactcctatttccttactgcttctgtagatttcattgaagctatgttccttagaat

SEQ ID NO: 218818 - DNA, 548 bp, Homo sapiens
tcagatcttaaactccatgctgggagaaccactactctcttcaaagctgtcagacagggacatttaagtctgcagaagtttctgctgccttttgttcagctatgccctgcccccagaggtggagtctacagaagcaggcaggcctccttgagctgcggtgggctccacccagttcgagcttcccggcagctttgtttacctactcaagcctcagcaatggctggcgcccctccgccatatttatttatttttttaagagatrgggtctctctctcactctggcccagggtggagtacagtggcatgatcatagctcactgcctgcttgaactcctgggctcaagtcatcctcctgcctgagcctcccgagtatctgggactacagatgcatgccaccaagcccagctaattttgtctcatgtctactaaaaattattttgtgaaggccctctgaaccttaagggaaatctgatgttgctcaggaatctaactctccccaaaccatcctctttgactgcttctaaaatatctctgttggcctttcttag

SEQ ID NO: 218819 - DNA, 604 bp, Homo sapiens
agcttcagcatccggccaagttgttgctgtgtttgtatttgtacagtattgagaaagtcctgattcagaccaataagtggttggaaatgctaaaaggttttttgttttggtttgttttaaactaaaggccttacaatctcaagacgctctttgatggaacagatcacaggggaagccttattctgagstttgctttaaaaaaatctgcagcacaagctagtggccttcaagctgctaaaatgtccacctaatacattagagtgagttgggttttattacacatttttaattgtttaaaacatagtccgaagaagaaagaaaataaattggattcacatgtgtgcagactccctgaaacatggggcttggggaagctagtttggaaatccctgacccccttgagtaaggtccagactccttaacatgatccccaaggccctctgtgggctcttccacatccctccagctcttcttccaacaatcctgcattcttcattcagtacttattcaggaacacagtcctgagcttcagagacatctgcatgacttttgcctgtcctgtttccctctccctgggaaactccacctactcaggctttaagat

SEQ ID NO: 218820 - DNA, 591 bp, Homo sapiens
ttatgcgtaatgctcagttagttgggttcacaaggtgaccagtggagctaccagtacagacgaggattcactgtatgcagcactgtccagttcactgtaggaaatgcagtttactgtggtacgtagtttagttatgtttctggggaaaactggcttttttacttagaggcaaggcaaaatcaattaatccatttgggccttgaagagacaccagatatgaaatatatcattcgtatgaaatatatcatatctgtctgccctctacacaaaactgcatccacttgtgtgctgttatggggccagaacaattgaatacagtatctttatttttggtgtaaatggtatcattaataaagctcttctttgagagragggaccaatttaatgtgtatcttgagggtacacaccaggattatctcttttgtatacaccggaaggaagaatacattgggaaaacaccctcgatttccgtgaaagctaagaaaaagggagaccttcgagagctggagtgttttgccctttttatttcccctcaaacagataacccaagtatgtaagcaaacaggggatctgcagcacaggcacagcggc

SEQ ID NO: 218821 - DNA, 610 bp, Homo sapiens
cctgtagtcccagttacttgagaggctgaggtgggagaagtacttaagcctgggaggtcaaggctgcagtgagctgtgatcatgccactgcactcyagcctgggaaacagaatgacaccttgtctcaaagaaaaaaaaaaaaaatccattaatctgctgatagacatctggagtgtttttaccttttggttattgtgaatagtactgctatgcatattcatgtacaactgagtccctcttttcaattgttttgagtgtatactcaggagcggaactgatagatcatatggtaattctatgtttaactttttaaggaactgccaaactgttttccatagtggctataccaatttgcattcctacctacaatttctcagagtttcaatttctccatacctttccaacactgttattttctgttaaaaatgttgaaaatcattcatacattcagcaaaatttattgagcagcagcacatctatcacttgacagtcaccagaaataaaaggctgataaaatgactgctcttacagagctttcaattagtttagcagaacatacataaaaagaactcaggaaaaaacaagcagagtaactacgtatgtacctgta

SEQ ID NO: 218822 - DNA, 603 bp, Homo sapiens
cgtgtaatttacaaaagaaaaacgtatggcttctgggttgtgctttcttcatttaaaccagccacccayaatagaaggaggaagaaaattacaagacaatctgtgtcaggctccacaaggcagcaaattatagagaacagttcagggctctcttccaatccaaatgccagcaaggtccattcctttaactaccaaaatacagcatccatttctggacaaggaagatgctgatttgctctccttctttgacaaggtgatgggcctgggaggaaaagggggtgataaattgaatctatcccagatttggaatctgtctctatgacatgcacatcattaagctgggatgaaaagatccaggcctagtggcatcacatgtatccataactgagcagagggtccaaatcaacagcagttatcaatgcattagtgtcaacctcagaggcctctaattatggggtttgcatgtctgctggcagaattgtgcccaagagaaaattcagtgactgtgactggttttgagaagacattcagattctcaaattgtagagccaaggggcataaaatacatgatctttcttcactggctgtctaatgggtggtgat

SEQ ID NO: 218823 - DNA, 322 bp, Homo sapiens
ctcacgccttttttagcaagccttctgctgatggaagcactaggatgattctaggctgttaaatagatttctcaataatgtaaataactaaattgttctctgcatatagcaggaaaactagcatgaaatattgtttcaggccctgggttctatgtgacactacattaggaattggattgtttgggtttgctttgtgtttttgaggtagaggaagaaatgggaatcttttttttctcttccaggagtcagtggaagaatagttctctagctaaggaayggacatacctttgttttaaaatattttatacttacaaaaatctag

SEQ ID NO: 218824 - DNA, 528 bp, Homo sapiens
atcctgccatccactgagagccggatgagcacagctaaggagccgcaggagcctgcgctgctgtcgcagcctctgaattctcatgaattcccagccttttggaaagggggccgggtgaggctggaagagggatccggaggtaggagatgaggacccaggccgcgcaccccctccgagaacacctgcacctgtctgtagctgctccccctttgctcagccttccccacccaccctcctaaacaaaacccaaaaaccaccttagagtgagaagacscccagccagggcgcagagagagcgctgggcgaagaggggtcgatggcccgcgggaacagggctggggttcctgtttggggaccggccggctgccaggcccctcgccctactgcttctccggagcgccgttgaccataggcccgtacaggccgccgccgtaggtcggctccttgtgcaccgccgcagcagcggcggccgagcggtcacgcatgagatcgctaaaggcgtagtccatgggtgggcggaagccgagc

SEQ ID NO: 218825 - DNA, 544 bp, Homo sapiens
aaagcatataaatatatttaayataagttttatgtgacataggaggcttcataagaaaatgaagtccagaagaaacgaggaagttgtgtttttttatactaaatttgctgaagaagtggatggttgtggagaagtgtgattggaaataaggagtattatctaatggtaataaactggggagaacttagcaaggcttgtttgtttaaattcttatctgtgccctgtgtcttctgagataaaggtagagggagtgcactctcaaatgagaatcttatgacctgcttcagtggaaagtcagaaaattctactatggcctgcttcaggggaaaagggtagaagaagatcgcagagaccttcctgcttctgctgttttctcaaatccaaggagccacattttgaggtagtgtgtgttgatagttcacatcacctccacgcccaccttgggcttaatcccagctctagagtacaaatggctgtggggatggagaaaattccatgaaaaaaacacactgggctagtaggaaatgaacaatagcgtaagaag

SEQ ID NO: 218826 - DNA, 544 bp, Homo sapiens
aaagcatataaatatatttaacataagttttatgtgacataggaggcttcataagaaaatgaagtccagaagaaacgaggaagttgtgtwtttttatactaaatttgctgaagaagtggatggttgtggagaagtgtgattggaaataaggagtattatctaatggtaataaactggggagaacttagcaaggcttgtttgtttaaattcttatctgtgccctgtgtcttctgagataaaggtagagggagtgcactctcaaatgagaatcttatgacctgcttcagtggaaagtcagaaaattctactatggcctgcttcaggggaaaagggtagaagaagatcgcagagaccttcctgcttctgctgttttctcaaatccaaggagccacattttgaggtagtgtgtgttgatagttcacatcacctccacgcccaccttgggcttaatcccagctctagagtacaaatggctgtggggatggagaaaattccatgaaaaaaacacactgggctagtaggaaatgaacaatagcgtaagaag

SEQ ID NO: 218827 - DNA, 594 bp, Homo sapiens
ttttttaaaggctgatgggagtgaggttgttctcctttggagtatgtgtggttcatcactgatacatcagaattactttattagcttaaaggtaaaaaactaatgtccttcaagcttcttcctgcaaataaggatgatcttttcaatagaatacatagtccaaatattctttgcaaattgtccttcaacgggaaartctggtattattcattcaacaaaacacatgaaaccaatattctttttggtattcagtgattattgtgttgaatgttgtataatgtagttttagttgagattttgataaattattattccttttgtttttgttcttcctagtaagtttgcaacattaatacatgaggcttgtctccatatttagggctgtgccgttaacacaataccaagatcacaatcagaaacaacttacatgtattctttactaacacagaggctcatcagaacagcttccgtaggttgccaagaaatgtcagcctattatacaatagaaagtcaatttacttttaaggcaatcccttattgaaagctttcttaatcagattatgtgtatattcagaaagcaaagagaaaaacaaa

SEQ ID NO: 218828 - DNA, 594 bp, Homo sapiens
ttttttaaaggctgatgggagtgaggttgttctcctttggagtatgtgtggttcatcactgatacatcagaattactttattagcttaaaggtaaaaaactaatgtccttcaagcttcttcctgcaaataaggatgatcttttcaatagaatacatagtccaaatattctttgcaaattgtccttcaacgggaaaatctggtattattcattcaacaaaacacatgaaaccaatattctttttggtattcagtgattattgtgttgaatgttgtataatgtagttttagttgagattttgataaattattattccttttgtttttgttcttcctagtaagtttgcaacattaatacatgaggcttgtctccatatttagggctgtgccgttaacacaataccaagatcacaatcagaaacaayttacatgtattctttactaacacagaggctcatcagaacagcttccgtaggttgccaagaaatgtcagcctattatacaatagaaagtcaatttacttttaaggcaatcccttattgaaagctttcttaatcagattatgtgtatattcagaaagcaaagagaaaaacaaa

SEQ ID NO: 218829 - DNA, 562 bp, Homo sapiens
ctcatcagaacagcttccgtaggttgccaagaaatgtcagcctattatacaatagaaagtcaatttacttttaaggcaatcccttattgaaagctttcttaatcagattatgtgtatattcagaaagcaaagagaaaaacaaaggcggtgaccttaatagatctagctttacaattttttgttgttgatatattaagataatktcagccaaagtgatattgaaagacctcagttatctagtttgttttatcttttttttttttgacattttactttgtgcatcatgacatgcctagtatcaggaaatggaatggaaagtacggttcttattctaggtatatggtgggaaacctaggggattcttacagtcggtacatgagcatcttttttttttttttacaataaaaaggaaagactgttagaaaattagttttaccctttctaaacactgtcctttttgaaagtttgaatatatccacagtctgttgaaaccttgaaactaaaaatttagactcttatcatcatcttaagttcttcatgctactcttaacctcccaaaaag

SEQ ID NO: 218830 - DNA, 571 bp, Homo sapiens
gatgagatttggaaggaggaatatccgaactgtatcactcagtgaaacaatattttccacgtaaacaatagttgatggtacaaaatcattcatgagtaaaggagtccttcaatgtgcaatatagaccaatagatttgaaaccaacgcggtacaaaaaaatgcactgatacagttatttaccttccattggagctaactacccttggttgagcttttgtagatatcaaatattaatatctacagttaccygaaaaggctattgaatttcttctctcctatccatctacatgtttatgtgaggctggattttctttatatactttaccctaaataatgtatttcaacagatttaggagaagctgatctgagaatccagctgtcttctgttaagccagacattaaagttggcaaatatgtaaaccaatgtcactctttccagtaattagtttttcagacaaatgtaattgtaaaaaaaaagtatctgttagcatgtgtttattattttaaatgaattaataaataatatcatttaaaatttttgttttataataaaccttgagagagatagccc

SEQ ID NO: 218831 - DNA, 594 bp, Homo sapiens
gtcccggatacatgtaaatatactttgtgattctctgtgtctctaaaagtacacccgttggtgcaagatcaaagcaagtggttaaatcgggaaaagtatagaatttgaccaggatatttaaggtacaaatgcaggatcatacctgacaaatgaaagttattttaagccatgaagktcataatgagttcatgttctgtcaacaataaatttgaacaagctgcaaggcagggaaagtatataccaaggaaattgtgctgaaaataaacaaaatacaatatttacataaaagagatggcccaatgtcacctttgatgaaaatatttgaattatgtgttttattctgcaaacaaacaattgaaataactcataaggtagttttgaacaaagaatgaaaaatgtcatttatgtgaactataggaatcactgctttgaaaatataaaaatgttcatttttttgttatgtaaatgaataatttatttacagcaagataaagaatattacagatgtatgaattatagaaatcttaaagtataacaataataaaattttaaaaagttcattcttgattattttttcttccctcaggagacgtc

SEQ ID NO: 218832 - DNA, 419 bp, Homo sapiens
acacagtcaaaccatagcatttcatctctggccctcaaaactcatgtccttctcacatgcaaaataaattcattcaatctgatagcccccaaagtattaactcattccagcaccaactaaaagttcaatgtccagattctcatcaatatggtttggctatgtctccacccaaatttcatcttgaattgtagtttccataatctctacatgtcctgggagggacctsgtgggaggtaattgaatcatgggggtggttgcccccatcctgtcatcatgatagtgagtaagttctcacaagatctgatgattttgtaaggagctttccccactttgctcggcacttctctgtcctgctgccatgtgaagatggatgtgtttgcttcctcttccatcatgattataagtttcctgaggccttc

SEQ ID NO: 218833 - DNA, 365 bp, Homo sapiens
gtctcttggaactactttacaaaataagaggatttttttttcctcaaaggagtatttttcttcataaagggaaagtcaagctctattttccccctacattatttgataaaattaaatatcgtaaaggaatgtttccttyccaaattatttctttcacataaatggcacttacttcaaagatttttgcattattttcccaaatagtgaggagcagcacaaaggaatctgacttgagtttaatggtgttaggtggtaaacactgcatagcacttagaatcctctccaacagtaatatatgataagacatttttattaataaaaactatagaatattatctgtaatttctacaaattctttatgcttg

SEQ ID NO: 218834 - DNA, 494 bp, Homo sapiens
ggccttcatttttcattagccccaagtgtggctcagacatcacagctattttagttaaaacatgagaatattctgcaatgtgggtaaactctgatttttaagcagctctaattacaaaaattcttgctttgctatttttctcagggatagcaagagctgccagcattccaatttggaaaacsttttacgggaaaaaaaacaaaactagtccacaatgttttttaaaagtcttgtgtggtgaaagggaaacaaattttattagctttgttgagtcaattttttaaataaatcttttaaatgattaaaatattaatatacattcattttaatgtgtcattttgaggagtttagacttttttaaatgaaatacttgcaaatattgggcaaaatgggtgacaacatttttctcctggaagccccccactgccacccacaacaaccttgttctgccttgtttcacatcaattatagatccaaagagactctgttgattt

SEQ ID NO: 218835 - DNA, 494 bp, Homo sapiens
ggccttcatttttcattagccccaagtgtggctcagacatcacagctattttagttaaaacatgagaatattctgcaatgtgggtaaactctgatttttaagcagctctaattacaaaaattcttgctttgctatttttctcagggatagcaagagctgccagcattccaatttggaaaaccttttamgggaaaaaaaacaaaactagtccacaatgttttttaaaagtcttgtgtggtgaaagggaaacaaattttattagctttgttgagtcaattttttaaataaatcttttaaatgattaaaatattaatatacattcattttaatgtgtcattttgaggagtttagacttttttaaatgaaatacttgcaaatattgggcaaaatgggtgacaacatttttctcctggaagccccccactgccacccacaacaaccttgttctgccttgtttcacatcaattatagatccaaagagactctgttgattt

SEQ ID NO: 218836 - DNA, 481 bp, Homo sapiens
gacctgttgcctcttggtcctcctttttcacttgatcccaccgatgtcctgcaaataaattcagatgtgccctcttacattaagttcttccttgcacacagaaacattcctctgtccaatcctaacacagggacatcagtcttgtcagtgtgagaacaggagactttcagagaaatattccagtaggcctgaggtcaagtcttgagaaaactggcttgggttctttcatgagccttgggcaaaattmccctgtgttggaatgttatcttccctatgtgctctgtcctaggtttatgtacacaaatgagcaattttttccccaataaattgtaggcaaatagttctaacacctcataggagagatacttcaatattaagctttctctcatcaaatacccagaatttgatagtttatgagattgtggacacagagatttgatgaaggggtgcaatgtaccagctcttgagtcaaaatgaaact

SEQ ID NO: 218837 - DNA, 481 bp, Homo sapiens
gacctgttgcctcttggtcctcctttttcacttgatcccaccgatgtcctgcaaataaattcagatgtgccctcttacattaagttcttccttgcacacagaaacattcctctgtccaatcctaacacagggacatcagtcttgtcagtgtgagaacaggagactttcagagaaatattccagtaggcctgaggtcaagtcttgagaaaactggcttgggttctttcatgagccttgggcaaaattcccctgtkttggaatgttatcttccctatgtgctctgtcctaggtttatgtacacaaatgagcaattttttccccaataaattgtaggcaaatagttctaacacctcataggagagatacttcaatattaagctttctctcatcaaatacccagaatttgatagtttatgagattgtggacacagagatttgatgaaggggtgcaatgtaccagctcttgagtcaaaatgaaact

SEQ ID NO: 218838 - DNA, 576 bp, Homo sapiens
aatgagttctgtctctgttagcagtgagaggagtcaaggacggaaagggggttgggaccaaattatgcagccttgaatggcaagctgaaagggtggggaggcagctacctcttaggtcacataaaactattgaaagtttttgaacagagttgagattgatggaaaggaagattgctctgataattctgtagaaaattgattgttgggagcaagaggtgaactggagccccaggaccagtcaagagttggtgaacagtccaggcacaaatttaagaagacctgaactaataaggtagatttcagaaggaatgaatctgagacaatgttaaagaaacagaaaaaaaaaatggaggtgtgactaattggatgtgggagtttacaatcctgttgggatgrgaaatcctacccatagaacctctccctgactcctataggataaaattcaaacttctaaacatggtacatacaaggccttttcgtcattgggccccatctcctgtcctccctgcccctgttgtgaacttcacacaataacagtattacttgagattcccccaaacatatcttgctgtttct

SEQ ID NO: 218839 - DNA, 572 bp, Homo sapiens
ggcccacacctgtaatcccaacactttgggagtccaaggcagaaggatggcttgagcccaggagttcaagaccaggctgggccacaaagtgagaccctgtctctacaaaaaattaaaaaactaactgggcatggtgatgcatgtctctagtcccagctactcgggaggctgaggtgggaggaccacttgatcccaggaggttgaggctgcagtgaaccatgttaccactgctgcatttcagctcgggtgacagagcaagaccctgtcaaaaaaaaaaaaaaaaacttacctagaaatttcacatcttctgctatgcttsagataagcaggaaaattcatataggaatgctcactgtatcactcccttaaaatcttcttttaagcattttatgctaggaggtattacacttcaattcctaagtaggtgtgtactttttgtatataatgatgtatgaaaaggttgacctgtatgcaccaagatgtctccccaatttaacagtatcataaattcacaactgtgtaattatcaaaccacagtattattggatgagtctcagtgctttagtcactaa

SEQ ID NO: 218840 - DNA, 449 bp, Homo sapiens
aaaaggggaagagtaattttataggaaagtacaaatcagtggtgtgtatgtctaccagtgtgtgcaaagagacagaggtggtaattgctggactcagaccaggtatcagcaacaactaaacataatgaccttataaatatgcagataggatttctgacaaagctaaaagtacatcattattattattcatcaatgtggaatggaatgtgaaattggaatcagcaggtaaggggtggttktacctgaatatcctggataccaacttgtttttgtttttaatcattctaatctctgttaagaataatgtcacatgactactttatcctctttctcagaccactgatccaaccatttttctttcacacttttgcctcctttcctcttataacaggtactaacagtctaagcagaaaaagaagaacagatggtggtaagacctagaatgttta

SEQ ID NO: 218841 - DNA, 450 bp, Homo sapiens
agagtgaataaaagatcacccttggcagtgtgagtgggcatcawgcaatcccttgaaggcctgaataaaacagagaggtggaggaagcacaagttcactctctcttctggagctgggacatccatctcctcctgcccttggatatcagtagtgtttctggttttggggcctttggacttggactgggacttacaggattggctctcctggttctcaggccttctggcttggactggagttataatacaccagtaactttcctgggcttccaatttgcagacagctgatcatgggacttcacaggttccataattgcatgagccaatctctcgtaataaatctatttctgtgtatctatatataatatatgctatcagttctgtttctctggagagccctaatacacgcagatatattgtgatatcggtttatgcattgtatgtatatctg

SEQ ID NO: 218842 - DNA, 450 bp, Homo sapiens
agagtgaataaaagatcacccttggcagtgtgagtgggcatcaagcaatcccttgaaggcctgaataaaacagagaggtggaggaagcacaagttcactctctcttctggagctgggacatccatctcctcctgcccttggatatcagtagtgtttctggttttggggcctttggacttggactgggacttacaggattggctctcctggttctcaggccttctggcttggactggagtyataatacaccagtaactttcctgggcttccaatttgcagacagctgatcatgggacttcacaggttccataattgcatgagccaatctctcgtaataaatctatttctgtgtatctatatataatatatgctatcagttctgtttctctggagagccctaatacacgcagatatattgtgatatcggtttatgcattgtatgtatatctg

SEQ ID NO: 218843 - DNA, 474 bp, Homo sapiens
cagaagatttcaagcctccaagtggcttctgctgtgttcttcagggacattctatccatggggagtgctccagtctgaagcacttcctaccacaaaacgcccccacataaagtgccttctccaacatcacacggcaagggccttcatctcattttggaaagcagttgtaagtgttcccacatttgaatgcttcagacccttgcaagagacaatttgtctgccacggagagagagaaactcaggaaggacaagtcattcactctctgacagttactaagaacattgccgaaaagacagcctgggaaccttcattcttagtccwgagctcttttcactctaacaagcctgctcccatcgcagcctccttcctgtcctttaaaactagacagatgctgcctcttgctccaaagaccacctttcatcaagggaggagggacacttgcaatactgtgacctccaaccccatgggtttcc

SEQ ID NO: 218844 - DNA, 305 bp, Homo sapiens
gaataagccaggggaaatcagacacaacagagccccaactaggtttcatgggtagcatagggaagtggttaaaaaactaaaaggatagatccattaatgaggtaacaaattattgccttcatgttgggacagaacagggccaaatggaaaagaatgaaagagaaagacagatagacacacacacacacacacacacacacacacagagagagagagagagaacgagctcagtgaattgtccaggtgacrcactgatgagggagtaacaggacactctgagttagtgccctcaggacacacagcat

SEQ ID NO: 218845 - DNA, 325 bp, Homo sapiens
cctgaaagctggtcatgatattctttggtttgcatctcagaaccaagggtgaaatatccccattctggtagatcgttatcccaaaatcatttatcccaagtttgtgcaaacagttatgctttattgttcccatcagttcaaagaaaatgccccagatgatttccaggaggaaaactgcagtattcagccctgtctcatcaaatgcccagctcgttcatggatgcaagaattttagacactgaaattagaatgaaggaggaaatctacaaacccttsagtccaaatcatacttctgtgaattttttacatctgcctgggtccaacg

SEQ ID NO: 218846 - DNA, 625 bp, Homo sapiens
aaaacatttgggctgaaaagtatatcatcaagaatgtgaaaagacagtacatagaatgacagaaaatatctgcaaatcatattatctgataagagacttgtatttaggatatattttttwaaaactattacagttcaatattaaaaagataaaccaattataaagtaggtaaaggatctgaacagacattctccaaagaagatacataatgactaataagtatatgaaaagatgttgaaaatcatcaaccatcagggaaatgtaaatcaaaaccacaatgagataaacacttcacattacagatgaatataataaaaaagacagacaataacaactgttgatgaggatgtggagaaactggaattctcatacactgctggttggaatgtaaaataatgtacccacttcagaacagtctgacagttcctgaaaaggttaaacagcattaccatctgacgcagcaattctgctcctaggtatatatccaagaaatatgaagataaatgtctaccaaaaaattatacaagaatgttcataacagaattattgataatactcaaaaagtagaagcaactcaaatgtcaatcaactgatgatggataaataaaatgataaaatgtggtaa

SEQ ID NO: 218847 - DNA, 429 bp, Homo sapiens
attatctattctttattaaaagagaaactaaaagtaatataattaaatagcttgttcttgtgacttaaataatataaarttttcatttcaattatgtgacaatgctttgtatagctgtattccaaatacatagcatggtgcctagaacatagcaggcagtcaatacatttttaccaaatgaaatgaataaattaccagttgattttatactgaggaccaaactatgacctttaatccctccaaaataaaacacacaatcccattatatgtgaaccatatccacaataccagaatctaagattcccactctgaaagagtaactagaacaacttctttttgaggcaattctgcttacttagcacattactcccccctacagttttccttcttttgtttttgtactaaggatatttgtataaaaacaggatc

SEQ ID NO: 218848 - DNA, 604 bp, Homo sapiens
tattctttattaaaagagaaactaaaagtaatataattaaatagcttgttcttgtgacttaaataatataaaattttcatttcaattatgtgacaatgctttgtatagctgtattccaaatacayagcatggtgcctagaacatagcaggcagtcaatacatttttaccaaatgaaatgaataaattaccagttgattttatactgaggaccaaactatgacctttaatccctccaaaataaaacacacaatcccattatatgtgaaccatatccacaataccagaatctaagattcccactctgaaagagtaactagaacaacttctttttgaggcaattctgcttacttagcacattactcccccctacagttttccttcttttgtttttgtactaaggatatttgtataaaaacaggatctttgttgcttagtaattcatctgattcagctgcttgtattctgttcccaatcaaaattcttggttttcagcctcctcatcatttttataaggagttgaatgaattggtcaagcttgttcctttctccctctccatggaacaccaggccccaagctccccgacactgctcctctttttattt

SEQ ID NO: 218849 - DNA, 429 bp, Homo sapiens
attatctattctttattaaaagagaaactaaaagtaatataattaaatagcttgttcttgtgacttaaataatataaaattttcatttcaattatgtgacaatgctttgtatagctgtattccaaatacatagcatggtgcctagaacatagcaggcagtcaatacatttttaccaaatgaaatgaataaattaccagttgattttatactgaggaccaamctatgacctttaatccctccaaaataaaacacacaatcccattatatgtgaaccatatccacaataccagaatctaagattcccactctgaaagagtaactagaacaacttctttttgaggcaattctgcttacttagcacattactcccccctacagttttccttcttttgtttttgtactaaggatatttgtataaaaacaggatc

SEQ ID NO: 218850 - DNA, 482 bp, Homo sapiens
cattatctattctttattaaaagagaaactaaaagtaatataattaaatagcttgttcttgtgacttaaataatataaaattttcatttcaattatgtgacaatgctttgtatagctgtattccaaatacatagcatggtgcctagaacatagcaggcagtcaatacatttttaccaaatgaaatgaataaattaccagttgattttatactgaggaccaaactatgacctttaatycctccaaaataaaacacacaatcccattatatgtgaaccatatccacaataccagaatctaagattcccactctgaaagagtaactagaacaacttctttttgaggcaattctgcttacttagcacattactcccccctacagttttccttcttttgtttttgtactaaggatatttgtataaaaacaggatctttgttgcttagtaattcatctgattcagctgcttgtattctgttcccaatc

SEQ ID NO: 218851 - DNA, 429 bp, Homo sapiens
attatctattctttattaaaagagaaactaaaagtaatataattaaatagcttgttcttgtgacttaaataatataaaattttcatttcaattatgtgacaatgctttgtatagctgtattccaaatacatagcatggtgcctagaacatagcaggcagtcaatacatttttaccaaatgaaatgaataaattaccagttgattttatactgaggaccaaactatgacctttaatcyctccaaaataaaacacacaatcccattatatgtgaaccatatccacaataccagaatctaagattcccactctgaaagagtaactagaacaacttctttttgaggcaattctgcttacttagcacattactcccccctacagttttccttcttttgtttttgtactaaggatatttgtataaaaacaggatc

SEQ ID NO: 218852 - DNA, 604 bp, Homo sapiens
tattctttattaaaagagaaactaaaagtaatataattaaatagcttgttcttgtgacttaaataatataaaattttcatttcaattatgtgacaatgctttgtatagctgtattccaaatacatagcatggtgcctagaacatagcaggcagtcaatacatttttaccaaatgaaatgaataaattaccagttgattttatactgaggaccaaactatgacctttaatccctccaaaataaaacacacaatcccattatatgtgaaccatatccacaataccagaatctaagattcccactctgaaagagtaactagaacaacttcttttkgaggcaattctgcttacttagcacattactcccccctacagttttccttcttttgtttttgtactaaggatatttgtataaaaacaggatctttgttgcttagtaattcatctgattcagctgcttgtattctgttcccaatcaaaattcttggttttcagcctcctcatcatttttataaggagttgaatgaattggtcaagcttgttcctttctccctctccatggaacaccaggccccaagctccccgacactgctcctctttttattt

SEQ ID NO: 218853 - DNA, 565 bp, Homo sapiens
aactaaaagtaatataattaaatagcttgttcttgtgacttaaataatataaaattttcatttcaattatgtgacaatgctttgtatagctgtattccaaatacatagcatggtgcctagaacatagcaggcagtcaatacatttttaccaaatgaaatgaataaattaccagttgattttatactgaggaccaaactatgacctttaatccctccaaaataaaacacacaatcccattatatgtgaaccatatccacaataccagaatctaagattcccactctgaaagagtaactagaacaacttctttttgaggcaattctgcttacttagcacattactcccccctacagttttccttcttttgtttttgtactaaggatatttgtataaaaacaggatctttgtkgcttagtaattcatctgattcagctgcttgtattctgttcccaatcaaaattcttggttttcagcctcctcatcatttttataaggagttgaatgaattggtcaagcttgttcctttctccctctccatggaacaccaggccccaagctccccga

SEQ ID NO: 218854 - DNA, 604 bp, Homo sapiens
tattctttattaaaagagaaactaaaagtaatataattaaatagcttgttcttgtgacttaaataatataaaattttcatttcaattatgtgacaatgctttgtatagctgtattccaaatacatagcatggtgcctagaacatagcaggcagtcaatacatttttaccaaatgaaatgaataaattaccagttgattttatactgaggaccaaactatgacctttaatccctccaaaataaaacacacaatcccattatatgtgaaccatatccacaataccagaatctaagattcccactctgaaagagtaactagaacaacttctttttgaggcaattctgcttacttagcacattactcccccctacagttttccttcttttgtttttgtactaaggatatttgtataaaaacaggatctttgttgcttagtaattcatctgmttcagctgcttgtattctgttcccaatcaaaattcttggttttcagcctcctcatcatttttataaggagttgaatgaattggtcaagcttgttcctttctccctctccatggaacaccaggccccaagctccccgacactgctcctctttttattt

SEQ ID NO: 218855 - DNA, 592 bp, Homo sapiens
agcaaaatgtttgcttcctgttcccgtaacattaagttctgctggcctagaggtcttagttccagagggaggaacgctgccaycagaagacacaacaacaattccattaaactggtagttaagattgccaccaggacactttgggttcctacctttaagtaaacaggctaagaaaggcgttacagtgttggctgggacatcaaggctatcaagacccaggctatcaagatgaaatcagtctactactccagaacggaggtaagaaagagtattcatggaatacaggagatccattagggcgtctcttagtattaccatgccctgtgattaaggtcaatgggcaactacaacagcccaatccaggcgggactacaaatggtttgggcctctccatcaggaaaaaaaaaaacacaacctgctgaggtgtttgctgaaggcaaaaggaatacaaaatgggtagaagaaggtagtcatcaataccagctactaccatgtgaccagctgcagaaatgaggactgtaattgtcctcagtatttcctccttcttttattaaaaacatgtctgtgcttgcacacacttgtactaagaaaa

SEQ ID NO: 218856 - DNA, 544 bp, Homo sapiens
agcacttattcaatcagctctaacatcctaaatggaccagcatcctatccatacctctcctctccctaaggacagtctggaaattccttgctgaacctaagcatatgactaaaagaataatctttcctaagcataattttcatgtcattcttctgctcagaaactagcaacagtattaataccaagcctttcaaatccaagttctttacaatctctgatctgcttgtctgtcccattccaatcatctaaccatcttactctttagtaatccataactcgaacactccatattatttccacaatcttgtttactgtcccctatattraaatctttttaatttccagtgagaaacatcatgcttcccttctggtatatctccaacttaggttcctttcttccacccttttttcaaaaatctgctgtaaacctgtcctatagtaagccttctacaaatcatcccacctgtctctgatccttccaacagcagatgtagtgccatgtcatgcactacattgtctccgctggtatggttcttctttattt

SEQ ID NO: 218857 - DNA, 533 bp, Homo sapiens
ccagtgcctaacacaatgactggcatatagaaggcattcractattcagtgcagaagcaaaaggtcaaaatgaagggctctgtggaatctttaccccttaaaaagaccctataaatacacttgaagtttgggaacaactgggttgagctatttacctaaaggattttcaaaactaattaagattcctgatatatagactacttcttaacccccactcacccctatatcagtcaaattgggccaactccatgcaaagtagattattttttaatcaccttccctcccacctaccaaatatgaagttaaccaacacacacagagaggcatgtgtgcatgtgcagacatacacacacacagtcctcattccctcttgcacttttattggtctttcatcggttgttgataagactgactacataaaccaccagggacctggagccctgactaaaaaaaaaaaaaaatcctacaaagtggcctcaatagcatgaactgctagattctgtagtgactgccattgaaaattaaagaagatc

SEQ ID NO: 218858 - DNA, 498 bp, Homo sapiens
gtgtttgtggttgtatatgtcttgaccactgtcccactccaagcaggggatcctagggtaagaactgtactgtgtctcttttttaatatccctcacagtgcccatcaccctctaggtgcacagataattcaatatacacttatgtaaatgaattgttccacaactcacactttcagctagcccctcacagatgcataagaaagcaaagaacaaccaaagagaaggaacaatatatttaaacaagataaggggaatgaaaaagaatcttgtgtttaaaarggatagaaaggtctaaccatcttctatcccaaacaactggccaacatgagagcctgttttcttgagcatagaatggtggtaggtatttcagcctcgatggaatctgacctgctgattagttatacaaggctaaaactgactgaagtgtgtatgtaagacaacggtctgggaagagaagcactaaatttaagctcacagggaatcaaccacttaaaaagg

SEQ ID NO: 218859 - DNA, 536 bp, Homo sapiens
atatctgaggttgagatacctgatttctcaactaagggaatgaactatgcagtacatgaaaaccaaccctcttcttagtgcctctgttttcctatcacttcccctatcccaatccattcttgctcttgccttagagattcttagattctgattttcctcgcaaaacatggccacaagcctaccgcctctctgtctggtagaagtayaagaatcaagagtcaaggccaaaaaggtctgagggaaggagcataattgctcccagctgccctctcttcctgtccccaggtcctctccttcaccctcactctaggcattctacctccaaacgttcaagttaacatgtgctaaaggaatgattttctaaatcacttacctgtcactgtgaaactagattaatccacatactggtttagtaaaacctcacacaaaccagcatatacacagaagacagcaatcaagatgaagaaaacgtttgaaaccgtgtcattaagaaaacgtgatgaagaaattggtaatgattattccaggaaataaca

SEQ ID NO: 218860 - DNA, 536 bp, Homo sapiens
atatctgaggttgagatacctgatttctcaactaagggaatgaactatgcagtacatgaaaaccaaccctcttcttagtgcctctgttttcctatcacttcccctatcccaatccattcttgctcttgccttagagattcttagattctgattttcctcgcaaaacatggccacaagcctaccgcctctctgtctggtagaagtacaagaatcaagagtcaaggccaaaaaggtctgagggaaggagcayaattgctcccagctgccctctcttcctgtccccaggtcctctccttcaccctcactctaggcattctacctccaaacgttcaagttaacatgtgctaaaggaatgattttctaaatcacttacctgtcactgtgaaactagattaatccacatactggtttagtaaaacctcacacaaaccagcatatacacagaagacagcaatcaagatgaagaaaacgtttgaaaccgtgtcattaagaaaacgtgatgaagaaattggtaatgattattccaggaaataaca

SEQ ID NO: 218861 - DNA, 536 bp, Homo sapiens
atatctgaggttgagatacctgatttctcaactaagggaatgaactatgcagtacatgaaaaccaaccctcttcttagtgcctctgttttcctatcacttcccctatcccaatccattcttgctcttgccttagagattcttagattctgattttcctcgcaaaacatggccacaagcctaccgcctctctgtctggtagaagtacaagaatcaagagtcaaggccaaaaaggtctgagggaaggagcataattgctcccagctgccctctcttcctgtccccaggtcctctccttcaccctcactctaggcattctacctccaaacgttcaagttaacatgtgctaaaggaatgattttctaaatcacttacctgtcactgtgaaactagattaatccacatactggtttagtaaaacctcacacaaaccagcatatacacagaagacagcaatcaagatgaagaaaacgtttgaaacygtgtcattaagaaaacgtgatgaagaaattggtaatgattattccaggaaataaca

SEQ ID NO: 218862 - DNA, 443 bp, Homo sapiens
tttctcagaaatgcagtattcaccaaacctggcccatgtacactcatgtaactatatgcagatttagtgttctagaatgatatgaggtactcaggcctacctaatgctactgtctttaaatttagaaattacataaagcagtgttttaatcatattcctgatctgaaaagtcccctttttgtatactttcaaatgttccacacttccwtttcagaaggttccatttgaactaccaacttaaaacaggtaattctgtcccattttattgacaggcaaactgagactcaacgtgacagtacattttccacgagtatatctcaggttagctacagagtgatgggatcttgagtgaattatttaacttctcttagcttccatatagtctctctctcacatgaggactaaagtaaatacatgtaaactacttgagaacagaccctaat

SEQ ID NO: 218863 - DNA, 443 bp, Homo sapiens
tttctcagaaatgcagtattcaccaaacctggcccatgtacactcatgtaactatatgcagatttagtgttctagaatgatatgaggtactcaggcctacctaatgctactgtctttaaatttagaaattacataaagcagtgttttaatcatattcctgatctgaaaagtcccctttttgtatactttcaaatgttccacacttccttttcagaaggttccatttgaactaccaacttaaaacaggtaattctgtcccattttattgacaggcaaactgagactcaacgtgacagtacattttccacgagtatatctcwggttagctacagagtgatgggatcttgagtgaattatttaacttctcttagcttccatatagtctctctctcacatgaggactaaagtaaatacatgtaaactacttgagaacagaccctaat

SEQ ID NO: 218864 - DNA, 642 bp, Homo sapiens
tacatgccacattttctttatccagtctatcaccgttgggcatttgggttggttccaagtctttcctactgtaaatagtgctgaagtaaacacacatgtgcatgtgtccttatagtagaatgatttataatcctttgggtatatactcagtaatrggattgctgggccaaatggtatttctggttctagatccttgaggaatcgccacactgaaatttttaaaggagagaaccagtgtcttcttatttaacataaatagataagaaacatgtgcatgacggtatctacttagcaccttttagtttaagaaacacattgctgaacaataactacaccaggcactgtactaggcattaactatgcaaaaaatgcataagactaagacctcacattctagcaaaagaaacacatcaacaaatgaccataatgcaatggggttaactaccacaagagttgcataacagaataaagcaagcaactaacgcaccaaatgccacaaaaagactaaacaagatttcagtggcctactctaaggtattaagttccctcccttattatctccagttgtatctccattcttagaggagaatgcaccacatttttttttcccccagctagaaaaactaaatgagcagcccataa

SEQ ID NO: 218865 - DNA, 642 bp, Homo sapiens
tacatgccacattttctttatccagtctatcaccgttgggcatttgggttggttccaagtctttcctactgtaaatagtgctgaagtaaacacacatgtgcatgtgtccttatagtagaatgatttataatcctttgggtatatactcagtaataggattgctgggccaaatggtatttctggttctagatccttgaggaatcgccacactgaaatttttaaaggagagaaccagtgtcttcttatttaacataaatagataagaaacatgtgcatgacggtatctacttagcaccttttagtttaagaaacacattgctgaacaataactacaccaggcactgtactaggcattaactatgcaaaaaatgcataagactaagacctcacattctagcaaaagaaacacatcaacaaatgaccataatgcaatggggttaactaccacaagagttgcataacagaataaagcaagcaactaasgcaccaaatgccacaaaaagactaaacaagatttcagtggcctactctaaggtattaagttccctcccttattatctccagttgtatctccattcttagaggagaatgcaccacatttttttttcccccagctagaaaaactaaatgagcagcccataa

SEQ ID NO: 218866 - DNA, 614 bp, Homo sapiens
gccacaaaaagactaaacaagatttcagtggcctactctaaggtattaagttccctcccttattatctccagttgtatctccattcttagaggagaatgcaccacatttttttttcccccagctagaaaaactaaatgagcagcccataataagctacataaaacctttatttccaatgttatctttattccaatccaaacaacctattgttaagctttactgtcatcacagcttaattttcactttagtgaagaaaattatttctgacttgaaaaaaaaatcttgtttataacattaaaaaactaaatcctggtgtcagaacagatctcactggaaaaaagttgtaattacattcctggtaagaaataaaaatgtgttggataaactcacttaaaatgcttactaagcaagtacctccaccaaagcaaagaasaactactcctcacaaaaatgaaggaaaagaagagaaatttcatattaccaaattttatttctccagcatcttccctgaaataaacagaatggatacatattcctcttaaaaattttcaattgaggcagaagaaaaaaaattatttgcaggaaacatagaaaagctattatgaaattatct

SEQ ID NO: 218867 - DNA, 614 bp, Homo sapiens
gccacaaaaagactaaacaagatttcagtggcctactctaaggtattaagttccctcccttattatctccagttgtatctccattcttagaggagaatgcaccacatttttttttcccccagctagaaaaactaaatgagcagcccataataagctacataaaacctttatttccaatgttatctttattccaatccaaacaacctattgttaagctttactgtcatcacagcttaattttcactttagtgaagaaaattatttctgacttgaaaaaaaaatcttgtttataacattaaaaaactaaatcctggtgtcagaacagatctcactggaaaaaagttgtaattacattcctggtaagaaataaaaatgtgttggataaactcacttaaaatgcttactaagcaagtacctccaccaaagcaaagaagaactactcctcacaaaaatgaaggaaaagaagagaaatttcatattaccaaattttatttctccagcatcttccctgaaataaamagaatggatacatattcctcttaaaaattttcaattgaggcagaagaaaaaaaattatttgcaggaaacatagaaaagctattatgaaattatct

SEQ ID NO: 218868 - DNA, 613 bp, Homo sapiens
aatgtgttgataaatcaaacaacacatatttgtatcactagattgagcccagtaatttctatagaaccttaatttcccaaaaggtaccttaatcagactctagtcaaacacaacaagatttagaaaaaacacactgttttttatcaaaaggcaggaaaatataactgtcttctttctagtctggtaaaggatttctaaatataccttccaagggcaaaagggtgcctttgaaaaataagaagattccttawttctgtcaatagaataatgatccagttatataccaaagagcagatagaagacctggctatggagtcatgtgactctgcattagatctcatggggtctctgtctcagtctccacaaataaaaacatggccttgtctctataaaagatacaatgtacatagaagtgttttgcaaactattatatattatcttctcaacatgcaaatttatccctgtgaactgattctttccctcccactcacagtggccaaaataatttatattagaatgtgtccataggtggcttaatagcagttgtgacaaaagtgtaaactagaaaagatactgaatatttacacacacataaagcagcatgaagccacag

SEQ ID NO: 218869 - DNA, 613 bp, Homo sapiens
aatgtgttgataaatcaaacaacacatatttgtatcactagattgagcccagtaatttctatagaaccttaatttcccaaaaggtaccttaatcagactctagtcaaacacaacaagatttagaaaaaacacactgttttttatcaaaaggcaggaaaatataactgtcttctttctagtctggtaaaggatttctaaatataccttccaagggcaaaagggtgcctttgaaaaataagaagattccttaattctgtcaatagaataatgatccagttatataccaaagagcagatagaagacctggctwtggagtcatgtgactctgcattagatctcatggggtctctgtctcagtctccacaaataaaaacatggccttgtctctataaaagatacaatgtacatagaagtgttttgcaaactattatatattatcttctcaacatgcaaatttatccctgtgaactgattctttccctcccactcacagtggccaaaataatttatattagaatgtgtccataggtggcttaatagcagttgtgacaaaagtgtaaactagaaaagatactgaatatttacacacacataaagcagcatgaagccacag

SEQ ID NO: 218870 - DNA, 609 bp, Homo sapiens
aaatatgttgctttcaatctttacaaacaatcctgcaagttagatattactattattcccattatataaatacgggtactgagacttaaagaagttaagtggcttgtctaatattcttagctagtacaaatcagagcccagtctctctgattccaaaactcaccagctatgctaaagcaaaaatcaaaaggtagtagggaagggtatctaaaagtcattctgagagataattaaaaataaataatgtttgctgtcacttatctcttttaccttctttaatatcccttggcatcctctccttcaacattcaactattgactaacacaactaaaacctaaggaggaagtccagtatgtttgaaagaacccacatgtctgagcatgcaggygaaggactgtgttttaaaatagcagggataatctaagattaggtattggtgtcaaacacacttctcttatctattagtacagatgaccaccagttttcagtaacaaaagatatggtaataagaaaaaacaaatccacagaaaaggaaaaaaacaagcttgtctttatgcttgttctgtaatgatatgtgtagaaatgctacccacagttaatttcatagtt

SEQ ID NO: 218871 - DNA, 400 bp, Homo sapiens
tcatccaagttgtcgaatttctttttattattgagtagtattgcattggatggacacgacacattttgttcatcaaaaccatcattttatttgggttgtttccaatgttttgccatargaataaagctgcaatgaacattcttgtagatatatatagatataatatatatatttcttttgagtaaatatctaagaggggaaatcctggattattttacatgtatatatgaattcaactgccaacaatttttcaaaccggttgtaccattttgtacctcaatcatcaaagtatgactatgagagttccagctgctccacatactctccagcatttggtattgttgcctttgaaatttttgctgttctagtgggggtatgacagcacctcgttttttttttt

SEQ ID NO: 218872 - DNA, 529 bp, Homo sapiens
catagtcatgaggaataaaaaacaaaaatgttttctcctccaatgtcctctttattcattttgtctctgtaaggaatggcaaggtcaaacagatataagaggtgaggctgtgtatgtgaaagaccccaagcaaaattcactaaatttcaaagaaaaattagatgatatgccagacgcggtggctcacacccgtaatcccagcactttaggaggctgagtagggcagatcacctgaggtcaggaattccagaccagcctgaccaacatggagaaaccctgtctctactaaaaacacaaaattagccgggcrggttggcacatgcctttaatcccagctactcaggaggctgaggcaggagaatcccttgaatagtgacatgggaatctcaacaaggaggacctcgtatgccgtatacagtggagcactggtaactggatactacctacacaagtgaggtctgaaagtaatccctacatgaatgaacaaaactaactggatgtacattgagcataagtcagtaagtcatag

SEQ ID NO: 218873 - DNA, 563 bp, Homo sapiens
ggattggtgtataaatatatacagcactgacgccaattgtttgaaaaactgcatgtgttatatcagttgggtgagtttagctcttctcaatggatcttttagttattggaataaaattccaacttatagcaacttcttcagtataaattaggcagactttcagcaagtcctgtgaatacccagttcctggcacacagtgggcctcattacaagttgacygaagaacctcagttctgggttctgtgacaattctgggcccagagttgtcacagggcaaatgagataagcagcattgcttggagaatgttgcctcaatcattcgtgttcctttctggctgtgatgtatattacactctccatagtaattgtctgtctccataaacccatttaaaaatacacatgttaacataataggattgctaattatacttggatgttcttgttcctttttctgactctataataaagcctcaaaatgctagctaggtcatggccacctaaaagaaattacattttcttgaccgccttccagcagatacggccaagtgactacactttggtca

SEQ ID NO: 218874 - DNA, 464 bp, Homo sapiens
ttgatctgcctttcagatctcagtgatttggtatctatctccactatcccactgaagtttgctattgttggttaccaatcacttttctgttgctaaatccagtgaatgctttccagttcttgatatacttggcctttttgtggtctctgactctgttgacccctctccatcttgcttgcttggcttcagaggcattaggctcacctagttctccttttctctctctggccattcttcctcagacttctttttgggcttctgatcatctgcacctccttttaaagtyagtgctctccaggggccctatccttgcctctccttattatgtcttctgtattttctccctgattgatctcatccatgcctcgggcttaaattaccaattattaatttatttcttccaaatctattttaactcaacctctttcctcattcatagacctgtacagtttgagtgtttattg

SEQ ID NO: 218875 - DNA, 578 bp, Homo sapiens
cttcttggacttaaactctttttttttgagacaaggtcttgccctgtcatccaggctggagtgcagtggtgtgattatggctcactgcagccttgacttgcaaggctcatgtgaacctcctgcctcagcctccagtgtagctgggaccacaggtgtgcgctaccatgcctggctagttttttgtttgtttgttttgaagagatgaggtttcattttgttgcccaggctgtaaactctttttgcctaagctttttctgttcctaaaatgaagttgttggcttgagttgtgcctgttcattcctttattcttacatacacactgtagatttggatttggaagaattcttggtcaattcagtggccccttagctcaggcagtcaatggctgtaggttttggacagtaactcctagactgcatggagatacttgtttctgagtttctttttcttctgctkcttctttttttaaaatcacagtacagaatgttatgttggagttagaataaagtcaatgttcataaaacaaatgaggaagaggttatataggggaaaaagagcaaaatactagtataattcgt

SEQ ID NO: 218876 - DNA, 204 bp, Homo sapiens
tctttaagtccctgctttttttgctggcttaaaattcagtattatagctagagtaaaactgttttgctcaaatcttcctttgaactctgggtagtgattgtctctccatttsccttgttgtgttccttctagaacctggatatttctaatgagaaaaatctattgaaaagctacatatcttgatttgagtgtaaattaagatct

SEQ ID NO: 218877 - DNA, 267 bp, Homo sapiens
ctgctggcccctttaagaggcccggctggctctgcggcggttccagctaacccggtccctggtgcagctctgcggtccgggtcccccagcagagaatcggcacccggcggggaggcagsaccagacgcaggagagggcgtggccccgccggggagctgggcggagtctatgctgcggagaaagcgggagaacccggaggtgggcggagccgagggtctgtgggtggggcccggcgctgcgggcctcgtggggcggagcctcgggctc

SEQ ID NO: 218878 - DNA, 523 bp, Homo sapiens
aagtccaagtccaaagtctcatctgagataagtcaagtcccttccacctatgagagtgtaaaatcaaaagcaagttagttatttcctagatacagttggggtacaggcattggttaaatayacccattccaaatgggagaaattggacaaaacaaggggctacaggccccatgcaagtccaaaatccaataaggcagccactaaaccttaaagttccaaaatgttctcctttgactccatgcctcacatccaggtcactgatgcaagaggtggactcccatgccttgggtagctccatccctgtggctttgcagagcacagcctgcctcctggctgctttcatgggctggtgttgagtgcctgcagcttttccaggcacatggtgcaagttgttggatctaccatcctagggtctggaagacagtggccttcttctcacagctccattaggcagtgccccagtggggactctgtgtagggtctcagatcccacatttcctttctgcactgccctagcagaggt

SEQ ID NO: 218879 - DNA, 523 bp, Homo sapiens
aagtccaagtccaaagtctcatctgagataagtcaagtcccttccacctatgagagtgtaaaatcaaaagcaagttagttatttcctagatacagttggggtacaggcattggttaaatacacccattccaaatgggagaaattggacaaaacaaggggctacaggccccatgcaagtccaaaatccaataaggcagccactaaaccttaaagttccaaaatgttctcctttgactccatgcctcacatccaggtcactgatgcaagaggtggactcccatgccttgggtagctccatccctgtggctttgcagagcacagcctgcctcctggctgctttcaygggctggtgttgagtgcctgcagcttttccaggcacatggtgcaagttgttggatctaccatcctagggtctggaagacagtggccttcttctcacagctccattaggcagtgccccagtggggactctgtgtagggtctcagatcccacatttcctttctgcactgccctagcagaggt

SEQ ID NO: 218880 - DNA, 617 bp, Homo sapiens
tactaaatagctctctgaggaaaccacttgtcttcataattattgtttccttatttatggaaagtaatattagactaatctactttccaggttattgttggttaaaagaaatgtttgtggcagtgcttgaggaaaaagttctgtgtaaatgcaaatagtatagttratttttccccaagatctagaaaatgcctaaaatactggcagatacagggatttccttttttctcccctttcctctctttctcttttgctttcctctcctgtctcagcagactaaatgtgctcatcattttttccttgaggtcaaagttcaataatttaaggcagcttattcttttatgtcttttaatatttgaaatctggtttatgctgcactgtgggtctgcaaatatagacaaagaaaaatttacttgaaattgctttctatgttgtacttctaaaaatttcaaagcactttcatttgtttatccaaagtttctgttagagtggggaaattactttataagcaaaaccaaggattgtctttatgacaccatggtataaggtaaagagaagaatttgttgagtaagctacaaaagcactattaaattgggggacagataagtccagcttt

SEQ ID NO: 218881 - DNA, 377 bp, Homo sapiens
aggctacagcagaatggtgaaaggagaaagcagtaaacttggagttagtagaccggagacatgctcatttatttattcaacgtattttcatataacacattcatgtgctttgggatagacaccatgaaagacacaaaaatgtctacyatataaggcagtatctaagcagaaaatgatttgatgataaatactatagcagtggagatgacagaaatatttttctggctcaggtcatcaatgaagggatcatataacacgcgcatatatgtgcatgcacatatatgggtggggccctgaagccccacttctgttattataagcagagacacggagggtaaagattagggtttacatagaggggttacaacaacaagtcc

SEQ ID NO: 218882 - DNA, 377 bp, Homo sapiens
aggctacagcagaatggtgaaaggagaaagcagtaaacttggagttagtagaccggagacatgctcatttatttattcaacgtattttcatataacacattcatgtgctttgggatagacaccatgaaagacacaaaaatgtctaccatataaggcagtatctaagcagaaaatgatttgatgataaatactatagcagtggagatgacagaaatatttttctggctcaggtcatcaatgaagggatcatataacamgcgcatatatgtgcatgcacatatatgggtggggccctgaagccccacttctgttattataagcagagacacggagggtaaagattagggtttacatagaggggttacaacaacaagtcc

SEQ ID NO: 218883 - DNA, 469 bp, Homo sapiens
gggacaaaacaggaaataattttggaatctaataatgtttctttcttgttgtataagagagttttgactttataattaaaattctcatctttctctgttgtcatgtaaatatcttctccatatcctgaatattaatgtgtcataacaatcttgtaggaggggcttgtaaaacacattattacacccaggcaagttacataatatgtattgaatggcagttcacaagagccaaatctaaggaagartggaaaaatccagttcaaagtagatgtcagtatccatgtgacagagtatagcctactgatgaagccatctaaacaaactgacaaaatgtttatatgatgcttttacataaatatacaaacacaacaaaaagggtaaaactaggcactattactaaatacaaaatccagtgcaagccaacacatatgtataattacatattatgtctctttaccccttaaactag

SEQ ID NO: 218884 - DNA, 615 bp, Homo sapiens
gaaaccttagagattttctagtgtaactctgatattccataggtaagaaagggaagaccccaagatgggagaagacttgtcaaaagtcatgttaactggagcaagagcccacagctcttgctttctatcctggttgattggctgcctgtctatttatgatgctttcaagttccttctcctttgagtttttgcttcaagattggtgaaggaagttgtatacattgcttctcttacattagtaaccatgctcatttttgaggtgatgttttgattaggagttttatttgtggctgccaaatagtacctggagccccgctaggttggtggtgtggagtgccgactaggaggaacacatgggcacctgaggtgactgcgcattcagagggaggagacctaaccaggaacacagacgtgaatgttaacacgttcctcggaagaggtcagcttcacatctgggggcacacggctgttgtagtgtgtgcagtgtctcaggttatagggtccaatgttgatgctgtcttagagctgtggcaaagcctatcagaacttgctttaggctgggtgctgtggttcaygtatgtgatcccagaactttgggaggccgaggtgggtgga

SEQ ID NO: 218885 - DNA, 507 bp, Homo sapiens
ttggctgtcctcgtcacctctgcccaggaaaggcccgaggcctgactaggcccccaaggagccagccccctcccgaggcacctccctcccaaggagacacatccacgtggcatggaaacttttcggtaaacrctcaaaagtgagagctggttcccttaccttggaggggacattcagggatggtaagagataagacgtttctaggaagaaaagaaaggggaagtgagaagataaaagtcttcacataagaggcaaatgagaaaagcattttctgccaaattgtgaaaagtgaaagaaatgaaagcaagcttgctttggagacagaaataaacactaggcaaaaagaaacaacttttccataaagcgttttgtaacagttaggaaaaactcaaaggtaatccatgatattggtccagggatgcctagaacaaggtctgcttaggtgactggaaaagacacttgcccctgtgaagaaatttcagaggtaccaggaaagttccctgaccc

SEQ ID NO: 218886 - DNA, 456 bp, Homo sapiens
agaaggcatacaaatcgcacacaggtatatgaaaagatgttcaacatcactgatcatcagagaaatgcaaatcaaaactacaatgagataccatctcaccccagttaaagtagcttttatccaaaagacaggcaataacaaatgttgttgaggatatggagaaaagagaaccctcatacactgttggtggaaatgtaaattagtataacccctacggagaacaatttgcaggtttcttaaaaaactgaaaatagagctaccatatgatccagcaatcccaccactaggtatatacccaaaggaaaggaaatcagtgtatcaaagagatatctgtactcccgtgtttattgtagcactattcacagtaaccaagattttgaagcaacctaagtgtctgtaaatagatgaatggataatgaaaatgtggtacatayacacagtgtatatgaatgtata

SEQ ID NO: 218887 - DNA, 370 bp, Homo sapiens
gaattctcttcttcttgtagtattgtttaagtttataattgcaaaagtatccttaaacttctggcsgggcatggtggctcacgcctgtaatcccagcactttgggaggccaaggagggtagattgcctgaggtcaggagttcgagaccagtctgagcaacatggtgaaacctcgtctctcctaaaaatgcaaaagtagccaggtgtggtagcacacgcctgtaatcccagcttactagggaggctgaggcaggagaatcacttgaacctgggaggcggaatttgcagtaagccaagatcgtgccattgcacttctgcctgggtgacgagagcaaaagtccatctcaaataaataaataaataaataaaca

SEQ ID NO: 218888 - DNA, 512 bp, Homo sapiens
aacaagggaaactgaagacctcgaccagcaccagggccttccgtcagctcctgatacaggaggggctcctggattttgtttccccttcwtgacaatacaacatgggactgggttcctcatttgactcggttcatttaaagaatgatctcaaagaagaaaggaaaatcaatgacccctttaggaaatgtagtccagggtgggggtggaggaagcatttcaatgacaaaagccaaacctcagtcataatgcagatccctgtctaacaggtgatcattgttttttttttctattacaggcactctggtctcccgcctaccccatgcaggatggctatccccatgcagaatggctgtgactttcaagagagtcccccaagggagggtcccaagatcaggggctggtaatgggccccaccacaaggctacgctgctggcttttgtttggaacaatagcgctcccatgatacctcactcttgctgacaatattggtaatacgggagcatgaacacagc

SEQ ID NO: 218889 - DNA, 548 bp, Homo sapiens
agatctggttgtttaaaagtgtgtagcagccccacccccttgctccttcttccaccatgtgatgtggtgttcccgcttcagcttccgccataagtaaaagctccctgaggcctccccaggaagtgcgtagatgttggtgtcatgcttgtacagcctatagaactgtgcgccaattaaacctcttttctttatttaaaaaaaaaaaaaaagataatgggtataaatcactatggtatttaaaattcacttgtaatatttaaaagagtgagggracaattttatttttaaatgtcaatgtttgtaattttggaagttacatccttatcataaaaaaagtcaatttaaatttgggagtgggtatgcgctttcaggcaaaattcttttaggggcttcatagggataaaatatttttcttagctttgtatctacctaaaggaagacccagaaattctttggggtaccaagcatgcttccacatctcagctatatttagtctggttttacctaacagaaacaaactagggtcactgaaaacactttcttgaacc

SEQ ID NO: 218890 - DNA, 420 bp, Homo sapiens
ttgctctgttgcccaggctggagtacagtggcatgatctcggctcactgcaaactccacctcccaggttcaagcaattctcctgcctcggtctctcaagtagctggaattacaggcatgcaccaccatacttggctaatttttgtatttttagtagagacggggtttcaccatattggccaggctggtcttgaactcctgacytaaggtgatccacccgcctcggcctcccaaaatgctgggattacaggcacgagccaccgcatccggcctaagcctgtttttaaatgtaaaaaggctaaaggtttttttatcaatttgctgaagacattgtgttattaatactaatataggctcaaatatgttaaaattctaactgatcaaacggtaagtggatgtttttataaataccacatatatc

SEQ ID NO: 218891 - DNA, 420 bp, Homo sapiens
ttgctctgttgcccaggctggagtacagtggcatgatctcggctcactgcaaactccacctcccaggttcaagcaattctcctgcctcggtctctcaagtagctggaattacaggcatgcaccaccatacttggctaatttttgtatttttagtagagacggggtttcaccatattggccaggctggtcttgaactcctgacctaaggtgatccacccgcctcggcctcccaaaatgmtgggattacaggcacgagccaccgcatccggcctaagcctgtttttaaatgtaaaaaggctaaaggtttttttatcaatttgctgaagacattgtgttattaatactaatataggctcaaatatgttaaaattctaactgatcaaacggtaagtggatgtttttataaataccacatatatc

SEQ ID NO: 218892 - DNA, 420 bp, Homo sapiens
ttgctctgttgcccaggctggagtacagtggcatgatctcggctcactgcaaactccacctcccaggttcaagcaattctcctgcctcggtctctcaagtagctggaattacaggcatgcaccaccatacttggctaatttttgtatttttagtagagacggggtttcaccatattggccaggctggtcttgaactcctgacctaaggtgatccacccgcctcggcctcccaaaatgctgggattacaggcacgagccaccgcatccggcytaagcctgtttttaaatgtaaaaaggctaaaggtttttttatcaatttgctgaagacattgtgttattaatactaatataggctcaaatatgttaaaattctaactgatcaaacggtaagtggatgtttttataaataccacatatatc

SEQ ID NO: 218893 - DNA, 452 bp, Homo sapiens
taaagctcctccacctcccctggctctcacctccagtacacacatgtatgtgggacatacaaagtgtgtgtgttcatgtgcacaccctttagggattaatttgaagccaagttgcaattggctaatggcttactctactgcttaagacagtattttattcttgactggctcaataaacctgctgagaaaaataaacaatggatttcaatcttataaataatctagaacacagaaccgctgcgcaaacaggagagttgatttactgcgcacaataaacagaacaggaaggaccagtgtggcagagtgaaccccaagtcctagwcccattgtcctgggacagtagagttcacaggggttttctgtctattacacaaagtctaaggcctgggatatccaggtttcaaactggtcttaaaaagagcatttcaaagcagatcaggtggagaagcttt

SEQ ID NO: 218894 - DNA, 549 bp, Homo sapiens
gattttcagcaagctatatttatgataaatgatggacagattttgagtagtacagattgaaaatttttgattaactcaaagtgaagtatgctgagagatcaaggacacagacatactctttctctagcatgtgcgcgcgcgcgcrcacacacacacacacacacacaccactcattgtatttgaggtgaagcagttgttaatgtgtgctttgtacctcacctaggaaaatcctaaactttctttttaactattttacaaaattggggcacatacttaagacatttcattaggtggtggtgataatcattatataaaaatctaaagcctgaagtgaggttttaggctttgcatagattatagaatggggaaatgtttgcaatgtgataacatatacatgatgtccactactcacctgtaattagtctgaggtagtgggttgatgttaagttctctattcaggcttcaagatactgtttgggggctggcggggagggaaggtgcagcccacttttcaaaagaggaagaactggttgtaatgttggaaaaaa

SEQ ID NO: 218895 - DNA, 439 bp, Homo sapiens
ggacctgcataagtaaatgagaaaaaggaagaatgaatacacacacacacatactccaaacctaatcagtcaatagtgatataggatgtgtctttttttcttctttttatgaaagttaactaaacctgatgcagagataactcccttagttttgattctaccggaggctgtgagcctcwttttatttcaaacaacatgtcagtgacagtatctcattagcatgaatcattttttttaagttaaaaagtacaacttcttggccctgttcctagaaagtaaactaacactactcatcggaaacagccttgcttgaatttcccttatcaagtttttacaatggtaataatttgacatctgatccaaactaaagagcaattattagacatggtttaaaaagtggtgctcctcatttcctattcaaacctgggttgcaatgatt

SEQ ID NO: 218896 - DNA, 506 bp, Homo sapiens
aatatttttcacttaataattttggaggtgccaaaacagaaagaaaagaatgaggagcgagtacattttcacaggctccttaagaacaattttcttacacatctccatatgtcagcattttccattgtccttaaaatatagtgggaacacattaactgcatagatgaagaagagtgaagaaactctcatgtagtctgaacataaaaaataggtaaggttttagtaggtttattccaactgtgttgcacatgattacacaagaaactcaatgagcttaccaataattttctagtatacaatatattcgtaagacctatatacagttttcagacagttagcttastaacttaagtgatcccaaagctttttgacatattttttccattttaactttttataccgttaaatactgtctgatttgttttaagctcagtaaatttttcccattgtcaatggacctataataatttgcatggctgtaacaagagatgaaatgtttgtagtgg

SEQ ID NO: 218897 - DNA, 406 bp, Homo sapiens
taagtgcttgtgttaaaaaatgttattttataaatgtggctacataaaataattgatttttttatttaaatattactatcaattctctcatgagaagrtaataactagaactttcagtttaggattatatgtgtaattaccagggaaaaaagtgtcttgcttacttacagaaatgaattcttgaaattcaggtagatgaagttatttgagtaattctgtgatgaaaatccttagttatatggggaaaaataggtaaaaattcacagacccatcagcctaaaattgcagtataattgctgattatcacactggagagtggcagtctctgttctgaactaatttgatggtagatccatgctgtaattgatatatagctatttatagtctttttttatttttagagtga

SEQ ID NO: 218898 - DNA, 604 bp, Homo sapiens
atgttcctttcccaaaacttttaacttgagtgacagagaggcacaagaatagttgcagaattatttatagcaacagcaaagacattgtcagcaagtgctaatggtggcttcctaatcaaagtgttcctgtgccctgaccttggctctggtccttgctgctggcttcccttgattcctatccattttccaaaagtggttctccttatttattccgttgcataaattagccaaagttgatttctattgcttacagtcaagaaggctaagcatagtgatacacgtctgtaatcctagcactctgggaggccaaagcggagaatcacttgaggccaggagttcaagactagcctggccaagatagtgagaccacatctctattttttttttaacttaaaaaaaaaaaaaacatgttaatgggktttttggttgttgttgtttttgcctcaatatatacagctaaatgtaaggaggtttaatgtgcctatgatgaaatcccactgtaatgtccctaacatatccttaataccaagggttacataatactagccctttacctggtaacttcatgccaagagacacaccatctatttaccatccttcaaca

SEQ ID NO: 218899 - DNA, 499 bp, Homo sapiens
aatgttcaatttcaaccagagatgtcagaaaaagagaagattttaaaaatgaaaagaacaagtacaacaaataaaaaacagatataaacatggttgatattaatccaacgatatcaaaattcacttcaacygttaaggacctaaacatattaattaaaaaacagagactgtcagagaagattttttttaaaaagacccaactaatattttctataagaaacccattttagacataaagatgcaggtaagtgaaaagagatggagaaatacgtaccaagttaaaactaaccaaaagaaggttggagtacagatggttcctgacttaacgacagttgaaatgacaatttttcaacactatggtgacgtacaagcaacatgcattcagcagaaagtatactttgagtacctatacaaccattctgtgtttcactttcactacagtattcaataagctacatgaaatagtcgacacattataaaacaggcttttgtgttagat

SEQ ID NO: 218900 - DNA, 499 bp, Homo sapiens
aatgttcaatttcaaccagagatgtcagaaaaagagaagattttaaaaatgaaaagaacaagtacaacaaataaaaaacagatataaacatggttgatattaatccaacgatatcaaaattcacttcaactgttaaggacctaaacatattaattaaaaaacagagactgtcagagaagattttttttaaaaagacccaactaatattttctataagaaacccattttagacataaagatgcaggtaagtgaaaagagatggagaaatacgtaccaagttaaaactaaccaaaasaaggttggagtacagatggttcctgacttaacgacagttgaaatgacaatttttcaacactatggtgacgtacaagcaacatgcattcagcagaaagtatactttgagtacctatacaaccattctgtgtttcactttcactacagtattcaataagctacatgaaatagtcgacacattataaaacaggcttttgtgttagat

SEQ ID NO: 218901 - DNA, 582 bp, Homo sapiens
tgtaaagcaaaaatgctgattcagacaaataggacatatacacagcaaagccaaaacaaacaatactttaacatgtatcggataaaggtagaaagttgagcatttaccttccaaaaaggagggaaggtcaatagcccaaagagagaaatcacagacaactgagaggaaatgactttttgtttaaaagctaatcagttctgttcaaatatatttaaaatatgcaatggaaaggcatttcttttaagaatgtttttaaaagacctaaaacaactagctcatatcatatctgtttcaaaaattatttgaagtttacacayacagttacatgacaagttaacatatcatgatagctttttaaatcattgccatcaataatctgttcttctttcatctttccttttgtaatctcaaaggaaaagttgcgagactacgttgggggaaagaaaggcttgttagaagtcacggcatgctctgattgtgacaaagagtgctgtggctaagtgacccagatctattgacaaggcttggaagagttagtcccaggtaggagagaaaatttaccagtaagcactaaatgaattc

SEQ ID NO: 218902 - DNA, 573 bp, Homo sapiens
tgcagaaaattctattggatatgctagactagagaagcacagaaggctgtatggtggtgatggtggtgatggtggtggtgatgatgttagaggcggaaaaagaggagatgattctgccagtagaaagggagtcactgaacgtgtttgagacaaagagaagggagaacagcagcttcasaaggacattggtgggaaagagaaacgtttaaagggaaggctgtctgacatatgaaataacttcatccctatgacattttcttataaaatctttgagaaaacctatgtcatttatttatatttagatttggatttgtgggtgtgtgtttttacatgtgatatatgttactgacctcaaagcggacatctagaaaaagcaagtttggcctacattcgggttatgtaagatatacatgggtatataaaacaaatgagacatgagattttagaagaatgtattgtcttgtttcttgctcttattcacttagcaatgtaagaaacatttctcatgttcatcttttatatacacatacaatcaattaaatacatatataattatatatacaacaaacacat

SEQ ID NO: 218903 - DNA, 219 bp, Homo sapiens
caacaacataattgcccacagtaatgtatgcacattcccatttcttcacatgctcatcaaaactatatatttttattctttttattttttgaagttttcagaggcaaaaacatagtatttgtttkaattagaagtatttttgaggtttctctaatcacgtgcggaaagaacaatgtcaatgctaacactaatatcatctttagtctctcaaagcatcat

SEQ ID NO: 218904 - DNA, 595 bp, Homo sapiens
gtttctattgtttgcagcagtggttaaggagctgttcagaggtagaaaacaaaaggatcctggtgacatgataatagctctgtgatactctgttgcaggctgctggatggtaactgtcctggccttctaccattcaacatacatgatcataccacgtgtcatcatccatagtccaaagtagaggctgagagagataatgcctatttttgaagtatatataaaacagcacaattctgaggctgtaggtcaagtgactcaggatcattttttacagacttataaatctgtagattactagcccactgtagatataactaataaaggcatgtgcctatggaaatgttcactagactgggaactaagtccctccctttgcaaaccggttggatcttgcccttagagataagaccaaagatctgcagaagggaagtttcccagcagacaaattgcaaaaatagtagagagttcacatatacccatcactgtttcccttaatattaatgttaatcttacataaccatagcacaataatcaaaaccaggaaattaggattggtaaaawactattaactacatatcttattcaaatttcccca

SEQ ID NO: 218905 - DNA, 597 bp, Homo sapiens
tattatgcaaactatgcagataggaaaggttttgatacaatattaagtgaacaagcaggacataagatgatatattatgattgcaaagatgccaaatagaaaacagtagctgtgtgtagcctcaccaaagtgagatgatgctagtraaagtggctgccttgccacatagtacatttccaagttcttcttacatacttgtggagccatgtgattgtgttctggccaatagaactgtgttaaatttatgtgagcaactttccttcctggtccataaacatcttctttgtggtttctttctttgtctgctaattggatgtcaacaccaggaaaccctgttttgaagatggcagaatctctgttagtttgagtctctgagtcccagaacctcacacataccattgctgatttggctttaataagcaagacgtaactatccactgcaataagccactgagatatcatggtctatctgttgtagcagcaagcattactttaacaccctatactatagtgatagaattagcaaataattttactttcagacttttctttaatgccaatattctaccatttgttgataatgaaaaataatgtaac

SEQ ID NO: 218906 - DNA, 605 bp, Homo sapiens
atttttgttcctacgctagtttcctaaggatgatagcctccagctccattcatattcccacaaaagacataatctccttcttttctatggctgcataatattccatggtatatatgaaccacattttctttatccrgtctgtcattgatgggcatttaggttgattccatgtctgctattctaacactgtaatttctaaagacttccagattctacttttataggtaacctgttaaacagtctagctctggaagccaagcaatttctagaataactaagcaatagaaattacacttcaatgcagaaaggcagtatctacatgagattatgaaattgcggttgctttttgtgttcactgaaaaaaataagtaaaactgtaactttcagaaaaaatgattgtacatatagaaaacccaaagcatctaaacaattaaaataaataagtatagaaagattactggatacagagtcaacatacaaatatcaattgtatgtctatataccagcaacgattcaaaaatgatttttataatagcattaaaaattagacgcttagtaataaatgtgagaaagatgtgcaagaactctacataaaaaattatgag

SEQ ID NO: 218907 - DNA, 601 bp, Homo sapiens
  misc_feature (1)...(601): n = A,T,C or G
nnnnnnnnnttatacaggtctccttgggctgatagggtaannanagtctctcttaattttaccntaaacnatctctcnccatgaaaacatgtatatntatgttctaagaggagttctgatgtgccaacatttttctcttctcctganaatgtttgcagccccttgaaatntttgccatgcagattttctgctcaagaactatraaagattaggttaaaacaccaggtctgttaaaccatggcctgacatatccacaccctcctccaagtatgaacaaaaaccattttttggaaggatgagcaagactcatctcagagcctcttgtggggaattgcttcctggctttgcacaagtagtcatgcacagggagaggttttcacctttccatgcaagcctcatctcttcaacacccgcaccaggaggtctctaatgaagcctatgggctggagcatgtgcaatagatggtaggtccacatggcagccttggagctgaagagcatctacagagacgttggaattctcagcctgggccctctgctccactccctgtactcagggtctcggcctccatttactgacttggagtgccactgggtatgca

SEQ ID NO: 218908 - DNA, 526 bp, Homo sapiens
gagcaggctgaggagtcaaatcgagaaatggaaagaaacaagccaggagaagtcttacgattctgcttctacagcctgcaaagagccaaagccgaggtgctgcacggccctgagctacacctctgctctcactttcatcaccctaccaggctcctcgggtggcttcttcccacaygccccccccccccggcctcccaagacggagtttcgctcttataaccgggctggagtgaagtaacgtgatctcagctcgctgcaacctcctcccccgcaggttcaagcgattctcctgcctcagcctccaaagtagctggaattacaggcacccaccaccacgcccggctaatttttgtattttttagtagagatgggatttcaccatgttgatcaggctggtctcgaactcctgacctcagacgatccacccacctcagcctcccaaagtgctaggattacaggtgtgagccactgcgctcagcccgggccgcttctttaagtttggcccttctgcagagtcagctcggaa

SEQ ID NO: 218909 - DNA, 526 bp, Homo sapiens
gagcaggctgaggagtcaaatcgagaaatggaaagaaacaagccaggagaagtcttacgattctgcttctacagcctgcaaagagccaaagccgaggtgctgcacggccctgagctacacctctgctctcactttcatcaccctaccaggctcctcgggtggcttcttcccacacgccccccccccccggcctcccaagacggagtttcgctcttataamcgggctggagtgaagtaacgtgatctcagctcgctgcaacctcctcccccgcaggttcaagcgattctcctgcctcagcctccaaagtagctggaattacaggcacccaccaccacgcccggctaatttttgtattttttagtagagatgggatttcaccatgttgatcaggctggtctcgaactcctgacctcagacgatccacccacctcagcctcccaaagtgctaggattacaggtgtgagccactgcgctcagcccgggccgcttctttaagtttggcccttctgcagagtcagctcggaa

SEQ ID NO: 218910 - DNA, 495 bp, Homo sapiens
tcacaacactgtctgatgggtttccaatgtatacagatgaaataaataagacaactttaagataaaccgggcgaaataaaggagtctgtacattgctaacatttccacattccccttgaagtggtaaatacagaatctaagtagactgtgaaaagttgtgtttactgtaatctctaaagcaaccackaaaaactacaataaaaaggtagagtaaaaaacacaacagataaaatactttaaaaaaaaaaaaaaaagctcgaataacctaaaaggaggcaggagagagaaacagaggaacaataaacagaaggaacaaaaacaaataataaaatggtgaacctaaatccaagcatatgaataattaaaaccaattataaatggtttagtctaacaattaaatagaggttgactgaatagattttttttaaaaatcatccaactaccaagaaattcactttgaatataatgatataggtagattaaaagtagaaggac

SEQ ID NO: 218911 - DNA, 495 bp, Homo sapiens
tcacaacactgtctgatgggtttccaatgtatacagatgaaataaataagacaactttaagataaaccgggcgaaataaaggagtctgtacattgctaacatttccacattccccttgaagtggtaaatacagaatctaagtagactgtgaaaagttgtgtttactgtaatctctaaagcaaccacgaaaaactacaataaaaaggtagagtaaaaaacacaacagataaaatactttaaaaaaaaaaaaaaaagctcgaataacctaaaaggaggcaggagagagaaacagaggaacaataaacagaaggaacaaaaacaaataataaaatggtgaacctaaatccaagcatatgaataattaaaacyaattataaatggtttagtctaacaattaaatagaggttgactgaatagattttttttaaaaatcatccaactaccaagaaattcactttgaatataatgatataggtagattaaaagtagaaggac

SEQ ID NO: 218912 - DNA, 632 bp, Homo sapiens
tgcctatggaaagatatttggggaccactatattacattagaagcactgtgaatataggatcttcatttacctttccctaaaagtagaccctaagacaaagattcagatgcagtcaatttatgtgggaggtgaaccttgaaagtagggaaaggaagaaaaggaagggggaaaggccaaataaagattgctttgatgagcttgtggacacctgaggttcaatcctgytggggaccctccaagataccttgtggaatagacctaaaatggtcccatcacaggacaggagacaggcatttattgccaattgattgagcactaggggctgttagctgcccgacaattccaagtcatgctcccaaggtagcctagaaagccctcagggagatgaggagagatggaggcactggcagtggttcatgttccacagcttcaggtaaacttaggtgcatctagggaacatagggtgggcactgacaactaccagagaggccatgtctgtcttgtttcctgttgcattcccacacattagaccttagcctagtgtgtggcctagagtgggtgcttaacaaatatttgataaataaatcttgtttaactaccagaccttgaaacaggaactgaatcacactaa

SEQ ID NO: 218913 - DNA, 538 bp, Homo sapiens
tctctctggctcttgtccctgaagtcccctctagaatagcaaggcctggatcctctccacttcctggatggcccccatggagcctgtttggctccctccctaccaggtctttaagtgaggaacactcagtccctgggataagacggtgtcatataacaaaacatgttcaataataagcatccatccatgtttggggaaaaatgactaaaaacttttgtaatgttgaggacctgaaataaagcactagaaagaagcaatgcttatcaactaagcaggaggtggggtagggggagacaagaagcatttaggactagggtggagaaccgtccttgcgggccggcagtttgcgctctcaccgctagggggcgaggcagggcggtcttgggaccgtgcgatcgcgatcctgggttccgccggcgcacgtgggtcttggtggttccaggtcctggccccaaggcaaggggccaggtacacctacacacttatgctgcggacccaggtggggacrgcttacagggtctgcagcacgtccagctag

SEQ ID NO: 218914 - DNA, 550 bp, Homo sapiens
aagagacttaataaaggtaaagtggtaactgaaattaaaagaactgccaaaaacaagccragtgagtaagccaagaagcagggcacaccctgcttcagtcagaaacaagtgccactgctgaatctctgacctcttcaggccacatctaaaacaggggttctcaaagcatgttcccagaccagcaacacgagcatcacctgggagcttgttagaaatgcagacccactgaatccgaataaagctgaataagctccctatgtgatctgtacgcacgttaaagtttgagaggcactgatcaccaaaggttttcccattgcttttccttggcctccacttagtagcacagaagtgggaaaggaaataaacagatcctgctccagggtcagtgcacacaactaccttagctggagccatgcttaactctattaggtactgagggattgggagaaaggggatgccaaaaggacacagtccctgccctcaaggagcaaagactaaacagggaataaattctaatcaaaggcaaaatggaggctaaataaaggcatga

SEQ ID NO: 218915 - DNA, 555 bp, Homo sapiens
aagagacttaataaaggtaaagtggtaactgaaattaaaagaactgccaaaaacaagccaagtgagtaagccaagaagcagggcacaccctgcttcagtcagaaacaagtgccactgctgaatctctgacctcttcaggccacatctaaaacaggggttctcaaagcatgttcccagaccagcaacacgagcatcacctgggagcttgttagaaatgcagacccactgaatccgaataragctgaataagctccctatgtgatctgtacgcacgttaaagtttgagaggcactgatcaccaaaggttttcccattgcttttccttggcctccacttagtagcacagaagtgggaaaggaaataaacagatcctgctccagggtcagtgcacacaactaccttagctggagccatgcttaactctattaggtactgagggattgggagaaaggggatgccaaaaggacacagtccctgccctcaaggagcaaagactaaacagggaataaattctaatcaaaggcaaaatggaggctaaataaaggcatgagtgcc

SEQ ID NO: 218916 - DNA, 564 bp, Homo sapiens
gggggtataggcattgggtaaatagtcactttccaaaagggagaaataagttaaaagaaaggggctatgggccctgtgcaaatctgaaacccagagggcagttattaaatcttaagccttcaaaataatctccttggaccacacatctcatatccagggcacactggtacaaggrgtggtctcccaaagccttgggcagctctgtggctttccaggacctgtgactgctctcatgggctggtgctgagtaccttcagcttttccaggtgatgggtgcaagctgttgccatatctaccgttctggggtctggaggacaatggccctcttctcacagctccactaggcactgccccagtggggattctgtgtgggggttttaaccccacattttccctctgcaatgccctaatagaggttctccatgagggctccatccctgcattaggcttttgcctggatatccaggcttttccgtacatcctctgaaatctaggtggaggctcccaagcctcaagtcttgtactctgcatactcacagtctttaataccatgtggaaactgcc

SEQ ID NO: 218917 - DNA, 564 bp, Homo sapiens
gggggtataggcattgggtaaatagtcactttccaaaagggagaaataagttaaaagaaaggggctatgggccctgtgcaaatctgaaacccagagggcagttattaaatcttaagccttcaaaataatctccttggaccacacatctcatatccagggcacactggtacaaggggtggtctcccaaagccttgggcagctctgtggctttccaggacctgtgactgctctcatgggctggtgctgagtaccttcagcttttccaggtgatgggtgcaagctgttgccatatctaccgttctggggtctggaggacaatggccctcttctcacagctccactaggcactgccccagtggggattctgtgtgggggttttaaccccacattttccctctgcaatgccctaatagaggttctccatgagggctccatccctgcattaggcttttgcctggatatccaggcttttccgtacatcctctgaaatctagktggaggctcccaagcctcaagtcttgtactctgcatactcacagtctttaataccatgtggaaactgcc

SEQ ID NO: 218918 - DNA, 596 bp, Homo sapiens
gttttgtcacccaggtattaagcccagtatccattagttatttttcctgatcctctccctcctcccaccttccaccttcctataggccccagagtgtgttgttctcccctgtgtgtccatgtgttctcatcatttagcttataattgagaacatgtggtatttggtttcctcttcctgcattagtttgctaaggataatgccctccagctccatccatgtccctgcaagggacataatcttgttctttttatggctgcatagtattccatggtgtgtatgtaccacattttctttatccagtccaccattgatggacatttaggttgattgtatgtctttgctaytgtgaagagtgctacaatgaacatacgcttgcttgtgtctttataatagaatgatttatattccctcgggatatacccagtagtgagattgctgggtcaaatgatattcctgtttttagttctttgaagaatcaccacattgccttccatgatggttgaactaatttacactcccaccgacagtatataaatgttcttttttctctgcaaccttgccagcatgtgttattttttgacttcttaataataac

SEQ ID NO: 218919 - DNA, 596 bp, Homo sapiens
gttttgtcacccaggtattaagcccagtatccattagttatttttcctgatcctctccctcctcccaccttccaccttcctataggccccagagtgtgttgttctcccctgtgtgtccatgtgttctcatcatttagcttataattgagaacatgtggtatttggtttcctcttcctgcattagtttgctaaggataatgccctccagctccatccatgtccctgcaagggacataatcttgttctttttatggctgcatagtattccatggtgtgtatgtaccacattttctttatccagtccaccattgatggacatttaggttgattgtatgtctttgctattgtgaagagtgctacaatgaacatacgcttgcttgtgtctttataatagaatgatttatattccctcgggatatacccagtagtgagattgctgggtcaaatgatattyctgtttttagttctttgaagaatcaccacattgccttccatgatggttgaactaatttacactcccaccgacagtatataaatgttcttttttctctgcaaccttgccagcatgtgttattttttgacttcttaataataac

SEQ ID NO: 218920 - DNA, 596 bp, Homo sapiens
gttttgtcacccaggtattaagcccagtatccattagttatttttcctgatcctctccctcctcccaccttccaccttcctataggccccagagtgtgttgttctcccctgtgtgtccatgtgttctcatcatttagcttataattgagaacatgtggtatttggtttcctcttcctgcattagtttgctaaggataatgccctccagctccatccatgtccctgcaagggacataatcttgttctttttatggctgcatagtattccatggtgtgtatgtaccacattttctttatccagtccaccattgatggacatttaggttgattgtatgtctttgctattgtgaagagtgctacaatgaacatacgcttgcttgtgtctttataatagaatgatttatattccctcgggatatacccagtagtgagattgctgggtcaaatgatattcctgtttttagttcttygaagaatcaccacattgccttccatgatggttgaactaatttacactcccaccgacagtatataaatgttcttttttctctgcaaccttgccagcatgtgttattttttgacttcttaataataac

SEQ ID NO: 218921 - DNA, 596 bp, Homo sapiens
gttttgtcacccaggtattaagcccagtatccattagttatttttcctgatcctctccctcctcccaccttccaccttcctataggccccagagtgtgttgttctcccctgtgtgtccatgtgttctcatcatttagcttataattgagaacatgtggtatttggtttcctcttcctgcattagtttgctaaggataatgccctccagctccatccatgtccctgcaagggacataatcttgttctttttatggctgcatagtattccatggtgtgtatgtaccacattttctttatccagtccaccattgatggacatttaggttgattgtatgtctttgctattgtgaagagtgctacaatgaacatacgcttgcttgtgtctttataatagaatgatttatattccctcgggatatacccagtagtgagattgctgggtcaaatgatattcctgtttttagttctttgaagaatcaccacattgccttccatgatggttgaactaatttacactcccacygacagtatataaatgttcttttttctctgcaaccttgccagcatgtgttattttttgacttcttaataataac

SEQ ID NO: 218922 - DNA, 504 bp, Homo sapiens
gccttgccatccccacccccttggcatgacctgaattcctgggttccagtgggtgcagtgagcctgtgccctgcctggatgcccctccctgatgggtcttgctccagcrgactgaactctgtccacttctccaaagcagctccctccagggctttgcaaaagctgctcctcctgcctagagagcctttcccctcctctctgcctggacaactcctattcatctttcaagacttagttgaaatattgcctcctccaggaagccaccgaaatctcccatacttgatcatacttccttggagtcctgaacgctgactgtgttatgttagagtgtttgtctaggtgtctgtctcccccctggactgtgacattcctgagtgctggggccatcactgtgagtcctgcaaactgcatggggcctggcctatagcagtggtaaataaaccaatgtctgtgaaataaactttgctcaacagttctagctctggtcagtgaatggtccaccca

SEQ ID NO: 218923 - DNA, 504 bp, Homo sapiens
gccttgccatccccacccccttggcatgacctgaattcctgggttccagtgggtgcagtgagcctgtgccctgcctggatgcccctccctgatgggtcttgctccagcggactgaactctgtccacttctccaaagcagctccctccagggctttgcaaaagctgctcctcctgcctagagagcctttcccctcctctctgcctggacaactcctattcatctttcaagacttagttgaaatattgcctcctccaggaagccaccgaaatctcccatacttgatcatacttccttggagtcctgarcgctgactgtgttatgttagagtgtttgtctaggtgtctgtctcccccctggactgtgacattcctgagtgctggggccatcactgtgagtcctgcaaactgcatggggcctggcctatagcagtggtaaataaaccaatgtctgtgaaataaactttgctcaacagttctagctctggtcagtgaatggtccaccca

SEQ ID NO: 218924 - DNA, 505 bp, Homo sapiens
cctgggagctcccatgaattcagattcctgcgcttggctccaggctattgatttggaatttctgcagaggcagtggggaggctcggaaatctgcagtttgagaagttctccaggtgattcttatgaatcagaatgttggtgaccctgagaaatggggcaggatgtgggacagagctatacaaggtaacctgattgtaatccaggcatttggggactattttaagtccactaagctacactatgttcagcccacgtgtctccacctggttcacacactctcaaaagtaggctccatactggtttactgaagtccacacgtggtgcctcaggacctttgctyctgctgtgcctgccaattcctgtatctctgcaggtctctacatctacaagagagtaacaaactgcaaccaggatagggatctgggtttgcctaaacccaaagtcccagtccttctttctgatgggctgccctggatggccgctctaaccctaaccctaaccctgt

SEQ ID NO: 218925 - DNA, 581 bp, Homo sapiens
ggagaatcctcaaaacctccctgagacgtaggtgagatggcgatgttgctttccccttgaagatgtggctgtagcaggaacatgcactgtaccccagcctctgcaggactcgttaagagcctccaatgtatgcagcaggatttattttgtaactttggaagggggtggggcagggagctttctgagccagctcaggagcacaggccaaagggagagaaaggaggagaataaacaccaggcaggtgtcaaatggtgagtgcaackccccagcccaggtgacatccttacccagcagcccatggcagggcctgggcctctctcctccctatgaactgagagtctggcctaaggcctggcaccaggcaggaatctgtaatggttgaagaatgaatgaatgaataagagagggaaagcaccaggatggtttggagaacagactctggaactaggtcttggtttgaatcttcactctatcagttattagctgtgaccttgagccagttactcagtctcctcctctgaacctcagttttctcatctgtaaaatgagaatgagaataatagcctttatctcactgggc

SEQ ID NO: 218926 - DNA, 494 bp, Homo sapiens
acttccacattttcagatatctttatagcaatatcccactccttgtaccaattttccatattagtctattctttcactgctataaagaaatacttgagactgggtaatttataaagaaaagagatttaattggctcaccctcccacaggctgtacaggaagcgtggcrgcactgcttctggggaggcctcagggagcttttactcatagaggccaagtgggagcaggcaacttacataacaggaggaagaaaaagatgggtggcagaggtgccacacacttttaaacaaccagattacattagaattctatcatgaaaacagcatcaaagggatggtgctaaaccattcatgaaggatccactcccatgagtcaatcacctaccaccaggccccaccttgacagtggggattacagttgaacataagatttgggtggggacacagatccaaaccataccaccctctttatccatttagtttcatttcttccccc

SEQ ID NO: 218927 - DNA, 484 bp, Homo sapiens
gagttctgtctttcctttttccacaaattgcraggcaggcatatagtttttgttgttgttgttgttgtttttatcttaatagctatcttcttttggaatagaatggaggcaggttggccctaagcagttcccagcttgactttcccctttggcttagtgatttggcggtctgagatttattttcctttcacaggtagatgcatcagaaagtagtcagaagagttcagctagaataattaaaaagttagtgaaggccaggtgcaggctggctggacagtgtgaagcccccaaatcgaggagtctgcgccaactttcaggctctttctagaacccagggcatgctcacaggaaaggtcagaaagaggtataagaaagtgtctgttacagttcagacaaggagaagctacaaaaaattatactcaggcagcctttctctccaatgaaacaaaagccttcacctaggtagaaaacgggaataagaact

SEQ ID NO: 218928 - DNA, 418 bp, Homo sapiens
cactcactattcctttttatttagtctactagcttatttatacctcttattatatttttagtgttttccctggggtttgcaatgcacattcctaattagagtctaccttcaaataatattatgcttctttatgtgtcatrttaggagcttacattatagtcccaatttgtccctcccattatttgtgttattgttgtcatatataacatttttaaacattctataaacacaattatgctttaaacaattactttttagggcaattaaaaataaggaaaaatgtactttctatgtttagggccctttttatttcctcttgtagatccaagattttgtttaataccatattccccttgcttgaagaactccttttaacatttctcatgtctctgttgacaacgtatttcttcatttgttg

SEQ ID NO: 218929 - DNA, 585 bp, Homo sapiens
ttaacctatttctgcctggggaccatatcccaagctcattcatttactgatacacaactatacagaaatgcaactccaaatttatgccaaatccaggatgagctaacaattattggatatttaaagtgttctaaaagtatcaccttctttatttcattaatcctcacatctactttatgctgtgggtacaattatctatgaggaaactgaggattgagccatttaagagacttgactacgatcatgcagattgtaaatagctaagctacaacatgagctatacctcactccagagctctgataaacaataaaaggtaccaagaaataaatctagcwaacgatgtgcaagacctttaaagggaaaattatgaaattttactgaacgacataaaaggaaaactgaatgggggagagatataccctgctaatcggtaggaaggactaatattctaaagatgtcaattatccccatgctaatccataaacacaatacaataataattttttaaaatcccaacagaacttcaagtgaacatgataggctgattcaaaagtttccagggaaaataattttgaagggcaagg

SEQ ID NO: 218930 - DNA, 366 bp, Homo sapiens
accttttttggaacctagttttccccttgataaactacaaaaagcacttatacattcatctayctctaagcctggagaagtcaggggtcgcgtctatattttgccactgctccccagtgctcagctcatagtaggacctcagtcaaatgtatgttaagtaagcgcatggtcaagacatctctgctagcctcagctctcagccctgctggaaatgaagggcaccagcacaaaacgccaaggcatgtacttgcacataaaaatcccagaggccctggagtccagcctcccctcccgactcctcttcttggatgctcacaggtcacctgcctaagcccatcctctgcaatccatccaggaagtgagact

SEQ ID NO: 218931 - DNA, 520 bp, Homo sapiens
aacgtacctgtcgtcatcccttccaggaaccgtggcttttcttgcctggcccaggggttgagaatggtggtggttcatggccttcagtgctctttggtctcaccgactcttgttccttttcagtttatgtggatccgtgaaatggaaattctccattccatgtccctgccttcattccttctagcctttgcattgttgtaggcgctgtactaaatttgaaggaaacaaagatgaaaatgatatggtctctgccctcagggaagtctagtggagggrccaccatgaacatgcaattgctatagagtgctgaggttcatggtctgcttgggtgctgtgggagcttatgaggttcaggccatcctaccccaaaatatggcaccttggcacttgaggaaacagaatcaggccatagactctagaaagaattctcctcatcccttatcctctgaaaagggccataaaacctagctgaatttcccttaaaataggtcataagaccctcgttccatagaagtcctcc

SEQ ID NO: 218932 - DNA, 506 bp, Homo sapiens
acaaattgagggtgcaactttgtttcccgtagttttgaactggcagggtgtccctgggatttgtggctgcctacttgaacaatcccttaggacagacaccattcacatttcatggctctcactaggaatcattaacagctcagtgcagagttttgcttttcacttaacttgtaagataatgaagagrccctgccaaggttcagaaaaggataacaaagcataagccccttaatgggatgaactaacgtaaaagtctaagtatctggagctctttcccacaagtaggacctgactcagggactggcattcaggctgacaaccaccatatacaagaaactgtaatagaaacgaaagtaatttccctaaaatgagccaagttatgggctttgggaaaataaggatctgttagctttgctaagatcaggatctttgatttacagtgctttccatgaaacggtatatttttattgaagagaatcataggatctagaaagcattgactttaa

SEQ ID NO: 218933 - DNA, 506 bp, Homo sapiens
acaaattgagggtgcaactttgtttcccgtagttttgaactggcagggtgtccctgggatttgtggctgcctacttgaacaatcccttaggacagacaccattcacatttcatggctctcactaggaatcattaacagctcagtgcagagttttgcttttcacttaacttgtaagataatgaagagaccctgccaaggttcagaaaaggataacaaagcataagccccttaatgggatgaactaaygtaaaagtctaagtatctggagctctttcccacaagtaggacctgactcagggactggcattcaggctgacaaccaccatatacaagaaactgtaatagaaacgaaagtaatttccctaaaatgagccaagttatgggctttgggaaaataaggatctgttagctttgctaagatcaggatctttgatttacagtgctttccatgaaacggtatatttttattgaagagaatcataggatctagaaagcattgactttaa

SEQ ID NO: 218934 - DNA, 533 bp, Homo sapiens
gggctgaactgaattgaactcctctgctatttcacattcatttgagactctgctcaggaatcatcttttccgggaggtctctctgtcaactcctctccctcccaacactgtcatttttgccattgttctgttacctggccatgtgctgtcatcgtgtgtaatacttgcctgctggtgcttactatatgccgttgacttgcctattacaataaacagacttgccctgtctaagtgacttctagaaactttaatatggtgtttagatgatgtagagcaaatacccaacttctctgcttcacttttctyatcgacaaacttggaataataataatacctatgtatgtgaataatatcccatttgctcccagatcagtatttttttaaaggcttgtcaggagaagcagtgggagtggagaagaaacaaataaatctgtaactggttgtgatcgattagttgtaaacaccattgcccttggaccagcctcagtacagtttttgaccccttttggctgtgctctgtgtctggaggaagg

SEQ ID NO: 218935 - DNA, 473 bp, Homo sapiens
ggctgcagcacatcaaagcccatagttgcttctggagagagtttgagaagggcccagggcagccttacatgctcccttttgctctgacctttagtaacatttccgaataaaactgtgacatgttgcttatgtttcagactaaagatgaagtaaaaacaggtcaggttgcccagacctaaacaaggagcagatggacaaaaattgcgtcactccctcccatctgtctcartcctccaggagaaaccctggtgggcatcatccaaaactttggtcccccagacccctgatttctctaggctgagcaaagaagcagattctgggggcagattatggaggggcacagatatcggagacttggagacatatggtcctggatttgcattccagctctctcatagtttgtatatgaaagctgatcctatatcctggtttgcctagtacagtcccagttcagccctactgactctgtggaa

SEQ ID NO: 218936 - DNA, 623 bp, Homo sapiens
ataatcaggtggtttacctgcacatttaaatctaagaagtgctgctgtagagggaataaacatgtgttacaaaccatataagagagcaaagtacacttctgatgcatgaacctgtgcagcaagggtagggtagcgtgccatgggatggatgccaggtgtgaggcgragcagtgcgcccaggataaaatgttctcaggcccaggacatgtggccaggtctaatttttaaatagaagacaaatatctggttatttatgaaaaatctgctgatttaaagatataaattaatttaaaaattaaaaatattctagtggatcaaaaaatcatgactttgggctgttagttgatagcttttggcttctgattgtgagcacagcacctgtatctttataacctggtgttgaatgaatgaattaggtgggaaaggattggaatattcctccaaggcccgcagagctggctatttctcttcacatacttttccacctttggcctcagtttcctcacctaaaagccaagggttccagttgatgatttctaaggacttttccaaatcagccttggtaaccccaggagagggtcagaatatcttgcaccaaggggtgggatcagtggtactaatgc

SEQ ID NO: 218937 - DNA, 421 bp, Homo sapiens
ttggttgaaactttcatccgtgtgggcctcagtttattcatctgtaaaatgtagataatagcacagygctgtgtaggttgtgaggatttttaaaaagtcactcacatttatttagcatttactatataaaaagcactacacaaaagaccttacttgccatattgcatttaattctcacaacagcctcatagctaggtgttattattatgcctattttacagatgggaaaactaaggcagtaaaattaagcaaattgtctgaggtctcacagataataagtggtagagactgaatcaggtgcagggggttctgattccagagctaacacacatgaccatagacacagataaacttaaaaaaggtttcaaacctgacccctaccctcatttagcctcaataggaggtttaatgggccagacag

SEQ ID NO: 218938 - DNA, 574 bp, Homo sapiens
ataatgacctttttattgaattgatagtgaaaactaatgagatcaagataacatttataggtacattaacacagtgcctgacatgtgacctaaaaagttaacaaataataataataattattattattactctatcagttcttcattataaactgtggctcgcacgctcagtggacatcttctgtgcttttccgagactaaccactatttctttagagcagattcctagaagtgtaaagactggattaggaccagrgacatttttgacattggtgactccagatttgtgtttggaaggtgaccatgcaacagctgaacaggcggagtgtaagctctgtagccagtatcaacgtaggtaaatcccatgaatgttttcaatgccatatagagccttgtgcttccaagatgcacctacggcataagcagtcaccatgatccttgcccctgaattacggtgagcagtgcagaatgatggacaagcacccttttacctgtctgtctctttaggaagatcagtggctcacgtctggtgtctcaatggctaaacagtcaaatttttcttccaaacatattc

SEQ ID NO: 218939 - DNA, 555 bp, Homo sapiens
cacaatgtgaaaaattgaatctgaatgtcattgattggggcatgggatctcccttctccataggctcctggctcttctatattttcttctatgatggctttctgtgaagaagttgtccactaagcccccgtgaccccgggactaggcacgagcactgtggcaaggatggcatctcattgcttgtggtattccagtgcccatcctgaaggctggcacgtaggaggggttctaagtatgggctggctgaggaatctgggcggaagtggctgagctgcatgtacacacaattctgatgtactctatgagccttaggctgccatttttttcccctgcaagtctcagttttcccttctgtaaaatgaaggaatttaactggatgtcctcaaatatctcttttgrttgtagaagtctatatgtctgttatataattataatcatgaatttctactttgtgccaaaaggtaagaaacatgacccctctttcaagaagtttactaccaagtttggaaatatattattgttatttattttatataagtaaatgccaaaaatgac

SEQ ID NO: 218940 - DNA, 635 bp, Homo sapiens
tagctttaattatcaattatgtgtcagtggtacatttatcagaaaaaaaataatattcatcctttttctttagactcttctgcctaaattctatcctttatgtcattgtttgaccaatttcttccaagttgcttttttcatgatattccagctcttctcagtttaattttccctctgcctaaaagataaaatctcaaaacgtctaccttggcattaagggacatcagacactgtggtccttaattctgttctgagttgcacttccaactgaactgagttgcctatttccacccaaagtgtctgttctaactgaaaaagctgtctccttctttgcttcaatggttttgattgtgatttttttctcctaaatttgtatgcctgcaaaatacaaattctacccattctataaattttccttgaggatgccattccacaattatgtctgtttccaaaattatgctcaccttactgtaaatttgtcatttggtcttaggttaatattatttaactatttcatgtatgtatacagtttttctgtcttgaaagggaatgtaaatggtgtaactacacagtcataacatttattttaaccaagatacacactaktcatacaagtgagtgtctcccattcaatg

SEQ ID NO: 218941 - DNA, 539 bp, Homo sapiens
atctcagcgtttcatggagcctgaaacttctcaggtttaagggcttgctcttaagagtctgtccccaattttagtgttctctactgggggaagcaggtgccagctgaaagtacttacatgtgcttctgatgaaagtgcatgatcttgccctctaaacagtcttggtttggtaagtaccgagtttgtgccagatgcttcctatctgtttcttcatgaaagtctccaagttctgctgcatgacaggaaaaagacatttttcacattacctttgaggaacttagcaatggagcatccagcatacccttgtcctccatcaaacagccccttctttgtagccaatgcagtccaaagcctccaaccccaygctttatgtatatttatgtttctataggggtgtgtgtgtttggggggggcaattggctctttttcaatttggaagcatttcagccttagtatagaaagtcacagaccaaatatagatcttaggggctccaagatcacagttgaacattttgttagatttttcttctaccatattg

SEQ ID NO: 218942 - DNA, 528 bp, Homo sapiens
tctcctcttccaccccagcttcttataggagaatgatttcctgaaggacgtagaacaccaaagctaaaacatttgctaagttagagctggtctggtcaagcaaactaactccaaaagaagctactgctctggaaaggcctgtttcatgtaccagtaatggacatatatggagatacaaatatagggggatatggaaagaaagaggactatggagagaaagaggactatagagagaaagcaggcaaaaccaaccatgctcctagggtaaaaaaagaagattttgaaagttcatttggttcaatcttcattcctcttgatctttgccattgttcttttttttttttttcttttttgagagggagtcttgatctgtcacccargctggagtgcagtggcatgatcttggctcactgcaacctcagcctcctagggtcaagcaattctcctgcctcagcctcctgagtgactgggattacaggcacgcgacaccatgcctggctaatttttgtatttttagtacagatgggg

SEQ ID NO: 218943 - DNA, 565 bp, Homo sapiens
tttcacattagattcttagctaaggcttctctcaaaagatatatttcattcttgtctgttacatcgtttagaatttacatagtttcatttgttagtatttcagtaatagtccttgcagtgctttactgcagattcaaccttcacaacatactgtaaaaacacaaacccaccactgaatccttgatcttgtgattggcgcttaatgccaccagatggcgagcatgagctcttgtcagacagttaaggcaagaaacttgaagtgggtgctttcttcatgttttatataatgaaactagaatacctaaatttgaaacagccagcttttgaaaaagctggtaatggttrtattgcagcagaaaatcataggctttggactcaaatggacttgagttccaatcctgcttctaattgctactctatggcgttaaacataagtttcatagtttattagagcttccttatccttagaactgggataatgataacttttttgtgtaattgcagggattaaatgaaacaatgtatggaaaacccctagcctagggactggcacttagtattcatt

SEQ ID NO: 218944 - DNA, 391 bp, Homo sapiens
tcagagcagtccctatgaactatttgttgaatcatagaatagaatgattcataaaggaagggtcattcctggggacagtatggaaaatgagaagaggaggaattatgcattttccagggccccatattgaaaagagccatccatgctcattagcatggctctcycctccctccttatgtgtggtaatcatgtgagaaacagtcagctgagcttgtgacatgaaaaaagctggctgggaaatgttggcatgacttttcccagatgttagcactgcttcaacttttgagagaacactctgagtgtaagtttactagactgacattactaaaatcattggtgctatagaggcaggagaatacggggaataagaaagccagttgcaagccaacaa

SEQ ID NO: 218945 - DNA, 642 bp, Homo sapiens
ttaaacttatttattttgtaaattgcctggtctcaggtatgtcttcatcagcagtgtgaaaacagactaatacagtacatatgtaccatattttcatcatccattcttttgctgatggccacttaccttgcttcaaaactttcactattgtgaatactgcttcaataaacatggaactgcagatatctctttgatatactaatctgctttctattgagtatgtaactagcagtgggattattgaatcatgcagtagttttatttttagattttgagcaatctccamactgatcttcatagtgattgatataatttgcatttccactaacagtgtaggagtgttccttactctccacaaccccagcagcattattgtctgtcttttggataaaagccatttaaactggggtaagatgatacctcactgtagttttatcttgcattccactgatgatcagtgatattaagcaccttttcacatatctgtttgccatttgtatgtcttttgagaaatgtctcttcagatttattgccgacttttatattggattatattttcttattgagttgtttgagttccttatatattttgattattaatctcttatgagacagatagcttgcaaacattttcttctatac

SEQ ID NO: 218946 - DNA, 579 bp, Homo sapiens
ctttactaactttcccttattttttcttagatgtcgtaggacaattattctttccagaaaacctatcctcagaacggtttagactttatctctctgctgtgcagaacataaattaaaagaatgagagttggtgctaggagagttgctgcaccttccagagaaggagaaggcctactaagtgatcatcaagaggcagatgctctttttgttttattaccatatagaaggagctgaatttttcactttggtccacaaatgcacagcctattatctagaccatagggaggagaattggagattctgccttactgtaatgatgaggagcttgaagttggtggtaataatgttgatgatgagattattatcttgatgacaatgaagacatcaaagacaaaaagtgtccaagccactaaatgttcagtattcttattaaaccacagaggctgttggcaaaagtgcaattggtctaattaatgaccgaatcgcttcrtctgcctcttatacagatctgcttctattgtttttttaaattggcttcttccttggacttcagatttaagatcgtggctcttactttcc

SEQ ID NO: 218947 - DNA, 438 bp, Homo sapiens
ttgccgacttttatattggattatattttcttattgagttgtttgagttccttatatattytgattattaatctcttatgagacagatagcttgcaaacattttcttctatactctgggttatctcttcactttattgattgtatctttggctgtgcagaagctttttaacttgatgtgatcccatttgtccatttttgctttggtttcctgtgcatgtaggatattgttcaagatatatacgcccagaccaatgtcctggagactttccctaaggttttcttgtagtagtttcatagtttgaggtcttagatttaaatcattaatctattttgatttgatatttgtatatggtgagagataggggtctggcttcattcttttgcatatggatattcagttttcccagcatcatttattgaagagactgtctttgtgt

SEQ ID NO: 218948 - DNA, 487 bp, Homo sapiens
gggtatctatttctttctggagtaagttttggtagtttgtttctttgagtaaattagtctatttgttctgaaatgtaaaattaatgggcataaagttgttcttaatattctacttttattctttaaatatctgtaggctctattgtaatgttctgccttgtgtttctcatatagttgatttatatattttttcttttttaatcgtgatagaaatgtaygaatttactaatcttttcaaaaagtctttgagttactttattgattttctgctttcattttcattgattggtgatattatctatattgtttcattctgtctgattgctttggatttattttgctcttatttttctaattttttaatgtgaaactttaggtcatcgatttgaggcatttatttattttttttagcatgagcatttaatactataaattgatcttaaagcactgccttactttgcattccagatattttgaattgtgtttt

SEQ ID NO: 218949 - DNA, 566 bp, Homo sapiens
tgtaagatggtctcttgaaggcaatagattgttgggtgtttttttttttaattacaatttgccaatctatgtcttttaagtggcacatttagggctgtttatattaaatgttaatattattatgtgagggtttatttctgccacagttttgttagcttgttgctgtgtagyctcaattgtgtaattgctacacaagatctgtgaacttgtattacttgtgcttttatggtagcaaatgttgtctttttttcatgtttaaaatttctttgagcatttcttgtaggactggtatggtgggaatgaattcccttagctttgcttgtctgggaaagactttatttcaccatatgttatgaagattagtttggaagtctataaaattattgcttggtattttttctttaaaaaggctgaaaataggccccaatctcttctggactgttcaatttctgctaataattcaatttttattttgatggaatttttgttttagttaatttaaccctttttttctagctcttttgatcatttttctttcacattgaccttggatagtctgaggactg

SEQ ID NO: 218950 - DNA, 644 bp, Homo sapiens
gatagttcaacaattatcatgctgcctctgtaaaatgataatttggcagctggcaccagggagagacaacctcctaatgttccacggctgccaccgtaaagcgttaatttaacgtaggcagcagggagaagcaacttcctggcatgggcattaagagacaaaatgggagtgtatgaccttctgggggcactccaccagaaaaggaaagaaacaaacaaattagcaaaaaaataataayaataatcctatcaaaaagtgggcaaatgatatgaatagacaattctccaaagaaaatatacaaagtcaacaaacatatgaaaaatgttcaatataactaattatcaaggaaatacaaataaaaaccataacgagataccaccttactcctacaagaatggccataattaaaaaatcaaaaaataacagatgttggcatggatgtggtgaagagaaaggaacacttttacattgctgatgggaatgtaaactagtacaaccactatggaaaatggtatagagattccttaaagaactaaaagtaaaactactgtttgatccagcaatcccactactgggtgtctacccagagaaaatgaagccattatatggaaaagacacgtgtgcatgcatgttcacagcagcac

SEQ ID NO: 218951 - DNA, 620 bp, Homo sapiens
gtgaatttcacttccactggccaaggctgttgcactggaactgccccctctccctatgctgagaactcagcagagcagcactgatcctcagtctggtattttgccacaagcctgaagacgatcctgccccccgcccccatcaaggtagatgcctgcatctgccatcggggggcatgagtgcaggtttccaaggtccagctctacccggcttagtcaaccttctctgagacagaggatgccacccaggcccctgagcattccttggtctgactcaccacctgggacaccagagcacttctcctgcttaacaaagatcaagcataaaacctattgtgaccaccacagctggtttttacctacargcaccacctactggtctggaggttggcctatacagcccattacaatgactgctgacacaagattacagtgctgtggaaggagacaagttacttgcaaccactggtaccccagctgctcaggaggtcatgaatctgctcacccaccctgtacactgctactgtaatcagcatttgaaaaagccaccatatgatgggtaattatagccaaaaaaattatagagtctttgccactgcacacacacggaagtgaagacaaag

SEQ ID NO: 218952 - DNA, 452 bp, Homo sapiens
aaacttcataaataaaggcaaaagaacgtctttaccagacaagcaaacactgagtgaatttgtcaccattggaaccatccaagaagaaatgctcaaaggactcctaaacaaaaaaacagaaggttgatatttgccatcagaaaaacacatgaaagtagaaagctcataggtctcatgaaacaatcacacaaagaggaagataaataattcaattggcaaattgactgaattccacctaaacacaaagacagacagagatatataaaggaacaaataatccatgtaacaactggataacaattaactttatgaaagaaataaaacttcacatatcaatattaattttgaatataaatagattaaatgctccaatcaaaayatatagtttggcttaatgagtaaaaaaaaaaacaaacaaacatgatctaactatacactgcttataagaaatt

SEQ ID NO: 218953 - DNA, 576 bp, Homo sapiens
gctgttttaggctgataacaacttaaatttgattgcataaaaggactctatactttcacttgacctcccatatcattttattttttattttttattttttttcagatggaatcttgctcttgtcgcctaggctggagtgcaatggcataatctcggctcactgcaacctcygcctcccaggttcaaacgattctcctgcctcagcctcctgagtagctgggattacaggcacctgccaccatgcccagctaatttttgtattattagtagagacagggtttcaccatgttggccaggctggtctccaactcctgacctcatgatccgcccacctcggcctcccaaagtgctgggattacaggcatgagccaccgcacctggcccattttgtgtttttgaggtcacaatttacacaatttatattgtgcatccactaacaaattattgttactattataatattattttcttttcattttcataatagcaatataactgacttatacaccatcattagagtattagagtattctaaaattgactgtctacttacttcaaaaagtaagttttctttct

SEQ ID NO: 218954 - DNA, 593 bp, Homo sapiens
tgcattatactcaccctttggtgttgggaaaagagcacattacacagccctggtcatatattcaagtaaaattattgggctttaagcaaaaaagaagaataaatgaataaaagtcttctgggcatatagattttaaaaagaacacgtaacttataatgaaatgaaaattatattgtcattagatacttttacaatgctttatggccataagtaaatgggatgacatatttaaggtgctcacgaaaaggaaatgtgggcaaagattttgcctccagaagaactgacttaaagagtaaaaagcaaaaactgtcatcaacatgtaagaacttgaagaatatctttttcagatcactttctgagaaatctgaagaataagtttcaaacaacaaaaattactgggagagagagcaacawatttaccagtggtaatcatttaatacataaggacctgtgaaagtgtgactaaatgaaaaaaagtatgtatgtagatggttatatattatatcaatgtagatataacacaattacaaaataaaatgaagaggatatggggagatgacatatacaaaaatttaaacattttcaatcactgt

SEQ ID NO: 218955 - DNA, 642 bp, Homo sapiens
ttaaacttatttattttgtaaattgcctggtctcaggtatgtcttcatcagcagtgtgaaaacagactaatacagtacatatgtaccayattttcatcatccattcttttgctgatggccacttaccttgcttcaaaactttcactattgtgaatactgcttcaataaacatggaactgcagatatctctttgatatactaatctgctttctattgagtatgtaactagcagtgggattattgaatcatgcagtagttttatttttagattttgagcaatctccacactgatcttcatagtgattgatataatttgcatttccactaacagtgtaggagtgttccttactctccacaaccccagcagcattattgtctgtcttttggataaaagccatttaaactggggtaagatgatacctcactgtagttttatcttgcattccactgatgatcagtgatattaagcaccttttcacatatctgtttgccatttgtatgtcttttgagaaatgtctcttcagatttattgccgacttttatattggattatattttcttattgagttgtttgagttccttatatattttgattattaatctcttatgagacagatagcttgcaaacattttcttctatac

SEQ ID NO: 218956 - DNA, 536 bp, Homo sapiens
tttaagacagttctggcaagtcaacagatatcagtagagtaatctgggtgtgaatggatgtgcagaggctaaaaatattcatctcatagaagtagagactagaataatggttactagaggctgggaagggtacatgggatagggaaagattagttaaaggatacaamattacatctggataggaggtataagttctagtgttgtatagcactgtagggtgactataataaaaatcatttattatatgttttaagtagctagaaaagaggattttgaatgttcacaacataaaccaatgataagtgattgaggtgataaacatgttaactaacctgatttgatcactatacattgtatgtattgaaacttactatacaccccataaatatatacaattatcatttgtcaattaaaaacataagaaacgcttcttaaacataaagagttagaagctaggttttgaaagatgtggttccaatggatcagcagagaaaatattccaaaaatgaagcacagattctgttaagaaaaacatg

SEQ ID NO: 218957 - DNA, 647 bp, Homo sapiens
caaaagagcctttgtccacctaacctgttttttagttatgagatcccaaagcaagctcttacatagcattacctcacaggtttgtggtatagtaaaaacatgggaagagaaaactttcattagtattcagataattgtataatatcaaagctgaagaggtccrtggtaattatccagtcccgctatttcattttgccaataaagaatttgaagctcagagaagttaagtaattaaatctgcattatctaataaatcagtgtcagagtctgaaacagaacccagagttctgactctcagtcttcgtcctcttctgctacaccatcttgccccctgacatcattgcataattttatctctggccaatcatcttgattatcacaatctttgcccttgaaaaaaatcctgatctgttaacctggcaggtgctctcccataagcatagtcaagtggtgtcacaattgctgtttacactaatcataatgtactattcccatgagaaacttatacataaaatgtgaagtactctgtctccatattctcagttttaacctgacacaccctcctccaccaatcaaataatactcccaaagttccattggaacttctggactgtagctataaaatacatgagaaaagatgccggatt

SEQ ID NO: 218958 - DNA, 647 bp, Homo sapiens
caaaagagcctttgtccacctaacctgttttttagttatgagatcccaaagcaagctcttacatagcattacctcacaggtttgtggtatagtaaaaacatgggaagagaaaactttcattagtattcagataattgtataatatcaaagctgaagaggtccgtggtaattatccagtcccgctatttcattttgccaataaagaatttgaagctcagagaagttaagtaattaaatctgcattatctaataaatcagtgtcagagtctgaaacagaacccagagttctgactctcagtcttcgtcctcttctgctacaccatcttgccccctgacatcattgcataattttatctctggccaatcatcttgattatcacaatctttgcccttgaaaaaaatcctgatctgttaacctggcaggtgctctcccataagcatagtcaagtggtgtcacaattgctgtttacactaatcataatgtactattcccakgagaaacttatacataaaatgtgaagtactctgtctccatattctcagttttaacctgacacaccctcctccaccaatcaaataatactcccaaagttccattggaacttctggactgtagctataaaatacatgagaaaagatgccggatt

SEQ ID NO: 218959 - DNA, 411 bp, Homo sapiens
ataaggagagagtgtcgcataacgggctttggtgtaatgaagacttgccctcaaatgacagcactgttatttattaagtggatggatgagtctgtaacatgtataagttatttaaatgttcagagtcttacatcctcactcataacatagkgataatgccatctctccgttcttgtaaagtagctattattaaataaaaaaaaaaaacatagaaggagtaattctgtccttcaacaaacattttctactatcttataattgtcaagccatgtgattctcactgggtgtttggtgataaataagacagcctctttcctcatgaagctcacagtctagaaggagcaatatacatttaaatccaatatgtgaatatacattcaaagtaaatatttgtgagtttccttattgcct

SEQ ID NO: 218960 - DNA, 494 bp, Homo sapiens
gaattcatacatcaactgtgcaagttataatcatgaaagttaattgtactacgtgcccagcagcattctatagtctttccattttataattcatctacttttcacaactttttcaggtagattccagtaatgtcacttcacaaataagaaagtccagccaggaagctgtaaaatggcttgtccaaggttatgaaaccagtcaatgacagagcagagatgggcctcagagtctattctctttcccttgctctcctactcgggccccctttycctagtatcttttttcacccacctgtttcccctagcagaatgtaacatgctaaattttcacatgctgtctctcaatctttttgccattttcttcatagcatttattccaacttgaaattattcttttgttatcttgtttggttatttctatgtctctcccactagtatgtaagctccatgcctccccagttcactattgaatcccaagtcctagcatagtggtt

SEQ ID NO: 218961 - DNA, 603 bp, Homo sapiens
tgtagtgaatgctgtgatgtactgcctagataccgcttcaggactcagccacttaattccccagctgccaggagtgttgactgctaayggctcacagctgtgatcttttctgggccttgcccttgatctaaaggagttgctttgctcaaggttatatctcttccccaagggcagctacgtacaatgattggtcagtgcagggctatgaaggcccagctcctctgcctcaattctggacaactgtgaagctctggacaaactccagagcttcttgttgaatcagatggaaaatctgtggcacctgcatcacagttaaccttctccctctattcaatccttttcccctcccttgcaggtgttgattcttaatggaatatccaagaaacctcctgaatgcaagtttctctctagagtctgcttctcaggaacccaatttaagactccagtggtgtggaataatattttaaatgaaaatatgcatcttttagatgttttgcaaattgcagaagtaatacatacgtgtatctagtaaaaaataagaaacaaagatactaataatcctgttcacatggaaataaaagtcccaatacctaaatacacaaa

SEQ ID NO: 218962 - DNA, 233 bp, Homo sapiens
tgccacacctggaggaattgtggcatattagatgttgaatccagtagyctctcttgagtaatctcagacactgatatgatttggctctgtgtcctcacccaaatgtcaccttgaattgtaattccccctagtccccaagtatcaaaggcaggaccaggtggaggtactttaatcatgggggcagtttcccccatgctgttctcgtgataatgagtgagtctcacaagatctga

SEQ ID NO: 218963 - DNA, 571 bp, Homo sapiens
agttgcagtgtatgcagtaacatggcttctctttgcacaatctacttttgtggcttggataccctctgttgacacagtatagtttttaagatatctatatgtggctctgacattccacagatttgtatctggagtgtaacctaaaagttccatttaaaatattatattgcatttaatgtaaatataaaaaaccctataaaaacagcacacwcaaaaaaacatgaaatgttttattgagaaataaatatataccatgaagtctggatattaaaagtcatgcagtgttatatggaagaactttaacaggaagacattccataggagatgcctatagtatgaaaagtggtcctattcatccctatatacaaatagaaagaagcagctaaaatggtaagaaaagtatcaggataatatcaatataaaataggaatggatgaagtgagaagcaaagagcactgaataaaattgcatgaaagcacaatgaacaatgtaagacaacttttctgacttgcaatagcatatccatacagaaaaaaatatcctcttaagttctttttccagttttactgtt

SEQ ID NO: 218964 - DNA, 571 bp, Homo sapiens
agttgcagtgtatgcagtaacatggcttctctttgcacaatctacttttgtggcttggataccctctgttgacacagtatagtttttaagatatctatatgtggctctgacattccacagatttgtatctggagtgtaacctaaaagttccatttaaaatattatattgcatttaatgtaaatataaaaaaccctataaaaacagcacactcaaaaaaacatgaaatgttttattgagaaataaatatataccatgaagtctggatattaaaagtcatgcagtgttatatggaagaactttaacaggaagacattccataggagatgcctatagtatgaaaagtggtcctattcatccctatatacaaatagaaagaagcagctaaaatggtaagaaaagtatcaggataatatcaatataaaataggaatggatgaagtgagaagcaaagagcactgaataaaattgcatgaaagcacaatgaacaatgtaagacaacttttctgacttgcratagcatatccatacagaaaaaaatatcctcttaagttctttttccagttttactgtt

SEQ ID NO: 218965 - DNA, 567 bp, Homo sapiens
tagtagcatagcatatatcgctgctgcttgtattggggataaatacaattgatgctatcaaacttgctgaaaattgtgcatctagaaagttattagaaatattaccaacacaatgatttttttttgtaaaaataaagcttttttcttcttcaggtttcttgaaatgtcaattttattaatctagttacaactccagtaagaaacactacactccgtgagtccatgactcawgaacaaactgagaactaaatgaataacagaagacattaagtcccattcattttgcatattacagaatggcaacttggctttactggtctttaggtggtaataacttcttttgtaatcaacaaaatagtgattcccagtgaaatgaatgcattaaagagcctgtgtcgaagctaagtatgaaactgatgtgtttactgctactgaaatacaaatatagaaatagtaagaacttttcatttattacttcctagatgggccaggtgatgcctaagactttatctgcataatttcattgactccacataagtctatgatgtagcttgtcctgaaatgata

SEQ ID NO: 218966 - DNA, 567 bp, Homo sapiens
tagtagcatagcatatatcgctgctgcttgtattggggataaatacaattgatgctatcaaacttgctgaaaattgtgcatctagaaagttattagaaatattaccaacacaatgatttttttttgtaaaaataaagcttttttcttcttcaggtttcttgaaatgtcaattttattaatctagttacaactccagtaagaaacactacactccgtgagtccatgactcaagaacaaactgagaactaaatgaataacagaagacattaagtcccattcattttgcrtattacagaatggcaacttggctttactggtctttaggtggtaataacttcttttgtaatcaacaaaatagtgattcccagtgaaatgaatgcattaaagagcctgtgtcgaagctaagtatgaaactgatgtgtttactgctactgaaatacaaatatagaaatagtaagaacttttcatttattacttcctagatgggccaggtgatgcctaagactttatctgcataatttcattgactccacataagtctatgatgtagcttgtcctgaaatgata

SEQ ID NO: 218967 - DNA, 567 bp, Homo sapiens
tagtagcatagcatatatcgctgctgcttgtattggggataaatacaattgatgctatcaaacttgctgaaaattgtgcatctagaaagttattagaaatattaccaacacaatgatttttttttgtaaaaataaagcttttttcttcttcaggtttcttgaaatgtcaattttattaatctagttacaactccagtaagaaacactacactccgtgagtccatgactcaagaacaaactgagaactaaatgaataacagaagacattaagtcccattcattttgcatattacagaatggcaacttggctttactggtctttaggtggtaataacttcttttgtaatcaacaaaatagtgattcccagtgaaatgaatgcattraagagcctgtgtcgaagctaagtatgaaactgatgtgtttactgctactgaaatacaaatatagaaatagtaagaacttttcatttattacttcctagatgggccaggtgatgcctaagactttatctgcataatttcattgactccacataagtctatgatgtagcttgtcctgaaatgata

SEQ ID NO: 218968 - DNA, 358 bp, Homo sapiens
gatactccatttactgtgatgtgatttttatgcatcgtatgtctgtattgaattatctcatgtaacccataaatatatatgcctactatgtacccacaaaagttaaaaatacataaataaataaatacaaatattcattattaaaccaaaaactatacctcttatgtctaataaaataacttctttagccagagttacttaaaattaattttattttttaacttaaataactttctatacaataatagtaataatgaaaaataaagatttcaggtaawtatacaaagacaaacacattttttgatcaaatgtaaaaacaaagctaaaaatacctttctatcatgggaatttaagaggc

SEQ ID NO: 218969 - DNA, 599 bp, Homo sapiens
agagtgtggaatgatagacagtggatattcagaagggtgatgggatggaagaggtgaatgataagaaattacttaacgggtacaatatacattatttgggtagtggatatgctgaatactctgacttcaccactattcagtctatgcatrtaataaaattgtgcttgtattccataaatttatttaaattaaaaattatgttaccttttgtgactggcttctttcacgtagcataatgtttttaatattcatttattttgttgtatggattaatacttttagtccttttattgttgaataataatccattgtattaagcatggatatacaacattttgtttttccattcatctgttggtggatatttacgttgttccatttttaagttatttttaataatactgttattaacacttacgtgcaagattttgtgtgcctatacatttttattttattgtgctatagagctagtaatgaattgctggatcatatggaaaatatgtttgacattttgaggaactgcaaaactgttttctttaagtggctacatcattttacatttccataagcaatgtatgagggttccaacttctctacat

SEQ ID NO: 218970 - DNA, 599 bp, Homo sapiens
agagtgtggaatgatagacagtggatattcagaagggtgatgggatggaagaggtgaatgataagaaattacttaacgggtacaatatacattatttgggtagtggatatgctgaatactctgacttcaccactattcagtctatgcatataataaaattgtgcttgtattccataaatttatttaaattaaaaattatgttaccttttgtgactggcttctttcacgtagcataatgtttttaatattcatttattttgttgtatggattaatacttttagtccttttattgttgaataataatccattgtattaagcatggatatacaacattttgtttttccattcatctgttggtggatatttrcgttgttccatttttaagttatttttaataatactgttattaacacttacgtgcaagattttgtgtgcctatacatttttattttattgtgctatagagctagtaatgaattgctggatcatatggaaaatatgtttgacattttgaggaactgcaaaactgttttctttaagtggctacatcattttacatttccataagcaatgtatgagggttccaacttctctacat

SEQ ID NO: 218971 - DNA, 598 bp, Homo sapiens
caggtggaacttgggtttttgcaagcctcaccaccatgagttaaagcagtctggtgctctaaataaacttgaaagtcagtctaggtcacaaggactgcaactcctaggaaagtcctagtgctgaactaggcccagagccagtagacttagggggttgagatggggtatgtgacctactgagacactagctgaggtggctaagaaagtgctgtcgtcaccactcacctaaccccaggtggcatggctcacaaattcaaaacagaccccttcctttcacttgaggagaggagacggaatagtggagataaatttgtcttgcattttggataccaactcagccacagcaaaataagccatcagagtcacaaggtcccatttccaggccctagttctcagatgaaatttctagaaacactcagggccagaaggtaacatgctgccctgaagggaaggacccagtyctggcaggatgcatcacctgctaactgaagagcccttgggccccgaaaaaccaccagagatgcccaggtactacgttgagggctttgggtgcgactctgagatgtggtgccatcagcacatttcaagctatggtaga

SEQ ID NO: 218972 - DNA, 605 bp, Homo sapiens
gagcatgaatcaaactgctgggttcttcctggttctgtcatatactatttgatcccaggcaagttgcttatcttccttgtgcctcttttttctcagggataatagtatttacgtcattgggttgttgaggatgtaatttttctttgaatagtgcttgaggcacatatgcaattacatgtttgatattattatcatcatttcccacaagaaaaaagaaaggccattagaaagtccaagaaaaaacataaaagtgtactgracagttaaggtctaaatatgagggaaactaaaacatggcatttttttagtaatagatagagaaaaaagagtccattgttgttaaattgtacccactgagaagaaaggtaatccaagcacattactttgttcggtaatgattattacagagacattactataatgtaaatgaaatgattatttataaataataatataaatgctgttaatagtattttgagttttagaattaacctacaaacaacttaatcagagttcaaagctgaatataatagttgacttaaaaaatgtgaaagtaaataaatatatacttgacctagggaagaagtgtggaagatagttggaag

SEQ ID NO: 218973 - DNA, 563 bp, Homo sapiens
tatcatgggaataagatattactgtgctaagagagctaagagttgaaaaataaaccaattgtggaaccaaaagaataaaaagagattatttcctctggaaaacttcccctcactctctgagaatggagtgaagttccacaaaaacagactgtatcagtctccatgaagactgaaacaggtatttacaatgatgccttctctgtaaacgagtcacaactcctagtcacttttccctcagactttcattttgtaatgctgtctagtttatgtctaagcatgcaaagaaataaataccatgtgtacagaattaaagcatctattacaaaaatgatagcaataattttaagtgaacaaaaaactttaaaaaaagactttataatagaagctaaggcaaaaaagcaaaatctgayatctccacattcacttttcatatttttactttgtgacatgtcgatcacagacacactaataactttagtaatgtggcacaagaaattaaaatgtcattattgtttagattttatcatacagctagttcttaagaatgaaaggctaagaactgg

SEQ ID NO: 218974 - DNA, 460 bp, Homo sapiens
agaagcatctagacatatctgcgtactcctcaagagatgccgttcccctgccccgtgatctggggtctgggacctgcctgaggccccctggaaccaaggatggacaatggcccatctctgggaggcgcacgaggctgcagtagcctgtgcttagccattggaaaagcacagagacgcctctctctaataaatgccatggggaccctctgccccagtcccaggaggagsagccccagggtggtgtggccggtcagcagttgcggcgagggtagctcagtgccaagggctgcttagtgctggtcagtgggggtggctggtcagtgctggtggctagtcagtcctcatggctggtcagtgttggttagtgctggtcagtgctggtggctggtcatttctggtcagtgctggtaaatggtggtggctggtcagcgctggtggctgatcagtgctggtcagtgct

SEQ ID NO: 218975 - DNA, 479 bp, Homo sapiens
atatctgcgtactcctcaagagatgccgttcccctgccccgtgatctggggtctgggacctgcctgaggccccctggaaccaaggatggacaatggcccatctctgggaggcgcacgaggctgcagtagcctgtgcttagccattggaaaagcacagagacgcctctctctaataaatgccatggggaccctctgccccagtcccaggaggaggagccccagggtggtgtggccggtcagcagttgcggcgagggtagctcagtgccaagggctgcttagtgctggtcagtgggggtggctggtcagtgctggtggctagtcagtcctcatggctggtcagtgttggttagtgctggtcagtgctggtggctggtcatttctggtcagtgctggtaaatggtggtggctggtcagcrctggtggctgatcagtgctggtcagtgcttatgctggtcagtgcttgtggctggtccactag

SEQ ID NO: 218976 - DNA, 476 bp, Homo sapiens
ccggtacgtacctaaaataaacaacaatcctcctgtactccatagtggtctctccgttcctcagtttaccgcaacattaataatggccattctggctggrataaggtggtatctcattgtggttttaatttgcatttccctaatgattagtgatgtcaagcatttttcatgtgtttcttggccatttgtttatcttcttttgagaaatgtctattcgtgtcatttgcccactttttaatgagattgtttttcttttcttgctgatttgagttccttgcagattctgattattagttctttatcaaatgcatagtttgcaaacattttctcccattctgcgggtgttctgtttactctaatgattctttcttttgcagtgcagaaggtttttagtttaattaggtcccacttatttatatttggttttgttgcatttgcttttggggtcttggtcataaattctttgccaaggctga

SEQ ID NO: 218977 - DNA, 422 bp, Homo sapiens
gaattcaaaaaaagaagtgaccactctgtcatttcttactgaattagcttaacagtttaggattctttaggataagccaatacacgaaggccataatrtgtgtgtgtgtgtgtgtgtgtgtgtgtgtgtgtgtgtgtgtggtgtgtgtacttggaagcatcttttccactgaatgttttccaggtactatttgcaaattttaccaaactcccaaggtaaactcattgccgaaacctcgacttgtcattgtgaaaacttgacaacctggtgttgtcactggtacccatgtcctagaacttccatgtaagaggatctttgtgccttagtcatttaactcccaggaacatatataagaccagttagccttaggctgaattattcctgtaatgaataaatgtgtcgatgttttaaataatttctga

SEQ ID NO: 218978 - DNA, 470 bp, Homo sapiens
gaattctcctgtctagcttctatgtgaagatatttactatttcactataggcttcaaaggtctgggaaatatccctttgcagattctacaaaaatacgggctccacagtgctgaattaaaagaaaccttcarctctgtcagatgaatggagacatcacaaagaagttcctcggaatgcttctgtctagtttaaatgtgaagatatttctctttcaccacagacctcaaatggctcagaaatatgcctgtgcagattgcagaaaaagactgtctctaaactgctcaaataaaataaagcttcaacactgagagatgaatgcacacatcacagagaagtctctcagaaaccttctgtctagttattatgtgatgatatttcctttttcagcataggccttacaccgctcacaaatatccttctgcagatactagaaaaagactgtttccaaactgctccatcaaaagaaaat

SEQ ID NO: 218979 - DNA, 470 bp, Homo sapiens
gaattctcctgtctagcttctatgtgaagatatttactatttcactataggcttcaaaggtctgggaaatatccctttgcagattctacaaaaatacgggctccacagtgctgaattaaaagaaaccttcaactctgtcagatgaatggagacatcacaaagaagttcctcggaatgcttctgtctagtttaaatgtgaagatatttctctttcaccacagacctcaaatggctcagaaatatgcctgtgcagattgcagaaaaagactgtctctaaactgctcaaataaaataaagcttcaacactgagagatgaatgcacacatcacagagaagtctctcagaaascttctgtctagttattatgtgatgatatttcctttttcagcataggccttacaccgctcacaaatatccttctgcagatactagaaaaagactgtttccaaactgctccatcaaaagaaaat

SEQ ID NO: 218980 - DNA, 382 bp, Homo sapiens
caaaagaaaagactatcagaaaaagaaaaatgaagggtagtaaagttgagagaatattacaccacagcttttggtaagaaaatatttatgtccacaagcacacaccacaccctttctgggaagatattactggcctagaagccgggtgagtgcatcccaaaatatacttcacaaaaagcaccattaccctcccaaaataggccctataattaggtaaagtcttttgcagtgggttgtcctatatcataaattgacatatgttgctttaatctccctgcttcagcaaatgtagccatattaggctacaaaagctctcagcractcacatgtaaaccagattgtggtgtcactagcaaactgatgcaaataaacagctctgtgt

SEQ ID NO: 218981 - DNA, 579 bp, Homo sapiens
actccctccagcatccaaatggttagtaggtagttagaattaaggttacctgagtaatgttgtacaagctgctgaagtgtttcaaactgggcccgggtggtaatgtagtatccaccattgtcaagtttgcgaattttataatgtttgacatggtctcctttcatatcatcccaatcacggatagaaagtgaataggcacctggtaaacgtggaaagcattagcagctccaatcatttagagtatcagcttgctttttaggcctcattttcttgactctgattaataattaccaaggatgcacacacacatgtacacacacacagcatctccactcagtaacaggaagaagatgcttcttgatgttctgcaaatgtcagaatatattagcaataaaatgattctgcccttgagactgaaagcttcctggacatttttcttaaacacactgttyggtaccccttgttgcataatacagcgtagactcaattccaacactcctttcccccaagggtaaagaaggaccacgatgaatggctgagcttgcttcccttgtcttctctacccaggggcatactggg

SEQ ID NO: 218982 - DNA, 583 bp, Homo sapiens
gaatctgtgtgtgggaaccatttttagaatatttaactgtgaaagaatccagattctaaaatgaaatttcaattcattatgcttgaatataggtatcatgagttcactgtcaaattcttttgtgaattaagtttcactgaagaaaagagacattgcgtattagctcctcagtgacttttagaaacaccaaaatgtgcaacaattcttartctagcattaggtggcgtaaagactagtacgtcaattatttgtgagaaatggctttctgggtttgtaccaataacccaattagaatgccgtgtaaaacagtggtgaaaaaggaattgttagaacaatggattgcaccaaaacaatagtattttaagataatgatagttaattgcatatgtaaaaccgaaggcattattttaaaaaataatattctttaaaaacaaaatatttaaaaagttgaccattataaaaataacttaaatatatagctgacaaattcccagttaaatcagggtaatgctacattttggtggtactttttattctgaaagaacacaaagatgtttgcaaatctgccctaaaatacaaatta

SEQ ID NO: 218983 - DNA, 492 bp, Homo sapiens
tgcccattgcctggtcactctttcacatcactgttttatttgcttcatggcatttaacaatctcagaaatggtctttatttargtgttttcttgtttattatctacctccactcatgagaaagaaagctcaatgggagtagaggctttgctggatggtatacccataatgcccaaaactgtgcctggcacagagcagacactcagtggatgctaatggctatggtgagatgtttatgtatgtacacacagagtaatgcatacgtgtgcatctgcataaaagaaggacaataagagcacagcataaaagaatatctcaggatgttgagttttggatggttttaagttttttcattttgtttatattcattttttataacagtgtgttacttttgaaataaaaaataataaaccagttttttttcttttcccttttaaagaacatggtcattctaagaaaatggtgacaacagctggcttaaaactagaaccac

SEQ ID NO: 218984 - DNA, 492 bp, Homo sapiens
tgcccattgcctggtcactctttcacatcactgttttatttgcttcatggcatttaacaatctcagaaatggtctttatttaggtgttttcttgtttattatctacctccactcatgagaaagaaagctcaatgggagtagaggctttgctggatggtatacccataatgcccaaaactgtgcctggcacagagcagacactcagtggatgctaatggctatggtgagatgtttatgtatgtacacacagagtaatgcatacgtgtgcatctgcataaaagaaggacaataagagcacagcataaaagaatatctcargatgttgagttttggatggttttaagttttttcattttgtttatattcattttttataacagtgtgttacttttgaaataaaaaataataaaccagttttttttcttttcccttttaaagaacatggtcattctaagaaaatggtgacaacagctggcttaaaactagaaccac

SEQ ID NO: 218985 - DNA, 577 bp, Homo sapiens
gtccatgatattgtatattcagtagtttattgctgctgagtggcatagtagtttttattgctttatccattatagtagcttttattgcctagtagtattccatggtatgaatataccactacttagtagctttttaacagttctctcttttgctaaataaagtatgcaactgcctactcatggcaaagcaaaaaagaaaaggcatgggtgtgtaagttctggtgaagtcaccaactattctctatgctatcaggcattaaggttatgagtggcttcatctttagaatcctccaacagcaacaagggctaaaacgtcaggtaaattaggacaaacagagagagrgtagagggagggaggcagggagagaaaggaaggggggaaggaagagagagagagaatgagagacagagagagagagagaatcccttatattgtcttagtgctatatatttggatcacaggagcagataacacacagccctcaaaagagagacgctaatttactgagaatttatgtactcaatataaatggttaggtacataatttagataactaaaatattctttaaaaaatta

SEQ ID NO: 218986 - DNA, 419 bp, Homo sapiens
tgactgcaattctctcacatccagatggcctggaatttccctctgcaagtcctcaggatgctcagactctccaggaaggaagttgtttactccaggtcccaaaccagccccctgttttaagttttgctgttccaagaagccctgagaaaaagagtcacttgctcaggcatcactcgaaatgccagagtgaatctcaattcctttgggcagtgctgtaaaaagttatagccagaggaacccttggcgatcaatcacttcaggcccctaatttttgtacctcaggagacagagacctagagaggtgaagtcacttgccaaggtcacacaaccactgggaacagtcatccagcttgctttacttagggaacagaatttwcatggaggaactgggacgtcattctacatcataacaagcctgc

SEQ ID NO: 218987 - DNA, 574 bp, Homo sapiens
cacagccagaattcaaagctaagtctttctgaacccaaagtgcatgctctttccactatactatatgctgataacacctgcactaatactgagggctgtttttcaggaaaattaagagattaaattccaaaatccttagcctggcattcaaagtctttgctctctagccccaacatccttttcccagcttatctctcataattcctcattgcctgacatttcatctcagaccactgactggctctgtgctctcatgcatcctgtacttctcttttgtagcactttaaaattatagcttaaataggctckgtctagttagtgttcaatacatagttcctttgattaaatgtaaacattatgtgagcagggaacaacttgtttaccgcttgatccctggcacccaggatggtccttcatatgacaagcattcagtaaatacttattgaatagaagagtgaatgaatgagggacagagctgactcacacttgccaaggccaaacttgaacacttctttttccttgaatatgtgctgcccctttcctgccattattcaggccattcattcccctgtca

SEQ ID NO: 218988 - DNA, 551 bp, Homo sapiens
ccggtctaaatatagttggaaataaaatccatttgttttctaagtaacatctatagaaaggtgacaacatgtgacaacaaatggatatatacaacagcttgatccagcagagatgttggctgatttgccattatactgtacttgttaaaagagcctagtatctagagtcagactgcctggattccactcttggctgctctgcttgttagcttcttggtctgagaaaaattatttaacctccctaaagctcacttttcttatctgtagtatgagatcataaggattcctatctcactggtttgttttaaagatgaagggaaatactacatataaaagcacttagcccacagcctgatataaaagacatgctcagtawatgttagctattgctatttgttgtcaacctaaagctttctgtgtcaagtaaagattttgcatcccttcttcatttatgagctcttggcagtggggagagctgatggtgatttcttaggtagaggaggtaccctggtcactgagaggaacctggaaagctgtgaggtagaagacaa

SEQ ID NO: 218989 - DNA, 549 bp, Homo sapiens
tcatccaggagaacttccccaacctataatagcaagacaggtcaacattcaaattccagaaatccaaagaatataaataagataccccacaagaagataagccacaagacacctcatcatcagattctctaaggtcaaaataaaagaaaaaatattaaggcagccagagagaaagggcaggtcatttacaaagggaaacccatcagtataaccgtggaactctcagcagaaactttgcaagccagaagacattggaggccaatatctgatattcttaaaaaatgaattttttacccagaatttcatatccagcaaaactaagcttcatgagtgaaggagaaataagaaatttctcaaatattcaaatgcttagggaaatcatcaccctcaggcctgctttgcaaaagctcctgaaggaagcactaaatatggaaaggaaaatccattaccagctactrcaaaaacaaactgaaggacacaaacaagtgacactatgaaatatccacataaacaaatctgcaaaataaccagctagcatcatgaagacag

SEQ ID NO: 218990 - DNA, 409 bp, Homo sapiens
atacataaccctgcatttcaccctttcaaatcacacaatgagccacaccatgggttcctggacaagtacaaaaaacaagtgtgaacttcctccaaaatataccttctactcagcccaaaattagaagtctactatcccacatccccagatttaactgcctctctctctcctttctcctcttctttaaatcacatmctttcttcctttattcttccatatccttaggctctttcttccctccatctcctctttaatcactggttctctcattcttctcaatttccctgaagagaggaggccaatcaagacaagtttggggacttcagtgatgacacagtcattaaccaatcaatgaaaacacactcaaaagaaacactgtcaggggcgtcagggacagagttgaactgaa

SEQ ID NO: 218991 - DNA, 409 bp, Homo sapiens
atacataaccctgcatttcaccctttcaaatcacacaatgagccacaccatgggttcctggacaagtacaaaaaacaagtgtgaacttcctccaaaatataccttctactcagcccaaaattagaagtctactatcccacatccccagatttaactgcctctctctctcctttctcctcttctttaaatcacatactttcttcctttattcttccatatccttagsctctttcttccctccatctcctctttaatcactggttctctcattcttctcaatttccctgaagagaggaggccaatcaagacaagtttggggacttcagtgatgacacagtcattaaccaatcaatgaaaacacactcaaaagaaacactgtcaggggcgtcagggacagagttgaactgaa

SEQ ID NO: 218992 - DNA, 409 bp, Homo sapiens
atacataaccctgcatttcaccctttcaaatcacacaatgagccacaccatgggttcctggacaagtacaaaaaacaagtgtgaacttcctccaaaatataccttctactcagcccaaaattagaagtctactatcccacatccccagatttaactgcctctctctctcctttctcctcttctttaaatcacatactttcttcctttattcttccatatccttaggctctttcttcyctccatctcctctttaatcactggttctctcattcttctcaatttccctgaagagaggaggccaatcaagacaagtttggggacttcagtgatgacacagtcattaaccaatcaatgaaaacacactcaaaagaaacactgtcaggggcgtcagggacagagttgaactgaa

SEQ ID NO: 218993 - DNA, 409 bp, Homo sapiens
atacataaccctgcatttcaccctttcaaatcacacaatgagccacaccatgggttcctggacaagtacaaaaaacaagtgtgaacttcctccaaaatataccttctactcagcccaaaattagaagtctactatcccacatccccagatttaactgcctctctctctcctttctcctcttctttaaatcacatactttcttcctttattcttccatatccttaggctctttcttccctccatctcctctttaatcactggttctctcattcttctcaatttccctgaagagaggaggccaatcaagacaagtttggggacttcagtgatgacayagtcattaaccaatcaatgaaaacacactcaaaagaaacactgtcaggggcgtcagggacagagttgaactgaa

SEQ ID NO: 218994 - DNA, 581 bp, Homo sapiens
tttgccatttggttgaatcagttttcattaactcacggggaatatttgatctgctcatctcatagggatatagcaaaggcaatttgttgagtgttgggggaatggataaaggtgagtaacaagcactaagttcctatttgataagcgtcattactgagaacttaatgccacctaacaccaaactgggaaaagtacaaaaaaatgcactaaaataaataataggcaagttgcaacatttgaatttcacgtatcttcattttcatttttatatcttatttactcttttgctccacaatttgagtcgaacatgtgatgagagttctaacytgatatgcttacttcagtcccaaacatagtcatctttgatcttttctcagatttggcctaaaactcatagtttcattgattttttttaaactaggcattcttctatgttctaggtcttcaagaaacctccatatccaagaaaaaatagaaagcaaccatgttctactatggtgccaaaaatagttgaacatcgacatcaaaaagattctttctatctgcttattcacatattgtggtttgaattaaaagtgatg

SEQ ID NO: 218995 - DNA, 522 bp, Homo sapiens
atctggcaatattctctttaacacatgatgtaggttaagaggagtggaccaatgttctgtttctgactgactatgaggttatgtatgtaccattaaaatttctcacatacattgggtctttatcttccatctatcaaggttkaaggttatccatgtataagactggctgcaaaatccttcacaaataaaattgtaaccctatgagtgcacacaacagatccccttttcacttctattgttcatagaggcataaacataggaaaaaaatggatagataaggaaaaaaattgaaagataggggttgtatgatagtagagaagtcttgctccatgatcttcagaaaaagttgttcacatcatggatgccatcttctttcggggagaaacttccctgattagctttacctgaaggtttccaataggtatgcagttccaacagtgcggagggaccctactgagttgtgagattatgaacgcaaggttaaaagtcccaaagttttgcttcaacgtggatagccagggc

SEQ ID NO: 218996 - DNA, 570 bp, Homo sapiens
taaagccatggcatatgtatttttactacattgtgggagaaaaaataattmttataatttaaaaaaactatgtcttacctgatttcagaaataaaagaagtagaagaaccacttccttatgttccattttgggactggccagcagtgcccagaaagtgggtcccaatcccaggatgttgttgacttacatgagagtaaacgcatccacaaaccagatagtcaaattaagttaatgattctctcagagacccatgccactggctcagcagggttcaaacattaccttgaataaagagtccttacaacatgtttgagggtggaatctgcaatagatgctgggaagtggtgaaagcaatctcccccctcggctgctccacgctgccgtcatgtctccttattccttccctcacccttgtactttatctctcgcaattagtcttatttcctcccctcttctcttattccctttcttttggagaaaatgaaatcataaaagtatctcacatttgctggaaccttccatgacgagaccctctgccaagcgctgcacgtccatagcctccctcaagc

SEQ ID NO: 218997 - DNA, 570 bp, Homo sapiens
taaagccatggcatatgtatttttactacattgtgggagaaaaaataattcttataatttaaaaaaactatgtcttacctgatttcagaaataaaagaagtagaagaaccacttccttatgttccattttgggactggccagcagtgcccagaaagtgggtcccaatcccaggatgttgttgacttacatgagagtaaacgcatccacaaaccagatagtcaaattaagttaatgattctctcagagacccatgccactggctcagcagggttcaaacrttaccttgaataaagagtccttacaacatgtttgagggtggaatctgcaatagatgctgggaagtggtgaaagcaatctcccccctcggctgctccacgctgccgtcatgtctccttattccttccctcacccttgtactttatctctcgcaattagtcttatttcctcccctcttctcttattccctttcttttggagaaaatgaaatcataaaagtatctcacatttgctggaaccttccatgacgagaccctctgccaagcgctgcacgtccatagcctccctcaagc

SEQ ID NO: 218998 - DNA, 350 bp, Homo sapiens
aaattaagttaatgattctctcagagacccatgccactggctcagcagggttcaaacattaccttgaataaagagtccttacaamatgtttgagggtggaatctgcaatagatgctgggaagtggtgaaagcaatctcccccctcggctgctccacgctgccgtcatgtctccttattccttccctcacccttgtactttatctctcgcaattagtcttatttcctcccctcttctcttattccctttcttttggagaaaatgaaatcataaaagtatctcacatttgctggaaccttccatgacgagaccctctgccaagcgctgcacgtccatagcctccctcaagct

SEQ ID NO: 218999 - DNA, 540 bp, Homo sapiens
atgtggtcgccgaccagactgaatgttacatcactgactggggagaaacccaaggtgagataaattccattgcccacataacgaattggttttgacctacagtccatgtgacaaaatgatcattttggagaaagctgtgcaaattcctatccatgaatgtggtccacccactcctgattttgccggggcagctgtgtatttctgcataatgggtcttgaaggcacatgggcaaggggtggaagactgtttctttgagtctctctctttttttttttttttttcaraacctttttcattctattttaattaattttaacttttattttaggttcagggttacatgtgcaggttttttgcataagtaaatttgtgtctcgtgggttagttgtacagattattttgtcacctaggtcctaagcctagtacccaatacttagtatttcctgctcctctctctcctcccgctcttctccttcaggtaggccccagtgtctgttgctcccatttttgtgtccatgagttgtcatcatttagctccc

SEQ ID NO: 219000 - DNA, 383 bp, Homo sapiens
ttatctcattcttttttatggccacatagtatttcatggtgtatatgtaccacattttctttatccaatctgtcatcgataggcatataggtgattccargtctttgctcttatgaatagtgctgcaatgaacattcacattcatctgtctttatgatagagtaatttatattcctctgggtatatacccggtaataggattgctgggttgagtgttaggtctgtttttagctctttgaggaatcactggactgctttctacaatagatgaactaatttacagtcccaccaacagtgtgtaagtgctcccttttctccacaacctttccagcatctgttattttttgacttttttaaaaataatagccattctggctgagatg

SEQ ID NO: 219001 - DNA, 606 bp, Homo sapiens
gtttctcgttgtggttttgatttrcatttctctaactatcagtgatattgagcattttttcatatgcttgtgggctgcctgtatgtttcctttagaaaagtgtttggtcatgtctcttgcatactttttaatggagttgttttgtttcttgtaaatttgtttaagtttcttatagatgctggatattagaccttgatttttgtcagctttgtcaaagatcagatggttgtaggtttggccttatttctgggctctctattctgtcccgttggtctatgtgtctgtttgtttgtttgtttgttttgttttgttttgttttcaccagtaccatgttgttttggttactatggccctgaagtgtagtttgaagacaggtaatgtgatgcctccacctttgttctttttgtttaggattaccatgggtattctggctcctttttggttctatataaattttaaaatagttttttaacagtgctgtgaagaatgtcattggcagtttgataggaatagcaatgaatctgtaaattactttgggccatatggccattttaatgatattgattcttccgatccatgagcatggaatgtttttccattcacttg

SEQ ID NO: 219002 - DNA, 591 bp, Homo sapiens
ggagaggcagacaggccccatggccccaaatctaggatagtatttggtattggttgatgggtgagagaaagagagggaacatctgtgcaggatgtggtatcagcacctggactacatcttagggattccttcttcatttttcagtatgccctgacaataattatatctatcagacttacccccttgaccactggaacactaagactgttttgggatctctgcctgactttctcagaggtgctggtgaggacattatgagtctggaacctagaaaagcgttctgactctgctgactttctcagaggtgctggtgaggacattatgagtctggagccctagaaaagcrttctgactctgccactagccagacagacctggactaggcacgttaactctttgtatgacttgactccaacccctcatttgtaaaaccagcattttcaagtggtgttttccacatcagccttttgcataagctgtcatttgaagaaaggtttttgtttgtttgttttttgtttaacaaaaaggttaaaaaccactggtctagataattgcaaagtttgctttcctttttctgtgctttttctacta

SEQ ID NO: 219003 - DNA, 564 bp, Homo sapiens
gctaaaatggtgaaaccccatctctgctaaaaatacaaaaattagctgggcatggtgatgcgtaactgtaatctcatctacttgggaggctgaggcaagagaactgcttgaacctgtgaggcagagattgcagtgagccaagatcgccccactgcattccagcctggtaacagagcaagactccatttccaaaaaaaaaaaaaaaaaagttataatagtttatttgcttggttagctgaaatatggattaaaagatggtccaatgttagtgagctggaaatgccttggtttaatgtagaggaagtgatccaaaggcttagggagattaggatggtggagtggattagtcactttagacctactcatcccagctgggagggtccagaagatacacccttggccgamgctttgtgaaatagatttgtgagagcagcacctgtatttttgaagagcccgtaattgctcttctctgtatgtcagatctaacagtaggaaccacagtcactcaactacaaaatttaaatacaatgggaataattggatcctgaggtggcaggggccaag

SEQ ID NO: 219004 - DNA, 537 bp, Homo sapiens
atctcatttattgatttgtatacattgaaccaaccttatatcccaggaataaaacctacttgattgtggtggattagctttttgatgtactcttggattcaattgctggtattttattgagaatttttgcatctgtgttcatcaaggatattggcttgaagttttctttttttgttgttccatatcagaatgatgacgacctcatagaatgagttagtctgtcctcttttatcttttggaattgtttcaggaggcttgatatcagctcttctttatatgactggtatactttggctaggaatctctctggtccaggggtttttctggtgtaggtttttaattactgattcaacttcagaactcattactcattattgagttctaaaactcactttcatgtactcttcaaaagactgtcttcttctgttgttgagcggggtgttctctcaaggtcgtttaggtgaagktggttgctggtgttcttctgtatccttactgcttgtctttctctttttttattgactactgaggattaat

SEQ ID NO: 219005 - DNA, 520 bp, Homo sapiens
gaattctgctaagtgactaatttagccaaaaaagacaatttatggaaggaagatagagagcagrgaatttacacagagagacagtatgctctgaaagataaggcagagcaggctgttgaaagggagagagtcaacagctttccaagagttctgcattgagttgctatgacatcaaactctttcctgaagttcccacctctgtcttaagtctctgccttttttccttgtctagatttcttgctcctgccttaagtcctagccttttcccagcctagtccccactctaggcttgtgggatcttcccttagtattagttgatgtgcatgcatcgtcctggtgttggatactgttttagtccgttttcattctcctgataaagacgtacccaaaactgggtaatttataaagaaaaagaggttaagtggactcacagttccacgtgactgaggaggcctcctaatcatggtggaaggccaaatgcatgtcttacatgttggcagacaagacagaatgtgagtca

SEQ ID NO: 219006 - DNA, 520 bp, Homo sapiens
gaattctgctaagtgactaatttagccaaaaaagacaatttatggaaggaagatagagagcagagaatttacacagagagacagtatgctctgaaagataaggcagagcaggctgttgaaagggagagagtcaacagctttccaagagttctgcattgagttgctatgacatcaaactctttcctgaagttcccacctctgtcttaagtctctgccttttttccttgtctagatttcttgctcctgccttaagtcctagccttttcccagcctagtccccactctaggcttgtgggatcttcccttagtattagttgatgtgcatgcatcgtcctggtgttggatactgttttagtccgttttcattctcctgataaagacrtacccaaaactgggtaatttataaagaaaaagaggttaagtggactcacagttccacgtgactgaggaggcctcctaatcatggtggaaggccaaatgcatgtcttacatgttggcagacaagacagaatgtgagtca

SEQ ID NO: 219007 - DNA, 604 bp, Homo sapiens
gccgtgctggtgatgagaaaagaggctctactttttgtcatggtgtgatggatgctgatttcctagtgtgcagaaggtgatatttttcagagaagaggcaattatttgcataatagtctttgccaacactctgccctcctttgagatgaagagctttctaatattgtactattaattgttaccagctactgtgttgtgattcgttttctctgaaagaacatataacaaagacatggaaataattcctgaaacaattcacaggtttgagatgcaataaggaattcaaatatcaatcccaaagtgggaagcagaattttagactttgtcaactgaaaaaataagtgattcatggggggaggggggttattttagaaaaaaaatgaaagcaagagaraggaagaaagtatactattttcttcacttttacagatgacacagttggatatcagtaacaccagttttgtttttgctttgcttcagaaatcttcaatatcaacacttaaaaaaagcctaaaagtcaacttgagaggagctatttaaatagagctgacaagcattataatgggctgcggagtccagaagcaagtcagatttcatgtgaagt

SEQ ID NO: 219008 - DNA, 604 bp, Homo sapiens
gagggaggtgctattactaccactctcatcttactaatagagagttccgcagaggttcatagcttccccagagtcacaccgcttgtgtgtcagatggagcagggttggatgccagagccaggccctccagccccacgcctcgttgctgccggagcctgccggtctgcagttactgccacaggcatcaatggcaataaccagaataagcatttatcgagcacctactgtattcacagaactctgatcagtgaagcaaacaaagccaaggaaggtagaaatcgcagagtccaaaccagagtctagggcctgaagtgcactgcatgggccaggttaaagtaaatgaaacattcctattttgatccctttcattatttatcgttcatacccataaatacttttaaggggatcagtttagatgcaaagtcaacaacaaataggcaacgaatckgttcttccaacattttttttctcctgaaaagactctctgaaagccctgttttaaagagacttgctccttttgcacgatgggtaaatcgcaggacctggtagattatgctacataatgtggaaaggttgcttcgtccaagagcctggagttttcaga

SEQ ID NO: 219009 - DNA, 643 bp, Homo sapiens
gaattcacttaggaaaatatatgtttcaatgcatgaccaatatgggtatttactttaactgatttcacagaagcagtgctcctgttttgagacacacagattttatttggtgcctctttatggtatgatcaattagctgcttacttcataagttatgtggagtggggaaggtacttcctgttttctctttaaatgtcttttctctgatttraagaagtaataaaggagaaatctttttgcagtgtttaacttttatcctccactattctgaagttcaagcttcaataattaatataaatacagtaaaattaatactttaaaggtagctgatatgcttaataaccagaaaatatttcaattaaaaaaattccattccatctagtgttttgacccatatgatacatatgcatacatgtgtaaaagtgtatatatattcatacgtatatgaaaaagatactatgcactatactgagtttatacttttattgtgcatcactaagaccgtttttgactttaaaaagtagattatgtagacctgcgaaacaagcaacaaaaatgaaaacactgcacttttttgtggttctctaaacacacaagaatagtggaggtcaggatccatgctgttggccaggcattaagttgg

SEQ ID NO: 219010 - DNA, 643 bp, Homo sapiens
gaattcacttaggaaaatatatgtttcaatgcatgaccaatatgggtatttactttaactgatttcacagaagcagtgctcctgttttgagacacacagattttatttggtgcctctttatggtatgatcaattagctgcttacttcataagttatgtggagtggggaaggtacttcctgttttctctttaaatgtcttttctctgatttgaagaagtaataaaggagaaatctttttgcagtgtttaacttttatcctccactattctgaagttcaagcttcaataattaatataaatacagtaaaattaatactttaaaggtagctgatatgcttaataaccagaaaatatttcaattaaaaaaattccattccatctagtgttttgacccatatgatacatatgcatacatgtgtaaaagtgtatatatattcatacgtatatgaaaaagatactatgcactrtactgagtttatacttttattgtgcatcactaagaccgtttttgactttaaaaagtagattatgtagacctgcgaaacaagcaacaaaaatgaaaacactgcacttttttgtggttctctaaacacacaagaatagtggaggtcaggatccatgctgttggccaggcattaagttgg

SEQ ID NO: 219011 - DNA, 599 bp, Homo sapiens
tatgcttaataaccagaaaatatttcaattaaaaaaattccattccatctagtgttttgacccatatgatacatatgcatacatgtgtaaaagtgtatatatattcatacgtatatgaaaaagatactatgcactatactgagtttatacttttattgtgcatcactaagaccgtttttgactttaaaaagtagattatgtagacctgcgaaacaagcaacaaaaatgaaaacactgcacttttttgtggttctctaaacacacaagaatagtggaggtcaggatccatgctgttggccaggcattaagttggcgttatcagcaatcactgtagtgccaatgaatgtgaattccccacatgtcgtgccttgggaattgctcctttgactagattactggcttgaggttgtcgctgttgtctttcctacaagagtagaaaacaagcgcacaaaattggatttaggtaaatggaaatttaatgcagtcacagcagtgccccacacaaagaaggcaatcaacaaatgcagccttgataagggtccctccctaggccagtcgtcacctactccctctgytggatgacagccctccggtatctg

SEQ ID NO: 219012 - DNA, 395 bp, Homo sapiens
tggctaccagccaatacaaaaatatacttaaatacgcagaccaatgacactataaaaccatcacacaaacaagccagcataacaacacaatgagggcatcaaattcacacatagcaatactaaccttgaatgtaaatgggctaaatgyccaacttaagaggcacagagtggcaagctggataaaaagcaagacccactggtatgctaccttcaagagacccatctcacatgtaatgacacccataggctcagaataaagggatggaggagaacctaccaagcaaatggaaatcagacaaaaaagcaagggttgccatcctaatttcagacaaaacagactttaaaccaacaaagaccaaaaaagacaaagaagggcattacataatggtaaaggg

SEQ ID NO: 219013 - DNA, 512 bp, Homo sapiens
gaatctatctatggaagcctttttttwaaaaaagaagcaaggcatagaatgcaatcatcttctctagtgctgagctcaatttctgctagtatgccttacatacagtagacatgcatcgttgtactaaaagagtaactacagaaatgatggtaccctgctcctactattcaaaacaaaactgaatgtttctatttatttttgcttattattatttgtactgtatatgttggtggaaaggaaatagttattaaaatcattcaccaccagaggctctagctttctcaagcacgagtcaaacctgaataaaccatatccttctgcatgaaacagtcctcaggatttccaagtgtctgatgggaacgcttctcaccaggcttggggttaacctcacttgtctcacatcaaggttaggtgggggacctcacagtcctttgggaaaaatcttgttcccattcttccttctttctccaatctctaagaacctgattcttgtacatcctcaatgtgggtga

SEQ ID NO: 219014 - DNA, 589 bp, Homo sapiens
tgtcactatcatcattgtaaatgtacttatttcatcttgaaactcaatgggaaatagcagaacagtgtgttttgcaggtggaarcaaggactttagattgttttttgcaagagttgtgtagagggtacctccttatcctgaaatgtcctgtgtacaggaaaaaacaaaacctgatctgttctaggatctatgtgtttccttaaagtcttagtttgattatgtcacattcagcataagtgacttcattttattttggtctgttctgctggggcctagtgcatgagctcagaccaaaacaatggcctcccctgaaagtgccccattctggtcaggttcttacttaggtgagagtgtgaccaaaatttagggcctcagcaccactctcagttaccatcattttgagtttctgatctcagcatgtaattcagaggttatggtgcgcttatgttcacacatttctttcagctcttgttattccaattgaagagagaccatttgacttctagagatagctgcctgcaaacatttaaaattttgcaagaatacagtgtaccagggagactactatgatgactatcaggagaataac

SEQ ID NO: 219015 - DNA, 539 bp, Homo sapiens
cagcaaattttgataccttgtcacagcagtcctagcaaaccaatacagggactataaatgacaataagaaacataaaaataaatattcctcccttgggggattttgagaattgcagaatacagttggcagtctagtataaatgaaaaatcagacaggtctggattgaaatcttacctatatcatggtctgggtgggtttctttgactgagttatccagattctcagagcctcaatatctttatctaaataatggagaaatagtatttaatattttggttgttgttaatgactgaataatatctgtactatttcaattattgttttgaaaatgtaattgctgccattccactatggtttgaatgtgtcctccaaagttcatgcattggaaactttttytctcaatgcaacagtgttgagaaatgggacctttaagaagtgattaggtcatgagagctctgccctcatgaattgattaatgtagttattgtagaagcaagtttgttgttgagagagtggatttgttataaaaacaagttaa

SEQ ID NO: 219016 - DNA, 561 bp, Homo sapiens
tagacagtacaggaatggtccaggtttggggaaagggatactgctctctgagaggggaaaggctgcatctctttctagggctagaataatattactgattaaaactatgagagatgtcttactagaggcacctggcattcacctactccacaaagaaggaccaaaacagcaaatagataatcacactttaaatagagcatctaagaaagaatactggaattcggcatggaagtgacaaggaacatctgagggacagaaagtaaaggaagtgaggcacacagcctggctaggatcagctgggatctagaagaggatccccagtacagggaaagagtaagtgagagattcccagtggtccacttccccagcatgaactcctgcaatcttagccatgggtgagccacttggcactaatagaccctgagaatagtatagggctctacctggagtctgtgtgatggtrttgttctagagagggagtctgcacggggtcccacacatcccctgagactcaagcaggggcaggacagcaccattttgagagcctagccttcaccaggc

SEQ ID NO: 219017 - DNA, 571 bp, Homo sapiens
acctatgaatataacttgttatgaaaagtgcagagaatggttgtaggtgagatcttgatgcataacacaaaaaaagctatccaaatatattttattcactgtcgctataaacccaggtaataaaaatgcttcataaacaacaaaatacaaaccaacaaaaatgttgattgttttgagtgtgaatatatakttgcttattcagaagttttgatacttttatgagaaaagcctttagcaggtgattattttagtttttttaaatatttgtgtagactgtattttctcattattttcacttgtgaaaatggaatttctgaaagaagctgtatgcagactaacaatgaaatggtaatcgatttgaatgtaaaataatctcttatgatttgccatgttggtagatatgattcagattggagattttgagccacaaaagatgtctttcatgtatctccctagtctattaatctttcacattaatcagtattctttaaatcaattgaaacattttttatccctgcctaaaggtggcttcttgaaaaccataacagtaattgaactatgacagatatct

SEQ ID NO: 219018 - DNA, 383 bp, Homo sapiens
attacaacataagacttcatagatttcaaatggacatttttgggcactcatcagggagtcagaatacaactytgaaggccgttaattttaactatgaacatacagctatgctatttattaatcttttctatcatttttcttatcaaacttacattatcacagagtataggatagatttttaaaaaatttttcttttgctgtatgcaccaggcaggtggctgacttttgatctcaaaatatgtgtcatcatttgtgatgagcaactattgaggttttttttttttttttgaggtgtaattggagatttagcaccttcttccacaaaagactttctcaatatagcacttacttttatctgctttagagtgctaggctgaaatctg

SEQ ID NO: 219019 - DNA, 440 bp, Homo sapiens
agtttagaatcatccctgctatgtgtctacgaggcttggtcagtgtgttctggtctgccctgacgtgacaataagaagaatcagactcatggcggctgaagagtcatagacagttggaagggaacttggcaatgtgaaacccagctccctcattacacacccagggaaactgaggcccacacaggccacagatgggctttttagccttgcccaagaaaggaggccaatgtcagaggtagtaataaacaagatccacmccattctgcctgcaatccagctaacttggtcaataaagcctaagggctttagctctgagtcctaaagttgaagaccattgccctggcatggggaacttgggaaggctgtggaggccccttctcttaaaaccagagaatggcctcctctttctgggttgcacatggtatgcccttagagcacaa

SEQ ID NO: 219020 - DNA, 454 bp, Homo sapiens
tttagaatcatccctgctatgtgtctacgaggcttggtcagtgtgttctggtctgccctgacgtgacaataagaagaatcagactcatggcggctgaagagtcatagacagttggaagggaacttggcaatgtgaaacccagctccctcattacacacccagggaaactgaggcccacacaggccacagatgggctttttagccttgcccaagaaaggaggccaatgtcagaggtagtaataaacaagatccacaccattctgcctgcaatcsagctaacttggtcaataaagcctaagggctttagctctgagtcctaaagttgaagaccattgccctggcatggggaacttgggaaggctgtggaggccccttctcttaaaaccagagaatggcctcctctttctgggttgcacatggtatgcccttagagcacaaatatccttggattcta

SEQ ID NO: 219021 - DNA, 407 bp, Homo sapiens
ggctcccctgtgtgcacacttgcagttaggttkagcagtgggggcacctgatggagcctggaagtgagaggaaggtgaggtccgtatttcttccctctccctccctgctctggcactgagtatctggcaatagctgcatctgtctattacttcagtggccactcttccacagacgcaattctcagtgggtcccatagcattatttacctttgttcctttagctcccatcaaggaagacccagaggcattctcctcaccaaggcattaagaaatgcatgggtgaggggaacagcggcgtgcgtgtaaaggtcctgtggcacctctcttctgcaggctggaggtcatggtgggagatgctgcatggatttgtcctccctgctgtcagaacaacagggttctggaagagt

SEQ ID NO: 219022 - DNA, 407 bp, Homo sapiens
cacttgcagttaggtttagcagtgggggcacctgatggagcctggaagtgagaggaaggtgaggtccgtatttcttccctctccctccctgctctggcactgagtatctggcaatagctgcatctgtctattacttcagtggccactcttccacagacscaattctcagtgggtcccatagcattatttacctttgttcctttagctcccatcaaggaagacccagaggcattctcctcaccaaggcattaagaaatgcatgggtgaggggaacagcggcgtgcgtgtaaaggtcctgtggcacctctcttctgcaggctggaggtcatggtgggagatgctgcatggatttgtcctccctgctgtcagaacaacagggttctggaagagtagaggacaggccgtgg

SEQ ID NO: 219023 - DNA, 423 bp, Homo sapiens
caaaaaaaccaaaaaagaaaaaaattaaaaaagcaaaatgaaatcttttgtgctacacagaaacattggccactcatggggtaaaaatctcagggccaagccttgctttatagaaacgtataagcaagaaaagtgtagaagtgtttatgtcytggtttcaaggtgactgcatagctaagacaagttgacttaaaggagatcaagactggagatgacaagagtgaaaccagggaaacaacatcttcaaataagtaaacaaggctgccagtgacatccctcagtcctgattaagcctatttgatttcaccagtttttaacccatcatgtgtttgcctttcttctccccagtccctggccccacctcttctgccacaaacgtcagcatggtggtatcagccggccctttgtccagcgagaaggcag

SEQ ID NO: 219024 - DNA, 423 bp, Homo sapiens
caaaaaaaccaaaaaagaaaaaaattaaaaaagcaaaatgaaatcttttgtgctacacagaaacattggccactcatggggtaaaaatctcagggccaagccttgctttatagaaacgtataagcaagaaaagtgtagaagtgtttatgtcttggtttcaaggtgactgcatagctaagacaagttgacttaaaggagatcaagactggagatgacaagagtgaaaccagggaaacawcatcttcaaataagtaaacaaggctgccagtgacatccctcagtcctgattaagcctatttgatttcaccagtttttaacccatcatgtgtttgcctttcttctccccagtccctggccccacctcttctgccacaaacgtcagcatggtggtatcagccggccctttgtccagcgagaaggcag

SEQ ID NO: 219025 - DNA, 431 bp, Homo sapiens
agttttatttctcttgaaggaaaaatgcctttggtttctgtgaccactccattctgtctcccatcagatcatctgggaggttttgttgtctaatgtctgttggttaaatcttctatcatccctgtcctgcctggctcatcaggaatctgcaggagtctgaagaggaggaagtcccccaggagtcctgggatgaaggttattcgactcyctcaattcctcctgaaatgttggcctcgtacaagtcttacagcagcacatttcactcattagaggaacagcaagtctgcatggctgttgacataggcagtgagtactccattgtgaaggtgataaagctccagttcatggcccaggtagaccccataatctttgggccttgtgccccttgttgggctgagatttgccatcactgtgggctgaacctatatatc

SEQ ID NO: 219026 - DNA, 431 bp, Homo sapiens
agttttatttctcttgaaggaaaaatgcctttggtttctgtgaccactccattctgtctcccatcagatcatctgggaggttttgttgtctaatgtctgttggttaaatcttctatcatccctgtcctgcctggctcatcaggaatctgcaggagtctgaagaggaggaagtcccccaggagtcctgggatgaaggttattcgactccctcaattcctcctgaaatgttggcctcgtacmagtcttacagcagcacatttcactcattagaggaacagcaagtctgcatggctgttgacataggcagtgagtactccattgtgaaggtgataaagctccagttcatggcccaggtagaccccataatctttgggccttgtgccccttgttgggctgagatttgccatcactgtgggctgaacctatatatc

SEQ ID NO: 219027 - DNA, 569 bp, Homo sapiens
ctttttcttttcaaactcttccttatgttagccatgaaatctagctggggctgtgtggtttctgattccccctggcttattctttactttttcccacttttccaggctcagcagggagctgctggatgagaaagggcctgaagtcttgcaggactcactgkatagatgttattcaactccttcaggttgtcttgaactgactgactcatgccagccctacagaagtgccttttacgtattggagcaacagcgtgttggcttggctgttgacatggatggtgagtacctttctatgaaggtgataaggatccactgagtcttctggttagggtcatattcctactgcaagtggccgttactgagctgagagatgtcattgccacagggaggacctataggcacatgtacgttgaatgaaactctagttccacttggaagaccagacaagggatgggtcagtgagcaaggctctcttcctagtctcaggccatgcctgtggcgccctaatcctactctcatgacattggacctgggcagatgtgacaaattcacacaactctgattttgtc

SEQ ID NO: 219028 - DNA, 493 bp, Homo sapiens
gtcctttttcttttcaaactcttccttatgttagccatgaaatctagctggggctgtgtggtttctgattccccctggcttattctttactttttcccacttttccaggctcagcagggagctgctggatgagaaagggcctgaagtcttgcaggactcactgtatagatgttattcaactccttcaggttgtcttgaactgactgactcatgccagccctacagaagtgccttttacgtattggagcaacagcgtgttggcttggctgttgacatggatggtgagtacctttctatgaaggtgataaggatccactgagtcttctggttagggtcatattcctactgcaagtggccsttactgagctgagagatgtcattgccacagggaggacctataggcacatgtacgttgaatgaaactctagttccacttggaagaccagacaagggatgggtcagtgagcaaggctctcttcctagtctcaggcca

SEQ ID NO: 219029 - DNA, 569 bp, Homo sapiens
ctttttcttttcaaactcttccttatgttagccatgaaatctagctggggctgtgtggtttctgattccccctggcttattctttactttttcccacttttccaggctcagcagggagctgctggatgagaaagggcctgaagtcttgcaggactcactgtatagatgttattcaactccttcaggttgtcttgaactgactgactcatgccagccctacagaagtgccttttacgtattggagcaacagcgtgttggcttggctgttgacatggatggtgagtacctttctatgaaggtgataaggatccactgagtcttctggttagggtcatattcctactgcaagtggccgttactgagctgagagatgtcattgccacagggaggwcctataggcacatgtacgttgaatgaaactctagttccacttggaagaccagacaagggatgggtcagtgagcaaggctctcttcctagtctcaggccatgcctgtggcgccctaatcctactctcatgacattggacctgggcagatgtgacaaattcacacaactctgattttgtc

SEQ ID NO: 219030 - DNA, 601 bp, Homo sapiens
tgacaaattcacacaactctgattttgtctcaattttgtagatcttgtagatttcatccttcactctaatttcagcgtctaaaatcctcgctaccatgaacaatctgagtatttgatgagacagggctgaatagtgcagtttttctcctagcaaccatttggggrcatttgctttaaatcgattggaaaaatatggcataaccatttgcacaaacttgggacaaatgatattgggataacggtctaccagaatagggaattttacccacagtttctgggacaaaaaccaaggaatctctatggagatcagccttcaggcctcctgaagaatatctctcacagtgtcctattctcatgctgaggagcctgaagtccctgtgtgaggattagacagtggattgttatgtgtgtaggagaaacagcttaatatgactgtccatgtctgaacttattgcagaaattgaaaagtaccaagaagtggaagaagaccaagacccatcatgccccaggtaactttgagcaattatggatgcttaattctgtgttgacacctggagatgccaggtccagggaaaacaagagtgtgttcaatttcatgttt

SEQ ID NO: 219031 - DNA, 601 bp, Homo sapiens
tgacaaattcacacaactctgattttgtctcaattttgtagatcttgtagatttcatccttcactctaatttcagcgtctaaaatcctcgctaccatgaacaatctgagtatttgatgagacagggctgaatagtgcagtttttctcctagcaaccatttggggacatttgctttaaatcgattggaaaaatatggcataaccatttgcacaaacttgggacaaatgatattgggataacggtctaccagaatagggaattttacccacagtttctgggacaaaaaccaaggaatctctatggwgatcagccttcaggcctcctgaagaatatctctcacagtgtcctattctcatgctgaggagcctgaagtccctgtgtgaggattagacagtggattgttatgtgtgtaggagaaacagcttaatatgactgtccatgtctgaacttattgcagaaattgaaaagtaccaagaagtggaagaagaccaagacccatcatgccccaggtaactttgagcaattatggatgcttaattctgtgttgacacctggagatgccaggtccagggaaaacaagagtgtgttcaatttcatgttt

SEQ ID NO: 219032 - DNA, 326 bp, Homo sapiens
cattggacccaggcagatgtaaaaaattcacagaagtatgatttggactcaagggtttgtagatttcctccttcattctaatttcagtgtctaaaattcttgcatccatgaacgagctgggcatttgatgagacagggctgaatactgcagttttcctcctagaaatcatctggggcattttctttgaactgatgggaacaataargcataactgtttgcacaaacttgggataaatgattttgggataacgatctaccagaatggggatatttcacccttggttctgagatgcaaaccaaagaatatcatgaccagctttcaggc

SEQ ID NO: 219033 - DNA, 590 bp, Homo sapiens
tggcctctggccaatagcagccagcaaggaactgaggtcctcagtccagtaacacttaaggaacggaatcttaccgacatcacatgagtgagcatggcagtgggctctttcccagttgagccttcagaaaagaccatagtcttggctgtcaccttcactgtagccttgtaagggactacccagttaaactgtgttcagatttctgacccacaggaacggtatgtgtgtgtgtgtgtgtgtgtgtgtgtgtgtgtattattttcagttgctaagttttggactaatttgttatgcaacaatagataacaaatacactattctatctgttgcttatgacacagatgaaaaggctaagaagttccaatattgattttctacaaagaatattacactactatgatactatagtggtactataatatgtagtactatagtacaataatatatagtattattaaggtatatagtattataatacaaagtattatattatactacatrgtgctatagtattctaatactatctatttcttggttgctctttagctcagatgtactgaacctcaccaatcctgacaggtttagtgaca

SEQ ID NO: 219034 - DNA, 635 bp, Homo sapiens
gtatttctgttttgagttatctgagaaatcttcaaactgccttccacagtggctcagctaatttacattcccctcaagagtgtataagtattcccttttctttgcagcttcactrgtatctgttgttttttgactttttaataatagccattctaggtcaggcatggtggttcatacctgtgattccagcactttgggaggctgaggctggcagattgcttgagaccaggagtttgaaaacagcctgggcaaaatggttaaaccctgtctctccgaaagtaaaaaataaaaaaatagctaactgtgtttctatctgcagtcccagctacttggaggctgagacaggaggactgcttgagccctggaggttgaggctgcagtgagctgtgatggtgccactgcactccatcctgtctcaaaaaaaaaaaaaaatagccattctgactggtgtgagatggtatctcactgtggttttgatttgcatttctctgatgattagtgacactgagcatttgttcagatgttggctgcatgtatgtcttcttttgaaaagtgtctgttcacaccttttgcccactttttaatggggttatttggtttttgcttgttcaattgtttaagttccttatagattt

SEQ ID NO: 219035 - DNA, 635 bp, Homo sapiens
gtatttctgttttgagttatctgagaaatcttcaaactgccttccacagtggctcagctaatttacattcccctcaagagtgtataagtattcccttttctttgcagcttcactagtatctgttgttttttgactttttaataatagccattctaggtcaggcatggtggttcatacctgtgattccagcactttgggaggctraggctggcagattgcttgagaccaggagtttgaaaacagcctgggcaaaatggttaaaccctgtctctccgaaagtaaaaaataaaaaaatagctaactgtgtttctatctgcagtcccagctacttggaggctgagacaggaggactgcttgagccctggaggttgaggctgcagtgagctgtgatggtgccactgcactccatcctgtctcaaaaaaaaaaaaaaatagccattctgactggtgtgagatggtatctcactgtggttttgatttgcatttctctgatgattagtgacactgagcatttgttcagatgttggctgcatgtatgtcttcttttgaaaagtgtctgttcacaccttttgcccactttttaatggggttatttggtttttgcttgttcaattgtttaagttccttatagattt

SEQ ID NO: 219036 - DNA, 370 bp, Homo sapiens
acagacattgaaattcaaaagtaagaaccaaactacatatctaattcaaatggaaacaattttgtggcrctctactttctcttcactttagtgcagatatttgggaattagctatggaagcaggggattttcacacattttattttaaccactacatataaacaaaataggctgagagaatttgcagcttaaaatcagaaaactctgccttgaattttattgttcccaaaatgaaaattagtgttaaaaagaagaagtcattgtattcttctaacatatataacagaaaattaagtaaaagaacctgttccagatatccaggcaaaggaagactagtaagaagtatcggttcccttaatgggggaagctt

SEQ ID NO: 219037 - DNA, 455 bp, Homo sapiens
ctgattctcctttagagaaaaaaatgctaaaaaacaaaacaaaacaacaacaaaaaaacaaaacattatatatcgcattacaattttattcaacaaatacagagrtttccagaatagttaaaacaaagtagaaaacaactctggtgttataagagcagtaggttcatatgcccactgtgcagtaatagaccaatacactaagacagcagtttgcaacaaagaatttaatgatcacagggcagccaaggggagagatatgagtagaccctcaaatccatctcctcaagaacttctgcgttagggtttttaaggggattgtggagggtgaggggttggaaaattaaggttgttgattgggcaggggaagggggatgaaatcattaggatttggaaactgcatactgagtcagttcctcagtggggtccttcagaccagctgacatcagtagtttcac

SEQ ID NO: 219038 - DNA, 455 bp, Homo sapiens
ctgattctcctttagagaaaaaaatgctaaaaaacaaaacaaaacaacaacaaaaaaacaaaacattatatatcgcattacaattttattcaacaaatacagagatttccagaatagttaaaacaaagtagaaaacaactctggtgttataagagcagtaggttcatatgcccactgtgcagtaatagaccaatacactaagacagcagtttgcaacaaagaatttaatgatcacagggcagccaaggrgagagatatgagtagaccctcaaatccatctcctcaagaacttctgcgttagggtttttaaggggattgtggagggtgaggggttggaaaattaaggttgttgattgggcaggggaagggggatgaaatcattaggatttggaaactgcatactgagtcagttcctcagtggggtccttcagaccagctgacatcagtagtttcac

SEQ ID NO: 219039 - DNA, 458 bp, Homo sapiens
ggttctaggccacaagatcaaaaactccggtctcaaaatctaacaacccccagctggtaatctcacacatgctcagattttactttgtraaagagaatcaagccacatcatataaaattaaacatttattatttttcttaatagtctaatagagatatacatttgtgtatattggccggaaattgggctaaaattttcacaaatggaaatcaagaatgttaccatagaactatcaatgccaactttaactatctgaatcagatggcatagcctagtttcctctacaactgacagcacactctttggtattttggtatttttcagtgtccttgaaatgtttaactacccactaaagaacaggtcacatggaattaataaacaaagggcttcagtttccatcaagcaccttcaagtgacaggaacagggatttaaataaaaggatctaagtcagcacagg

SEQ ID NO: 219040 - DNA, 577 bp, Homo sapiens
cagccataattttttactctgagagtggtcattgtttccagtttcatttcttttcttttcttacaatcccggagcctcatggccccctctcaaaggcatgagcatcagccagtggacayctcttcttcagaggtctgagtccctgctacactaggtacttcctctgagttccaaggccagcagcaacctccttctcagaagccatcctcccagttatgtgtggcccttcatccaagttaccaagttctaacaacccaaccattttacctttgtttctacaaccctagggttgatcactgcttcgctttctacactaactatctctgtgttacatcagttccccttttgccttcttagacctccaatacctgtataattccttgtgttaaattccctctggtatactgttcattttctattttttttttttttttttgagacagggtcttgctctgttacccagactcaagtgctgtggtgcaatcatagctcactgaagccttaaactcctgggctcaagtgagtgtgccaccatgcccagctaatttttattttttttagacacagtgtctcactc

SEQ ID NO: 219041 - DNA, 577 bp, Homo sapiens
cagccataattttttactctgagagtggtcattgtttccagtttcatttcttttcttttcttacaatcccggagcctcatggccccctctcaaaggcatgagcatcagccagtggacatctcttcttcagaggtctgagtccctgckacactaggtacttcctctgagttccaaggccagcagcaacctccttctcagaagccatcctcccagttatgtgtggcccttcatccaagttaccaagttctaacaacccaaccattttacctttgtttctacaaccctagggttgatcactgcttcgctttctacactaactatctctgtgttacatcagttccccttttgccttcttagacctccaatacctgtataattccttgtgttaaattccctctggtatactgttcattttctattttttttttttttttttgagacagggtcttgctctgttacccagactcaagtgctgtggtgcaatcatagctcactgaagccttaaactcctgggctcaagtgagtgtgccaccatgcccagctaatttttattttttttagacacagtgtctcactc

SEQ ID NO: 219042 - DNA, 577 bp, Homo sapiens
cagccataattttttactctgagagtggtcattgtttccagtttcatttcttttcttttcttacaatcccggagcctcatggccccctctcaaaggcatgagcatcagccagtggacatctcttcttcagaggtctgagtccctgctacactaggtacttcctctgagttccaaggccascagcaacctccttctcagaagccatcctcccagttatgtgtggcccttcatccaagttaccaagttctaacaacccaaccattttacctttgtttctacaaccctagggttgatcactgcttcgctttctacactaactatctctgtgttacatcagttccccttttgccttcttagacctccaatacctgtataattccttgtgttaaattccctctggtatactgttcattttctattttttttttttttttttgagacagggtcttgctctgttacccagactcaagtgctgtggtgcaatcatagctcactgaagccttaaactcctgggctcaagtgagtgtgccaccatgcccagctaatttttattttttttagacacagtgtctcactc

SEQ ID NO: 219043 - DNA, 577 bp, Homo sapiens
cagccataattttttactctgagagtggtcattgtttccagtttcatttcttttcttttcttacaatcccggagcctcatggccccctctcaaaggcatgagcatcagccagtggacatctcttcttcagaggtctgagtccctgctacactaggtacttcctctgagttccaaggccagcagcaacctccttctcagaagccatcctcccagttatgtgtggcccttcatccaagttaccaagttctaacaacccaaccattttacctttgtttctacaaccctagggttgatcactgcttcgctttctacactwactatctctgtgttacatcagttccccttttgccttcttagacctccaatacctgtataattccttgtgttaaattccctctggtatactgttcattttctattttttttttttttttttgagacagggtcttgctctgttacccagactcaagtgctgtggtgcaatcatagctcactgaagccttaaactcctgggctcaagtgagtgtgccaccatgcccagctaatttttattttttttagacacagtgtctcactc

SEQ ID NO: 219044 - DNA, 555 bp, Homo sapiens
taggaagtgtcccagtggggactctgtgtcggggctccaaccccacatatcccttctgcactgccctagcagaggttctccatgagggctctgcccttgcagcacacctctgcctgggcatccaggcatttccayacatcccctgaaatctaggttcccaaacctcagttcttgtcctctgcacacctgcaggaccaacaccatgtgaaagctgccaaggcttggggctcgcacccactgaagtcatgactcaaggtgtaccttggccccttgtagccatggttggagtggctgggacacagtgcaccaagttcctaggctgtacacagcagggaggtctctgacatgccctgaagaccttttccccactgtcttggcgattaacatttggttcctcattacttatgcaaatttctgcagccagcttgaatttctccctagaaaacaggtttttcttttctaccacataggctgcaaattttccaaatttttatgctctgtcacctcttgaacgctttgctgcttagaaatttcgtctaccagatactctaaatc

SEQ ID NO: 219045 - DNA, 578 bp, Homo sapiens
ctcttctcacagctttactaggaagtgtcccagtggggactctgtgtcggggctccaaccccacatatcccttctgcactgccctagcagaggttctccatgagggctctgcccttgcagcacacctctgcctgggcatccaggcatttccacacatcccctgaaatctaggttcccaaacctcagwtcttgtcctctgcacacctgcaggaccaacaccatgtgaaagctgccaaggcttggggctcgcacccactgaagtcatgactcaaggtgtaccttggccccttgtagccatggttggagtggctgggacacagtgcaccaagttcctaggctgtacacagcagggaggtctctgacatgccctgaagaccttttccccactgtcttggcgattaacatttggttcctcattacttatgcaaatttctgcagccagcttgaatttctccctagaaaacaggtttttcttttctaccacataggctgcaaattttccaaatttttatgctctgtcacctcttgaacgctttgctgcttagaaatttcgtctaccagatactctaaatcatctc

SEQ ID NO: 219046 - DNA, 577 bp, Homo sapiens
ctcttctcacagctttactaggaagtgtcccagtggggactctgtgtcggggctccaaccccacatatcccttctgcactgccctagcagaggttctccatgagggctctgcccttgcagcacacctctgcctgggcatccaggcatttccacacatcccctgaaatctaggttcccaaacctcagttcttgtcctctgcacacctgcaggaccaacaccatgtgaaagctgccaaggcttggggctcgcayccactgaagtcatgactcaaggtgtaccttggccccttgtagccatggttggagtggctgggacacagtgcaccaagttcctaggctgtacacagcagggaggtctctgacatgccctgaagaccttttccccactgtcttggcgattaacatttggttcctcattacttatgcaaatttctgcagccagcttgaatttctccctagaaaacaggtttttcttttctaccacataggctgcaaattttccaaatttttatgctctgtcacctcttgaacgctttgctgcttagaaatttcgtctaccagatactctaaatcatct

SEQ ID NO: 219047 - DNA, 578 bp, Homo sapiens
ctcttctcacagctttactaggaagtgtcccagtggggactctgtgtcggggctccaaccccacatatcccttctgcactgccctagcagaggttctccatgagggctctgcccttgcagcacacctctgcctgggcatccaggcatttccacacatcccctgaaatctaggttcccaaacctcagttcttgtcctctgcacacctgcaggaccaacaccatgtgaaagctgccaaggcttggggctcgcacccrctgaagtcatgactcaaggtgtaccttggccccttgtagccatggttggagtggctgggacacagtgcaccaagttcctaggctgtacacagcagggaggtctctgacatgccctgaagaccttttccccactgtcttggcgattaacatttggttcctcattacttatgcaaatttctgcagccagcttgaatttctccctagaaaacaggtttttcttttctaccacataggctgcaaattttccaaatttttatgctctgtcacctcttgaacgctttgctgcttagaaatttcgtctaccagatactctaaatcatctc

SEQ ID NO: 219048 - DNA, 581 bp, Homo sapiens
agctttactaggaagtgtcccagtggggactctgtgtcggggctccaaccccacatatcccttctgcactgccctagcagaggttctccatgagggctctgcccttgcagcacacctctgcctgggcatccaggcatttccacacatcccctgaaatctaggttcccaaacctcagttcttgtcctctgcacacctgcaggaccaacaccatgtgaaagctgccaaggcttggggctcgcacccactgaagtcatgactcaaggtgtaccttggccccttgtagccatggttggagtggctgggacacagtgcaccaagttcctaggctgtacacagcagggaggtctctgacatgccctgaagaccttttccccactgtcttggcgattaacatttggttcctcattacttatgcaaatttctgcagccagctkgaatttctccctagaaaacaggtttttcttttctaccacataggctgcaaattttccaaatttttatgctctgtcacctcttgaacgctttgctgcttagaaatttcgtctaccagatactctaaatcatctctctcaagttcaga

SEQ ID NO: 219049 - DNA, 334 bp, Homo sapiens
gctcgcacccactgaagtcatgactcaaggtgtaccttggccccttgtagccatggttggagtggctgggacacagtgcaccaagttcctaggctgtacacagcagggaggtctctgacatgccctgaagaccttttccccactgtcttggcgattaacatttggttcctcattacttatgcaaatttctgcagccagcttgaatttctccctagaaaacaggtttttcttttctaccacataggctgcaaattttccaaatttttatgctctgtcacctcttgaacgctttgctgcttagaaatttcrtctaccagatactctaaatcatctc

SEQ ID NO: 219050 - DNA, 546 bp, Homo sapiens
ttccagccctgtgtgactgttgggtactgttctagctaatgctttcaagtggttctttcctggggtagttttttcacacacrtgcacctgtgaaattaaaaaaaaaaagaagaagaaactttttatctgaggaatgtgagcccctttaaattatcaggctcagagaggcattggaatgaaactgcagtcacatcactcccccttgagtgattatcttgtaaagccacttgctatacgggctccagactaactgatgccaagcagccataaaataacatatgctggacaccacgactcatatcctatagttcaacagtgtataaccaataactaatccatgtcatctctgtaagccaatgaaaatttctatcaaagaactttgtatccatccacttcttcttacctttgcctttaaaaacctgcttgtaacaaaagctgattgagcactccctgagttaacttggaagtgtgtcctgggcagctgtgctcactttggctcaagtaaactctttaaattatatcttgtgcttcagccccttccttcta

SEQ ID NO: 219051 - DNA, 626 bp, Homo sapiens
tattttccatgtcttaattgaggtaagacccttctgggttctctatcacatgccttgtgaattgtgctctccttttttgggaactggcactatttccagccctgtgtgactgttgggtactgttctagctaatgctttcaagtggttctttcctggggtagttttttcacacacgtgcacctgtgaaattaaaaaaaaaaagaagaagaaactttttatctgaggaatgtgagcccctttaaattatcaggctcrgagaggcattggaatgaaactgcagtcacatcactcccccttgagtgattatcttgtaaagccacttgctatacgggctccagactaactgatgccaagcagccataaaataacatatgctggacaccacgactcatatcctatagttcaacagtgtataaccaataactaatccatgtcatctctgtaagccaatgaaaatttctatcaaagaactttgtatccatccacttcttcttacctttgcctttaaaaacctgcttgtaacaaaagctgattgagcactccctgagttaacttggaagtgtgtcctgggcagctgtgctcactttggctcaagtaaactctttaaattatatcttgtgcttcag

SEQ ID NO: 219052 - DNA, 546 bp, Homo sapiens
ttccagccctgtgtgactgttgggtactgttctagctaatgctttcaagtggttctttcctggggtagttttttcacacacgtgcacctgtgaaattaaaaaaaaaaagaagaagaaactttttatctgaggaatgtgagcccctttaaattatcaggctcagagaggcattggaatgaaactgcagtcacatcactcccccttgagtgattatcttgtaaagccacttgctatacgggctccagactaactgatgccaagcagccataaaatamcatatgctggacaccacgactcatatcctatagttcaacagtgtataaccaataactaatccatgtcatctctgtaagccaatgaaaatttctatcaaagaactttgtatccatccacttcttcttacctttgcctttaaaaacctgcttgtaacaaaagctgattgagcactccctgagttaacttggaagtgtgtcctgggcagctgtgctcactttggctcaagtaaactctttaaattatatcttgtgcttcagccccttccttcta

SEQ ID NO: 219053 - DNA, 647 bp, Homo sapiens
ccttcttgcccatttctagtccacccctgacactgacttccagcaccataggttttttgcctatttttgaacttcatataaagggctacggtatggaacaggatgtactcttttgtgtctggttaatttttctcaacattatgattgtgaacagtatacatgttgtaaattgaagttcatttgttcttattactgtatatttcatattttcccattctgctgaggggctcgggttgcttctggttttgaccacttacaaatagtaatgctgtggatatttttgtttacatgtttcaaatattttctaccattactaatgttygacagtatctgatggaggtatgttacaatttcccactcttttggatatacaaatgcaaattaagcatttccctaatgactatgatattgaccatttttcacgtttattacctatttgggtatccttttttgtaagctctttttgataatttttctattgtctgtctttttcttactgacttataggagttatttatatattctggatataagtcctttttcaagtgtcttaaatatcttctcccactctgtggcttttcttttcactataatattaaagttttgtttgttttcaatgaacaagacttgttaattttactacagta

SEQ ID NO: 219054 - DNA, 647 bp, Homo sapiens
ccttcttgcccatttctagtccacccctgacactgacttccagcaccataggttttttgcctatttttgaacttcatataaagggctacggtatggaacaggatgtactcttttgtgtctggttaatttttctcaacattatgattgtgaacagtatacatgttgtaaattgaagttcatttgttcttattactgtatatttcatattttcccattctgctgaggggctcgggttgcttctggttttgaccacttacaaatagtaatgctgtggatatttttgtttacatgtttcaaatattttctaccattactaatgttcgacagtatctgatggaggtatgttacaatttcccactcttttggatatacaaatgcaaattaagcatttccctaatgactatgatattgaccatttttcacgtttattacctatttgggtatccttttttgtaagstctttttgataatttttctattgtctgtctttttcttactgacttataggagttatttatatattctggatataagtcctttttcaagtgtcttaaatatcttctcccactctgtggcttttcttttcactataatattaaagttttgtttgttttcaatgaacaagacttgttaattttactacagta

SEQ ID NO: 219055 - DNA, 647 bp, Homo sapiens
ccttcttgcccatttctagtccacccctgacactgacttccagcaccataggttttttgcctatttttgaacttcatataaagggctacggtatggaacaggatgtactcttttgtgtctggttaatttttctcaacattatgattgtgaacagtatacatgttgtaaattgaagttcatttgttcttattactgtatatttcatattttcccattctgctgaggggctcgggttgcttctggttttgaccacttacaaatagtaatgctgtggatatttttgtttacatgtttcaaatattttctaccattactaatgttcgacagtatctgatggaggtatgttacaatttcccactcttttggatatacaaatgcaaattaagcatttccctaatgactatgatattgaccatttttcacgtttattacctatttgggtatccttttttgtaagctctttttgataatttttctattgtctgtctttttcttactgacttayaggagttatttatatattctggatataagtcctttttcaagtgtcttaaatatcttctcccactctgtggcttttcttttcactataatattaaagttttgtttgttttcaatgaacaagacttgttaattttactacagta

SEQ ID NO: 219056 - DNA, 407 bp, Homo sapiens
agaattctgcctaccatgctgtatgaactgtttttgtttcaaccaacttctgagatctggaaagggaagataagaaagggctgtgtaygcagttgccagtaaagattgcttttctttccaccaaagctaaagatatttgaggaactggatataggcctgagatttagcagagctctgaggctggatgttgcaaggagaaaaaataggaagcccacagggccaagcttgggcctccttgtacctcctccactgtatacatacattttgggttcatatttttcaggctggccactactgcaggtctccagcagagtcttcacggaaggagaacctctggccttgaggtgtcatgcgtggaaggataagctggtgtacaatgtgctttactatcgaaatggcaaagcctt

SEQ ID NO: 219057 - DNA, 401 bp, Homo sapiens
tgtttttgtttcaaccaacttctgagatctggaaagggaagataagaaagggctgtgtacgcagttgccagtaaagattgcttttctttccaccaaagctaaagatatttgaggaacyggatataggcctgagatttagcagagctctgaggctggatgttgcaaggagaaaaaataggaagcccacagggccaagcttgggcctccttgtacctcctccactgtatacatacattttgggttcatatttttcaggctggccactactgcaggtctccagcagagtcttcacggaaggagaacctctggccttgaggtgtcatgcgtggaaggataagctggtgtacaatgtgctttactatcgaaatggcaaagcctttaagtttttccactggaattct

SEQ ID NO: 219058 - DNA, 400 bp, Homo sapiens
gtttttgtttcaaccaacttctgagatctggaaagggaagataagaaagggctgtgtacgcagttgccagtaaagattgcttttctttccaccaaagctaaagatatttgaggaactggatataggcctgagatttagcagagctctgaggctggatgttgcaaggagaaaaaataggaagcccacagggccaagcttgggcctccttgtacctcctccactgtatacatacattttgggttcatatttttcaggctggcyactactgcaggtctccagcagagtcttcacggaaggagaacctctggccttgaggtgtcatgcgtggaaggataagctggtgtacaatgtgctttactatcgaaatggcaaagcctttaagtttttccactggaattct

SEQ ID NO: 219059 - DNA, 393 bp, Homo sapiens
gaattctgcctaccatgctgtatgaactgtttttgtttcaaccaacttctgagatctggaaagggaagataagaaagggctgtgtacgcagttgccagtaaagattgcttttctttccaccaaagctaaagatatttgaggaactggatataggcctgagatttagcagagctctgaggctggatgttgcaaggagaaaaaataggaagcccacagggccaagcttgggcctccttgtacctcctccactgtatacatacattttgggttcatatttttcaggctggccactactgcaggtctccagcagagtcttcayggaaggagaacctctggccttgaggtgtcatgcgtggaaggataagctggtgtacaatgtgctttactatcgaa

SEQ ID NO: 219060 - DNA, 568 bp, Homo sapiens
tggtgtacaatgtgctttactatcgaaatggcaaagcctttaagtttttccactggaattctaacctcaccattctgaaaaccaacataagtcacaatggcacctaccattgctcaggcawgggaaagcatcactacacatcagcaggaatatcacaatacactgtgaaaggtattgtattggaatagtcatagaactgatagtccctccccctgagggaccatcataaatattctaaactcctcactttaatttacaagtgaagaaaccgggctccagagaggtaaactgcattactaaaggccacaccatgaccagtagctggaaccagaactgaggtctctgggtcctagtccaatactctttccagtgtaccgcaagccccatcaataatcacaggagctaatgtcaatgtcagggcataatggtgatccatttcatccatcattattttagttgtaaagaatacagactcactctaggtagataggagagttagaaaataataccatggaatctcatggaagccccatagaaagagaaacctggaaaatatgaggaacgggct

SEQ ID NO: 219061 - DNA, 568 bp, Homo sapiens
tggtgtacaatgtgctttactatcgaaatggcaaagcctttaagtttttccactggaattctaacctcaccattctgaaaaccaacataagtcacaatggcacctaccattgctcaggcaagggaaagcatcrctacacatcagcaggaatatcacaatacactgtgaaaggtattgtattggaatagtcatagaactgatagtccctccccctgagggaccatcataaatattctaaactcctcactttaatttacaagtgaagaaaccgggctccagagaggtaaactgcattactaaaggccacaccatgaccagtagctggaaccagaactgaggtctctgggtcctagtccaatactctttccagtgtaccgcaagccccatcaataatcacaggagctaatgtcaatgtcagggcataatggtgatccatttcatccatcattattttagttgtaaagaatacagactcactctaggtagataggagagttagaaaataataccatggaatctcatggaagccccatagaaagagaaacctggaaaatatgaggaacgggct

SEQ ID NO: 219062 - DNA, 568 bp, Homo sapiens
tggtgtacaatgtgctttactatcgaaatggcaaagcctttaagtttttccactggaattctaacctcaccattctgaaaaccaacataagtcacaatggcacctaccattgctcaggcaagggaaagcatcactacacatcagcaggaatatcacaatacactgtgaaaggtattgtattggaatagtcatagaactgatagtccctccccctgagggaccatcataaatattctaaactcctcactttaatttacaagtgaagaaacygggctccagagaggtaaactgcattactaaaggccacaccatgaccagtagctggaaccagaactgaggtctctgggtcctagtccaatactctttccagtgtaccgcaagccccatcaataatcacaggagctaatgtcaatgtcagggcataatggtgatccatttcatccatcattattttagttgtaaagaatacagactcactctaggtagataggagagttagaaaataataccatggaatctcatggaagccccatagaaagagaaacctggaaaatatgaggaacgggct

SEQ ID NO: 219063 - DNA, 568 bp, Homo sapiens
tggtgtacaatgtgctttactatcgaaatggcaaagcctttaagtttttccactggaattctaacctcaccattctgaaaaccaacataagtcacaatggcacctaccattgctcaggcaagggaaagcatcactacacatcagcaggaatatcacaatacactgtgaaaggtattgtattggaatagtcatagaactgatagtccctccccctgagggaccatcataaatattctaaactcctcactttaatttacaagtgaagaaaccgggctccagagaggtaaactgcattactaaaggccacaccatgaccagtagctggaaccagaactgaggtctctgggtcctagtccaatactctttccagtgtaccgcaasccccatcaataatcacaggagctaatgtcaatgtcagggcataatggtgatccatttcatccatcattattttagttgtaaagaatacagactcactctaggtagataggagagttagaaaataataccatggaatctcatggaagccccatagaaagagaaacctggaaaatatgaggaacgggct

SEQ ID NO: 219064 - DNA, 435 bp, Homo sapiens
gcaccaattacattccccaaagtgtgtgagactgcgtcttttccccagaatttaaaaccaatgctagaaattatcagacttttagagataattttaagcttatttatcatcaaaggatttcttcatagtcaatttccccttagactataaatccgcaagagatggcaaagctggaagaactgcctagaatttcagcaaacttgaattcaatagtctctctgttctttcctgttttggcacctacccttttcttccagttaagattggacacaatagaaaaataattaataaatgtaataaaaatgtaagcctggacgttttgctcacagtgttctcactgggtctaaattttgtgaatgtggttccttggatrgtctcatgggtatgcttgagactttaggcccttgggacacctggtgcacagaagggtcccaa

SEQ ID NO: 219065 - DNA, 371 bp, Homo sapiens
tgatttaaattttcataatttaattttcattttgatggccactttattttgacaaagacactagtggaggaaagtctctttatcgkatcatcaatttccctataaatctttgtctcagaaaaatttaataataatttcataataaattataataaataatgtttcacatcttacattattcacttttgatttagttggcttgtgctgtcaatatgttgcccactgtataacactacctgatgaattacattcaactatgtagtaatacatattactacatatacacacacacgtatacatgtgtatatacatatgcatatacacacacacatgtatacgtgtgtgtgtatatatgtatatataaccatata

SEQ ID NO: 219066 - DNA, 371 bp, Homo sapiens
tgatttaaattttcataatttaattttcattttgatggccactttattttgacaaagacactagtggaggaaagtctctttatcggatcatcaatttccctataaatctttgtctcagaaaaatttaataataatttcataataaattataataaataatgtttcacatcttacattattcacttttgatttagttggcttgtgctgtcaatatgytgcccactgtataacactacctgatgaattacattcaactatgtagtaatacatattactacatatacacacacacgtatacatgtgtatatacatatgcatatacacacacacatgtatacgtgtgtgtgtatatatgtatatataaccatata

SEQ ID NO: 219067 - DNA, 476 bp, Homo sapiens
gccctgccataaattgtgattatctataccttgtcagttttatctgtgtatatatcttttacagtaatccccacatccaccagagaacctaggttattggcagaatgaggtttgggaattttggtcctctggccagacactatcagwtagtactctgattccaccatttttgaaattatatacaacaaattttaagtattgtttattttggagagttcaggttaaaggaaatgaagactattattcagtattatttctgtaattttgtaattttaaccataacataggtttcttatcaaaatgtatggaagccagaaagcagtgaagcaacaatattttctccaaaacaaacaggccaaactttggcaggagtgacaaatctggcatgcaatggtggcttctatatcagaaatcaagtcttttactttgtgagaggcaggagtttttagttctttgtcttccttttggctgccaga

SEQ ID NO: 219068 - DNA, 474 bp, Homo sapiens
cacaagccctgccataaattgtgattatctataccttgtcagttttatctgtgtatatatcttttacagtaatccccacatccaccagagaacctaggttattggcagaatgaggtttgggaattttggtcctctggccagacactatcagatagtactctgattccaccatttttgaaattatatacaacaaattttaagtattgtttattttggagagttcaggttaaaggaaatgaagactattattcagtattatttctgtaattttgtaattttaaccataacataggtttcttatcaaaatgtatggaagccagaaagcagtgaagcaacaatattttctccaaaacaaacaggccaaactttggcaggagtgacaaatctggcatgcaatggtggcttctatatcagaaatcaagtcttttactttgtgagaggcmggagtttttagttctttgtcttccttttggc

SEQ ID NO: 219069 - DNA, 659 bp, Homo sapiens
tttcaggttcaatatcactgattgctgtcaccattttcaaggctaatatctaatctgctttggttctgctaagatctccctgtttttttgtcgttgtttttttcctctagaaaaaacagaaaagagaactatctccagatgaatacagaagaggtggtaaaaagaatacacataacgtggctctcacatgatcacatatcatgctgaagkctctcagaggcaactgaggttggagatcatttttagggtcttaagttcagagctgtatctgtaatatcaacaacagatattctggctcttaccaccttgcccatttctcctcttagcactgtaagagtagttcttgctgagaaggcactagcctgtagtggcgatgaacatcagctttgagtatagcttccccacgtaaggactgtatgaccttggaaaactttctttacttgttgtgataaataaacttccttacagcaaattgatcctcaagttattcccctgtaaggtggaaaaaataatggaaactaccttctaggcttgatatgaagattaaatgaggtaatgtacccaaagcacttagtacagtggctggaacatggtaaatatttgatcagtgttcttattattgttatggttaggaaggcgctagcaagagcaccattgta

SEQ ID NO: 219070 - DNA, 659 bp, Homo sapiens
tttcaggttcaatatcactgattgctgtcaccattttcaaggctaatatctaatctgctttggttctgctaagatctccctgtttttttgtcgttgtttttttcctctagaaaaaacagaaaagagaactatctccagatgaatacagaagaggtggtaaaaagaatacacataacgtggctctcacatgatcacatatcatgctgaagtctctcagaggcaactgaggttggagatcatttttagggtcttaagttcagagctgtatctgtaatatcaacaacagatattctggctcttaccaccttgcccatttctcctcttagcactgtaagagtagttcttgctgagaaggcactagcctgtagtggcgatgaacatcagctttgagtatagcttccccaygtaaggactgtatgaccttggaaaactttctttacttgttgtgataaataaacttccttacagcaaattgatcctcaagttattcccctgtaaggtggaaaaaataatggaaactaccttctaggcttgatatgaagattaaatgaggtaatgtacccaaagcacttagtacagtggctggaacatggtaaatatttgatcagtgttcttattattgttatggttaggaaggcgctagcaagagcaccattgta

SEQ ID NO: 219071 - DNA, 659 bp, Homo sapiens
tttcaggttcaatatcactgattgctgtcaccattttcaaggctaatatctaatctgctttggttctgctaagatctccctgtttttttgtcgttgtttttttcctctagaaaaaacagaaaagagaactatctccagatgaatacagaagaggtggtaaaaagaatacacataacgtggctctcacatgatcacatatcatgctgaagtctctcagaggcaactgaggttggagatcatttttagggtcttaagttcagagctgtatctgtaatatcaacaacagatattctggctcttaccaccttgcccatttctcctcttagcactgtaagagtagttcttgctgagaaggcactagcctgtagtggcgatgaacatcagctttgagtatagcttccccacgtaaggactgtatgaccttggaaaactttctttacttgttgtgataaataaacttccttacagcaaattgatcctcaagttattcccctgtaargtggaaaaaataatggaaactaccttctaggcttgatatgaagattaaatgaggtaatgtacccaaagcacttagtacagtggctggaacatggtaaatatttgatcagtgttcttattattgttatggttaggaaggcgctagcaagagcaccattgta

SEQ ID NO: 219072 - DNA, 453 bp, Homo sapiens
tcccaagaaactttacttggcaagcaagctattgattttggcgggggtgggatggtgtttatcagtcacccctactagcagagatgtgataacactgcagtcagagtagttgagttttawaattttgacttgccaaccaacagaacattatttatatggtaaaacttagacatcagaggctacaggcactcaggctaaattctgacccattcattggtgacaaatgttaagggatttttgtcccattagccctttttttactcatgatggtactctgaacagaagaatctcctctaacaatttaagaccattcattgtataagcatgtaaatcatcaatctcaatgacacattttcacaactatacactgaattggctcagaggcttcactcataactttaactttttttccccctttactacaagttttacccaaactctgtcagttgaatt

SEQ ID NO: 219073 - DNA, 442 bp, Homo sapiens
ttacttggcaagcaagctattgattttggcgggggtgggatggtgtttatcagtcacccctactagcagagatgtgataacactgcagtcagagtagttgagttttaaaattttgacttgccaaccaacagaacattatttatrtggtaaaacttagacatcagaggctacaggcactcaggctaaattctgacccattcattggtgacaaatgttaagggatttttgtcccattagccctttttttactcatgatggtactctgaacagaagaatctcctctaacaatttaagaccattcattgtataagcatgtaaatcatcaatctcaatgacacattttcacaactatacactgaattggctcagaggcttcactcataactttaactttttttccccctttactacaagttttacccaaactctgtcagttgaattc

SEQ ID NO: 219074 - DNA, 453 bp, Homo sapiens
tcccaagaaactttacttggcaagcaagctattgattttggcgggggtgggatggtgtttatcagtcacccctactagcagagatgtgataacactgcagtcagagtagttgagttttaaaattttgacttgccaaccaacagaacattatttatatggtaaaacttagacatcagaggctacaggcactcaggctaaattctgacccattcattggtgacaaatgytaagggatttttgtcccattagccctttttttactcatgatggtactctgaacagaagaatctcctctaacaatttaagaccattcattgtataagcatgtaaatcatcaatctcaatgacacattttcacaactatacactgaattggctcagaggcttcactcataactttaactttttttccccctttactacaagttttacccaaactctgtcagttgaatt

SEQ ID NO: 219075 - DNA, 442 bp, Homo sapiens
ttacttggcaagcaagctattgattttggcgggggtgggatggtgtttatcagtcacccctactagcagagatgtgataacactgcagtcagagtagttgagttttaaaattttgacttgccaaccaacagaacattatttatatggtaaaacttagacatcagaggctacaggcactcaggctaaattctgacccattcattggtgacaaatgttaagggatttttgycccattagccctttttttactcatgatggtactctgaacagaagaatctcctctaacaatttaagaccattcattgtataagcatgtaaatcatcaatctcaatgacacattttcacaactatacactgaattggctcagaggcttcactcataactttaactttttttccccctttactacaagttttacccaaactctgtcagttgaattc

SEQ ID NO: 219076 - DNA, 354 bp, Homo sapiens
tgtgtatcctaaagaaatacttagaaatgtacctccaagagacatgtacaaggaagttcccttaygcattgtttgtaaaagtaaaacagtgatgatctcaatgcccactgataggggaaaggtttaattcaccatgattcataaataaagagaaattctatataaagtggaatagatttgtgtggcatggaaggatcgccaaaaagtattttaagattaaaaaaaaagtaaaaaatatgtgcagaattatgcctttttttcatagaaaaaagtctaggggattcaccgctcagcaggccatcctggctatctgggcataaccaccacccagagtgtaatttcttctaaggcaat

SEQ ID NO: 219077 - DNA, 451 bp, Homo sapiens
gaagagtcccagtaatgctaactatgtgagcaaatacaatgatgacttgcccaaagtcagaaagtggtagagctgggacttgagtkcagggcttttgacaccaaggtcaatcttaacccactccactgcagctgcatttaacactgccattaatttaaattaacaaacactgattacattcttattctatacaaagttggtacaacattggtagtgttgggggggaatctaagagtaaatgaagtacatgctctgctctcaaaggagcttatcttctattccgagtatcagagataaaaaggaaagggaaatttagggaagagtgtgggaagttctgaatatgtcctgagagtgcaactccaccatcaaaattagaatgctaataaagtgagagtccactttcaaatcaagagcagggccatttcatccattaaggattacaggtccacga

SEQ ID NO: 219078 - DNA, 623 bp, Homo sapiens
gatgggatctgtaaggtgcactctagcatgtgctatagcaggcaaaggtgtgtgatgcacctgggtggttcagatagtgctccacatgtctcagcaagacccagggcctgtagctatcagagaacaagctgctacatcttgcagcacagggccaaccttttctaggcaagtgggtttgaagcattggtagtcaggtcccaagtagcagttgaatgttttcaacatgggaggagggcaagacctagagtggggtttcaaagcaaatcatttgtagaatattacttccaacaactgcagaaagcattcgtttcaagtgtttatgggatgttcaccaacacagaccwtatgctgcaccataaaacaagtctcaatatatacacaaggatcaaaatcatacagagtatatgctatggccacagtagtatttaattagaaattcaaaacaataagatatctagaagattcccaatttcagaaaacaagctacatactctgttggtatcggtcacttgggtcaaagacgaactcacaagaaaaaattcaaaacatcattaactgagtgatgataacccgatgcatcaaaatgttggctgcagctgacacagtgcttagagagaaactta

SEQ ID NO: 219079 - DNA, 623 bp, Homo sapiens
gatgggatctgtaaggtgcactctagcatgtgctatagcaggcaaaggtgtgtgatgcacctgggtggttcagatagtgctccacatgtctcagcaagacccagggcctgtagctatcagagaacaagctgctacatcttgcagcacagggccaaccttttctaggcaagtgggtttgaagcattggtagtcaggtcccaagtagcagttgaatgttttcaacatgggaggagggcaagacctagagtggggtttcaaagcaaatcatttgtagaatattacttccaacaactgcagaaagcattcgtttcaagtgtttatgggatgttcaccaacacagaccatwtgctgcaccataaaacaagtctcaatatatacacaaggatcaaaatcatacagagtatatgctatggccacagtagtatttaattagaaattcaaaacaataagatatctagaagattcccaatttcagaaaacaagctacatactctgttggtatcggtcacttgggtcaaagacgaactcacaagaaaaaattcaaaacatcattaactgagtgatgataacccgatgcatcaaaatgttggctgcagctgacacagtgcttagagagaaactta

SEQ ID NO: 219080 - DNA, 594 bp, Homo sapiens
catgtggtgcagaatggtgatagatggggagtctgtgtatgtgtgggagtgggagtatatgagaactgtctgcacttgccctcaactttgttgtgaagctaaaactatcatagaaaataaagtycattttaaaaactaaatgagataacatacgtaaagcacctgatacatagtaaagggctcaattaatatattagagctcatatgcagagctttctttgtgcaaggagatgtgccatatgacatcttggtctgatttcaactgattattccttaaaataaatatctggagtggactcgtatggatgggtcaagtgtgtgaaaatttaaaatattttgtcagatactcaccagaaatttgcataaacttacacttccacggataacacacctgtctccccacatcttcaccaacacttagtaacttcagtgaatctaatatttgctaaaccacttgtggttttcaaactgagtttaatgaagggctaatgttctttgtaatgcaagagaaatccccaagaaaagaaagcagcttgttaaaaatatgtcagtctacctattttcttcttaaacattggagttccaagagctctt

SEQ ID NO: 219081 - DNA, 594 bp, Homo sapiens
catgtggtgcagaatggtgatagatggggagtctgtgtatgtgtgggagtgggagtatatgagaactgtctgcacttgccctcaactttgttgtgaagctaaaactatcatagaaaataaagtccattttaaaaactaaatgagataacatacgtaaagcacctgatacatagtaaagggctcaattaatatattagagctcatatgcagagctttctttgtgcaaggagatgtgccatatgacatcttggtctgatttcaactgattattccttaaaataaatatctggagtggactcgtatggatgggtcaagtgtgtgaaaatttaaaatattttgtcagatactcaccagaaatttgcataaacttacacttccacggataacacacctgtctccccacatcttcaccaacacttagtaacttcagtgaatctaatatttgctaaaccacttgtggttttcaaactgagtttaatgaagggmtaatgttctttgtaatgcaagagaaatccccaagaaaagaaagcagcttgttaaaaatatgtcagtctacctattttcttcttaaacattggagttccaagagctctt

SEQ ID NO: 219082 - DNA, 576 bp, Homo sapiens
tcatatccgtgctatagatgagaagaaaattgcttctccttggcaaacagctttggcctgggcaatgattccagcctctcattactatgggaaactttctagtattttcatttttgtggtcactgttctcttctatttccttctttgtattagtctataagcactaactttcaraagcactaagacattctagagtcttgattgttcactcatccttccatttctttattcaataagcatgtattaagttcctatgatgtgtcagatgttgtgcaaattcttatggtaataaaacgatgtatgagacataaacactttatttagtcaaacactcaacaatgtttgaacatttgctctgtacaaggtgctaaggatcaataaaggagtagtccagtttaagacaacacaacaaaaacaaactcttcactccactggctgtaacacctttttactgagatcttcatggcacaacttcttgaacaggtgttgtttttaagagtcgctctcttcacatttttcttctattcctcaacacacaaatgaattgtgtgttggactttccagttgaactttcaa

SEQ ID NO: 219083 - DNA, 411 bp, Homo sapiens
cccctccctgactcctctgactcttagattctcccagtcccatagacacccatccatggtcaccatgatctacagcaaaactaagatcctttgcagaagggagactccgagaccccaagttctgggccctgggttgctttattcccaagaactgctgtgagctgagagtgtcgggggccccaggatgatggggtacagggaagatagaagagatgaaggtaggcccctgaaggactggccaaaaggacatakggtgagtgggggaagggggttgattaaatgcagagaaaaggtagggacatctagccagactcctctctagtcttgacttctctctccgagtgagaacacatatgtgttacagatagggagactgaggtcaagagaggataacatgacctgcctgaagca

SEQ ID NO: 219084 - DNA, 580 bp, Homo sapiens
tggttaggggcctcctcactcacctctccctgatagtcacaacccccaatacaggcacagtactttagtttgccaggctgtttcgcatcccatatcttatttgctttaagactcctatggggctgggtgtggtggttcacgcctataatctcagcattttgggaggccaaggcaggaggatcacttgatgccaggagttcaaggctgcagtgagctatgatcctgccactgcactccagcttgggcaacagagagagaccctgtcacttttctttaaaaaaaaaagaaggctcttggaccttttttgaagtgagrctagagattgtcctcctgtttgacagagaagtaaacccagtcactcagcaagccgttaacagagcaaggaataccttggatacactttatgtgtagcattttacttatttatgaactatatctgtagggagaattcccacagatggaattgcttggtcaaagggtatgtgcatttgtaattttttgtgtattgcctagttgctttctacaggaagacagattgactcccataggcagtgtgggagactacatctttccccgtagc

SEQ ID NO: 219085 - DNA, 580 bp, Homo sapiens
tggttaggggcctcctcactcacctctccctgatagtcacaacccccaatacaggcacagtactttagtttgccaggctgtttcgcatcccatatcttatttgctttaagactcctatggggctgggtgtggtggttcacgcctataatctcagcattttgggaggccaaggcaggaggatcacttgatgccaggagttcaaggctgcagtgagctatgatcctgccactgcactccagcttgggcaacagagagagaccctgtcacttttctttaaaaaaaaaagaaggctcttggaccttttttgaagtgaggctagagattgtcctcctgtttgacagaraagtaaacccagtcactcagcaagccgttaacagagcaaggaataccttggatacactttatgtgtagcattttacttatttatgaactatatctgtagggagaattcccacagatggaattgcttggtcaaagggtatgtgcatttgtaattttttgtgtattgcctagttgctttctacaggaagacagattgactcccataggcagtgtgggagactacatctttccccgtagc

SEQ ID NO: 219086 - DNA, 551 bp, Homo sapiens
aaagctttaaaataaaacctatgaaatcaagtttttggtaaaatcaaatatttataaaacttcaaaatttcaagtatcaaaagaaaatgaagttcccagataaacagcaggcgtacccctaacaaagaatctgattggcatttgatttttttttyttttaatgctgcactggatactaaggaagagtagaaacattcctatagaattctgaggtagaagtattgttaacgaacaccatggattttcatctaggtcctgctgctcactgcacagaaagccagtcagagataatgattattgccaaagaagaaggctttaatctcatgctgcagctgaggagatggaagatcagactcagatccatctccctgatggactgaaactagaggtttatatagcagggaagaaatgtaacaatatgcaagaaaacagtaactagaggggcaaggaagcaatcatgatgaatgaggagtccgctctctatctcattgtctggttgttgggatctggtgagtttcagttatttgatagtttttttgggaggcctgaaa

SEQ ID NO: 219087 - DNA, 434 bp, Homo sapiens
gggactctaactcctaaggaccacaccacatcaatggactccctttccttcctgcttctgaagagatttgcttgaagagcatcactagcaggaggtatgaagggtaagcaggaagtgaggtggggctgtttcttccctgcctcctcaatccgggtctctgcaggctggctttgtccttgacttgagaccatagttctgtcacagagccttctccacatacctctggtagccactactgccctgtggcacttcagggccatggggtggtaatgccagtcctgctactggccccagggggarctttgtggtttccctatatcctgtctacgcctttagaaataaatagtctctttattaaactcttctcagatgactcaatttaaatgtgctatttgtttcctgccaaatccctaacttcagttagctaagcatgt

SEQ ID NO: 219088 - DNA, 496 bp, Homo sapiens
tagactgaggtttttttgttttgctttgtttaacagccagttagaatgaattcagacagcaaacatgtatgagggccaatttgtggttaggaattcttaagttagatgatttttctcttccatctgcacctcagtttgaaatagatactttttaatgaagtcacttgggctttattatttctagattccactaacattgacgggactcctccttaggctttctctcttaatgctgtgaaatttgaaggaaaattcaccttatttgctaaatattttcaaagcagaaactagatccagcctacacttacctctctgcatttctgttttcacttagctgagacccttagtatcttttactaaatggtccatgcatcagagcacttttaagagtttgaaaatagtctatccaacattttcagtttttcttcagtggctgggtgygatggttaatacggagtgtcaacttgattggatcgaaggatgcaaagtattgatc

SEQ ID NO: 219089 - DNA, 617 bp, Homo sapiens
ataaattgcacaacatcactattgccacattccattgaccaaaacaggttgcaaggccagcccagactgcctttcaaagcaaggcattgtaaagaattttcagctacctctcctccactgcaatatttctgactctaaaaaaatgcctgttcttttaaaatagatttcttttcttgtcttgtrgattcttttttctttttaaatatttacatatttttaacatattcatttttattacccttcagaatgctttattgtcactggcagaagggtttccttgttgctttataatctttgtttgtgacctcatcttcatgagaatcttttgcctgcccccttgttcatggaggcagtcccatattgtggataaatctccagcccaaggagaaagtttttttattgtgcacatacatagatagaacaagctctttctgactcctggatttttggtgttaggtgttaggatgggagggagggcttcccacatctgctcagttcatcatcttaatttgaagttcccatgataatctcttttcaatgacaaatcaaatttaagtctctcttttactagcttgcctctgccagtatttgcagtttcttcccagatttaaaatcat

SEQ ID NO: 219090 - DNA, 617 bp, Homo sapiens
ataaattgcacaacatcactattgccacattccattgaccaaaacaggttgcaaggccagcccagactgcctttcaaagcaaggcattgtaaagaattttcagctacctctcctccactgcaatatttctgactctaaaaaaatgcctgttcttttaaaatagatttcttttcttgtcttgtggattcttttttctttttaaatatttacatatttttaacatattcatttttattacccttcagaatgctttattgtcactggcagaagggtttccttgttgctttataatctttgtttgtgacctcatcttcatgagaatcttttgcctgcccccttgttcatggaggcagtcccatattgtggataaatctccagcccaaggagaaagtttttttattgtgcacatacatagatagaacaagctctttctgactcctggatttttggtgttaggtgttaggatgggagggagggcttcccacatctgctcagttcatcatcttaatttgaagttcccatgataatctcttytcaatgacaaatcaaatttaagtctctcttttactagcttgcctctgccagtatttgcagtttcttcccagatttaaaatcat

SEQ ID NO: 219091 - DNA, 627 bp, Homo sapiens
tggttgttttctggtttgtcattccctgaaaaatctgtaacctcttctaataaaatgaataatggataaatgattttaaatggtttgtggtttgctatcagaggagtatcatacatattaaacacccaaaatcttaatgtgcttaacatcttttccagctttttgaacaaagtgggctactttacccccaggtataaatcaattagcagagacataaccaaggagacgttcaagaccaagttaactgagtctacagttaggatctctgagtggatgacagatgttacactgaaagtcagtaaccagcatgtctaatgctacagttgcaccttttataaaamctgcctaaatccctctatgttgctaggagagggggagaaattacatacatgcaaggaagaaaggaggtgagttggaattaataggtaccaatcaatataagacttggatgtgcgtatcttactaagaggcataaattaaggcttagtgtgcaagtacttacatcagtacccagtttcatcaacatgtggagaaagaaagcatcgagttccttctcttctatgtaacctttttctaaatgtgagaaaataaacataaataatactaacatataaaaaacacatgaca

SEQ ID NO: 219092 - DNA, 620 bp, Homo sapiens
  misc_feature (1)...(620): n = A,T,C or G
atataaatttatttagcatgtacacatgggagccttcagaatgaagacccaaagacacaggagaaattgatctattttatgcttaggtttaacaaagtatggacaggcatgtagaaatatgattgcaccaaaaaggtatgatctaatggtaataaactgagcaaggaagcccagccaggtctgtctggctagattctccttcgcctctctgagcagcattccttccttctggggatgggacatgaccttctctggaatgggggtcttatgatctacaaacaaggkatggcagataatttctttatggcctggtttcacagaaatagggcagaaggaatggtggagtaatatttttagggtttatggctggctttggagaaaaagggattttggtttctatgacccggcctggggaagagggattctaggttctgaggctagcctcagtagggcatgggactganggacaggagggcaggagaagggcagacaacaaacctacacctctgaggctggttctgagggcttcattttggggcattggtttctgagccccaacagaggaacacagaaagagctacagaaattcataaaggggatgggtggttggacaggaggag

SEQ ID NO: 219093 - DNA, 202 bp, Homo sapiens
cttcagaagttgcatctcgtcagcaggatgagtgcttttggaatagacaatcttaaatgtcatagtgaggtgacttgcagagataaggaaggacgccagcctcaggcactgactgatgaatccagatggtgayttcctccttgcaggagaatcagccacttacacagactgggagggattctactgagggaaaaaatgaatt

SEQ ID NO: 219094 - DNA, 432 bp, Homo sapiens
gaattcagcaaccaaaatggagtcatggggacgggtgggacctgccgtgatggtcccacctgcattacccccatggcagactagggtggtgtggcctgtctgggaatgtggtctttctctctgagaacccagctatgtggttagtaactcaggattgtggccctgtggttactgtgcactaatcagccctccaaacactggaggagcacaccctggtgtctgcaccgctggctgttttcaagagtgttgttctcttccaccaaacagcctacactcagccctgcactcagattttgctttatttgttgatgaagctggaaagagtccatktgacgtgtaacctggtctccgctaagcggttgttctctattcttgtcaaatgtgaaggcttcccaagcctggttatgcattgttggctgccaaagagggcca

SEQ ID NO: 219095 - DNA, 592 bp, Homo sapiens
tctatttttctaatgcgaactcggtcttcactcttattgatattttcttgagtgttatatattcaaacasgactttatcattcatgttcagtagtttgactatggtgtacttagtttgggtttctgctatatttcccttgcttgtagttcactaaatatgaatctgctgagagccacagatctcacacaccaatcagttttttgtctcatttcttttcttttctttctatttttttttttttttgcatttctttctttgtgcttcagtgtggataaattccgttcacttgtctttaagttcactgaccatttgctcagctgtgttcagtctactattaagcccttgaaataaaatctttatttctggtattgtaggtttcaatcttctgatgaattatctcatttgctcatgcatcttgtttcctttttcccgtaaaactctttaacatattcgtcataattaccttttaaaggccttgtcaagtaatccgatatctatgatacctgtgagtccactttaattgactgattcttttttggattttggatcacataacccagtttatttgcatgtctcataatttttcttgag

SEQ ID NO: 219096 - DNA, 592 bp, Homo sapiens
tctatttttctaatgcgaactcggtcttcactcttattgatattttcttgagtgttatatattcaaacaggactttatcattcatgttcagtagtttgactatggtgtacttagtttgggtttctgctatatttcccttgcttgtagttcactaaatatgaatctgctgagagccacagatctcacacaccaatcagttttttgtctcatttcttttcttttctttctatttttttttttttttgcatttctttctttgtgcttcagtgtggataaattccgttcacttgtctttaagttcactgaccatttgctcagctgtgttcagtctactattaagcccttgaaataaaatctttatttctggtattgtaggtttcaatcttctgatgaattatctcatttgctcatgcatcttgyttcctttttcccgtaaaactctttaacatattcgtcataattaccttttaaaggccttgtcaagtaatccgatatctatgatacctgtgagtccactttaattgactgattcttttttggattttggatcacataacccagtttatttgcatgtctcataatttttcttgag

SEQ ID NO: 219097 - DNA, 592 bp, Homo sapiens
tctatttttctaatgcgaactcggtcttcactcttattgatattttcttgagtgttatatattcaaacaggactttatcattcatgttcagtagtttgactatggtgtacttagtttgggtttctgctatatttcccttgcttgtagttcactaaatatgaatctgctgagagccacagatctcacacaccaatcagttttttgtctcatttcttttcttttctttctatttttttttttttttgcatttctttctttgtgcttcagtgtggataaattccgttcacttgtctttaagttcactgaccatttgctcagctgtgttcagtctactattaagcccttgaaataaaatctttatttctggtattgtaggtttcaatcttctgatgaattatctcatttgctcatgcatcttgtttcctttttcccrtaaaactctttaacatattcgtcataattaccttttaaaggccttgtcaagtaatccgatatctatgatacctgtgagtccactttaattgactgattcttttttggattttggatcacataacccagtttatttgcatgtctcataatttttcttgag

SEQ ID NO: 219098 - DNA, 522 bp, Homo sapiens
tatgtgctatgcaattttggtactctgctatgcaattatgttccccaattcacaaatggcttgcaatatcttcatctctgccagctctcagtgagcaataactgcctttcatttttctcacgtccttcaagataccaagtttaaggcttagaacacaccaggccataaaagaaatatttgcttttggctcattagtttgaaaacattacctcaaaagatactcttaggatcagatgattataataatgrcacttatattgctgacacttaataatgtacttttctttcccccaatttaaagtatcttctcattggtctcacaataagcatccatcaataatgaatttctcactgtaagttttaaaaggtcacttggacctattgccctttcaaagaactgtttttaaaaggattcgggaatggcaagcaaatttatgggaatattcaagaaatttcacatagtgagcattttttgagtggttatgaatcattgggtcacaagcaaggtatgttttgtatata

SEQ ID NO: 219099 - DNA, 522 bp, Homo sapiens
tatgtgctatgcaattttggtactctgctatgcaattatgttccccaattcacaaatggcttgcaatatcttcatctctgccagctctcagtgagcaataactgcctttcatttttctcacgtccttcaagataccaagtttaaggcttagaacacaccaggccataaaagaaatatttgcttttggctcattagtttgaaaacattacctcaaaagatactcttaggatcagatgattataataatggcacttatattgctgacacttaataatgtacttttctttcccccaatttaaagtatcttctcattggtctcacaataagcatccatcaataatgaatttctcactgtaagttttaaaaggtcacttggacctaytgccctttcaaagaactgtttttaaaaggattcgggaatggcaagcaaatttatgggaatattcaagaaatttcacatagtgagcattttttgagtggttatgaatcattgggtcacaagcaaggtatgttttgtatata

SEQ ID NO: 219100 - DNA, 553 bp, Homo sapiens
tggacctattgccctttcaaagaactgtttttaaaaggattcgggaatggcaagcaaatttatgggaatattcaagaaatttcacatagtgagcattttttgagtggttatgaatcattgggtcacaagcaaggtatgttttgtatatacaaagaggagttggattaattaactctaagatctttcccagcttgtaacattatgacaccttctcttattgaacagcaaggacaaatctcwgatgccactaatgagtaactttagattaaatatatttgtatgtatatgtaggtctataaaagccatgtttaacagcaaggtgagatttcaaatggcaactttccattttttttcctgagccagtcaacaacagcacaggcagaggaagggtccaggctgtcctcattttttcattgatgaaggactgtctgaaaaacagtgtttacaaaagcattcctatgctgattgtctgcatcccccgcagggttcaagtgaggggtctaagaatttggggagggcaaaggcagtgatgggtgaataaatcctttctcac

SEQ ID NO: 219101 - DNA, 579 bp, Homo sapiens
acaaaatgagagattactgtgtagctgtgaaaataaataaatttagctatataccaatatatatatatctcaagaatataactgtgaatgaaaaaaaatttcaggtgaatagatcaagtatgatgtwattcatataaaattcaaaagcatgcaaaacttagccatgtattagaaaaggagaaaaaccatatggtaaagtggagcattcgttatctgttgatgcatgacaaattaccccaaaacagagaagttaaaacagaaattgccactcattatctctcataatttctgtgggtcatgaatttgcaggaggaaaggaaggacactgttccatgatgtcaggggcctcagttggaagacggactgtgatgtagagtcatatggagactctttcagtcccaggtcggctgcttcctgctggtctcagccggtaggttagcagaagatttcagcctgcacgtggcctctgcacgtggcctggcttcttcacaaatgaagcctgggttcccagggcaagcatcctgagagaaagagccaagtagaagctacctccttttcatgacctagcctcagtagcca

SEQ ID NO: 219102 - DNA, 624 bp, Homo sapiens
ccaacaccttagttttagcccagaagacctatttcaggcttttgagctccagaactttaagatagtaaacttgtcttgttttaagccacgaaagttcatggtaattttttacagcaacaataggaaactagtccaaccccttaaatgacttcaaagatctctgtctaaaagcaattaactagaagctttccgggtgccaagaaatatttttctatgaaactaggcatcttaacctccaaatccagagatcactgggagtgctaagttatgcaaagcaagcaaataaaaaagaaatttgctgccttgtatataatagatgtctaatagtagtcattttagttatcatcataaatctgctaatatcccagtaagtgacttcactatggaagatatacaccagccaaaattgtggctaatctttgagcttgtccagctacagtccaccgctagtttctcaatcacattgatcccgtgtgaaaagcctaccccatgggaaattaatggttctgcatctgcattccatggtacatyttcatcctctaatcattttgctttttgtaattccatctaatacagcttggtttggcatgacagaagaccacaggtaacattgaaagaagagag

SEQ ID NO: 219103 - DNA, 279 bp, Homo sapiens
atgcagtattagtttttctgtgcctggcttatttcatgtarcataatgttctctagatttatccatgttgtcataaatgacagaatttccttctttttaaggctgaatagtatttcttttcccactcatccattgatggacactgagttcatttgcatatcttgggtattgtgaataatgttgccatgaccatggcagtacagacatcccttcaacatactgactcccattcctttgcatacatatgcagaaccaggattactggattacatggtagtt

SEQ ID NO: 219104 - DNA, 458 bp, Homo sapiens
agaatatacctaccctagaagagacattaaacaaccaggtaattggagtagacaaagtgtcagccagtcaatatcagccatactctgtcatcagagacttcagtgtttggacaataagcacatgaacagagtaagcatggtgtaagggatgcaggttttgcatgggccccaccaatttactgaagttgttataacttctgtcactgccaaatgtcccagaagtagcaacagagaccaacactaagcccccaatacagcactatctcttcargagatcaaccagccaacctggtggcaagttaaattcattggacttctttcatcctcaaaggatggaagcattaattcatttcgaattaatgctttttgaatttatacatattccaggtatggtctgtgttttatgtcaaagaacctcaaacagcaccataagcggtgggattgcagagagtttagtc

SEQ ID NO: 219105 - DNA, 660 bp, Homo sapiens
ccttactgtgctccctttcttttgcccagcatttggtatcaggtcgcagagagccttgtcatattcccaaacctggcctgcaggactcttgtcttttctcttcctgaaagccacacctaagtcagcttccattattgtcaccaaaactgttaagaattgtgaaggacctgacatgttctctaactgcaagataatgagctagtctgccacagctttatggatttaaaaaatggcatgaaactcctaagtcaaaacaaatgactttattacggcctggtaagcagcatgaacatcagcttatttttgygggttctctttgctccacaaccctgtgaaggtgacccagatgggcccagatatagcccacgtatgtagtggtttacactccaggagaggaactctctacatagggaatatgaatattttataatgagcagtaagtgtctctgtcctttgatccagagggagacatgatattttttatacaagacagcaagcattcctgctctttgttctagggagagacactatctctgtcactcaaggttattcattacacaaacatcctttaaaagacaatccagaagaaaagacagtcagtgcatcttttctcaagatgtgtcaaaatgtgagagaagtgtttctgaacacattctgtgg

SEQ ID NO: 219106 - DNA, 577 bp, Homo sapiens
ccagtttcattcttcagcatatgactagtcagctatcccagcatcgttgattgaatagggagtcctttcccyattgtttttgtttttgtttattttgtcaaagattagatagctgcaggtgtgtgactttatttctaggttctcttttctgttccgttgatctatgggtctgttactgtagctttatagtatagtttgaaaccggtaatgtgatgcctctggctttgttctttttgcttagggctgctttggctatttgggctcttttttggctccatataaattttagaatagtttttttttctagttttatgaaaaattacattggtaggttgacaggaatagagttgaatctatagattgctttgggcagaataaccatttacattatgttgattctttcaatccatgagcatggaatatttttccatttatttgacataagttatttcttctagcagtgctttgttcttcttggtgtaaagatctttcacctccttggtgagatgtactcctaggtatttttttttttggctactgtaaacgggattgtatttttgatttggctttcagcttg

SEQ ID NO: 219107 - DNA, 577 bp, Homo sapiens
ccagtttcattcttcagcatatgactagtcagctatcccagcatcgttgattgaatagggagtcctttccctattgtttttgtttttgtttattttgtcaaagattagatagctgcaggtgtgtgactttatttctaggttctcttttctgttccgttgatctatgggtctgttactgtagctttatagtatagtttgaawccggtaatgtgatgcctctggctttgttctttttgcttagggctgctttggctatttgggctcttttttggctccatataaattttagaatagtttttttttctagttttatgaaaaattacattggtaggttgacaggaatagagttgaatctatagattgctttgggcagaataaccatttacattatgttgattctttcaatccatgagcatggaatatttttccatttatttgacataagttatttcttctagcagtgctttgttcttcttggtgtaaagatctttcacctccttggtgagatgtactcctaggtatttttttttttggctactgtaaacgggattgtatttttgatttggctttcagcttg

SEQ ID NO: 219108 - DNA, 542 bp, Homo sapiens
cagtttcacctataagccagtagatggtccttataggtaagagccagctacagccaacatggttaggaatatacttgatccctatttactgtcagaagctctctgttgcctcaggcaatgggctgattcatagaatgcacagtgytgtgatctccctgctcagccccagggtgtgggaaccacaaagggtggggccagcctgggcaggtccacctacaggtcacctgatggcaggcacacgcactggcagcatgggagaatccagtgcatggtcatcaaatgcctagaggtgtgcctagccatggaactggaaaaccttcctgtctccaagttctccacacaggaatgtggaatgtcctaaactactaacccaggagagtgtgtgctccagatgcctggagatctgcctgggtgtggagcacatagagggcatccccttcattaaactctttgcatggaggggtgcggcaactcaggatcatggaccaggcaagcaggtgctctgaatgtctagagatctgcttgagtgtgtagtagagaca

SEQ ID NO: 219109 - DNA, 542 bp, Homo sapiens
cagtttcacctataagccagtagatggtccttataggtaagagccagctacagccaacatggttaggaatatacttgatccctatttactgtcagaagctctctgttgcctcaggcaatgggctgattcatagaatgcacagtgctgtgatctccctgctcagccccagggtgtgggaaccacaaagggtggggccagcctgggcaggtccacctacaggtcacctgatggcaggcacacgcactggcagcatgggagaatccagtgcatggtcatcaaatgcctagaggtgtgcctagccatggaactggaaaaccttcctgtctccaagttctccacacaggaatgtggaatgtcctaaactactaacccaggagagtgtgtgctccagatgcctggagatctgcctgggtgtggagcasatagagggcatccccttcattaaactctttgcatggaggggtgcggcaactcaggatcatggaccaggcaagcaggtgctctgaatgtctagagatctgcttgagtgtgtagtagagaca

SEQ ID NO: 219110 - DNA, 496 bp, Homo sapiens
ggaggctctctgcctctctcacatacttgggcttcactgacttttatcagccagacaccatcacagaggctgtttgctagcattctcctccctgggatctggggtgtccttcatgattctggtgggtttctgttttccttcttgaattaaaactcataaagttgctttttatctactatattgctatttccaaggggctgagtcatgccgaaagcttctaatctgccatcttgggaaaaaacccaatcaagttgatatatgcagctgcagttcattcattttcactgctgtgccatatytattacaagatttcttccacaatttatatgtgtaatgttatcctctttttttgctattactcaacgatgctatgaacattttcataaatatctctttgaatacataaataagagattcttcagttttcatctctgtttaatataaccaaactactcttcaaaatgcatgtggcaatttacatttccactaggcttca

SEQ ID NO: 219111 - DNA, 496 bp, Homo sapiens
ggaggctctctgcctctctcacatacttgggcttcactgacttttatcagccagacaccatcacagaggctgtttgctagcattctcctccctgggatctggggtgtccttcatgattctggtgggtttctgttttccttcttgaattaaaactcataaagttgctttttatctactatattgctatttccaaggggctgagtcatgccgaaagcttctaatctgccatcttgggaaaaaacccaatcaagttgatatatgcagctgcagttcattcattttcactgctgtgccatatctattacaagatttyttccacaatttatatgtgtaatgttatcctctttttttgctattactcaacgatgctatgaacattttcataaatatctctttgaatacataaataagagattcttcagttttcatctctgtttaatataaccaaactactcttcaaaatgcatgtggcaatttacatttccactaggcttca

SEQ ID NO: 219112 - DNA, 588 bp, Homo sapiens
tgatctcttcgtttttaaacgctgctttcgcagctactaaaaaaaawttttaaacaatgtgggtgacaaataaaatcagcaggatttgacccagagtgaggggtggggctgtttcctgtttataatcctctgattataaacaggaaaataaaataactgcacctcatgggattatctgatgaaatgtgtgtatcacttgtcaagcgggaagagagatgattcaccaaacacagtgaaacccactgaggttgaaagatgtttgagactgggtggctgcgggggcggccaagcgaggggtccctgggccccccactcagccctccttgtctgctatcaccacccacatctcccaacctccctagaggtgctggggccaggccacgtgaagagggggtgaaggtggagggttgcaccaaatcatttcatgagtgcctcgggtgagggcgaaacctgatcaagtcccggcctgcgctcccacagccagcgccttctcccacattcggggtgtattcctttggggatgagccaggtctcaacccaggggtctgggatctcagggcccacaacccacacagaatcggaggtcag

SEQ ID NO: 219113 - DNA, 412 bp, Homo sapiens
tggtgaatgcagggattttatttggtgstggaggtggctctcagcaggacagatggggacctggaaagggaatggcgtgggaagatgatctttccctggagtttggctgtccctgggccgatctctctgactgtccccagcagacgttcagacgctccttctcttctctcctcctccaccactccattcttctgctcatctgctcgtggaacctgggtttggggtttatatgggtacaggatagggggccatggcaggccaaaaggcaacatttgggcatgaaaacaggagtgcctgttcccatttagggttgcaggtttccaggctttggggcggggcctctgccagggagctgccctcttccacccagtatttccctgtctcttgtctgtgtcacatggaggctataaaa

SEQ ID NO: 219114 - DNA, 603 bp, Homo sapiens
tataaacatttatcaagagcattttgcagctcaccccaaggctctctggtagatgccatctcatctgaaattgtcaatgctttgctggatcaaagaagttacatgaaaggggacttaaaatgaaaggaacagcccacaggagcttcctgttcagtacctgacattggaaaggttttatcccagcggatcataaccaccttgcaaagcagatagaaccactcttcaatagatgrcatttattgcttattacgtgcctactgtgtgctaggctcagttcgaagtccctggggatggaacaaggagggaggaagacagacaagccgcctgccctcacagggctttaggttccaggggtacaattccaaggagatgttatcctcttttgatggatggaagtctcagggatggtcagtcacctgccatggccatccaggactagaatgcagatgtccctaacctcaaagcccctcaccatcctggggtcccaattctctactacatcgaagcagccggtacctcacatgtgtattctcatctccattcagaaagctcctaactacatttcctggaggtgccctgtgtccaaaggtgcactttgtctga

SEQ ID NO: 219115 - DNA, 573 bp, Homo sapiens
gccagcaacaagtcagccttagcatccccagcacactcggtcatcagaggagagctgccacgggagctccgtaccagctggacacctgggggcagcagccccgcctggaggaggtcaggcacagagtcctatgcactgaggctggatggaagtgcagctgagggaacccagaggtccctggggccaaagccaggaccagcaggagaacacacacaataagagctagaagacctccttgctggtgggtttgtcctaaaagggagcaggcaggcgggawgagaaactcctgcaagaaaccagaacaccatctgtggggctcagggatcgggtgttgtcaggaaagaggctcttttctatttatttttaaaatcaaagttacacattcacatggagaaacaaatggtcaaataacacctaagaggctttatttcaggacacagctactctgtcccccttttctcattgtctgcccacaaaaccattttccattctatgacctgagtcacaaagaccttctgtgctgtctccctctgccagggtgctggccaccccctccattacttgagcccttac

SEQ ID NO: 219116 - DNA, 555 bp, Homo sapiens
acctgagcctaggtaatttctaaagatgtttaattggtccatgaatccacaggctgtacaggaaacatggctggggaagcctcaggaaacttacaatcatggtgtaaagggaagcatggagaaggggaagcaggcttgtcttacatggctggagcaggaggaagacagagagggagggtgctacacacttgtaaacaaccaggtctcatgagaagtctgtcatgagaacagcactagaaggatggtgccaaaccattagaaagtgcccctatgtccaatcacctcccaccaggccccacctccaacattggggattacaaytgaacatgagatttgggtggacacacagatccaaaccatatcagatagtaatgaacatggaggagcagcccagtatccagcacaaaggccctcagtaaacagaagactcagaaggagggccaccctgtctcaggagcactgattggcctgcccttctttccttcagcctcctggagggcagggtctgtgtcttctttatctgtaccccgagcccctagtcctcatggctagtag

SEQ ID NO: 219117 - DNA, 593 bp, Homo sapiens
tacttttttttaaacaagtgaaatgtttgtttgtatagacgtgtgaacatgaagttccttttgtgttgatataacatccagttgtttgtttattggttaaaaatgataatgttcaaccccattgaaatgaggggaggcagaaagatgctgacctcagtaactttggaaatgttttagtgtgtaatactaaaggtgaaaagaactgaatttaagcactgtactgtagttgataatattgcttcccatgggtcaataattctgatactcatatatatatatatatatatatatatatatatatatatakagagagagagagagagagagagagagagagagaggaattaaataattgagtaaatgaatggcaagtgttgggaacaagatttctctcttttggggtgaaactttacagataagcaagggaatcaggagaatagaatgatccatgtggtaaaggattacagttggagagatcagtaggaactcatgtctagcttaatataaatgtaaatggttacacatagaaatatttatagatatgttttatatacaggtgagtatacattcatatatttccttgctttgtgagg

SEQ ID NO: 219118 - DNA, 407 bp, Homo sapiens
attccggaaggaacctcacatattatgttctacgtttgtctctgtatcttcacatgcccatcttcgtatagaaacgccagtcacggtgagctaatggtccatcttactctggtggaacctcatcttaatcaaactaattttatttacaaaaaccctatttccaataagttcccactataagatagtggggatcaggacttcaacatctttttaggagaacaatcttcaacccatgaaacaagagaactcttcactcacttaccaactcttttccacaagcctcaaccmatcaagagaaaattttaggaaagaaaagaaaacttaatggaaacttaatattattaaatgactttgaataaacacaaggtaggaatcagcttgtgctagcaggcaggcagaaaatccac

SEQ ID NO: 219119 - DNA, 536 bp, Homo sapiens
tctgggctatctggaattggttctctgtttcaatttgctttaaagctgttaatgactccttcgccagtggaaaggtgrgcactggtagtcctatgacacgcattggcaaaagtgttgcttaaataacctgtagacttctataaccagatgccttataggtagcaatgttttggatagccaagtaattgctaacatagaacatttttattgaaaaattaaaaaagtggtggagctggctggttgcttctaagtgttctggagaacttgggaaagaaaatgttgagtttgggattttaaaaatccacctcaagaccaagcaaaaagaaaaaatgccagaaagtttgtattactactgtgaaagaaacccttaactcttgtagctatagggccaacgttgctgaaacgaaacccaaaatctaaacctatgagtagctgaatcatgatataaattgaattaataatcacataggatcctatatgttaaagctagggtactgactacaatagaggggcatcctgaaaatcatggagacata

SEQ ID NO: 219120 - DNA, 632 bp, Homo sapiens
acaaaaattacaagcaatgaaaaatggcaaggaaaaaaaagtatgaaaagacaaggcaagcatcagaaccagatccagatataatacagatattggaattctcagtcagggaatttaaaatcactaagattaatatgataaggggtctaayggagaaaggcagagatcattcaagaacaaatgggcaagagaagcagaaagacactgtaagcaaaatcagaaggaaaggcaagaaatcaataaaaaacactacaacaaataaagaatgccctcagcaggctcattagcagactaggcacagccaataaaatattcagtgagcttggagagttgtcaatggaaactttccatattaaaatgtaaaaacaaagtaaaataaagcaaacagaacagaaaatcaaaggactgcgggacaatttcaaaagatgtaacatatgtataagtgaatatcagaaagagaagagagaagcagaagacatacttgaagctgcaatggccaagaatgctctaaagtgacacaatcgcttttaaagcagtctggcagttcctcaaaatgccaaacatagaatcaccatgtgacccaacaattccaccctttgggttatactcaagaaaaatgatgtccacacaaa

SEQ ID NO: 219121 - DNA, 632 bp, Homo sapiens
acaaaaattacaagcaatgaaaaatggcaaggaaaaaaaagtatgaaaagacaaggcaagcatcagaaccagatccagatataatacagatattggaattctcagtcagggaatttaaaatcactaagattaatatgataaggggtctaatggagaaaggcagagatcattcaagaacaaatgggcaagagaagcagaaagacactgtaagcaaaatcagaaggaaaggcaagaaatcaataaaaaacactacaacaaataaagaatgccctcagcaggctcattagcagactaggcacagccaataaaatattcagtgagcttggagagttgtcaatggaaactttccatattaaaatgtaaaaacaaagtaaaataaagcaaacagaacagaaaatcaaaggactgygggacaatttcaaaagatgtaacatatgtataagtgaatatcagaaagagaagagagaagcagaagacatacttgaagctgcaatggccaagaatgctctaaagtgacacaatcgcttttaaagcagtctggcagttcctcaaaatgccaaacatagaatcaccatgtgacccaacaattccaccctttgggttatactcaagaaaaatgatgtccacacaaa

SEQ ID NO: 219122 - DNA, 515 bp, Homo sapiens
tcagtgaattaatttgctgtccataattattattagaatatcctatgtttcatctgattattttcaatgacctacaggtaacattactgatttgaagaatcctctatttgatagaaataaattgcaatcaagacattctcagagggaaggaacaatgaggtgtttactaataatttttttactcaaagcaaatgagtaatcatgttataaacytcttaatatgatcctgtcctaataacaggaaaccattaatgtcaactgtaataaatgttgaggtcattgttttaacctgacgttaaaatgatagtgagacattttccttgccatggctaagaaaagagcaattattgaaaggaatgagtttgatttaaatcctctgaagaaaataataaacaggtaaacagctaaaaattatgaggctcatttatttcccaggtgagccaaagcaattagatagctccttccttcagcttcctatagggtataacaaatcttcctaatgattacttgcttgg

SEQ ID NO: 219123 - DNA, 562 bp, Homo sapiens
gtgggtgagatccacaaagaaggctgtgagaaaggaatagagttcatccaggggcagccagacagacaggtgggaatgcagacctcattccccaggctggaagccagccagcagggctgcactgagagaaagtggcaactacccgggatgtgtacatcctgggcaaaggtgacactgtgccagcaatggaagtacttccttataaccacaatcttctcaaatactttaaaacagaaagatcttctgaaaggagtctccaggtgggaaggcacacagatcagcaatccccacattctcagctttctagtctccctcaatttcagcagcacaggcactattatggctctcctcataggcccaatatcagctctcctaagtgtagacaaaatcccttttaaaaatccctattgcatccagctagagacaggaaagtggctaaaatcaatggaaatttttaaaattatacacacatgtgcgcacgcrcacacacacacacacacacacacacacacacacacaccccttaagaaaatataagtataaaatgaagttagggtatata

SEQ ID NO: 219124 - DNA, 573 bp, Homo sapiens
acctggagtgggtgagatccacaaagaaggctgtgagaaaggaatagagttcatccaggggcagccagacagacaggtgggaatgcagacctcattccccaggctggaagccagccagcagggctgcactgagagaaagtggcaactacccgggatgtgtacatcctgggcaaaggtgacactgtgccagcaatggaagtacttccttataaccacaatcttctcaaatactttaaaacagaaagatcttctgaaaggagtctccaggtgggaaggcacacagatcagcaatccccacattctcagctttctagtctccctcaatttcagcagcacaggcactattatggctctcctcataggcccaatatcagctctcctaagtgtagacaaaatcccttttaaaaatccctattgcatccagctagagacaggaaagtggctaaaatcaatggaaatttttaaaattatacacacatgtgcgcacgcgcacacacacacacacacacacacacacacacacacacmccttaagaaaatataagtataaaatgaagttagggtatatattaa

SEQ ID NO: 219125 - DNA, 402 bp, Homo sapiens
gatgctaagtatgggttgagtgcgtgggaatgctagcgtagctccaaaatcttcatctccagaatctctccacctgttctcttcactcccacccccattcctctggcaaagccgccatcatctcttgcgtggactgttgcagttgccacagtaaatggcatccttgctaatttttgacactgccagttatcctcttatggcaggacttttgcacttgctgtctcctctgccttggatgctctcctcagggatctgtgtggctcactcccttaccgtcttcacacatcacctagctgagaacttccctgagtgttggrtctaaaagtgcaatttccccatccccaacatttcctgttatatttcttttgcttatcaccatctcacctgccatatatgttgttt

SEQ ID NO: 219126 - DNA, 453 bp, Homo sapiens
agggaatgaggtggaaatggaatttaacagtaccaaggagccaggcccaatggcggcgccagattgagacaaagaggcgccgccgccattttgtgacgttcagcacggggcggtggcgggggctcccggcccatcggagggtttcctagtcttggagtggaagtstttatattcctcattggggcatgagccaggatgggggttacctgggagttgggaaccacaaaggggagccgatagccgagttgtattccaggtcacggcctttttatttttatggcgccttttttttttttggcccctcatttaattgggaagcttctcagaatgtttttgtaaagtcactaaccaagaccggacctttcagttcatattaaatggcccccgtagtcaccttactttcatgtagtttcagattttgcagcctgaatctaatcacctttttctaagacc

SEQ ID NO: 219127 - DNA, 459 bp, Homo sapiens
gggctggaggctaaagctctgaagggaggaaaaacagaggcaggcatattttgtgcatttgttaaatggscctcaaatgcctccattcatttatttgttgaagacagggtcatgtcatttaattcagcaggaaagcaactgtaccagaaagagaaaagctgtctcaatcttctctgtatttcaaaggtatttcacatatgctcctcatgaaggagaccgcacagggaatcagacccacgtgcctgctttgcctctcttgcgcaggattaagtaagggaagcccctgattcacaagtgcatcctggctgtttaaggttatgcatattgtgtctgaatgtacaactatgataaatatatattctggagcaatgttaaattcagcttaggatgatgtactgcttagagctttgagggaaaacataagaatgataaaatgagcctaaattattttggaaaaaa

SEQ ID NO: 219128 - DNA, 459 bp, Homo sapiens
gggctggaggctaaagctctgaagggaggaaaaacagaggcaggcatattttgtgcatttgttaaatggccctcaaatgcctccattcatttatttgttgaagacagggtcatstcatttaattcagcaggaaagcaactgtaccagaaagagaaaagctgtctcaatcttctctgtatttcaaaggtatttcacatatgctcctcatgaaggagaccgcacagggaatcagacccacgtgcctgctttgcctctcttgcgcaggattaagtaagggaagcccctgattcacaagtgcatcctggctgtttaaggttatgcatattgtgtctgaatgtacaactatgataaatatatattctggagcaatgttaaattcagcttaggatgatgtactgcttagagctttgagggaaaacataagaatgataaaatgagcctaaattattttggaaaaaa

SEQ ID NO: 219129 - DNA, 459 bp, Homo sapiens
gggctggaggctaaagctctgaagggaggaaaaacagaggcaggcatattttgtgcatttgttaaatggccctcaaatgcctccattcatttatttgttgaagacagggtcatgtcatttaattcagcaggaaagcaactgtaccagaaagagaaaagctgtctcaatcttctctgtatttcaaaggtatttcacatatgctcctcatgaaggagaccgcacagggaatcagacccacgtgcctgctttgcctctcttgcgcaggattaagtaagggaagcccctgattcacaagtgcatcctggctgtttaaggttatgcatattgtgtctgaatgtacaactatgataaatatatattctggagcaatgttaaattcagcttaggaygatgtactgcttagagctttgagggaaaacataagaatgataaaatgagcctaaattattttggaaaaaa

SEQ ID NO: 219130 - DNA, 560 bp, Homo sapiens
gctggctttgaaatcacacagttcttccggggtccctggagcacaccacctccctgtgatttctactcaagttttccctggccccccccagcacccgttccatacctatttaatctttaagctgcctctaatccttttgcaaggaagcaggatgaaatgctcaaaccacagttatacacaatgttgattctcaggttcacacatttgaggaattgtttgaacaagaaatgctctctgtactataatccagggtgcaggcacggtgcccgggcgaccctcagtctccctccgacaccccgcatcccaactcccgccgcctttgcgcctcaaagctggcaaacatccccaagccagagctggagtacctggagtgggtrggggtaagaagggaagccaaggtcgtcccggaaggtgtgcgcccctcaccttgtggacggtgcgtgcagccgcgccgcactgggcaaaccggcacgtccagctggctccagaagtctcactcggaacccgctcctttttctcctgagctggatcagagcactgcttctctcaacattcgattc

SEQ ID NO: 219131 - DNA, 442 bp, Homo sapiens
tcaaattttctaccatcaaaatgtcaaaataaatgctaaatgcagctagagagaaagggcaggttacctacaaagggaatcccactaggctaacagcaagcctctcaggtgataccctgaaagccaaaagagattggagacctctattcaaccatcatagggaaaaaaatcttcaatcaagggtttcatatttggccaaactaggcttcctaagtgaagaagaaatacaatccttttcagattagcaaatgttgasggaattcattaccaccagacctgccttacaagagctcttcaaaggagtgttaaatgcagaaagactgctaccttctaatacaaaaacacacttaaacacacagagcagtgtcattgtgaagcaattacaaaaacaaactaacataataaccagctaacagcacaacgacataatcaaatccacaca

SEQ ID NO: 219132 - DNA, 591 bp, Homo sapiens
tcccatttataggttgtacacacacggaagactgagatcccctcaaacacacacatgcactcacactcatccatgcatgcactcacaacccagtgattaatatacaattgtcttgcctatataaggcrtgtctatttatgccatgaggttagaaagaaggtatcaagtcaactatagcagaaagcagtaatagtaattccccaactcttccaaatctctattattttaaaaccatcatcctttagttatagtctttgtaactaaaccggaatttgggcacttctcttcatgaaggcaatttaagagcctgtattgggggaccacctaaaaccttgctattgtcccctaccccaccctgcgtcactagcaacatccgcatcacctggaagcttttcagaactgtagattttctcacccctgtcctgaaacttactgaatcagaatctgtattttaacaagatcctcaggtgaaccataggcacattaaagtatgagaaacgctgatctaaaacactcccttatggggcagcaccctatctacaacaatccaaatagaaaaaacggctggataaaatgcgataggggaaaaat

SEQ ID NO: 219133 - DNA, 427 bp, Homo sapiens
tgactggaagcagcaagaggttgtggcacgtgggcaaagatattttgaagaagttatcagaataatgtatggaccttgagagcttacttgggaggttctggcaggggagtgcagctactcatatacccttgatcaaagaatggtcctcctctattggagaaggtcatcctcttcaaccaagaacacagcttcaaaaaggtcgcacatagagtggtcaaggaggaaggggacaccygcctacccagccagatcagccgaatcaaccctggtgatcaatggggtgacagatgtcgcagctagatcgtcctcacatccaaaataatgtatgaattccatgaaagcaaagcagaagctttaaaaaatctattaggagcagaaagcacaatgcccaaaaggaaaaatgagaagaacttaaaggactttaccc

SEQ ID NO: 219134 - DNA, 574 bp, Homo sapiens
tcaagggtcataggaaccatgtctgattaatctcggcacccccatcatctggtccagagcctaacccagagcaggggctaagacaggcttgctggtaactgaatttttacaagggcctgtgtactacgccatgcatagcatgttctatccaactagtgttttargggattttcttcttcttcgcctttctttccccctgttgaataccttctgtgtttctggaatttcagaaacatatactgccaaacttctactgtcccatcttccagaaaggggtaaagggaagagtcaagaaacaggccagagctagagttcattccttctgtcatgtgaggatgagactacaactcagacctcctgatacccatacttggaggatctccctactcccacatgagttgttctcctaattgtgttaggaataatcacagccacaaacggatgatatcagaggtgtcaaacagtaaggcaggagcatctctcagaggaaaacattcactgaacctgcctagcagagctagtttatgtcatgtatcacaccattaagctttggagcaggaagggccctcagaga

SEQ ID NO: 219135 - DNA, 574 bp, Homo sapiens
tcaagggtcataggaaccatgtctgattaatctcggcacccccatcatctggtccagagcctaacccagagcaggggctaagacaggcttgctggtaactgaatttttacaagggcctgtgtactacgccatgcatagcatgttctatccaactagtgttttaggggattttcttcttcttcgcctttctttccccctgttgaataccttctgtgtttctggaatttcagaaacatatactgccaaacttctactgtcccatcttccagaaaggggtaaagggaagagtcaagaaacaggccagagctagagttcattccttctgtcatgtgaggatgagactacaactcagacctcctgatacccatacttggaggatctccctactcccacatgagttgttctcctaattgtgttaggaataatcacagccacaaacggatgatatmagaggtgtcaaacagtaaggcaggagcatctctcagaggaaaacattcactgaacctgcctagcagagctagtttatgtcatgtatcacaccattaagctttggagcaggaagggccctcagaga

SEQ ID NO: 219136 - DNA, 371 bp, Homo sapiens
gttgattggcaattggcacagggagagaggacaattgccagagtaatggccaaatattcaggtttcatgttcagtgaagcagracgtgcatttgtatcccaagggcaaaactgacgctagaatctgggcctcctggctgaatctgagtccacagtctgatgagtaggatgaagtagtctcagaaatccaagccagccagaacccatgaggtgtgctctgcagatattggctggtgagctgcattaagatgtttcattccattgagcaaacattctttggttggttaggttagcatcccacaagagcagagacaaattcttcagaatttgtccatgaagctatagtcccagagcttatatttcaagggagga

SEQ ID NO: 219137 - DNA, 388 bp, Homo sapiens
tttattagtggaataggcctgtattttattttgtgtagtgtatatgagagagacgaagggaaagggatgggaagagagcacatgtgttcagctttggtccagtttagtataaatacaatatttattcataaatatatttggaagtatttttattttctttacatggaaacatttaaagctatggatttctcctctccctctcactgtcactctcactctgtttgtgtgtgcacgcacatgtgtgtgcrtgcatcatttagccctgctgactgatatgcctacttatttatgatcaagagccagacattgacctaagagaaaaagtctttagatgggatctccctccaaagaaattgtagttttcttctggcttagaggtagatcctct

SEQ ID NO: 219138 - DNA, 371 bp, Homo sapiens
gttgattggcaattggcacagggagagaggacaattgccagagtaatggccaaatattcaggtttcatgttcagtgaagcaggacgtgcatttgtatcccaagggcaaaactgacgctagaatctgggcctcctggctgaatctgagtccacagtctgatgagtaggatgaagtagtctcagaaatccaagccagccagaacccatgaggtgtgctytgcagatattggctggtgagctgcattaagatgtttcattccattgagcaaacattctttggttggttaggttagcatcccacaagagcagagacaaattcttcagaatttgtccatgaagctatagtcccagagcttatatttcaagggagga

SEQ ID NO: 219139 - DNA, 465 bp, Homo sapiens
tgtgtttaacatgccatatttgctcaggtgtctgcatctactctcaccattttttgaagaaaggytaaattgttatggcactgacaactagtcttcatagtttggtttataatttttaatggtgtttatttttaacaaaattggtggagtttttttctttgtacgttgattttcttttggttttcagttgttttaagaaataaatggagggagagatatgcttcctttgctcccattaaccaaaagaatagtttgaacaacacaggaattaacttttccattaagtttaagaggacctgcttgagacacagctgggccttgagcttttaaaggtgctataactttataccagtttcatttttttctattgttggtatcttcaaatgttcttatttttctagatttatttttatagttaaattctccctaaaaaattaacctctttatatatattttcaaatataa

SEQ ID NO: 219140 - DNA, 465 bp, Homo sapiens
tgtgtttaacatgccatatttgctcaggtgtctgcatctactctcaccattttttgaagaaaggctaaattgttatggcactracaactagtcttcatagtttggtttataatttttaatggtgtttatttttaacaaaattggtggagtttttttctttgtacgttgattttcttttggttttcagttgttttaagaaataaatggagggagagatatgcttcctttgctcccattaaccaaaagaatagtttgaacaacacaggaattaacttttccattaagtttaagaggacctgcttgagacacagctgggccttgagcttttaaaggtgctataactttataccagtttcatttttttctattgttggtatcttcaaatgttcttatttttctagatttatttttatagttaaattctccctaaaaaattaacctctttatatatattttcaaatataa

SEQ ID NO: 219141 - DNA, 465 bp, Homo sapiens
tgtgtttaacatgccatatttgctcaggtgtctgcatctactctcaccattttttgaagaaaggctaaattgttatggcactgacaactagtcttcatagtttggtttataatttttaatggtgtttatttttaacaaaattggwggagtttttttctttgtacgttgattttcttttggttttcagttgttttaagaaataaatggagggagagatatgcttcctttgctcccattaaccaaaagaatagtttgaacaacacaggaattaacttttccattaagtttaagaggacctgcttgagacacagctgggccttgagcttttaaaggtgctataactttataccagtttcatttttttctattgttggtatcttcaaatgttcttatttttctagatttatttttatagttaaattctccctaaaaaattaacctctttatatatattttcaaatataa

SEQ ID NO: 219142 - DNA, 465 bp, Homo sapiens
tgtgtttaacatgccatatttgctcaggtgtctgcatctactctcaccattttttgaagaaaggctaaattgttatggcactgacaactagtcttcatagtttggtttataatttttaatggtgtttatttttaacaaaattggtggagtttttttctttgtacgttgattttcttttggttttcagttgttttaagaaataaatggagggagagatatgcttcctttgctcccattaaccaaaagaatagtttgaacaacacaggaattaacttttccattaagtttaagaggacctgcttgagacacagctgggccttgwgcttttaaaggtgctataactttataccagtttcatttttttctattgttggtatcttcaaatgttcttatttttctagatttatttttatagttaaattctccctaaaaaattaacctctttatatatattttcaaatataa

SEQ ID NO: 219143 - DNA, 371 bp, Homo sapiens
gttgattggcaattggcacagggagagaggacaattgccagagtaatggccaaatattcaggtttcatgttcagtgaagcaggacgtgcatttgtatcccaagggcaaaactgacgctagaatctgggcctcctggctgaatctgagtccacagtctgatgagtaggatgaagtagtctcagaaatccaagccagccagaacccatgaggtgtgctctgcagatattggctggtgagctgcattaagatgtttcattccattgagcaaacattcyttggttggttaggttagcatcccacaagagcagagacaaattcttcagaatttgtccatgaagctatagtcccagagcttatatttcaagggagga

SEQ ID NO: 219144 - DNA, 371 bp, Homo sapiens
gttgattggcaattggcacagggagagaggacaattgccagagtaatggccaaatattcaggtttcatgttcagtgaagcaggacgtgcatttgtatcccaagggcaaaactgacgctagaatctgggcctcctggctgaatctgagtccacagtctgatgagtaggatgaagtagtctcagaaatccaagccagccagaacccatgaggtgtgctctgcagatattggctggtgagctgcattaagatgtttcattccattgagcaaacattctttgrttggttaggttagcatcccacaagagcagagacaaattcttcagaatttgtccatgaagctatagtcccagagcttatatttcaagggagga

SEQ ID NO: 219145 - DNA, 345 bp, Homo sapiens
actgaccttgaagcatctttttatcctgcttttctgggaggcttaaagtgaaggcagagggagatatcacacagtcccaaagcccccactaaatggggagctactgtctttcatctttcatgcagggtaaaagaagacacctcagctacagcaagaggaaagaaggtcaaaccacaggcagaactttcaggttgaatgttagagcagactgtgatcccaagagrtcatccaagacccttggtctcagaggatgcctatgaggccctggtccctggctggggtgggaacaataatcccaacagccccatgccagactgacttgggagtcagaaggtacgtgggact

SEQ ID NO: 219146 - DNA, 345 bp, Homo sapiens
actgaccttgaagcatctttttatcctgcttttctgggaggcttaaagtgaaggcagagggagatatcacacagtcccaaagcccccactaaatggggagctactgtctttcatctttcatgcagggtaaaagaagacacctcagctacagcaagaggaaagaaggtcaaaccacaggcagaactttcaggttgaatgttagagcagactgtgatcccaagaggtcatccaagacccttggtctcagaggatgcctatgaggccctggtccctggctggggtgggaacaataatcycaacagccccatgccagactgacttgggagtcagaaggtacgtgggact

SEQ ID NO: 219147 - DNA, 384 bp, Homo sapiens
ctggtgatcgccctgtgagggcagggttgttttatacatgctgttcttcagcaccatgaacagggcctggctgttgaagatgcccaataaatatctgttgacagagaaaggttgacaggggcagacggatccaggatgactcccaaattcctggcccagtgcaaaagcctggatgatgatcccagtctgcagtatgagggccccaggagaagaagctggattgcagggaaagawgaatccagaagccatctctctgatctagaggaaacgaggctgtgcggtgtggaagggattaatgttaggaagcagaccggacttccgttcttaggacagaaaaaaatcttgtagcaggtagttcaaggctacaaaagatctgaagggacc

SEQ ID NO: 219148 - DNA, 384 bp, Homo sapiens
ctggtgatcgccctgtgagggcagggttgttttatacatgctgttcttcagcaccatgaacagggcctggctgttgaagatgcccaataaatatctgttgacagagaaaggttgacaggggcagacggatccaggatgactcccaaattcctggcccagtgcaaaagcctggatgatgatcccagtctgcagtatgagggccccaggagaagaagctggattgcagggaaagaagaatccagaagccatctctctgatctagaggaaacgaggctgtgcsgtgtggaagggattaatgttaggaagcagaccggacttccgttcttaggacagaaaaaaatcttgtagcaggtagttcaaggctacaaaagatctgaagggacc

SEQ ID NO: 219149 - DNA, 384 bp, Homo sapiens
ctggtgatcgccctgtgagggcagggttgttttatacatgctgttcttcagcaccatgaacagggcctggctgttgaagatgcccaataaatatctgttgacagagaaaggttgacaggggcagacggatccaggatgactcccaaattcctggcccagtgcaaaagcctggatgatgatcccagtctgcagtatgagggccccaggagaagaagctggattgcagggaaagaagaatccagaagccatctctctgatctagaggaaacgaggctgtgcggtgtggaagggattaatgttaggaarcagaccggacttccgttcttaggacagaaaaaaatcttgtagcaggtagttcaaggctacaaaagatctgaagggacc

SEQ ID NO: 219150 - DNA, 576 bp, Homo sapiens
agaatatgggtcatgggaagaggggtgactgggggcaggggtagagatggggagcgatcaccccaaggctcctcaactatacccctaggctggtgatagatgaatttctggagcagaggatggcatttcaagtgaaatggttataggaaatgagtrtgatttaaacaacgtcttggctgataagcaccagccagctggggggagatggcaggctagaagtggaggaatcaaaagcccagaggcccccagtgttaagtagctgtctgaagctccgctcaaacacacgcacaagctttggtctcaatatgtttttaagagctggttatgatttccttgagggctgctcagattaagactagagtggagcccccagctaagcacctcaataactgtccatcacatcctctttagaaacagcagtctcttccccttggctcagggaccctgtaactggggagggctgtgaagctgcatggcttgtcagcctgttcccagacaacatggtgcctgtctgtcctttgcctggggtcctgccccagatcccaggaacagagattgagccccacccacagagat

SEQ ID NO: 219151 - DNA, 576 bp, Homo sapiens
agaatatgggtcatgggaagaggggtgactgggggcaggggtagagatggggagcgatcaccccaaggctcctcaactatacccctaggctggtgatagatgaatttctggagcagaggatggcatttcaagtgaaatggttataggaaatgagtatgatttaaacaacgtcttggctgataagcaccagccagctggggggagatggcaggctagaagtggaggaatcaaaagcccagaggcccccagtgttaagtagctgtctgaagctccgctcaaacacacgcamaagctttggtctcaatatgtttttaagagctggttatgatttccttgagggctgctcagattaagactagagtggagcccccagctaagcacctcaataactgtccatcacatcctctttagaaacagcagtctcttccccttggctcagggaccctgtaactggggagggctgtgaagctgcatggcttgtcagcctgttcccagacaacatggtgcctgtctgtcctttgcctggggtcctgccccagatcccaggaacagagattgagccccacccacagagat

SEQ ID NO: 219152 - DNA, 576 bp, Homo sapiens
agaatatgggtcatgggaagaggggtgactgggggcaggggtagagatggggagcgatcaccccaaggctcctcaactatacccctaggctggtgatagatgaatttctggagcagaggatggcatttcaagtgaaatggttataggaaatgagtatgatttaaacaacgtcttggctgataagcaccagccagctggggggagatggcaggctagaagtggaggaatcaaaagcccagaggcccccagtgttaagtagctgtctgaagctccgctcaaacacacgcacaagctttggtctcaatatgtttttaagagctggttatgatttccttgagggctgctcagattaagactagagtggagcccccagctaagcacctcaataactgtccatcacatcctctttagaaacagcagtctcttccccttggctcagggaccctgtaactggggagggctgtgaagctgcatggcttgtcagcctgttcccagacarcatggtgcctgtctgtcctttgcctggggtcctgccccagatcccaggaacagagattgagccccacccacagagat

SEQ ID NO: 219153 - DNA, 438 bp, Homo sapiens
taaaacccccaagcatactgctaatgtttgctattgaataatgttttctagtctgggtgtggtggctcctgcctgtaatcccaacactttgggaggttgaggcaagtggatcacctgaggtcaggagttcgagaccagcctggccaacatggtgaatccccgtctctacaaaaatactaaacattagcaggccatcgtggtgtgcgctggtaatcccagctgcttgggaggctaaggcaggagaatcctttgaacctgggaggtagaggttgcagtgagccaagatcacaccatcgcactccagtctgggctacaagagtcaaattccatctcaaaamtaataatgatagtaataatgttttctacaagcaaggagttactttgtactgtgaactggtgtgaagggatcccccatgtgtaagcttttggattgatgac

SEQ ID NO: 219154 - DNA, 422 bp, Homo sapiens
taaaacccccaagcatactgctaatgtttgctattgaataatgttttctagtctgggtgtggtggctcctgcctgtaatcccaacactttgggaggttgaggcaagtggatcacctgaggtcaggagttcgagaccagcctggccaacatggtgaatccccgtctctacaaaaatactaaacattagcaggccatcgtggtgtgcgctggtaatcccagctgcttgggaggctaaggcaggagaatcctttgaacctgggaggtagaggttgcagtgagccaagatcacaccatcgcactccagtctgggctacaagagtcaaattccatctcaaaactaataatgatartaataatgttttctacaagcaaggagttactttgtactgtgaactggtgtgaagggatcccccatgtgtaag

SEQ ID NO: 219155 - DNA, 439 bp, Homo sapiens
taaaacccccaagcatactgctaatgtttgctattgaataatgttttctagtctgggtgtggtggctcctgcctgtaatcccaacactttgggaggttgaggcaagtggatcacctgaggtcaggagttcgagaccagcctggccaacatggtgaatccccgtctctacaaaaatactaaacattagcaggccatcgtggtgtgcgctggtaatcccagctgcttgggaggctaaggcaggagaatcctttgaacctgggaggtagaggttgcagtgagccaagatcacaccatcgcactccagtctgggctacaagagtcaaattccatctcaaaactaataatgatagtaataatgttttctacaagcaargagttactttgtactgtgaactggtgtgaagggatcccccatgtgtaagcttttggattgatgaca

SEQ ID NO: 219156 - DNA, 380 bp, Homo sapiens
cacctctgctgtggcacgacctttgtcaaaatgctagaaagaagagagactggctcttagaccaagggaatttgggatttgaaaggwcttccaattacaattctatagatttccttcccattagccttttcatgtgcatcaaatgtaaatggcaggctaaacctacaggatgaagagagttgaaagactgctgtctaaaaatgcccttttccaaatctgtgggtgcagaagcatattgaaaagcagctacccagcctggcggtgtggcacatgcctgcagtctcacatacttaagaggctaaggtgggaggactacttgagcccaggagtttgaggcttcagtaaactatgatggtgccacaacagtccagcctgggaaa

SEQ ID NO: 219157 - DNA, 380 bp, Homo sapiens
cacctctgctgtggcacgacctttgtcaaaatgctagaaagaagagagactggctcttagaccaagggaatttgggatttgaaaggtcttccaattmcaattctatagatttccttcccattagccttttcatgtgcatcaaatgtaaatggcaggctaaacctacaggatgaagagagttgaaagactgctgtctaaaaatgcccttttccaaatctgtgggtgcagaagcatattgaaaagcagctacccagcctggcggtgtggcacatgcctgcagtctcacatacttaagaggctaaggtgggaggactacttgagcccaggagtttgaggcttcagtaaactatgatggtgccacaacagtccagcctgggaaa

SEQ ID NO: 219158 - DNA, 380 bp, Homo sapiens
cacctctgctgtggcacgacctttgtcaaaatgctagaaagaagagagactggctcttagaccaagggaatttgggatttgaaaggtcttccaattacarttctatagatttccttcccattagccttttcatgtgcatcaaatgtaaatggcaggctaaacctacaggatgaagagagttgaaagactgctgtctaaaaatgcccttttccaaatctgtgggtgcagaagcatattgaaaagcagctacccagcctggcggtgtggcacatgcctgcagtctcacatacttaagaggctaaggtgggaggactacttgagcccaggagtttgaggcttcagtaaactatgatggtgccacaacagtccagcctgggaaa

SEQ ID NO: 219159 - DNA, 380 bp, Homo sapiens
cacctctgctgtggcacgacctttgtcaaaatgctagaaagaagagagactggctcttagaccaagggaatttgggatttgaaaggtcttccaattacaattctatagatttccttcccattagccttttcatgtgcatcaaatgtaaatggcaggctaaacctacaggatgaagagagttgaaagactgctgyctaaaaatgcccttttccaaatctgtgggtgcagaagcatattgaaaagcagctacccagcctggcggtgtggcacatgcctgcagtctcacatacttaagaggctaaggtgggaggactacttgagcccaggagtttgaggcttcagtaaactatgatggtgccacaacagtccagcctgggaaa

SEQ ID NO: 219160 - DNA, 499 bp, Homo sapiens
aattacaattctatagatttccttcccattagccttttcatgtgcatcaaatgtaaatggcaggctaaacctacaggatgaagagagttgaaagactgctgtctaaaaatgcccttttccaaatctgtgggtgcagaagcatattgaaaagcagctacccagcctggcggtrtggcacatgcctgcagtctcacatacttaagaggctaaggtgggaggactacttgagcccaggagtttgaggcttcagtaaactatgatggtgccacaacagtccagcctgggaaacagagctggaccacatttccaaaaaaaaaaaaaaaaaaaaaaaaaagtagttacccaggtaaggtggatgatcaagtacacccagtgagaagcacacaaaccttaccctttgcccaactctgccccttacctggcccatttctggtctctagaggaggatcagttagggggtgtgacccaagttacccagataattaactgtggaagcacg

SEQ ID NO: 219161 - DNA, 499 bp, Homo sapiens
aattacaattctatagatttccttcccattagccttttcatgtgcatcaaatgtaaatggcaggctaaacctacaggatgaagagagttgaaagactgctgtctaaaaatgcccttttccaaatctgtgggtgcagaagcatattgaaaagcagctacccagcctggcggtgtggcacatgcctgcagtytcacatacttaagaggctaaggtgggaggactacttgagcccaggagtttgaggcttcagtaaactatgatggtgccacaacagtccagcctgggaaacagagctggaccacatttccaaaaaaaaaaaaaaaaaaaaaaaaaagtagttacccaggtaaggtggatgatcaagtacacccagtgagaagcacacaaaccttaccctttgcccaactctgccccttacctggcccatttctggtctctagaggaggatcagttagggggtgtgacccaagttacccagataattaactgtggaagcacg

SEQ ID NO: 219162 - DNA, 537 bp, Homo sapiens
agatctttgaccaccacctctgctgtggcacgacctttgtcaaaatgctagaaagaagagagactggctcttagaccaagggaatttgggatttgaaaggtcttccaattacaattctatagatttccttcccattagccttttcatgtgcatcaaatgtaaatggcaggctaaacctacaggatgaagagagttgaaagactgctgtctaaaaatgcccttttccaaatctgtgggtgcagaagcatattgaaaagcagctacccagcctggcggtgtggcacatgcctgcagtctcacatacttaagaggctaaggtgggaggactacttgagcccaggagtttgaggcttcagtaaactatgatggtgccacaacagtccagcctgggaaacagagctggaccmcatttccaaaaaaaaaaaaaaaaaaaaaaaaaagtagttacccaggtaaggtggatgatcaagtacacccagtgagaagcacacaaaccttaccctttgcccaactctgccccttacctggcccatttct

SEQ ID NO: 219163 - DNA, 613 bp, Homo sapiens
acgacctttgtcaaaatgctagaaagaagagagactggctcttagaccaagggaatttgggatttgaaaggtcttccaattacaattctatagatttccttcccattagccttttcatgtgcatcaaatgtaaatggcaggctaaacctacaggatgaagagagttgaaagactgctgtctaaaaatgcccttttccaaatctgtgggtgcagaagcatattgaaaagcagctacccagcctggcggtgtggcacatgcctgcagtctcacatacttaagaggctaaggtgggaggactacttgagcccaggagtttgaggcttcagtaaactatgatggtgccacaacagtccagcctgggaaacagagctggaccacatttccaaaaaaaaaaaaaaaaaaaaaaaaaagtagttacccaggtaaggtggatgatcaagtacacccagtgagaagcacacaaaccttaccctttgcccaactctsccccttacctggcccatttctggtctctagaggaggatcagttagggggtgtgacccaagttacccagataattaactgtggaagcacgatttttttttcactcctttggcctctaaatatgagag

SEQ ID NO: 219164 - DNA, 613 bp, Homo sapiens
acgacctttgtcaaaatgctagaaagaagagagactggctcttagaccaagggaatttgggatttgaaaggtcttccaattacaattctatagatttccttcccattagccttttcatgtgcatcaaatgtaaatggcaggctaaacctacaggatgaagagagttgaaagactgctgtctaaaaatgcccttttccaaatctgtgggtgcagaagcatattgaaaagcagctacccagcctggcggtgtggcacatgcctgcagtctcacatacttaagaggctaaggtgggaggactacttgagcccaggagtttgaggcttcagtaaactatgatggtgccacaacagtccagcctgggaaacagagctggaccacatttccaaaaaaaaaaaaaaaaaaaaaaaaaagtagttacccaggtaaggtggatgatcaagtacacccagtgagaagcacacaaaccttaccctttgcccaactctgycccttacctggcccatttctggtctctagaggaggatcagttagggggtgtgacccaagttacccagataattaactgtggaagcacgatttttttttcactcctttggcctctaaatatgagag

SEQ ID NO: 219165 - DNA, 523 bp, Homo sapiens
tatataccaaagaatgcaattgccagatcatatggtaagcatatgtttagttttgcaggaatttgcaaaactgccttccacagtggctttaccattttacattcccagcagcaatcaatgagagttcctgttgctccatatcctcatcagcatttgttggtgtcagcgtttggatttgagccagtctaatagatgtgtagtggtatctcatcattgatttaatttgaattccctrgtgacatatggtgttgagcaacttttcagatgcttatttttgctatctatatagcaaagggcagatacagacggtggactgcagagaaagagcttgctatgatgataggaagatgcagacagagatgatctcagggttaactgggcatcaactgttccttctcctgtcacataaaatgtgatctacctgagttttgactggaaacacagaatatctgattgtccataaatatttattactgaggcttgaggtttatgtacgttatgatcaaaaggtgatatcacccca

SEQ ID NO: 219166 - DNA, 570 bp, Homo sapiens
cttaaaagggggcaggagatagggacattcccttttccgcctttgatcattgctgtgtgtctccaygcaatgcctggaaatgtggtggtgactctaggaccatgagggaagccaacacacttagaaaactaaatggaaaacaggaggagtctgaacccttgaggacactactgagccactcaattgacagagcctgacctctagcacttggttatgtgatctaatacatgtccttatcatttaggccagtttatcttttgatacctgtagcaaaaatatctgaactcatagaatcattaagtgtaggaagcaataggttaaaatccttttcctctacaatggagctgcagcacgcatgaatttgaggtatgtaaattcacctgtaacaatctcttgtgttattaaataattctcaaacagactattataccctgcaccgacagaattatacatacaaaaccaagtgtactgtagtgtggatatcagagctggctacagaaaataacctgcttggaatatgatcatttgttcctgtgatcaggctagccatgggctctattccacaaatta

SEQ ID NO: 219167 - DNA, 557 bp, Homo sapiens
gtcttggtcagaggtggtggctcatgcctgcaatagcggcactttaggagaccaaggtgggcgactgcttgggctcaggagtttgagaccagcctgggcaacatagagagaccctgtctctacaaaaaaaaaaaaaaaaaaaaaatacaaaggttagccaggygtggtggcacatgcctgtagtcccagctactggggaggctgagacgggaggatcgcttgagcccagcaagcagaggttacagtaagttgagatcatgtcactgcactccagcctgggtgacagaggaagactgtctcaaaaaaaattttttttaattaaaaaaaatagataaatcttgaaaatcatgttatacaaaacaaatttagcttcagaaggctatatacagtaggattccactaacacaaaataatactctacatagctagtgagctcatgcaaatacagtatggcctggaagaatacacgccaacttcaatacactagttaacatggaggggaaagaggataatgggatcttagtggaatgaatatatacaggcttcaactgtaacca

SEQ ID NO: 219168 - DNA, 559 bp, Homo sapiens
gtggtggctcatgcctgcaatagcggcactttaggagaccaaggtgggcgactgcttgggctcaggagtttgagaccagcctgggcaacatagagagaccctgtctctacaaaaaaaaaaaaaaaaaaaaaatacaaaggttagccaggcgtggtggcacatgcctgtagtcccagctactggggaggctgagacgggaggatcrcttgagcccagcaagcagaggttacagtaagttgagatcatgtcactgcactccagcctgggtgacagaggaagactgtctcaaaaaaaattttttttaattaaaaaaaatagataaatcttgaaaatcatgttatacaaaacaaatttagcttcagaaggctatatacagtaggattccactaacacaaaataatactctacatagctagtgagctcatgcaaatacagtatggcctggaagaatacacgccaacttcaatacactagttaacatggaggggaaagaggataatgggatcttagtggaatgaatatatacaggcttcaactgtaaccatcaactttataagaa

SEQ ID NO: 219169 - DNA, 511 bp, Homo sapiens
aaatgattggggcacaggctctgcagtttgcctcaatccctacccytgctttgctcatgtgtgtttcccatggagtaaccaactcatcttgggttggccccaggtggttctggccttaacactgaaagtctcatgtcctgggagccctctcggtcccagatgaactgagacggtcagttatcttggataccaacctggccccgataaacatagtggacaatattcatactgtatgcatctcctgctaagcacagctctaagcattgtaagtgggttaacttatttaatccttgcagcaactctatgaggcaggtactatgtcatcccagttttacaggtgagaaactgaggcacagtcagctgaagtatatgtagcctagaggactcagctataagttgggacttcagtctctttccctgggtggggtctaatccagggagtcagggcatcttattttaggtccatgcaagaggaggaaactgactgatctgcttctaatctgcttatcac

SEQ ID NO: 219170 - DNA, 540 bp, Homo sapiens
aataaaaaaaccaaaatgtaagtttatatatataaacttacacaaatatatttatataaaaatttatacaaatacatataaatttatgtatataaagctattatttatatgtgtcctttcaattatttatatataaaaagtcttcctctcatttatataattatatattatatattataaattgaacgtttatagaatttgatataatcaatcaatcctctcaatcagacatttagatataataataatctatcctctcagacacttaatatatatataaatgcctgattgagagaaagactttttaagcctaaaagtgaaggaagaaagcamcaaagagaaaataatgatttgcctgcaaaaatatgaaaaatacctttacttcaaaaacagcaagctgacttagaagacaaaccactcaatttgtaaaatatatgaaaaataagagactaatatagaaagtttatacagagactatataattgatataaccatttagaaaaacgggcaaaagacaaaaatagtcacctcaaaaaagaa

SEQ ID NO: 219171 - DNA, 603 bp, Homo sapiens
ggtttaaactatacttcttttcaaattatatgattagctctctggaaaacccaagagaatcaactgaaagtccatcagaactagaaagtaagtttaataaactagatagttataaataaatatatgaaaatcaaatagctttccaacatactgttaataactacttagaaaatattataaaaagatcccattcactagtaataaaatgacaaaatatctggaaataagcttattaagaaaactgtagayaacacatgaagaaagctaccaaatattatggaaagacaaaactagactaaaaaatggagatttcatgtctgcatgagaagatctaatagtaaatatgagaactcttaccaaattattatataatattaatacaatcctcccatttggatttgttgtagaacttgagaaaaattctacaagcatcctaacatctagtacagtttctggcaaacaataagcacccatttcatggaacaaatgaagaaataatcaggaaacaacttaaaacaaaatgttttgagggaggatttatattatcacaagagtaaaaatgtatcataaagctttgataattacattatgtattaaaagttt

SEQ ID NO: 219172 - DNA, 399 bp, Homo sapiens
gatcataaacgcttattgttgtttcaagctgttagggtaattttttatgcagtaataaatgagaaacacacacatggcaaatatatactcagtattttcctctgtatgctgtcaaaagttttactttccttttaatttttttcctttttccttctaatttacactttaaataatctgaaattacctggataaaactttttyttccccaaatgatgaactagttaggaattttagacacacacacacacacacacacacacacacacacacacacacattttttctcccacatccctccgtaagcccccaagaattagataatacattttaaaaaaataatatgcattattcatgttattatgcttatggaacaattactcacaattacgtagaacatgt

SEQ ID NO: 219173 - DNA, 477 bp, Homo sapiens
tattcaattaaaacatgaaattttaaaaactgagtacaaataaaatcctacaaattataatcgagtatagatacatgacagatagacatagatagatagatagatagatagatagatagatagatagacagatagttagttagtcacctttcctttgtaattttctgcaagcatattgcaaagtgttgttttccctgaatattgaggtccaagtatgaatactttacatggtggtcctggcataggtggaagcagatagggacgtgggttcaayaaaaatggttttaatgcttcttctgatgaaagacagtagattttacctagaaaacttaaaatatgccatattagtaaacaactgaaaagatgtatgaggaagatttaaaattaagttctgaaaatcttacttacctcacagaataatctggtaatcctgaataaatgttaccatcttttaaattcacaggacatgtacgtccc

SEQ ID NO: 219174 - DNA, 569 bp, Homo sapiens
gctcaccacaacttccgtctcccaggttcaagtgattctcctgcctcagccttccgaatagctaaactacaygtgtatgccaccatacttggctaattgttgtatttgtagtagaaacaggatttcaccatgttggccaggctggtctcgaactcctgacctcaagtgatctgcccaccttggcctcccaaagtgctgggattacaggcatgggccaccgtgcccagcctattacatgttttaaggtcataaaactgctacttctggaatatttcttaaacttgcttgatttgtctaaattgagctaaagctgtaaggtctggctgctgggctccctgaaaccttgcacatatcttactgtatgactgtatttcgttttgagtctctggattctggggtttggacagatgaccatagtgaggcctgcagaaatatgcatgtcctcagtgtttggactgccagctgcaagcaagccaaacccaatatggccccatcatccctggctcagctgtgctacctggccatgctggaaggggtttgatcttccaggaatttgcttcacagctctt

SEQ ID NO: 219175 - DNA, 569 bp, Homo sapiens
gctcaccacaacttccgtctcccaggttcaagtgattctcctgcctcagccttccgaatagctaaactacatrtgtatgccaccatacttggctaattgttgtatttgtagtagaaacaggatttcaccatgttggccaggctggtctcgaactcctgacctcaagtgatctgcccaccttggcctcccaaagtgctgggattacaggcatgggccaccgtgcccagcctattacatgttttaaggtcataaaactgctacttctggaatatttcttaaacttgcttgatttgtctaaattgagctaaagctgtaaggtctggctgctgggctccctgaaaccttgcacatatcttactgtatgactgtatttcgttttgagtctctggattctggggtttggacagatgaccatagtgaggcctgcagaaatatgcatgtcctcagtgtttggactgccagctgcaagcaagccaaacccaatatggccccatcatccctggctcagctgtgctacctggccatgctggaaggggtttgatcttccaggaatttgcttcacagctctt

SEQ ID NO: 219176 - DNA, 561 bp, Homo sapiens
tctcagctcaccacaacttccgtctcccaggttcaagtgattctcctgcctcagccttccgaatagctaaactacatgtgtawgccaccatacttggctaattgttgtatttgtagtagaaacaggatttcaccatgttggccaggctggtctcgaactcctgacctcaagtgatctgcccaccttggcctcccaaagtgctgggattacaggcatgggccaccgtgcccagcctattacatgttttaaggtcataaaactgctacttctggaatatttcttaaacttgcttgatttgtctaaattgagctaaagctgtaaggtctggctgctgggctccctgaaaccttgcacatatcttactgtatgactgtatttcgttttgagtctctggattctggggtttggacagatgaccatagtgaggcctgcagaaatatgcatgtcctcagtgtttggactgccagctgcaagcaagccaaacccaatatggccccatcatccctggctcagctgtgctacctggccatgctggaaggggtttgatcttccaggaatttg

SEQ ID NO: 219177 - DNA, 569 bp, Homo sapiens
gctcaccacaacttccgtctcccaggttcaagtgattctcctgcctcagccttccgaatagctaaactacatgtgtatgccaccatacytggctaattgttgtatttgtagtagaaacaggatttcaccatgttggccaggctggtctcgaactcctgacctcaagtgatctgcccaccttggcctcccaaagtgctgggattacaggcatgggccaccgtgcccagcctattacatgttttaaggtcataaaactgctacttctggaatatttcttaaacttgcttgatttgtctaaattgagctaaagctgtaaggtctggctgctgggctccctgaaaccttgcacatatcttactgtatgactgtatttcgttttgagtctctggattctggggtttggacagatgaccatagtgaggcctgcagaaatatgcatgtcctcagtgtttggactgccagctgcaagcaagccaaacccaatatggccccatcatccctggctcagctgtgctacctggccatgctggaaggggtttgatcttccaggaatttgcttcacagctctt

SEQ ID NO: 219178 - DNA, 569 bp, Homo sapiens
gctcaccacaacttccgtctcccaggttcaagtgattctcctgcctcagccttccgaatagctaaactacatgtgtatgccaccatacttggctaattkttgtatttgtagtagaaacaggatttcaccatgttggccaggctggtctcgaactcctgacctcaagtgatctgcccaccttggcctcccaaagtgctgggattacaggcatgggccaccgtgcccagcctattacatgttttaaggtcataaaactgctacttctggaatatttcttaaacttgcttgatttgtctaaattgagctaaagctgtaaggtctggctgctgggctccctgaaaccttgcacatatcttactgtatgactgtatttcgttttgagtctctggattctggggtttggacagatgaccatagtgaggcctgcagaaatatgcatgtcctcagtgtttggactgccagctgcaagcaagccaaacccaatatggccccatcatccctggctcagctgtgctacctggccatgctggaaggggtttgatcttccaggaatttgcttcacagctctt

SEQ ID NO: 219179 - DNA, 536 bp, Homo sapiens
cccaggttcaagtgattctcctgcctcagccttccgaatagctaaactacatgtgtatgccaccatacttggctaattgttgtatttgyagtagaaacaggatttcaccatgttggccaggctggtctcgaactcctgacctcaagtgatctgcccaccttggcctcccaaagtgctgggattacaggcatgggccaccgtgcccagcctattacatgttttaaggtcataaaactgctacttctggaatatttcttaaacttgcttgatttgtctaaattgagctaaagctgtaaggtctggctgctgggctccctgaaaccttgcacatatcttactgtatgactgtatttcgttttgagtctctggattctggggtttggacagatgaccatagtgaggcctgcagaaatatgcatgtcctcagtgtttggactgccagctgcaagcaagccaaacccaatatggccccatcatccctggctcagctgtgctacctggccatgctggaaggggtttgatcttccaggaatttg

SEQ ID NO: 219180 - DNA, 536 bp, Homo sapiens
cccaggttcaagtgattctcctgcctcagccttccgaatagctaaactacatgtgtatgccaccatacttggctaattgttgtatttgtagtagaaacaggatttcaccatgttggccaggctggtctcgaactcctgacctcaaktgatctgcccaccttggcctcccaaagtgctgggattacaggcatgggccaccgtgcccagcctattacatgttttaaggtcataaaactgctacttctggaatatttcttaaacttgcttgatttgtctaaattgagctaaagctgtaaggtctggctgctgggctccctgaaaccttgcacatatcttactgtatgactgtatttcgttttgagtctctggattctggggtttggacagatgaccatagtgaggcctgcagaaatatgcatgtcctcagtgtttggactgccagctgcaagcaagccaaacccaatatggccccatcatccctggctcagctgtgctacctggccatgctggaaggggtttgatcttccaggaatttg

SEQ ID NO: 219181 - DNA, 549 bp, Homo sapiens
agatctcagctcaccacaacttccgtctcccaggttcaagtgattctcctgcctcagccttccgaatagctaaactacatgtgtatgccaccatacttggctaattgttgtatttgtagtagaaacaggatttcaccatgttggccaggctggtctcgaactcctgacctcaagtgatctgcccaccttggcctcccaaagtgctgggattacaggcatgggccacygtgcccagcctattacatgttttaaggtcataaaactgctacttctggaatatttcttaaacttgcttgatttgtctaaattgagctaaagctgtaaggtctggctgctgggctccctgaaaccttgcacatatcttactgtatgactgtatttcgttttgagtctctggattctggggtttggacagatgaccatagtgaggcctgcagaaatatgcatgtcctcagtgtttggactgccagctgcaagcaagccaaacccaatatggccccatcatccctggctcagctgtgctacctggccatgctggaaggggtttga

SEQ ID NO: 219182 - DNA, 543 bp, Homo sapiens
cccaggttcaagtgattctcctgcctcagccttccgaatagctaaactacatgtgtatgccaccatacttggctaattgttgtatttgtagtagaaacaggatttcaccatgttggccaggctggtctcgaactcctgacctcaagtgatctgcccaccttggcctcccaaagtgctgggattacaggcatgggccaccgtgcccagcctattacatgttttaaggtcataaaactgctacttctggaatatttcttaaacttgcttgatttgtctaaattgagctaaagctgtaaggtctggctgctgggctccctgaaaccttgcacatatcttactgtatgactgtatttcgttttgagtctctggattctggggtttggacagatgaccatagtgaggcctgcagaaatatgcatgtcctcagtgwttggactgccagctgcaagcaagccaaacccaatatggccccatcatccctggctcagctgtgctacctggccatgctggaaggggtttgatcttccaggaatttgcttcaca

SEQ ID NO: 219183 - DNA, 482 bp, Homo sapiens
cctgggccctggcactaagcctgctacaccctgtgaaaggaaaatcmatctcaggccccaaaattaccaagccaagggaagagtcaagctaggtactgctcaggcaaacctgcctcccagtccactcctgaataagatggctacagagactaaaaagccactacctccctcaaaatttgcccatgaggaaattcctcatagacaaatgacagacaggacccaacgccatccctctgctcccctgagacaaatccatatctgatggcttcctctgccctattgttgatataaaaatacagattccctgagccagactaaattgtgtttcagtgggaagccgatcaaggtctcaaaagaatgcaacagtttgtctcttacctacttatgacctggaagtcccccacccccgcaagttgtcaagctgccccaccttacctgaccaaacaaacgtacatcttacacatattgattgatgtctcatg

SEQ ID NO: 219184 - DNA, 482 bp, Homo sapiens
cctgggccctggcactaagcctgctacaccctgtgaaaggaaaatcaatctcaggccccaaaattaccaagccaagggaagagtcaagctrggtactgctcaggcaaacctgcctcccagtccactcctgaataagatggctacagagactaaaaagccactacctccctcaaaatttgcccatgaggaaattcctcatagacaaatgacagacaggacccaacgccatccctctgctcccctgagacaaatccatatctgatggcttcctctgccctattgttgatataaaaatacagattccctgagccagactaaattgtgtttcagtgggaagccgatcaaggtctcaaaagaatgcaacagtttgtctcttacctacttatgacctggaagtcccccacccccgcaagttgtcaagctgccccaccttacctgaccaaacaaacgtacatcttacacatattgattgatgtctcatg

SEQ ID NO: 219185 - DNA, 482 bp, Homo sapiens
cctgggccctggcactaagcctgctacaccctgtgaaaggaaaatcaatctcaggccccaaaattaccaagccaagggaagagtcaagctaggtactgctcaggcaaacctgcctcccagtccactcctgaataagatggctacagagactaaaaagccacyacctccctcaaaatttgcccatgaggaaattcctcatagacaaatgacagacaggacccaacgccatccctctgctcccctgagacaaatccatatctgatggcttcctctgccctattgttgatataaaaatacagattccctgagccagactaaattgtgtttcagtgggaagccgatcaaggtctcaaaagaatgcaacagtttgtctcttacctacttatgacctggaagtcccccacccccgcaagttgtcaagctgccccaccttacctgaccaaacaaacgtacatcttacacatattgattgatgtctcatg

SEQ ID NO: 219186 - DNA, 482 bp, Homo sapiens
cctgggccctggcactaagcctgctacaccctgtgaaaggaaaatcaatctcaggccccaaaattaccaagccaagggaagagtcaagctaggtactgctcaggcaaacctgcctcccagtccactcctgaataagatggctacagagactaaaaagccactacctccctcaaaatttgcccatgaggaaattcctcatagacaaatgacagacaggacccaacgccatccctctgctcccctgagacaaatccatatctgatggcttcctctgccctattgttgatataaaaatacagattccctgagccagactaaattgtgtttcagtgggaagccgatcaaggtctcaaaagaatgcaacagtttgtctcttacctacttatgacctggaagtcccccacccccgcaagttgtcaagctgccccrccttacctgaccaaacaaacgtacatcttacacatattgattgatgtctcatg

SEQ ID NO: 219187 - DNA, 533 bp, Homo sapiens
tcgggaactccagggccaggcacatgcctagctgtccctgtgtctccagcacacgagaggaggcatgtggcttctccaggctcaaaaamacaccgagtcttcctgctgccgggtctttgcttcccttgcttcctcactaccccgcagcgcccagggcagggccaacgcctgcactggggcccacaagcctgctctttgtggcgctcactgccgtccgtctgatcatcccttgaagggggacactccgagttgtgcctgcccccctacatactcccagcgcagaacctggaaccagcagacgctcaaaaatgtcaatgttgaatgaatcgacactggccgtgttggatgactaattagcaaagtcatctcaaaacagagatgtgagttggggacccagtgagcattcctcaaagtctctaaagaaacagatctcatttctgagacctggcccagctagagctgcctgatatgaacctgggatttcaagagctcctgtttcatccttaaaatgcacttgaatttcactttgtaat

SEQ ID NO: 219188 - DNA, 554 bp, Homo sapiens
ttagccgctttctctccatcttttatgctaccaccttaattcagacactcgtcattccacacttacacaactaccacactctcctcatgggtctccctggttctcctttcttcctctctatcctctgtaccctgtcaaagtgacctttccaatatgcaaatcactcctagtcttaaaayctttcaatggctccctgttgcctacagaataaagttcaaacttcttagcatgacatgtgagatactctgagatcttaccttgtcttcccctctggcttgatttctccatcttctccagcggcccccactgcacaacctctgaacattttcccctgcctctaatcatcctgtccattctaccttctaaatacctcccttcaatttattcactgacctgcatctctacagctaccaatctcattcacccctggcctgagcaacccacacatccttctctctaactgcacactgctgtgtccagtccattttctaaacatcagcaagtgagcttttaatcatagaaatgcttgcctcctctcctcctggcctaaaatc

SEQ ID NO: 219189 - DNA, 405 bp, Homo sapiens
ggcccccactgcacaacctctgaacattttcccctgcctctaatcatcctgtccattctaccttctaaatacctcccttcaatttattcactgacctgcatctctacagctaccaatctcattcacccctggcctgagcaacccacacatccttctctctaactgcacactgctgtgtccagtccattttctaaacatcagcaagtgagcttttaatcatagaaatgcttgcctcctctcctcctggcctaaaatccctccatggaaacaagttgaggtttctgcaagatctggcctgtargtatttctttaccctctcccagcaccactccctgcactcagacccactgtcaagcactttcttatcccagagtttgtgttcctacttacctggggacactttct

SEQ ID NO: 219190 - DNA, 517 bp, Homo sapiens
tttgagtggaaatgttaactaaggacatttcactatacagaacttaagattcaaacagctaaatctgtttggtatgtatatgttggtatatataaaaaattcctaggattctcactgaacattttctcaaagaatatttcttggggttcagatttcatgcctcactgacataaaggaactgcccgcctcccacatcatgcatgcgcagaagattcagaactttaccccatccacaataacctaacatttgagcacaccagaatcaagaacaaaactgcactaaaacacaccacttaggttcccatcctaagggaaccttagggctgctctctggtcccatccttcttgcccaattctcagctccctacccctaaagtgataggataaggtttcatagccaagagatatattttatctcattttctttatagccgagccattatttcctacagaattattagtctacctccttyatcactctcagcccccaattccctatttccaattttacccaaca

SEQ ID NO: 219191 - DNA, 458 bp, Homo sapiens
ttcataatccgcaaagacatgtgcctcctttcagtcatttgtgaaaaagcatctttgcctttgttgagcagcacttggtatatctttgctgagtagccctgtgtttctgcccttggctacagagattacccaactgcactcacagttctccaggtttacacagtttctccaactgtgttgaagtttctgcaagtacatgcgaagttacacagagatgtgtaaatttccctgattgtatgcaaaaycatacagatgtgtacagttttcaccacatgtgggtgaggttctccaccatttgaataggcccccaactggcctgtctcttcctcatcaggagcttctctcacttggattcaggaacccatgcaaagggttcccttttatccttgctttattgtctacacctgcattttcctgcctggtgcatgccctttgtgaaaatagctatagtactcact

SEQ ID NO: 219192 - DNA, 300 bp, Homo sapiens
cagatgaggaatttgaggcttaacagggttaagtaatttgctcacatctgctgaaggaaagcctagacttgcagtcaggcatccagaatactttcatttataacacacatcctgttttacatggatattgaagatgtgggattattttttagccccagtttrtggacatctcttgccagagttattttcctaagaacctagaatcatttgtttgactgtatatcaggcttctgtggatgcaaagcccactagcaccatgcactcaacatttccaaaactaaacccaacatctgcccactc

SEQ ID NO: 219193 - DNA, 644 bp, Homo sapiens
ggcacctgggacagaggcagcaagactctctctgaatccttatgtgcccttagcacaaaaaagagcacctcgttggtctgtagttgtagtaggggtctcagctgctccacatgagaaacctgttgttgggctgttctgaattcaattaccccagacatggccccttttatttctgtacctaccagaatttcaccttctgaattttttatcctctgtttatctctgttgtgttgaaggaagaccacacaattcaagaacacagtgggggattacctacaccrtgcgctttcaaggagaaaacagaattttttaccttaaagttcctaccaatgaatatactagcatctgggatttcctacctctttgggtattgttactttccaatgatctttttatcttttatctatctattgttcttcctacttttcttcctatcatatctatcttaactgaataatgtctaagaaagatgacctctttagccaacatatatgatgtttagcttccacggaaataatttatcacatgaggagaaatggaagacatgacaatggcatttttaaaatagaagaggaggcagtgtgaaggcatgagaattcagaatgaagggggggaagagaaagaaagagagagagagagagatt

SEQ ID NO: 219194 - DNA, 630 bp, Homo sapiens
gaaaggtgagattaatacatgtactaatattactactactgtatcaacacagaaatagttgtaatgctactgattgcatgagagtaattttagtgttccactttcaattatggtggtgcctcttactttaagatagatatttttaaatcatggaaaaagccattaaaagtggctttccaagtcttctatgaaattgtatggtgttaacattttttaaatgtcctttcaaattttattgatgttattaaatattagaaaataaatagtatttaattattgttataattgctagaattatatatatatatataaattaaaacaatgttctggtggagtctgggaagttggcggtaatggtgccataaytcttgaatctacccaaatcccacagaagctacatatcaaaaacttaagctcgtgggtatacagtcatgtacctgataaggacattttggttagtgacgaactacgtatgtgaccgtagccccataagattataatattttattttttctgtatattttctctgttaaaatatgtttcaatatgcaaatacttcccattgtgtttcaacaactgcccacagtattcaggacagtaacatgctatacaggtttgtagcctaaaaat

SEQ ID NO: 219195 - DNA, 566 bp, Homo sapiens
gtttttatagtaactctttttttgctttgatcacttacctcgattctcttgaaagcagttaattttaaaatgtagctgtggtcactgttttttgttttttttgtttgtttgtttttgtctctcagccttcaactattctcttttttggctacaatttctattatacctgttctaatggctacagtagtgagggagaaaggaaaatccccatgggaggcagtcgcaagtgggtgcctgtttttcacctttgcctgtagtgaagcattgtagtatagtgtctgggaacagggacccaaggcccaggcttcctggattcaaatcccaaactctttcccactgctggtattaccaacctggcttagtactcaacttcatcaagatcargtttctgggaaatgagggtaagccaaatggtattgggcctctgcaaggatacagaacccttctaaaccctcttctttgcaggaagggtcagataaatattgcttttgtggtgaatggtggtgtcagaaaggtaaatcagaggtgggcatgagttcacgatcacagatctcactgtaagtacc

SEQ ID NO: 219196 - DNA, 587 bp, Homo sapiens
gccatcttccagtcccaccatcaccatttccccactcttctaaggcaactgctttccattagtttgcctgttcctgatatttgctcaacatctctaaataacctgcttagatgacagctacttgattttttcagttaccggcattctccattgaattcacagtatagaagaggagggtttacgtctcttttagccccmccttctcactacccagcccccatcttcccctaaagaattataagtttggttagacaatattctgcttagtttattattactatacaaccactcttcatagttgagccattaatacacaatggttcatcttctttggagcacagttctgtgtttaccttgtggcttataattgtcttttttattgtttgcttgcttagttttctatgttctattcttagagctctccaatcttctttctgtacgttcaaaattatcaactgtttcatcaattttgtccttctggcaacattttttctgtagtcttctgagtcactccagtctggctaggttgttctctaagcctgctgtaaaagtttcattttggaatttccttttatcatccttctaaa

SEQ ID NO: 219197 - DNA, 587 bp, Homo sapiens
gccatcttccagtcccaccatcaccatttccccactcttctaaggcaactgctttccattagtttgcctgttcctgatatttgctcaacatctctaaataacctgcttagatgacagctacttgattttttcagttaccggcattctccattgaattcacagtatagaagaggagggtttacgtctcttttagcccccmcttctcactacccagcccccatcttcccctaaagaattataagtttggttagacaatattctgcttagtttattattactatacaaccactcttcatagttgagccattaatacacaatggttcatcttctttggagcacagttctgtgtttaccttgtggcttataattgtcttttttattgtttgcttgcttagttttctatgttctattcttagagctctccaatcttctttctgtacgttcaaaattatcaactgtttcatcaattttgtccttctggcaacattttttctgtagtcttctgagtcactccagtctggctaggttgttctctaagcctgctgtaaaagtttcattttggaatttccttttatcatccttctaaa

SEQ ID NO: 219198 - DNA, 391 bp, Homo sapiens
accgtctgccttctccttactatcctggccgtttgcatcaaatatgtctttaaaaatgaggcaggtgagtttcacagatgtccatgactgtctttaactgttcttggtttacacacaggtgggagtctttagtccttgtgctgatgtatcttatctacattgtcatcatgaagtaagtaaaatttttcatttcttatccaaaactgtttcttgcattccacattatgtgatgatgtgggaagaggattggggtgggtatctgactggtttttcagtgtgtatcatcacagtcacttggctccctgccagactgttgtgagtcactgtrattttgattagtatcaattgtagtgacccttccagcccatatttgatgatagactcaaagctt

SEQ ID NO: 219199 - DNA, 426 bp, Homo sapiens
gattagggtctccagagagacagaattaagctgttccggaggcctgtggggaccggccccagagtggacgtgtggacagcagcaggtgggcctgggcctcctggctgctgcttccgagtcctgggaagaggccaagtcacagtaactgctgagcctcaatgtccccatccaaagagtggggataaggctgcacctgcctggggccaccgtgaggagtaatggctcacacacacagcctggcagccgcttctgtcccgggmctgccatctgctgggggcctgtcctgcatgggtgagtggggaagagaggaggctcccagcagaatcctggcctgcatcctggcaggggaggggtagtgctgggagccggggcagggatgaggagagggggcagagctgggtcctggctgctcccccgctcccccag

SEQ ID NO: 219200 - DNA, 538 bp, Homo sapiens
ccagcatggccggttgagaggtctgcatggcacgcagtggccggcccgggggtgcaaccccatcccctctctggggtccctttgcagggcagccttaggatccattcactgtggccccagggcccagggcgacctgtgaccctgcggagccacctgcaggagtcccagcagatgagggcctctggctgcccctcaggggcttgttgggtcccacaagaacttccagggcctcggagctccagccgggccacagagctgggaaccttgagtggctgggaaccctgaggagctgggagagccaggctgagcaagacaagcctgggcgactcacctggggcaggaatgtggattccatcactccgcagaggctttcaagcaaaacacagcctcgtctctgggcctgtttctgccgtgcgggcacgtccagcccgaygctctcagaagcagctgggatgggctcggggaggtgggggtggagcaggagtcccagccgccttcctctggggcccatcccaggctcccggctgggcgccagcag

SEQ ID NO: 219201 - DNA, 569 bp, Homo sapiens
gatggagagagttactataatgtagggatgctactcagaggtacgacaacatcttcttagaaagacagacagcacaatagtagcagctcagacttcagccagttctgtctgtgttcaaatcccagcttggccatttatacctgcgtggactctggaagggaaacctgtccacgcctcaagttcytcattgtgaaactggatgatagcaataatacttacttcttaaggaggtaaacaagttaataaatgtaaaatgcttagaatcatgcattacatgggtaaaatgtttgcagtgggctaaatgtttgtgtctgcccccaaccaaattctaggctgaaacccaaattctcaatgtaatggtatttggaggcaggaccctttgggaggtgattaagtcgtgaggatggaatcctcacaggtgggattgatgtccttataagaagagacatgagagagatgatctctctctgcttgcctccaagtgaggatattgctaaccaagaagagagccttcaccacacactgaatcagccagggccttgatcttggactccccagcctccaggact

SEQ ID NO: 219202 - DNA, 633 bp, Homo sapiens
gggggaaacatgggaagaatacctacccgtacatgaggaggctctgctcaattaaagaactagtctgaccataatttacttcagtctgattattgttattattattatttgtgagatgaagtcttgctctgttgcccaggctggagtgcagtggtgccacctcggctcactgcaacctccgcctcctgggttcaagcaattctcctacctcagcttcccgagtagctgggactacaggtgtgtaccaccacacccggctaatttttttgtatttttagcagagatggggtttcaccatgttggtcaggctggtctaactcctgaccacaaatgatctgcccagctcagcctcccaaartgctgggattacaggtgtgagccaccacgcctgggccagtttgattacttttaattgtcgtgctttttcttcctagtaattaaatgtgtctaggaatagctttgattacctgggaatagaaggttgtgatgcaagaacagcagctaagacacccgtcttttgtgtatgttcatcaacttctggccttaattcatcttctgattttaatcttcttcgaacaggtttaggtggtggagcaagtggtgttgtgcctttgctctttaagacaagaattc

SEQ ID NO: 219203 - DNA, 633 bp, Homo sapiens
gggggaaacatgggaagaatacctacccgtacatgaggaggctctgctcaattaaagaactagtctgaccataatttacttcagtctgattattgttattattattatttgtgagatgaagtcttgctctgttgcccaggctggagtgcagtggtgccacctcggctcactgcaacctccgcctcctgggttcaagcaattctcctacctcagcttcccgagtagctgggactacaggtgtgtaccaccacacccggctaatttttttgtatttttagcagagatggggtttcaccatgttggtcaggctggtctaactcctgaccacaaatgatctgcccagctcagcctcccaaaatgctgggattacaggtgtgagccaccacgcctgggccagtttgattayttttaattgtcgtgctttttcttcctagtaattaaatgtgtctaggaatagctttgattacctgggaatagaaggttgtgatgcaagaacagcagctaagacacccgtcttttgtgtatgttcatcaacttctggccttaattcatcttctgattttaatcttcttcgaacaggtttaggtggtggagcaagtggtgttgtgcctttgctctttaagacaagaattc

SEQ ID NO: 219204 - DNA, 572 bp, Homo sapiens
gtgagtggatctgtgtggtatgattataaggaagtcaggaaaactgtaagagataagggagggtggggccagatgaaattctataggttaacaygtcgctaacacaggccttctaaagcttgttcagataccatcagggtgcagaatcctgcaccaggtatcatatgcagggagatagaaaacaagtagaacatggctgggcgtggtggctcacgcctgtaatcccagcactgggaggccgaggcgggcagatcacaaggtcaggagatcgagactatcctggctaacacggtgaaaccccatctctactaaaaatacaaaaaattagctgggcgtggtggtggacacctgtagtcccagctactcgggaggctggggaaggagaatggtgtgaacccgggaggtggagcttgcagtgagctgagattgtgccactgcactccagcctgggcgacagtgtgagactcggtctcaaaaaaaaaaaaaaattaaagaaaagaaaacaagtagaacacatggcccctttcctcacagggcattgtgatcacagtaataccaataaaggagcaaag

SEQ ID NO: 219205 - DNA, 572 bp, Homo sapiens
gtgagtggatctgtgtggtatgattataaggaagtcaggaaaactgtaagagataagggagggtggggccagatgaaattctataggttaacacgtcgctaacacaggccttctaaagcttkttcagataccatcagggtgcagaatcctgcaccaggtatcatatgcagggagatagaaaacaagtagaacatggctgggcgtggtggctcacgcctgtaatcccagcactgggaggccgaggcgggcagatcacaaggtcaggagatcgagactatcctggctaacacggtgaaaccccatctctactaaaaatacaaaaaattagctgggcgtggtggtggacacctgtagtcccagctactcgggaggctggggaaggagaatggtgtgaacccgggaggtggagcttgcagtgagctgagattgtgccactgcactccagcctgggcgacagtgtgagactcggtctcaaaaaaaaaaaaaaattaaagaaaagaaaacaagtagaacacatggcccctttcctcacagggcattgtgatcacagtaataccaataaaggagcaaag

SEQ ID NO: 219206 - DNA, 534 bp, Homo sapiens
tgcataggttacatgcaaatactacaccattctacatatcagagagctgagcattcacagattttggtacccatgggggtcctggaaccaattccctaaacatattgagggatgactgtattacaatttcacattagatacaaacataacttacatatgtgcagaatgagaactaaagttgacaatgaatctgttaatcacagacatttgtggaatagtgagaatatgaataattatttcatttttatctattacatttctacaataaatacgttacttctgtaatggacaaaaaggtcgcttttaaagaacaaattagaaatactttaaataaaagtaattttaaaattgttaatgtgaaaattaaaaatttgacatgggaataaaatgtgcttatacaataataayaattatgaaattagccaaggatcccagctttttctgcagaggaaacatttattttcaatttcctcaaagtctcatgaagcacaagagaatcccagaaatagactaagagttgtgacagaaaaaaga

SEQ ID NO: 219207 - DNA, 581 bp, Homo sapiens
ctttttaagtagatagagctagtatataaaatacatttgtttaaaaaatgtaaacaaatatgatggtaaatgcccttcacctatttttacttaaratatttaatttataggacacaaatactgttggagtgacattattaaagacttctgaacttcaaactataatagtaggagatcacacttgagaagagttccacctgggaaattgttcttctgatatgaagtcccttctttaaacaaaatgctccattaaaattttacaaatgaatctgtgaagtgtaggactgtccacaatatgaaattatttcaaaatcatctttaatattaaaacaagtataaaattatattttctttaaaaaaagtaaaatatagaaaatgcatatagcataaaatgattttggctaagtataatgccacagaaaataaatatacttaaaacactcttgaatacttaattcaatatcctttgtaagaaatataaaattcagggagtatgttaaggtttttgttctaaaagttttaacacgtgaaaaaatatatgtatataaaattctagtatgaattttcctcttaaaaaattt

SEQ ID NO: 219208 - DNA, 581 bp, Homo sapiens
ctttttaagtagatagagctagtatataaaatacatttgtttaaaaaatgtaaacaaatatgatggtaaatgcccttcacctatttttacttaaaatatttaatttataggacacaaatactgttggagtgacattattaaagacttctgaacttcaaactataatagtaggagatcacacttgagaagagttccmcctgggaaattgttcttctgatatgaagtcccttctttaaacaaaatgctccattaaaattttacaaatgaatctgtgaagtgtaggactgtccacaatatgaaattatttcaaaatcatctttaatattaaaacaagtataaaattatattttctttaaaaaaagtaaaatatagaaaatgcatatagcataaaatgattttggctaagtataatgccacagaaaataaatatacttaaaacactcttgaatacttaattcaatatcctttgtaagaaatataaaattcagggagtatgttaaggtttttgttctaaaagttttaacacgtgaaaaaatatatgtatataaaattctagtatgaattttcctcttaaaaaattt

SEQ ID NO: 219209 - DNA, 605 bp, Homo sapiens
tttaattggctcacagttccacatggaagcctcagaaaacataatcatggtgggggggaaagcaggcacatcttatatggtggcaagagagagagsacatgaaggaggaactgccaaacgcttataaaaccactggatcttgtgagaactcactatcaggagaacagcatgggggtaccatccccatgatcaaatcacctccctccaagcccctccctcgacacatgggaattatggggattacaatctgagatgagatttgggtggggacacagggccaaaccatatcagtagggtaattcttcactaaactgacataacaagattcttctgaaggcaggccagggtgattagatgtcacctgggacatggtgggggatgggtacaggtaatttgattagatatggagggtggaagactctgtgtaaatcgacttgacaggattcttgcccaaactggactctaccgcaaggatggagacagaagcccaaggtgggtctagtcaagcagagggctcagaggagccttattaaaattttgtcaaggagaaaatctttgttagtcaatacaagatatgccttttaatgtagaactattcaagaatt

SEQ ID NO: 219210 - DNA, 588 bp, Homo sapiens
tggagtaactcttaacctatgggttctggggcatggagaaggaggtgaacacctcaggagccagccaagcggaatcagagaaccagagrccacatgagccagcagagcacatctgaaccaggaaatgtgactgctctctggagcagtgggtttcaaccttgtcagacgcagcttttttttttttttttttttttgagaaggagttttgctcttgttgctgcagtgcaatggcatgatctgagctcactgcaacctccagcccgccaggttcaagggattctcctgtctcagcctcccgagtagctgggattataggctcatgccagcacatctggctaatttttatatttttagaagagaaggggtttcgcccacttggccagactggtctcaaatccctgacctcaggtgatccacccgcctcagcctcccaaagtgctgggataacaggcatgagccactgtgcccggcccgacacagctccttttataacaaaaattttgtagtgtaccttaagtgaaataaatactataatttactccacacgtttttttaaaagtcagtataatgctctaaatatataagctt

SEQ ID NO: 219211 - DNA, 605 bp, Homo sapiens
agaagttgtatttgggtccagttagagaaaaggatcatcatgagacatgaaggaccatgagttaaggtcagatcttgagagggcttgatcaagctaagaaatgtgtacaactttatcacamgggacaataacaaatcactgaggggtactaggaagaaaaatataataaaaagtaagtggattgtggaggaggaaagttagaaagaccaagtgataaaacgaagacttggattaggctatgacgggtgaagatagaaaagaacggactgattcaagaacattttgaggatatacacagggtgattgctgtagattgttatagtattggtccctaatgattcatgcatcttccatccatgcttttggtaatacccacctatcttgcctctgaacttggctattagcaaccacacaagcagaggcttggaaagaactcatgcattgaggcttcacctcttgctcatgctggataccttgagaccatcaccaggaggctaagaccaggctagcttgttgtagatgtgttaagcccattatttcagctgataaccagttggtctggctagctattaaaaactgctagccagaaagaccccactgccaga

SEQ ID NO: 219212 - DNA, 456 bp, Homo sapiens
gaattcaactgtaaatccatttggtcctgtgcatttttttcttggtaggctatttattactgcctcaatttcagaactcattattcatctattcagggattcaatttattcctggttcagtcttgcaagggtgtgtgtgtctaggaatttatccatttttttctagattttttttttagttcatgtgcatcccagagattctggtatgttatatctttgttctcattagtttcaaataacttcttgatttattccttaattttattatttacccaagtcattcaggagcaggttgttcaattttcatgtagttctgtggtttttagtaagcttcttaatcttgagttctaatttgattgcactgtggtctgagagactgttrtgatttcagttctttcaaatttctacaacactcctcagcaggaatgttgtacttctgattatgtggtcaatttt

SEQ ID NO: 219213 - DNA, 451 bp, Homo sapiens
agacaaatactgtatggctctacttaaagaggattctagagtagtaaacatcatagagacagaaagtagaatggtagtggccagggacatggtagagggaagatgggagttattgttcaatgagtagagagtttcagtcttgcaagatgaaagagttctgaaggtggatggtggtgatggttacacaatgataccaatgtacttaatcccacaaaactgtacactcaaaaatggctgatatagtatattttatwtgtagtttaccacaataaaaatatgaacaaaaaccaattacaatatgaaataatgtgttcagagcaactttatgctttcaaagtaattatatagagaatattgttataatcttggaatatacacaaatttttaaaaaacaagatataaaaaggtctaaccataaaataaaaatcttcatcaaaagatacaatagaat

SEQ ID NO: 219214 - DNA, 436 bp, Homo sapiens
tctccaaaaattaattacccactcaaattttcattataatataaaatgtctgaattaatttaggaagaattggaatatttataatatctagcattcctatccaggcacatggtatgtcatttcacttgtagttttcttttatgcctgtattttttttttccaaataggcagtatgcttctcttattataactgttcctgaatattttgcatttcttctggctcatgccatttaaattttacratcttctaactttcttgtcttccacaaagactgttgctaccatctcaataaatctgtgagaaaattaagtcctacagaaaatgatttgaacaaccatttttcaattctctcaaggatggtgcttaatcaataccattctaaacactcatgcacggcagagtttattccttatattcagtggatgtcttagggca

SEQ ID NO: 219215 - DNA, 640 bp, Homo sapiens
ttattacaataaactttctatcttggtaaggtactagtcaagcacatagatctttaaaacaggttgtctcagaaaaaagttacatttacatttactgcctttgttttattgaatccaacctgaaaatagactttgctttattagtaaatactaatttaaaagcaattctgcttccttgatttctcctcttcatctctctggaacactagttcacaattaatttctcactaattatgacaagttatataattttcccagtaatctagrttatataatcatccatacaaagcggacattaaggtctgatgcttaaatggaaacatcttgataagcaaaattaagaaatcattttattcaataggtatcatgcatatttaaagaaacacagagaatttgtcttgaagatggtgtaactctaccttgtcaagccctttccagaataaacggagtggtaatatgcactgctctctttgatgccaatcccatagtaatgatacctagagcaaagacaggaaccagctctgtgttagtgaaggagatttttggaggggaaaaagagactaaggtataactgacataaccatgaataagaactgcaaaccctgatgacctttcttttctgacatttttcaggtaggca

SEQ ID NO: 219216 - DNA, 657 bp, Homo sapiens
ggaactgaacatttaaagttgctttgaatatgcatgtrtagaaactgccattctgtgaatggaaatgtgtgcttagctgatttcttttcatctaaagagccatagcgtgtctttttgctgtttgtttgcttattttattttttattttcttgtcctactacattatttttgtcattttatttctcctttttcttctttaaattttaagagaggacacaaatctcaattttatgccaagaaactccaaaacatgcacatatactttgcagtagatatatgctaatcatcgtttccaggacaaaggttcttcatttgtgaataaaaatgacaagagaggaaattcatttcaggtttccataggtgtttgctctactaatatgcttctttctgcacttgaagaaaatttttatggtgtcttagcgtctctacgaatcctatttttcaaatagaagtcattcaaatgatgttaatacatcagatccaagtttctgatgtgaaaaactataaacaacaatgaacttccaggtcattttgatggtacaagcacctttcttgcccatgtctcattctttgcactgtttctgaggctcagaactcagattttaaatgttagtagcgttctctgtacagaaaagtgccagaaaataaaatgaagca

SEQ ID NO: 219217 - DNA, 527 bp, Homo sapiens
tttatttatccaaatctttgttactacttttactactttatgtttatttacccaaaaattaattttaaaaaatwtaaatttaaattaaaaattaaattttaaaatttaatattttagtaggcataaaactaggatgttactttggtccatagtactctgaaaaattacctttttcatattatactgtagttgtccatttgtttgcttttctcccttcacaaggcagtaagatccttgaaataagaattttgccttaatttttgagtcctcaacattgagcatactgcttggtacgtaataggatcttttaaaaaatctgtgttgaacaaattaacaagaaaaggcagtgttaaaaggatgctttggttaagctttttcttccttgaaataggttgatacgctcataatgatgtacaaaactcactgccagtgtatcctggacaatgcaattaatggaaactttgaagaggtaagaatgacaaagaatgctttatttgaccctattatatatactttcatgttctgtt

SEQ ID NO: 219218 - DNA, 657 bp, Homo sapiens
ggaactgaacatttaaagttgctttgaatatgcatgtatagaaactgccattctgtgaatggaaatgtgtgcttagctgatttcttttcatctaaagagccatagcgtgtctttttgctgtttgtttgcttattttattttttattttcttgtcctactacattatttttgtcattttatttctcctttttcttctttaaattttaagagaggacacaaatctcaattttatgccaagaaactccaaaacatgcacatatactttgcagtagatatatgctaatcatcgtttccaggacaaaggttcttcatttgtgaakaaaaatgacaagagaggaaattcatttcaggtttccataggtgtttgctctactaatatgcttctttctgcacttgaagaaaatttttatggtgtcttagcgtctctacgaatcctatttttcaaatagaagtcattcaaatgatgttaatacatcagatccaagtttctgatgtgaaaaactataaacaacaatgaacttccaggtcattttgatggtacaagcacctttcttgcccatgtctcattctttgcactgtttctgaggctcagaactcagattttaaatgttagtagcgttctctgtacagaaaagtgccagaaaataaaatgaagca

SEQ ID NO: 219219 - DNA, 657 bp, Homo sapiens
ggaactgaacatttaaagttgctttgaatatgcatgtatagaaactgccattctgtgaatggaaatgtgtgcttagctgatttcttttcatctaaagagccatagcgtgtctttttgctgtttgtttgcttattttattttttattttcttgtcctactacattatttttgtcattttatttctcctttttcttctttaaattttaagagaggacacaaatctcaattttatgccaagaaactccaaaacatgcacatatactttgcagtagatatatgctaatcatcgtttccaggacaaaggttcttcatttgtgaataaaaatgacaagagaggaaattcatttcaggtttccataggtgtttgctctactaatatgcttctttctgcacttgaagaaaatttttatrgtgtcttagcgtctctacgaatcctatttttcaaatagaagtcattcaaatgatgttaatacatcagatccaagtttctgatgtgaaaaactataaacaacaatgaacttccaggtcattttgatggtacaagcacctttcttgcccatgtctcattctttgcactgtttctgaggctcagaactcagattttaaatgttagtagcgttctctgtacagaaaagtgccagaaaataaaatgaagca

SEQ ID NO: 219220 - DNA, 657 bp, Homo sapiens
ggaactgaacatttaaagttgctttgaatatgcatgtatagaaactgccattctgtgaatggaaatgtgtgcttagctgatttcttttcatctaaagagccatagcgtgtctttttgctgtttgtttgcttattttattttttattttcttgtcctactacattatttttgtcattttatttctcctttttcttctttaaattttaagagaggacacaaatctcaattttatgccaagaaactccaaaacatgcacatatactttgcagtagatatatgctaatcatcgtttccaggacaaaggttcttcatttgtgaataaaaatgacaagagaggaaattcatttcaggtttccataggtgtttgctctactaatatgcttctttctgcacttgaagaaaatttttatggtgtcttagmgtctctacgaatcctatttttcaaatagaagtcattcaaatgatgttaatacatcagatccaagtttctgatgtgaaaaactataaacaacaatgaacttccaggtcattttgatggtacaagcacctttcttgcccatgtctcattctttgcactgtttctgaggctcagaactcagattttaaatgttagtagcgttctctgtacagaaaagtgccagaaaataaaatgaagca

SEQ ID NO: 219221 - DNA, 516 bp, Homo sapiens
tcttgactaggaagtggacaggttttagaataattttctattatctttcaaagatatttatamaaaatagatgtcattatagtacatatgtatatgtatgcttacatatatgtataatatattttatgtatgtgcatatgtaaatattttatgtacaaatgtatttatatatacatatatatgtaataaaaaacttgctgaaacttgaaaccatgtctgaaattacaagtttgaaaaaagcagcaatataaaacactgaaagatattagccagtgggtgattcataaaagccagtcttaagagcaagatcaaaactgacaaagctttatctgtccttagagagggtagaaaaatgaagaccatgaagatataaatgtggtaatactaattcatatgtgtgaatggctgctccacactacttaaactagtccttcaatgtattttttgttgaatgaattaccaatttaataagctgaaccatgatgggagggaaagcatattttttagaaaagaagg

SEQ ID NO: 219222 - DNA, 526 bp, Homo sapiens
aagaacatagaaacaaagggctcagcacaaacattcagtttgtcatccagctttggccatattaactaagggtgaacatattgtacacattataacttaacttcgccattcccaggcrtatgcctgacagaaatatggtcatgtgtttatcaaaaattaagggcaataaatagtggtatattcacaaaatgagatattatacagcagtaagaaagaacaatctccagctgaacacaaaaacatggatgtatcttaaaaacacaatgttgagctaaggaagccagacatataagagtgcaaatggtatggtcccgttgatataatgtactaaataagtaaagtcaatcacctctgccaaaagtcaggatagtggtttctctgagctgatagtgacttgaaagggacacacaaaaaatttgtggggtgttggcaatgtctgcctcttgatcttgggactagttgcacagtatacctacttatcctaggtatacactctgtgaattttcacgaatacctacttatccta

SEQ ID NO: 219223 - DNA, 618 bp, Homo sapiens
acattcaatgggttattttacaatatgtgaattatatctctataaaacagttaaaagtcaaaaaacaaaacaaaaacaaaaagaagtgagggtcaggtgcagtggcttatgcctgtaatcccagcattttgggaggccgaggcgggtggatcacttgaggtcaggagttgaagaccagcctgaccaacatggcaaaaacctgtctctactaaaaatacaaamattagctgggtatggtgatgcatatacctgtaatcccagctacttgagaggctgaggcaggagaatcgcttgaacccgggaggtagaggttgcagtgagccgagatcgcaccactgcactccagcctgggtgacaaagtgagactctgtatcgaaaaaaaacttaaaaaataataataataaatgagagggttgctcagtagctagaagagtacaggaggtggcttatttttggggggggggtaaatgtcaagggggagactgcctctatttctgcctctctatgttctctctaattgtccaatgactaactccaatgtcaccatctctatgtctccttatccatgaaatttttctccatggcaaactaactttgttgagtgactacctcaacatt

SEQ ID NO: 219224 - DNA, 618 bp, Homo sapiens
acattcaatgggttattttacaatatgtgaattatatctctataaaacagttaaaagtcaaaaaacaaaacaaaaacaaaaagaagtgagggtcaggtgcagtggcttatgcctgtaatcccagcattttgggaggccgaggcgggtggatcacttgaggtcaggagttgaagaccagcctgaccaacatggcaaaaacctgtctctactaaaaatacaaaaattagctgggtatggtgatgcatatacctgtaatcccagctacttgagaggctgaggcaggagaatcgcttgaacccgggaggtagaggttgcagtgagcygagatcgcaccactgcactccagcctgggtgacaaagtgagactctgtatcgaaaaaaaacttaaaaaataataataataaatgagagggttgctcagtagctagaagagtacaggaggtggcttatttttggggggggggtaaatgtcaagggggagactgcctctatttctgcctctctatgttctctctaattgtccaatgactaactccaatgtcaccatctctatgtctccttatccatgaaatttttctccatggcaaactaactttgttgagtgactacctcaacatt

SEQ ID NO: 219225 - DNA, 571 bp, Homo sapiens
gaggccttgccaggcctgattcaaagcacttgcattgtctcatttgatctttcaacaatcccatttggtactattatccacattttactgccatgaaaactagggctctgagaagtgaagtcacctgtctaaagcaacagagctaatgagtggtagagctgggattcaaacaaaggtggtctgaccccagagcctgtgttagatcaacaggaatatcaacagcaaaggcacagaatcaggaagggacagagctggttgcaggctgtgattggagcagagaaatgagagattgagctgatgggtaaggatagcttattgaagactttgaaactgatctagtttacgtttgatgtgggacagagtaagaaatagggagccagtgaagattcttgaataggagagtaccccaattcagttggcgtttaacrtgatatgacctaaaagcagtgactggaggtagaacaaggcagacaggccggcagacttctgcagtatttggggcataaagtttcaagggcctggactagaacaggagctgctggtggtgggttctgggagaagagctgtggtt

SEQ ID NO: 219226 - DNA, 622 bp, Homo sapiens
attgttttctttatctcttctgtgcctctttcagggatatgaagttaaaacaaagtactatgagtgttcacctggtttttttgactcttacgaagtttttttccatgtagatagttgttaacttggtgtccttgcagcaggggacaatcagcggagctttccatttcaccatcttgctccacctccttcctctggccatgttaagtttgtatatcaatttgatagcaagtggaaatgtcaagtggacaattgggtacagcagtttgacgacaagaggagagataccggctgggtatattaatctggtagtcatcaaagtataaatgatgtttaaaaccataagactatatgagattacccagaaagagtataggtggaagaagtttatcagatattattttattctaacactacagctgttactgccctacttttcacaagatctccatactccttgattctggctcatctgcttcataattccactgactgacaycttgacaccaaatttttccccaactttgcctactgagctcagataactactgcgaattctgtctcagtaagacttacctagtgaagcactgagttgtgggctgattctttctaccaattgccattg

SEQ ID NO: 219227 - DNA, 622 bp, Homo sapiens
attgttttctttatctcttctgtgcctctttcagggatatgaagttaaaacaaagtactatgagtgttcacctggtttttttgactcttacgaagtttttttccatgtagatagttgttaacttggtgtccttgcagcaggggacaatcagcggagctttccatttcaccatcttgctccacctccttcctctggccatgttaagtttgtatatcaatttgatagcaagtggaaatgtcaagtggacaattgggtacagcagtttgacgacaagaggagagataccggctgggtatattaatctggtagtcatcaaagtataaatgatgtttaaaaccataagactatatgagattacccagaaagagtataggtggaagaagtttatcagatattattttattctaacactacagctgttactgccctacttttcacaagatctccatactccttgattctggctcatctgcttcataattccactgactgacatcttgacaccaaayttttccccaactttgcctactgagctcagataactactgcgaattctgtctcagtaagacttacctagtgaagcactgagttgtgggctgattctttctaccaattgccattg

SEQ ID NO: 219228 - DNA, 622 bp, Homo sapiens
attgttttctttatctcttctgtgcctctttcagggatatgaagttaaaacaaagtactatgagtgttcacctggtttttttgactcttacgaagtttttttccatgtagatagttgttaacttggtgtccttgcagcaggggacaatcagcggagctttccatttcaccatcttgctccacctccttcctctggccatgttaagtttgtatatcaatttgatagcaagtggaaatgtcaagtggacaattgggtacagcagtttgacgacaagaggagagataccggctgggtatattaatctggtagtcatcaaagtataaatgatgtttaaaaccataagactatatgagattacccagaaagagtataggtggaagaagtttatcagatattattttattctaacactacagctgttactgccctacttttcacaagatctccatactccttgattctggctcatctgcttcataattccactgactgacatcttgacaccaaatttttccccaactttgcctactgagctcagataactactgcgaattctgtctcagtaagacttacytagtgaagcactgagttgtgggctgattctttctaccaattgccattg

SEQ ID NO: 219229 - DNA, 578 bp, Homo sapiens
tgcaaaacacaccagattggctacagcttaaaaccagcctcataaatcctttttcataattaaaactctacagacaatataaatagtaatactccacatcatttctggcccagaaaaatgtcttccaaaagggggaaaaaaaartcacttaaaagttacctcctgagagggtaaaggattcctgaggaaagaacctcttattcttatgcaagtggttcctccaccagggagaaaagtttaattgctgtagaatggagcagaactctttggctgggagagggggagactccatgagggcctggcggggaactccagctagccgtgcagggcccttgggccatttgtcccaacctggtcaggaagaggagagtgactgctcacctgtctgtcccaaaaaaggaaggaaaaggccatggaaaggctgggttggactgaaaccaacatttctgacacccaggagcaataggggatggggcacagttgcctctaccctccgaagaaatccgcgggacccgaagcttaggagcaaaagagagaaaggtttttttggtttgcatctcactcacccttcccccagc

SEQ ID NO: 219230 - DNA, 573 bp, Homo sapiens
tggaagctaacaggatgcaacggcataagaatgatataatggactttggggacttgtggggaatggtgagagtagggtgaaaaataagagactacacattgggtacagcatacactgctcaggtgatgggtgcacaaaaatcccagatatcactactaaggaacttatccatttaaccaaaaaccacctgttccccaaaaattattgaaataaaatataattaaattttaaaaatccaatgactaaaaaacagagaaccaaacacatggcacagtaccataacagagaagacggggatgaatagaattgaaatgttttacacatctttgcattttgaaamtcaaagtcacctgttttaatatctagggtataactcctagaacactagtaaaatgacttgtaattaaaaagataacagagggagaaaaatggaataataaaaatgcttaatctgaaagaaggcaacaaaggaaaagaagataaatgtatatagtatgtggagcaaatagaaagctaatggtaatatggtatgtataatccccaatatattagtaactacattaaatataaata

SEQ ID NO: 219231 - DNA, 548 bp, Homo sapiens
tcattctaggcaagttccactcaacaccagaccaagcaattctatctatttacactattagcttagttttctcatacaatcatcacaagcataggaagatacttcaaaaccaaaaaaccaaggtgcatcattaatattcatttaattcaaataccaaatagtttacatagggccagcttagaaatagatactaaatccagagctactgcaatcaaagcttatatgagtgaatatggtagagttgcctgctaaaaggcaatgtaatataattgcagctagaaccctacagtggagaatgaggaattttaaacacacatttkattatagccaccaaaaaacagatgtaaagtaaaaataaaggcatttggctggtccaagatgtaataccaatcagtcagcacctgtgattcttttacttatattttttgtgtttttttaaacaaattttagcccaattttcttgagtcattatctctctgcagcagcagaggaagggcctgtacctccctaccaatgacctggtgtccttattttctaccccaagagca

SEQ ID NO: 219232 - DNA, 467 bp, Homo sapiens
tgaggtgaaagatttggggagaagagcataccaggcagagggagctgctatgcaaaagccctgaggtcagaatgtgctttgcactttgggggaacaaataaaagtcagtgtgcttgagtcatagacagcaagaggttgagtaataaaagatgaggccagaaaagtagtaaaggactagatcatatgaaaccttttcaacggagtaaagagaatgttattctaagcacagtgaaaagccactggaagattttaagcggggtgttttagtccgttttcacactgctataaagatactaccaaggactgggtaatttataatgaaaagaggtttaattgactcagagttctgcatggctggggggtgcctcaggaaactacagtcatggcagggaggcgaaggggaggcaggcacctttyttcacaaagcagcaagagagcaagtgagagtggggagaagcgccagacac

SEQ ID NO: 219233 - DNA, 619 bp, Homo sapiens
cttatgtcctaccattgttcctgagacaacttgctcttttttctttttgttgggaaatctgtttagatacagaaatagttggtatgacatttttcctgaagttgtatagcaatatacatgaggaaagctcaggaattatatggaatctttgcattttttaaaaggatatttaggactttaagacttgtacatatactgtcatacttttatatacatkgtaaatagttaagataaaagtcaactttgcataaccttatatagtttttttttgtggtgagaacacttaaaatctctgtaaggtaatgcacatgttaattagcttgggttaggaattctactatgtatatacatttcgaaacatcatgttgtacatgatagatatatataactttatttgtcaatttaaaaaaatgaaacacttttaaaaaggcaactttggacatttgttctttctccatatgcccaagatatttttcatagatttaaaccacagttaattcccaattaaatgaacaagaggtataaaataatgggaaagtagaatgctgagagaccaccacatgccaacaaactactcaactttgaaatttgtgttcattcaaatacactgacattgtca

SEQ ID NO: 219234 - DNA, 619 bp, Homo sapiens
cttatgtcctaccattgttcctgagacaacttgctcttttttctttttgttgggaaatctgtttagatacagaaatagttggtatgacatttttcctgaagttgtatagcaatatacatgaggaaagctcaggaattatatggaatctttgcattttttaaaaggatatttaggactttaagacttgtacatatactgtcatacttttatatacatggtaaatagttaagataaaagtcaactttgcataaccttatatagtttttttttgtggtgagaacacttaaaatctctgtaaggtaatgcacatgttaattagcttgggttaggaattctactatgtatatacatttygaaacatcatgttgtacatgatagatatatataactttatttgtcaatttaaaaaaatgaaacacttttaaaaaggcaactttggacatttgttctttctccatatgcccaagatatttttcatagatttaaaccacagttaattcccaattaaatgaacaagaggtataaaataatgggaaagtagaatgctgagagaccaccacatgccaacaaactactcaactttgaaatttgtgttcattcaaatacactgacattgtca

SEQ ID NO: 219235 - DNA, 624 bp, Homo sapiens
tgatcagatgtaatcagggtagacaatatacatagaacgaaagccaggttacttaattatattttaaactagattatgcaacatataatcagtggcatactaaggctggagccacggaagcagtccactcygggcacaggaaataaaggagtgcattgtctgtagagatataaaagcagtaataaatgtgattaataatcagtttgacttggtgtgcacattattatcactttggagtgcccaggcttaatccttggatttacctttcttttctgtctatatttactctttaagtaacttctatatgctgatgactctcaaattaaaatatctgtatctatccaactagtaactccacatctacatagtggaagtctaataaacacctcaaatgtaacatttccaaaattgaattcctagtatctccataaaacctgcagtcttccccatctcagttgatggggtcttcatccttctgattgctcacaccaaaattcttggagtcatccttgactcattcttcttttctcccacagcacaaccaatctatcaggaaatcatcttggctctaactttgaaatatttccagaatctgaggactcctcaccactctctctgttatca

SEQ ID NO: 219236 - DNA, 465 bp, Homo sapiens
cacagctagtgaaattctgactstccatcaagcaaggcaaggctaactttgtatgtaggtaatatgttctttgcagtatttctttattttatgtcttttaaatgaaaaacaattaggaaagctacattgtaaatatttgtaaaaatagaatgagttttaaaagatttaccccactgctaccattcctataaaacttttattaatattttgatgtatttcatttcagtctttttttctatccataaaagttacatagttgtaatcatactgtccttacaattttgtatggtgctttttaaaacttaatattatatcataagcttttccaaactgttgtgaaattctcttaatcatgattttaatgtctgtaaaatgatccattgaatataccatgatggacatttaaattatttccaacttgaaccatagtaaataactatttggtggcatgtacccccatagtta

SEQ ID NO: 219237 - DNA, 563 bp, Homo sapiens
ggtgggagcaggctcaatcaagtggctcaagatccccagttgcaatattttctcggttttaagtaccctttagaggtttcccattggttacaccatatgtaaatgaagttttggcccataacccatcgtargctgaaggtttggccagtgaacagaagctgaagtgaaggtttggcttgtgaccaatcagaggctgaaggtttggtctgtgaccaatcagaggctgatgtgaaggttccctgtctcttgactctattctcctgcctcattgtcattgcctttatgaaggaatgaattttcagaggtgcttaccccaccagtgcagacatgtttctctcatcatccttcatgttttcctcttaggtcattttacccttattttagaatactctgtctttaaccatttaatggttacccttggtattttctcatgcatacttaatgtctaaagttaaacattttaccttcttttgagaagacaagggccacagaacattaactcagatgatacctccctcacgaggtatgtgatatggtttggctgtgtccccatccaaatctca

SEQ ID NO: 219238 - DNA, 563 bp, Homo sapiens
ggtgggagcaggctcaatcaagtggctcaagatccccagttgcaatattttctcggttttaagtaccctttagaggtttcccattggttacaccatatgtaaatgaagttttggcccataacccatcgtaggctgaaggtttggccagtgaacaraagctgaagtgaaggtttggcttgtgaccaatcagaggctgaaggtttggtctgtgaccaatcagaggctgatgtgaaggttccctgtctcttgactctattctcctgcctcattgtcattgcctttatgaaggaatgaattttcagaggtgcttaccccaccagtgcagacatgtttctctcatcatccttcatgttttcctcttaggtcattttacccttattttagaatactctgtctttaaccatttaatggttacccttggtattttctcatgcatacttaatgtctaaagttaaacattttaccttcttttgagaagacaagggccacagaacattaactcagatgatacctccctcacgaggtatgtgatatggtttggctgtgtccccatccaaatctca

SEQ ID NO: 219239 - DNA, 484 bp, Homo sapiens
tgcataacacttccacaccagatgataagatatacttaggtgggatctttatgtgctttgttcataggagtgtctttggcagctaacaaagcgcctggtacctagaaggagctcaatacmaatttgaggtatgactaaaaccaccccattaatatccccagataactaaatgaaataactctctgaacctcccttccctgctcactgacattggcaagttccaatttaccatttagggacagggtttcttagggaaccctttgtcaacaccaccctcttctctgccacatacaagtttgagctctcttttagacattctcatacacttttaagaattgttttcctagtcagtgtttgtttaatcaatgaatggtatatcaaaaaatcggaaactataacaagtttcttaaaaatgttagagatgggatcattcccacctagttcactttataagacagtgaagaaatattaaaccctggaaact

SEQ ID NO: 219240 - DNA, 494 bp, Homo sapiens
caaagagacataaactcccacacaataacagkgggagactttaacaccccactgtcaatattagatcatcaagacagaaaattaacaagggtattcaggacttgaactcagctttggatcaagtggacctgataaatatctatagaattctccgccccaaaacaaaagaatatacattcttcttggtgccacatggcacttactctaaaatcaatacaaaattggaagtaaaacactccccagcaaatgcaaaataaactgaaataataacagtctctcagatcacagagcaaacaaattagaactcaagattaagaaactcactcaaaaccacgaaactacatggacattgaacaacctgctcctgaatggctcctgggtaaataatgaaattaaggcagaaatcaggaagctatttgaaaccaatgagaacaaagagacaacataccacaatctctgggatacagctaaagcagtgttaagagggaaattta

SEQ ID NO: 219241 - DNA, 332 bp, Homo sapiens
aagttaaatcatttccccaagatttcacttttaggaagtggctgaaaygggcatttgaatccaagattgcttgatatcaagacattttcttagctacaacagtctgccccactttcttccagaaacggcctggcaatatgtaggatgtcaaggagaaaaatcatcctggatttaagaattagttacagataattaagccaacttaaattatacattgtgggttaccaagtcagtaaaaattatactatgcttgtgaaaaacttttgctagtttcctgattaatgaataccttcaccttgaaaatctgtacacagggaaaatttgcaatctgg

SEQ ID NO: 219242 - DNA, 570 bp, Homo sapiens
  misc_feature (1)...(570): n = A,T,C or G
gtagcttttcatcacatgcatatgtctaatatttgtaaaaagataattcttcataggtnattcaagaattgtctggttttatttgcttaatgaaaaataaatgaggtaacgtctcattgtaaaataagagtttaaattttaattaggaaaagatacccaagacagaaatacatttaaaataagatagattatcacttttaattatagaaaatgaagctttccagaattatgtttaaatttatagatgcattaaaaactatcaagtttaaacatttaagtacctgaataatgttgagcaaatagcaactttggactatgctggcatgaggagagtgaggaaatgccacgataaaaatcagaaattattaaagaagtccttgctttcttttgcttacaaaagattctattgatattgaaaaacaaaccaaaacaaacaaaaaaatggctmcggcatctggattcaaaatgtttccataagtctatggatgcaaagtgagtctcaattttatgaaataagaaaaaagaaaaatgttagctagaccaggcatgatggatcacacttgtaatccc

SEQ ID NO: 219243 - DNA, 598 bp, Homo sapiens
cacatgcatgtatgccaaaacaatattttcattaggtgttcctatgcttgagctttctggagtgttgtctaatacaagggtcagcacactaccgcccatgggctcccmggctctggagtgagtgcacttccccaggctggagcgcagtggcgcgatctcggctcactgcaagctccgcctcccgggttcacgccattctcctgcctcagcctcccgagtagctgggactacaggcgcccgccaccacgccccgctaatttcttgtatttttagtagagacggggtttcaccgtgttagccaggatggtctcgatctgctgacctcatgatccgcccatctcggcctcccaaagtgctgggattacaggcgtgagccaccgcgcccggcctccctgacagtttttaaaaatgaagttttattagactcactcacacctattcactcatataataactatggctgctttgatgccacaacaacatagttaggtatttgcaatatgacctagaagcctgaaatatgtactatctggccctttaagaaaatgtttgtggacctctacattatgtttttatgattttctcatattcttacatg

SEQ ID NO: 219244 - DNA, 598 bp, Homo sapiens
cacatgcatgtatgccaaaacaatattttcattaggtgttcctatgcttgagctttctggagtgttgtctaatacaagggtcagcacactaccgcccatgggctccccggctctggagtgagtgcacttccccaggctggagcgcagtggcgcgatctcggctcactgcaagctccgcctcccgggttcacgccattctcctgcctcagcctcccgagtagctgrgactacaggcgcccgccaccacgccccgctaatttcttgtatttttagtagagacggggtttcaccgtgttagccaggatggtctcgatctgctgacctcatgatccgcccatctcggcctcccaaagtgctgggattacaggcgtgagccaccgcgcccggcctccctgacagtttttaaaaatgaagttttattagactcactcacacctattcactcatataataactatggctgctttgatgccacaacaacatagttaggtatttgcaatatgacctagaagcctgaaatatgtactatctggccctttaagaaaatgtttgtggacctctacattatgtttttatgattttctcatattcttacatg

SEQ ID NO: 219245 - DNA, 586 bp, Homo sapiens
acgtcagaatgaggggcatgtaacttgaaaataatttcaataaccaagtcaaataatgaaaatggaagttcttagggcagagcagaaggagagagagaagggaaaatgatgaataaaactaagagttacattcctgtaagatatttacgtgtgtgtgtgtgtgtgtgtgtgtgtgtgtgtgtgtgtgtgtgtgtgwgatgtgtggtttgtgtatgagagagagaaaaagacaggtgacaaagttctgacaaagctttaatgaattttttcatacaattttatttttgttagatgcagagagagatggatgtttagagttttgtgtatcatttaagcatttgcggttttaacttggaagttgcagaaagttatatctcattcacaggggaaccatcatctttataatatatggtgtctgcctcttcttgcctttttagacaaccagtgacaaggacatttcagagctacaggctctaatgaaaacacgtcctgcgtcattcagccaattgaaattagactaaagcaggtcgtttctcacatttgtttcaaaggaattggttctcccagatcatttcagagtttgata

SEQ ID NO: 219246 - DNA, 566 bp, Homo sapiens
tccatgcttaattttcattgacaaccaatgcccatagtccttaagtcttgagtgtaattcatttaccctttaaaatatttctatttaaacaagtaataattttaatggaagatctcattgggtgtggtggctcatgcctgtaatctcaacaatttgggagacggaggtgggcagatcctttgagcccagaagttcaagaccagcctagacaatttggtgaaaccttgtttctaccaaaaaaaaaaaaaaaaaaaaaaaaaaagaaagaaagaaagaaagaaagaaaaactagctgggtgtggtgtcacatgcctacagttcyaactactcagaaggctgaggtgggaggatcacctgagcccagggaggttgagggttcagtgaaccataatcgtgccactgtactctagcctgggcaacagagtgagaccctgtatcaaaaaagaatgctgaggatgtataccttaaatacatacaacgtttatttgtcaattatacagcaataaagatgtggggaaaaaagaaaatcctgaagatgacaaataatctacgctagcttatccaag

SEQ ID NO: 219247 - DNA, 438 bp, Homo sapiens
aacacaagaacttcacaatgctaccgcaagtatcaataaccaaatagaccaagcagaagaatgaatttcagagcttgaagaytatcttgctgaaataacaccagcagacaagattagagaaaaaagaatgcaaaggaatgaatagacgcagaaaagtcttgataaaattcaacatcctttcatgttaaaaaccttcagtagattaggtattgatggaacatgtctctaaataagagctatttatgacaaacctacagccaatatcatactagatgggcaaaaactggctgtaggttttggtatgacaaacccttgaaaaccagcacaagacaaggatgccctctcttaccattcctattcaacactgtattggaatttctggccagggcaatcaggcaagagaaagaaatcaaggataaataggaagagaggaagtca

SEQ ID NO: 219248 - DNA, 438 bp, Homo sapiens
aacacaagaacttcacaatgctaccgcaagtatcaataaccaaatagaccaagcagaagaatgaatttcagagcttgaagattatcttgctgaaataacaccagcagacaagattagagaaaaaagaatgcaaaggaatgaatagacgcagaaaagwcttgataaaattcaacatcctttcatgttaaaaaccttcagtagattaggtattgatggaacatgtctctaaataagagctatttatgacaaacctacagccaatatcatactagatgggcaaaaactggctgtaggttttggtatgacaaacccttgaaaaccagcacaagacaaggatgccctctcttaccattcctattcaacactgtattggaatttctggccagggcaatcaggcaagagaaagaaatcaaggataaataggaagagaggaagtca

SEQ ID NO: 219249 - DNA, 528 bp, Homo sapiens
ggggatctactttaactagaacattaatttcagtttcagacactttgagtttgagataccagtataatattcatttggatatgtcctcggaagtactgcaatgcatgttcatagatatgttaatttgggaatcatttgcatggagaagtagttgaagaaataagaaagaagacaatgtgrtaagcagtgtggtgatttcttaaataatttaaaacaatagtaccattcaacccagcaatctcattattgggtatatacctgaaggattataaatcgttctaccataaagacacatgcatgcatatattcatcacagcactattcacaacagcaaagacatggaatcaatctaaatgtccagcaatggtagactggataaagaaaatatggtacatatacaccatggaatactatgcagtcataaaaaagaatgagatcatgttctttgcagcaagatcaatggagctggaggccattatcctaagcaaactaatgcaggaacagaaaaccaaataccacatgttctca

SEQ ID NO: 219250 - DNA, 629 bp, Homo sapiens
ttatattcaggtttactttaaaatatgagttctcatataaaatggatcaggcatcttatgtataacttcgacaaataaataataaaagaaaaacaaaagcccttcaatcagactactaaatgagaggagacttttttatataatgccaggatcacaatatgtgaaatttcctcaaagtttatctgagcactgattaatgaagtgcatggtatcktggaaagggaaactttttcaatatgctttgagagacacctagtggctgaaggtaattttgtcacgtacatatccttaatattatccaatctacatttgatatttgtatagtgtttttaatcctatgtttcagataggtatacattttaagaatgtctgttattttcagttgtaactctattggacttttcctcccaattatctttctaaatcctttaaggtatgatccaaaaggtgattcatggtcaactgtggcacctctgagtgttcctcgagatgctgttgctgtgtgccctcttggagacaaactctacgtggttggaggatatgacggacatacttatttgaacacagttgagtcatatgatgcacagagaaatgaatggaaagaggtattcgaattaaaatattcaaat

SEQ ID NO: 219251 - DNA, 605 bp, Homo sapiens
ggtacataagtgttcatgagttcatggattactaaaagaggcatggaaactaccaatggacctgcaggatggtcttgtggaggtaaaaattatgtggctaatgcagaggatatggaaggaaacataaagttggcaagcagatgaggaggcctttacctttctgtagatgtcatgacagaaacagagcacactgaataaccagatagaataggttgtttgttaaaacagataagacactatgattccacttttgtgaatttttaaaactcaccatatgtgtatgtaaaagtagaaaacaattgacttgaaggatgcacattaccctcatggtagtggttggctcttttacaaaagaaagacttaaaaaagtatggcaaaatgttaacacatacatagtggtgtaagtttttaatatctagtagtctattttctgaggaataagttagacaaaacctataaatcttaacagaaaaaaataactaawttttttgtcatgaattgaaaaatcacaaataagtaattgcacgtgtgtagtaggtacaattcttattccataaagtcacattatatttctttattttctaaaaggtagataaatttctact

SEQ ID NO: 219252 - DNA, 605 bp, Homo sapiens
ggtacataagtgttcatgagttcatggattactaaaagaggcatggaaactaccaatggacctgcaggatggtcttgtggaggtaaaaattatgtggctaatgcagaggatatggaaggaaacataaagttggcaagcagatgaggaggcctttacctttctgtagatgtcatgacagaaacagagcacactgaataaccagatagaataggttgtttgttaaaacagataagacactatgattccacttttgtgaatttttaaaactcaccatatgtgtatgtaaaagtagaaaacaattgacttgaaggatgcacattaccctcatggtagtggttggctcttttacaaaagaaagacttaaaaaagtatggcaaaatgttaacacatacatagtggtgtaagtttttaatatctagtagtctattttctgaggaataagttagacaaaacctataaatcttaacagaaaaaaataactaaattttttgtcatgaattgaaaaatcacaaataagtaattgcaygtgtgtagtaggtacaattcttattccataaagtcacattatatttctttattttctaaaaggtagataaatttctact

SEQ ID NO: 219253 - DNA, 605 bp, Homo sapiens
ggtacataagtgttcatgagttcatggattactaaaagaggcatggaaactaccaatggacctgcaggatggtcttgtggaggtaaaaattatgtggctaatgcagaggatatggaaggaaacataaagttggcaagcagatgaggaggcctttacctttctgtagatgtcatgacagaaacagagcacactgaataaccagatagaataggttgtttgttaaaacagataagacactatgattccacttttgtgaatttttaaaactcaccatatgtgtatgtaaaagtagaaaacaattgacttgaaggatgcacattaccctcatggtagtggttggctcttttacaaaagaaagacttaaaaaagtatggcaaaatgttaacacatacatagtggtgtaagtttttaatatctagtagtctattttctgaggaataagttagacaaaacctataaatcttaacagaaaaaaataactaaattttttgtcatgaattgaaaaatcacaaataagtaattgcacgtgtgtagtaggtacaaytcttattccataaagtcacattatatttctttattttctaaaaggtagataaatttctact

SEQ ID NO: 219254 - DNA, 365 bp, Homo sapiens
tttgccccacccaggactggcaaattagctttactcaacatgccctgagtcagataactaaaatacctcttagtctaggtagatactttcactggataggtagaggcctttcctacagggtctgagaaggccaccacagtcatttcttcccttctgtcagacataattcctcagtttagccttcccacctcaatacagtctgataacagacgagcctttattagtcaaatcagccaagcagtttttcaggctcttagtattcagkgaaacctttatatcccttacggtcctccatcttcaagaaaagtagaatggactaaaggtctcttaaaaacacacctcaccaagctcagccaccaacttaa

SEQ ID NO: 219255 - DNA, 225 bp, Homo sapiens
tcccttgttgttgcatgggatggcaatgtccacatagtgcagaggagaatctgtgttacacagagcaatggtaggtaggttaacataagatgcctccgtgagaggctggtggtcagccctggggtcastaaccacaagaagccgtggctcccggaaggctgcctggatctggttagtgaaggttccaggagtgaagcggccagcaattggagtggctccagtggc

SEQ ID NO: 219256 - DNA, 569 bp, Homo sapiens
caccacagttagactcctcctccaaatgccactttttcagtctccttttaaaactgtgaagtccccagtaacattggctgtcacttaaacccactctggatgtggccagatacagctgattctagtgacatattgtgtctgttaatgtctggctacatcttaatgtgaagcgatggttcacactgacgggatgtccgagtgggaaggcaccctggtcaagagggctctgcatttgtgattttacatgacatacatatgctactgatggctcttgatgccattaggaaccaccagcaggaacagacatgcagttatgcaaaccacatcctttttgtccagtggtcctggccagcctcagacagtgacccagccctgagttgtcagagtggatggtcagcaaggtgtcagcttggatttctcaaagcaaggctgatatggttaggctttgtgtccccacccaaattccatcttgaattataatccccacaatcctcacckgtcaaggacccaatgggaggtgattggatcatgggggaagcttcctccatgctgtcctcatgacagtgagt

SEQ ID NO: 219257 - DNA, 578 bp, Homo sapiens
tgcttttcagctttcctttccatggcagcattttttttaatgctacatccgacataatctgtattttattatttactctgttcattgtttgtaagttctgctagggcaggtggatttctcttgctgttcactgggtatcacagtccctggcaaagagcagtgctcaataaatatttgcttgatgaatgcaygcagacatgctcttagccattctatgctacctaatatggattattccaggctccctgaactcttcccaaatcaagaaaccactttccagaagtattttaacacgagctgccaagccttgactgttgaaatgtttttgacagtcagccttgccatccttagatgtcctgctcttttcagaccttcccagacctgtcatcgccagcgcctttcctgaagagccatcctacactgggtcccggaactgcagctctgcaaacaatagcacaggctcatgatctccctctgtctccatggggaagtatccctccctgtaccagagcagccctggccaagtggggctcagcccaagagcaggctggagccagacagctcggcccacagatatt

SEQ ID NO: 219258 - DNA, 583 bp, Homo sapiens
aggagggaggcatgaatcggcagaatacagagggcttttagggtagtgaaactgctctttatgatactataatgggagatacatgtcattatacatttgtccaaacccgtggaacttacaacactaagtgagccctaatataaactgcagactttgggtgattacagtgtgtctgcataggttcattgcttgttaacaagtataccatctggtgggggatgttgataacaggggaggctgtgcrtatgtgggggctgggactatgtaggaaatctttgcaccttctgctcaatgttgctggaaacctaaaacaactctaaaaaaattaattcttcaagatgactaggagcaaattccaaatgcctcaccacaaagaatggtaagtaagtgaggagacgaatatgttaattagcttgacttaacccgtccacattgtatacatccatcaaaacatcactttgtaccccataaatgttcattaaaaataacattaataaaaaataaagtcttaagcaaacaaattatctctatgcacacaagaaaccaggacctcagcacccaacactccacctgtttcagtttt

SEQ ID NO: 219259 - DNA, 583 bp, Homo sapiens
aggagggaggcatgaatcggcagaatacagagggcttttagggtagtgaaactgctctttatgatactataatgggagatacatgtcattatacatttgtccaaacccgtggaacttacaacactaagtgagccctaatataaactgcagactttgggtgattacagtgtgtctgcataggttcattgcttgttaacaagtataccatctggtgggggatgttgataacaggggaggctgtgcatatgtgggggctgggactatgtaggaaatctttgcaccttctgctcaatgttgctggaaacctaaaacaactctaaaaaaattaattcttcaagatgactaggagcaaattccaaatgcctcaccacaaagaatggtaagtaagtgaggagacgaatatgttaattagcttgacttaacccgtccacattgtatacatccatcaaaacatcactttgtaccccataaatgttcattaaaaataacattaatraaaaataaagtcttaagcaaacaaattatctctatgcacacaagaaaccaggacctcagcacccaacactccacctgtttcagtttt

SEQ ID NO: 219260 - DNA, 513 bp, Homo sapiens
agaattccaaatcaagtcagatccatagttctgcaacaggtgacstgggatgacgctcagcctttttgaccaaacatccagggtgataaacagaaggttggaaaggattcaccgcagcaaagggatccaatgatttgcttctggtgctccctctgtgttgcgagggcgtgtgaatgtgtggacagccgcgcatggtggggcaggaatccaggcccacatcctctccctgatgcttctctccgtgggccgcactttccactttaaatagctccaggacattcttttgtttcagtttttgtgtttcttgagaaggttacagttcttttacagccatgttgtaaaagaagttaaaagtctaattgaataaaagtaaaacaaacatccacagtgctaaataaagctgaggctagcgcactgccagcctccgatatcagaagcagccagaggcatcgaagagttgaatttctgtgggtcaactggggccaaaatcactgcataagtggcagagtgccg

SEQ ID NO: 219261 - DNA, 523 bp, Homo sapiens
gaattccaaatcaagtcagatccatagttctgcaacaggtgacctgggatgacgctcagcctttttgaccaaacatccagggtgataaacagaaggttggaaaggattcrccgcagcaaagggatccaatgatttgcttctggtgctccctctgtgttgcgagggcgtgtgaatgtgtggacagccgcgcatggtggggcaggaatccaggcccacatcctctccctgatgcttctctccgtgggccgcactttccactttaaatagctccaggacattcttttgtttcagtttttgtgtttcttgagaaggttacagttcttttacagccatgttgtaaaagaagttaaaagtctaattgaataaaagtaaaacaaacatccacagtgctaaataaagctgaggctagcgcactgccagcctccgatatcagaagcagccagaggcatcgaagagttgaatttctgtgggtcaactggggccaaaatcactgcataagtggcagagtgccgcagagttcccc

SEQ ID NO: 219262 - DNA, 579 bp, Homo sapiens
ggccccactcacagccacttctcccctgctggctagcctcaaagagatcattagagggactttgctgcccataacaacaaggaccattggtgaaaacaagcagctcagggaaatggatcatggaaatcacagaaacagagatttctctgttcccatcccctaagatcaccagtgcccctgctcctgacaattggtcacctctcagccaacatctgagcctctggtgtcccttccttgtgacagagttcatgatactcatgggttatttcaatgcattgggaagttaatctttttttttktgagagatggggtcttgccatgttgcctaggctgttctcaaactcgagctcaggtgatctttcccacctcggcctcccaaagtgctgggatcacaggtgagagccaccacacctggctgaggaagttagtctttataatgagactaaacctgccttcctatatttttcatcttttcatgtgcttattggatatttgcatttcattcatggaaaaaaaaagatatctttttggtttttgtttttttaatagagatgagatctcactttgttggcccaggct

SEQ ID NO: 219263 - DNA, 579 bp, Homo sapiens
ggccccactcacagccacttctcccctgctggctagcctcaaagagatcattagagggactttgctgcccataacaacaaggaccattggtgaaaacaagcagctcagggaaatggatcatggaaatcacagaaacagagatttctctgttcccatcccctaagatcaccagtgcccctgctcctgacaattggtcacctctcagccaacatctgagcctctggtgtcccttccttgtgacagagttcatgatactcatgggttatttcaatgcattgggaagttaatcttttttttttwgagagatggggtcttgccatgttgcctaggctgttctcaaactcgagctcaggtgatctttcccacctcggcctcccaaagtgctgggatcacaggtgagagccaccacacctggctgaggaagttagtctttataatgagactaaacctgccttcctatatttttcatcttttcatgtgcttattggatatttgcatttcattcatggaaaaaaaaagatatctttttggtttttgtttttttaatagagatgagatctcactttgttggcccaggct

SEQ ID NO: 219264 - DNA, 551 bp, Homo sapiens
agccttttcactgtcttgccacttcccagactctacttagaaaaagggcatgggtcccttccgattccagctttctggcttgtcaaggatatctcttgttctcctgctggcagctcgccccttccatcccccaccgcccacttacagcagttttttgggcttctaggggaggggataagatgcagggacacatctcagattcaaacccacatgcttctctctaattctcctctttctctgcatctagagacttctagttraagaagcacttatcaaacaatctatgatggaagaccagttttgttttatttccaattgtcatgaattaatctttttggcctgtacactgttgaatgaaatgagtctgccaatcatgcacttggatattgtgacaacatcatattgctgtaacagctgctaaatgtttgttctcaatatctgtacttaactcatcatggacagtaacagacagttcatggatcagcaggggtccaggggccacagtgtgtaacctggtatagagtgtcactcgcctcatctgctatttcaag

SEQ ID NO: 219265 - DNA, 495 bp, Homo sapiens
ggagtacacggactcatggatctgaatgcattttctttctttttttttttttttcttttttcgagatgaaattttgctctgttgcccaggctggagtgcagtggcatgatctcagctcaccacaacctctgcctcccaggtccaagagaatcgcttgaggcagtcccagtgcctcagcctcccgagtagctgggattacaagcacccgccaccacgcccagctaatttttgtatttttttttagtagggacaggcttttcccatgttggccaggatggtcttgaactcctgacctcaagtgatccacccgcctyagcctcgcaaagtgttgggattacagggatgagccacaacgcctggcctgaaatgcactttccaaaggaggagagagcagtacaaggggggctctcatggcctggaatcccctcacccacccacctccccaaacacaacaagccactcactccggatctgcttcttgatctccttggaggg

SEQ ID NO: 219266 - DNA, 527 bp, Homo sapiens
ctctttctcctaccgaccaccccagtgcttgggcctagaaatggattctgcctccagctgctcctccactgggtcctgatttagtccgcaaatttttattaaaaactccaattttattggagttcctaccatactccaaacactgtcctatgtactgggatacagaggcacacatggcaggtaaacacatgctatggtytggatgttagtgtccccttataatttatttgttgagatcctaaccgccaaggtaatggttttaggaggtggggcctttgggaggtgatgaggtcatgagggctccaccttcacgaatgggattaatgtccctataaaagatcccagagcctttggtagttcatgagcatgatgattgggtgttcacgcatgggggtgagatgtgccgccttcaaaccttgttacaatgtacaatgtgaacgcattacctgtctgacatgaaaaaaaaaaaaaaagagagcgatctcagagagctagatttcctttctaccatatgatgactagaagga

SEQ ID NO: 219267 - DNA, 498 bp, Homo sapiens
ctcagtggccatactcccaggctttcgacatcttccatcccgttacccattttgagaccctcttgaaattcagaggatacacttctgactatccccatccccccagccttccarcccttataatcccccatttcattcttgtggggatcccttagagacccaggaaagttgctcatgattccttcccatcctcgctcttccttcccatcccagagactccctccagacttctccctggatttcctttgcttctccagccctcatccactcccatctctcccaggctcggggaattgaacctttcccacaccacagtggggtgatctaaaagttggcctgggaccaggctgtggcccaccttggtggggagaaaggggcctgttaggtggaggatatggggacacctgtgtgggggaatcggtgctttcacctgcaagcttagcctgtctcctggcttgtgtgtttttccacctgtcagccatgggactgtgtgtagag

SEQ ID NO: 219268 - DNA, 498 bp, Homo sapiens
ctcagtggccatactcccaggctttcgacatcttccatcccgttacccattttgagaccctcttgaaattcagaggatacacttctgactatccccatccccccagccttccagcccttataatcccccatttcattcttgtggggatcccttagagacccaggaaagttgctcatgattccttcccatcctcgctcttccttcccatcccagagactccctccagacttctccctggatttcctttgcttctccagccctcatccactcccatctctcccaggctcggggaaytgaacctttcccacaccacagtggggtgatctaaaagttggcctgggaccaggctgtggcccaccttggtggggagaaaggggcctgttaggtggaggatatggggacacctgtgtgggggaatcggtgctttcacctgcaagcttagcctgtctcctggcttgtgtgtttttccacctgtcagccatgggactgtgtgtagag

SEQ ID NO: 219269 - DNA, 495 bp, Homo sapiens
cactttagattttactcagaaggagatgggaggacattggagaggtgaaagcagaggaatgacargacttgattaataggaacattccggctactgggtagagaatagaacttagggagtgagagtggaagcaaagaccaaggaggcttttagaagggtccacgtgcgaggtgacaatagcttggactggcatagtaaagaaaggtgagaagcacttggacttgggatgcattccgaaggcagaccttacacattctgctaatgagttctatgttgggtgggagagaaagaggaatcgaccgtgacctcaaggcttgggcctgtgcacctggatgaagggcgctgtttactgagacatttgtcacagtcacagtttgccaattcaactgcttttcacgatggaggaggaactgctctagggtgatgtcagaagctctgagaccaggagggtgttttagctgaggctttctcataacagtcacttgcccacagtca

SEQ ID NO: 219270 - DNA, 401 bp, Homo sapiens
aatagcctgcatgctcccagataactcactggagcttggttttaagctcactaggctgtcatatttaagcaatgtgaccccattcctccctccatagctgattagatccttgatcctggctgaaccaatctctttcctgggaatattgatttgggacaaagagcttagtttgggttggtctcttgaatgcaggaactattatataaaagcattgcagctcttggtggttgyggcagagacgcagagaaagccagtttgcattgaaggaagggtacagcagaatgaagtgagtgacagtctcttgcaggacttctgggtcccaggtctgggctctacctttgtccttggagcatcaggaaaaacagctgtgtcactgtatactttcttcccttaagctaaag

SEQ ID NO: 219271 - DNA, 378 bp, Homo sapiens
gtgttttgttgcttttccacatatttatataattctttgcatgtctcacaattttttttttacctttcctatggtactgaacaatttttttgaaaagtggacattttagataatatgttgtagcaactctgaataccagttctccatgctcccacagatttgttgtttgcttgtttatttggttagtaactttgctagagcaatccagsactctttctatgtattcaatatttctcccaatatgaaaggacaagagaaataaagctttcttccataataaatattctttttatatttcaggaaagtctatttccctcacagggtgcagcatctgatgttgttcctcaaagagctcagccttgggcatgagcacagcct

SEQ ID NO: 219272 - DNA, 576 bp, Homo sapiens
tttatacaataagtgcagttagaatgttagttcacgaagctgcttttcaaacttaaatgctggaaagtatgtgaaaagttctttgactatgcatatgtttattgctatgaccagtagcagcttctctgcagtaacccagagttctcagtgtagggcctgatctcaggtagggtcaaggcagtgaaaytatattatcagttagagtacttagctgcaggcaacagaaaacccaactcaacctggcttacacaataaaaaaagttgtcattttacataactgaaagtcagagataggacaagctccaggtttggttcagtcatgagttcaaagtttgcctccagactagattttgtctatttctcagctctgctatcatcatggttttatcctcatgctggttcccattgtggtaggaaaatggtggcccatggccattggcgctataggctgtcttgcttctttccgataggagaaacagaaaggaattttcccctcttgtttggtctgatagagccaactgggtcatgtgccaactttgaacccaaaagagtcagtgagggtgaggcacacctgat

SEQ ID NO: 219273 - DNA, 576 bp, Homo sapiens
tttatacaataagtgcagttagaatgttagttcacgaagctgcttttcaaacttaaatgctggaaagtatgtgaaaagttctttgactatgcatatgtttattgctatgaccagtagcagcttctctgcagtaacccagagttctcagtgtagggcctgatctcaggtagggtcaaggcagtgaaactatattatcagttagagtacttagctgcaggcaacagaaaacccaactcaacctggcttacacaataaaaaaagttgtcattttacataactgaaagtcagagataggacaagctccaggtttggttcagtcatgagttcaaagtttgcctccagactagattttgtctatttctcagctctgctatcatcatggttttatcctcatgctggttcccattgtggtaggaaaatggtrgcccatggccattggcgctataggctgtcttgcttctttccgataggagaaacagaaaggaattttcccctcttgtttggtctgatagagccaactgggtcatgtgccaactttgaacccaaaagagtcagtgagggtgaggcacacctgat

SEQ ID NO: 219274 - DNA, 576 bp, Homo sapiens
tttatacaataagtgcagttagaatgttagttcacgaagctgcttttcaaacttaaatgctggaaagtatgtgaaaagttctttgactatgcatatgtttattgctatgaccagtagcagcttctctgcagtaacccagagttctcagtgtagggcctgatctcaggtagggtcaaggcagtgaaactatattatcagttagagtacttagctgcaggcaacagaaaacccaactcaacctggcttacacaataaaaaaagttgtcattttacataactgaaagtcagagataggacaagctccaggtttggttcagtcatgagttcaaagtttgcctccagactagattttgtctatttctcagctctgctatcatcatggttttatcctcatgctggttcccattgtggtaggaaaatggtggcccatggccattggcgctataggctgtcttgcttctttccgataggagaaacagaaaggaattttcccctcttgttyggtctgatagagccaactgggtcatgtgccaactttgaacccaaaagagtcagtgagggtgaggcacacctgat

SEQ ID NO: 219275 - DNA, 478 bp, Homo sapiens
gcaggagaggaaaggggccaagagatgagactgaggtcccttcctgggctctgtctggctgctcctttcaatgctccaagctaccttgggagcgtgggtccccaaycttggctccgctcaggaaaccataaagtcttgagtaacatcccatctcaggtttttctctgtttatcttgttgaccaaatagcttaactgtctcacctgctaatgtgattggcaattatttactttggagagccctgaaagacactgtcagattgcagaattctcaattatctagaaacccatcacccaacacatgcttcctcgtccccatactataaaagaggctgactcctcggcagaagtgagtgggggagagagaggagaccaggacagctgctgagacctctaagaagtccaggtaagagccatccattctgtggcccctctgctacccttaacggcagggatctcaggctcctgccctgtggggca

SEQ ID NO: 219276 - DNA, 478 bp, Homo sapiens
gcaggagaggaaaggggccaagagatgagactgaggtcccttcctgggctctgtctggctgctcctttcaatgctccaagctaccttgggagcgtgggtccccaaccttggctccgctcaggaaaccataaagtcttgagtaacatcccatctcaggtttttctctgtttatcttgtygaccaaatagcttaactgtctcacctgctaatgtgattggcaattatttactttggagagccctgaaagacactgtcagattgcagaattctcaattatctagaaacccatcacccaacacatgcttcctcgtccccatactataaaagaggctgactcctcggcagaagtgagtgggggagagagaggagaccaggacagctgctgagacctctaagaagtccaggtaagagccatccattctgtggcccctctgctacccttaacggcagggatctcaggctcctgccctgtggggca

SEQ ID NO: 219277 - DNA, 346 bp, Homo sapiens
tttcaaactgggggcctcattgtcttctacgggctgttagcccagaccatggcccagtttggaggcctgcccgtgcccctggaccagaccctgcccttgaatgtgaatccagccctgcccttgagtcccacaggtcttgcaggaagcttgacaaatggtgagttttcaggggtgtatgtgtgcatgtgtgtgtgtgtgtgtgtgtgtgtgtgtgtgtgtgtgtgtgtgtgtgtgtgtccaaccctgcaaagtggggagggacagggctggatggggragggggcctgaggatctggaattgtcagatctgacccccagagacccttacacccatttccagccctca

SEQ ID NO: 219278 - DNA, 193 bp, Homo sapiens
ctgaaaaactacctatgggtactatgctgattatctggatgacacaattatctgtacaacaaacagtttacccaggtaacatgtaccccttgaacctaaaataaaagttggaaagaaaagaagaaaatggcagatttaagagatgttcaggaggtrgatctggaaggatgtggacaagggcgtaggtgaggtg

SEQ ID NO: 219279 - DNA, 607 bp, Homo sapiens
catgctgttaaatccatcgcaagctggagactcaggcatagatctgatgggtgccttcctcatggagtttacagtccagaggctgagacagttacagaacaaggtggtcacagctgcaggagaacttgctggaaagtggcactaaggagggaatgacttgactgagatatccaggaagacttcytgcaggaggtgacacctaagctcaggctaaaaaaataaataaataactggtacatcaccagatgggcaagggcaggagcacatcctaaactgaaaaaccagcccatgtaaaagcagagaaaaatgaactgacctgatgcatgtaggagaaatcactggtgtcaatgtagtaggaaaattaaatgggagaaggtgaggctggagagacaagggccggacagtggagggcttgaatacgaggctttgagctggactttctcctaagagctgtaggaagccagcagactgaaattaaaaagactcacagtgccaaacgttggtaatggagtgaagcaaccagagctcccatacactacaggtgggagtataaagtgatacagccactttggggaaagttctggcggtttcttacaaaacgaatcat

SEQ ID NO: 219280 - DNA, 607 bp, Homo sapiens
catgctgttaaatccatcgcaagctggagactcaggcatagatctgatgggtgccttcctcatggagtttacagtccagaggctgagacagttacagaacaaggtggtcacagctgcaggagaacttgctggaaagtggcactaaggagggaatgacttgactgagatatccaggaagacttcctgcaggaggtgacacctaagctcaggctaaaaaaataaataaataactggtacatcaccagatgggcaagggcaggagcacatcytaaactgaaaaaccagcccatgtaaaagcagagaaaaatgaactgacctgatgcatgtaggagaaatcactggtgtcaatgtagtaggaaaattaaatgggagaaggtgaggctggagagacaagggccggacagtggagggcttgaatacgaggctttgagctggactttctcctaagagctgtaggaagccagcagactgaaattaaaaagactcacagtgccaaacgttggtaatggagtgaagcaaccagagctcccatacactacaggtgggagtataaagtgatacagccactttggggaaagttctggcggtttcttacaaaacgaatcat

SEQ ID NO: 219281 - DNA, 607 bp, Homo sapiens
catgctgttaaatccatcgcaagctggagactcaggcatagatctgatgggtgccttcctcatggagtttacagtccagaggctgagacagttacagaacaaggtggtcacagctgcaggagaacttgctggaaagtggcactaaggagggaatgacttgactgagatatccaggaagacttcctgcaggaggtgacacctaagctcaggctaaaaaaataaataaataactggtacatcaccagatgggcaagggcaggagcacatcctaaactgaaaaaccagcccatgtaaaagcagagaaaaatgaactgacctgatgcatgtaggagaaatcactggtgtcaatgtagtaggaaaattaaatgggagaaggtgaggctggagagacaagggccggacagtggagggcttgaatacgaggctttgagctggactttctcytaagagctgtaggaagccagcagactgaaattaaaaagactcacagtgccaaacgttggtaatggagtgaagcaaccagagctcccatacactacaggtgggagtataaagtgatacagccactttggggaaagttctggcggtttcttacaaaacgaatcat

SEQ ID NO: 219282 - DNA, 538 bp, Homo sapiens
ctcactatatgttaagtgttggagtctgactcacctaattggaaggcagacagtaagaaggcagcctcagacgccgcctcctcctgcaaactctcagcccactgcccagcatcccatcattatggcttcaccccttggatttatgaaggtttgtctaagcctccactaaattacaaatagcattgaaaaggggtacagcagaagctcttcccagctagtactttagttattatttaataccccagtggttaaaaacagcatctttgtatgctaacacygtaatttccaactgatgctttgaatttgacatcttaattttcctttaacatcttaattaactacaaaagtgttagttatcagctaatgcttttcttgtctaggatttggaaatgggatttagaatggaaatctaggtcaaggatacgaaggcccaggatagaagaaaagccatgttgaagtttgagtaataagtcgagaagactgggaagttctgcttttccacttcaccttgctcttcccattcttcaggctcaaaatc

SEQ ID NO: 219283 - DNA, 326 bp, Homo sapiens
tttgaaattgccaattttgtgggtcgatgacagctgaatattggcagttttaaatgsttcaatctaatgcgagttaaattaaaaccttgaggaatatgcaacttttcactttacacggctctgttttaaaaagggtgtcaacatatttcagccttgcggagatggcggcgtatgtctatcctgtgttgcaagcagctgtgaatggttgcgtcgttttgcttggcctacgcatgggcgtgttgtcaccagaaagcgtctctgctcctccaagtggtggcaagcccctcctgagagccattcctcatccagacaagaatccatcagat

SEQ ID NO: 219284 - DNA, 584 bp, Homo sapiens
atgtgtgtgtggcgtgtgtgtgygtgcatatccctgtcgacaccaccagaatatgttttaatgaaaccgtcatgttttaatgaaaacagaaagccttctgtttcatgtcgtgacgctggaatgaaaacagtctctcccagcatctagctcagtgcctggcacatcatgaaagcttaataaatacggctagaattaatgaatgagtttctttcccctcccctgtcctgtatttttaataaggctgttgagcctggggcctctgccctctgctggtcactatcatcacacagcctcactcaggaggcccctggccccgttctgcctggagtgttggcaggtggcaagggttgtaagctcctgcccagtcccgtgggcagttctaggatcttacccccagcccctgcgattctgaggggacgtgtcagtcattcagcctccagccagtccctggggatgtctgagggaggaagtaaggctcaagtcccctgaagtgggcagctcctgtcatccacagctgctgcttgttagtgggagccctggggccctgggtaaatgtcctgccagagctgggctcactctggcct

SEQ ID NO: 219285 - DNA, 571 bp, Homo sapiens
gaaatactttttccccttgcttttagatgtatctgttgttaaaaggggggaacaaaagtatcaattttgtataaagagttcggaaataatttgagttttacaggktgtcacttaatctttgaatctggttttattcggtaatattttgaaaactactcaggccaaaaaatccggataaaactactgtcctggcaccaaaaatggaagaaatggtaactgctgttccctgcatcctaggcatttccctgggcttacatagaatttattccaatgttccaccaggtggtgctctggtgaagacatggttctcaggctctccaaccccttgacgttatgcttggaaatattttgagtagattaagtcatttctcctaagaaagaggctgcccagtaaaaggaatatgattgcccattttgccaataagacacaacgtgcacacagagaaaagtccaacgggaatcctcagataaaggacaatcgtccctgaaaaagtcagtcccaaaacatctaagaaggtattagaacagtggtcttggctgagtcttatgggactagaatcaggaatttgga

SEQ ID NO: 219286 - DNA, 585 bp, Homo sapiens
taaactacaggtataccttggagatactgcaggtttggttccaggtcaccacaataaagttaatattgcaataaagtgagtgacacaaattttttggtttccaagtatacatgaaaattacatttacactctactgtagtctatccagtgtgcaatagcatgatgtctaaaaaatacataccttaataaaaaatacataccttaataaaaaatactttattgctaaaagaatgctaacaattatccagtcatactctttgtgttggtagagggtcttgccttgatgttaatggctgctgactgatcgggattgtggttgctgaaggctggagtggctgtggcaattycttaaaaaaaagacagcaataaagtttgctgcatcaattgactctttcttttacaaaagatttctctgtagcatgtgatgttgtttgatagcattttaatgactgcaaaacttctttcaaaattggagtcagttctctcaaatcctgccagtgccttatcaactaaatgtatgtaatattctaaatcctttgttgtcatctcaacaatattcatagaatcttcaccgggagtatattc

SEQ ID NO: 219287 - DNA, 590 bp, Homo sapiens
atcctgcaactttgctataatcacttattagttttaaaatttatattttgattcttttggattttctacatagaacaataatgccatttgtgaacaaagatagttttatttcttccttcccaactggtacacttcttatttccttattttgtccttctgcattagggagaacttccagtacaacattgaaaaggagtggtgagaggggatatccttgtcttgttcctgatcttagtggtaaagtttctagtatcttarcattaaatttaatgttggctgtaaggtttttttgtggatattctttatcaagttgaggaagttcccacttttcctagtttactgagagattttatcataaattggtattgaattttgtcaaatgccatttctgtggctatttatataatcatgtgattttttagcctattgatgtgatggattatattagctgatttttgaatgttcaaccagcttgcacacatgaaataattcccacttggtcgttgtgtataattctcattatacattattggatttcacttggtaatattttgtttaggatttttccatctatgttcataagagttatc

SEQ ID NO: 219288 - DNA, 561 bp, Homo sapiens
aaatttgaaatcatatatttggctcacatttgtggcctgagttttatttttattggggagtgctaccctagagctttgtgttggctcaacacaatttaaggggaaaaacattaaacctcccaataattactttctctggaaatcactgtgcctcttgattttttgtgcatttaccctgatgacaccatgatgttagatcctgctctcatgatccttctatcttagaactgtgttggtttggagcttcagaaattaaacattcttgaataaagaatgggtctttcactaaataaaattcctgcttattgtgaaaaatatcattgccagttttttgtgttttttktttgtttgtttgtttgtttgtttttttttacacagggcagattcttttctccttcaattttttatccctcttttacttaagccaccctttaaagaccctcaattgctgtctgatcatttaagttattacctataactcctggagctttggtctataccaaatcactgtggcctgtggggtctggagcatgaaggaacaaaggtctagggcaattcgtg

SEQ ID NO: 219289 - DNA, 561 bp, Homo sapiens
aaatttgaaatcatatatttggctcacatttgtggcctgagttttatttttattggggagtgctaccctagagctttgtgttggctcaacacaatttaaggggaaaaacattaaacctcccaataattactttctctggaaatcactgtgcctcttgattttttgtgcatttaccctgatgacaccatgatgttagatcctgctctcatgatccttctatcttagaactgtgttggtttggagcttcagaaattaaacattcttgaataaagaatgggtctttcactaaataaaattcctgcttattgtgaaaaatatcattgccagttttttgtgttttttttttgtttgtttgtttgtttgtttktttttacacagggcagattcttttctccttcaattttttatccctcttttacttaagccaccctttaaagaccctcaattgctgtctgatcatttaagttattacctataactcctggagctttggtctataccaaatcactgtggcctgtggggtctggagcatgaaggaacaaaggtctagggcaattcgtg

SEQ ID NO: 219290 - DNA, 561 bp, Homo sapiens
aaatttgaaatcatatatttggctcacatttgtggcctgagttttatttttattggggagtgctaccctagagctttgtgttggctcaacacaatttaaggggaaaaacattaaacctcccaataattactttctctggaaatcactgtgcctcttgattttttgtgcatttaccctgatgacaccatgatgttagatcctgctctcatgatccttctatcttagaactgtgttggtttggagcttcagaaattaaacattcttgaataaagaatgggtctttcactaaataaaattcctgcttattgtgaaaaatatcattgccagttttttgtgttttttttttgtttgtttgtttgtttgtttttttttacacagggcagattcttttctccttcaattttttatccctcttttacttaagccaccctttaaagaccctcaattgctgtctgatcatttaagwtattacctataactcctggagctttggtctataccaaatcactgtggcctgtggggtctggagcatgaaggaacaaaggtctagggcaattcgtg

SEQ ID NO: 219291 - DNA, 599 bp, Homo sapiens
acctagatgaaccatcattcgtaaagctgaaaggtaatatttacttaatcaaaattagacttcttaatactygttaaagggaaaacccattgtggggaagaagcatagagtataatgctcatattatatttcagacaataaaacaaccttgtataatcctattatgaacattagcatacatttcacagcccatccggcaaacaataagggtcatgactctatgtatttgaaatgctatccagggcattgtagtaagcaaaatggtaaaacctacagctgtgtcagtgggtcaaaaagcggtcatggtacatttctcagacactgtgaacccaaatacgcttttataaagataagctgtgtgttaggaaacatgtttttcaaagctaaacaggtctaaagatatagttatgtgagaagcagggacgggagggggagagcatgacctgtttggagtgattcatggttaaatgaaactgtgacaaaactccagtgtcttgtggaatgcaaattcttattataaaaacatcctttatgagacagagaaaatacagtgtctgcttccagttaaagaattttcttctgaaacttcagaagaggtc

SEQ ID NO: 219292 - DNA, 435 bp, Homo sapiens
acgataggttctgactcagtttctatctgagctaaacctggaaaatagacgcygcctccattaaattgttattttattagagtgagcaagtgtctaaatacctataattattgttacaggtatagtctactgtttaaaaattatgggcatgttgacattatgatttaatcattcacaagctttataaatataaaagatttgtcactgtcactggaacctattttaaattatttcatgccttcagtttacttagcttgtatccaagtttgaaggcaatctcatttgtcacattgttttctctgacaataatgatgaaattgctgctaatttgaaaagaactttaaaattctgtattacgtctgacccagtgataatattcactgtatgccaacatggtaaatgcaacattgagtgtgaaattgataaatagccaag

SEQ ID NO: 219293 - DNA, 546 bp, Homo sapiens
gccatgacaagtagaagttttaatttaatagaatgtgtaatcgctcacatctgaggttctaattagcacatggttcttctcaacacagggaatgggaacctaggctccctccagtgtgtggttctgtcatcccatagggtagtttatggaaatggcaaagacagcatggaggatgcacagccrtttctaacaagtggcttagaaatgtcactcatcactgccacttacttcccattggtgagaattcatctcataggcagacccacctgcaagaagtgtgcagaagaatgaatgtggcctgtgattgggcagccacttccttgttacaactgtgttctatggaaaaggagaaaagtttgtggtggatagatagccattgctgcaggaggaattggaaatagcagaattccatctcaagtatctgtagtattcactgccagatagatagatagatagatagatagatagatagatagatagatagatagataaactttccaaatagatctttgcccattaatgttttatccatccttcaaggctcag

SEQ ID NO: 219294 - DNA, 626 bp, Homo sapiens
acatactagaaattgcatacttctcagatgattaatatatatttgtgttactttagacatttgacagacatttggggtttacgcaaggtagtgatgaaaactaggagagaagyatctgcttccctttagtctgcgctgtggagttctgtgagtcatgttccatagacttacacatcactccagaaacatgcttcattctgccatgtttcatgtgtcatcctgcttgtgagtgcaaccttgatcttcagcttctcagtgcaaaagacagggaagaagctaccagaacacaggccccggtgtcactttccagatttcactagctgagtgaattttgaaatgttatttgatatttccccattagtacaatcaagttaatagtatcaccatgtcagaattgttttaagaattaaatgatgtacaaaccacctagcacagtacttgtccaaacaatctattaattcagcttttcattcaacaaatgtttattgtgtacctactatgtaccagtttacactccagaagaaaaaagactattttaataaagcatatagtatgttctatggcaaagacaaaagctgcaaggtggaatatggggaattctgaaatggtattttgtttgtagaccc

SEQ ID NO: 219295 - DNA, 626 bp, Homo sapiens
acatactagaaattgcatacttctcagatgattaatatatatttgtgttactttagacatttgacagacatttggggtttacgcaaggtagtgatgaaaactaggagagaagtatctgcttccctttagtctgcgctgtggagttctgtgagtcatgttccatagacttacacatcactccagaaacatgcttcattctgccatgtttcatgtgtcatcctgcttgtgagtgcaaccttgatcttcagcttctcagtgcaaaagacagggaagaagctaccagaacacaggccccrgtgtcactttccagatttcactagctgagtgaattttgaaatgttatttgatatttccccattagtacaatcaagttaatagtatcaccatgtcagaattgttttaagaattaaatgatgtacaaaccacctagcacagtacttgtccaaacaatctattaattcagcttttcattcaacaaatgtttattgtgtacctactatgtaccagtttacactccagaagaaaaaagactattttaataaagcatatagtatgttctatggcaaagacaaaagctgcaaggtggaatatggggaattctgaaatggtattttgtttgtagaccc

SEQ ID NO: 219296 - DNA, 579 bp, Homo sapiens
tatccagaataggcaaatctgtagaggtgatggattagtggtttcccagggctgggcatttggagggaaatggggagtgactgctaaagggcacacgggatttcttttggggaataagaatgttctaaaagcgattgtgataatggttacacaaatctgtcactatactaaaaataatggaattgcacatattaaatgtgtaaattacatggtatgtgaattatatctcagcacatgtttaatttttttttaagtgggttgtggttatgtagcatgtaccttccttaggtgggtacctgccatagtctccatagttccatattgactgccctacactgggacccagttaacttctttgattttggcctctgttggcatttgacattttagcctcagttcatattcatgagcattttcctttttctagtacctttatcatgataagttccctyttcttatccttttcctcatgaaaattacctttactggtcatcctagagcacatctcctataatattttttgacatgtagttatcaagtttctgacaaagaaatgtatttccttattagtaacaatat

SEQ ID NO: 219297 - DNA, 586 bp, Homo sapiens
aagttttcccagcagaagccctgagatgactcttattgtctgaattggtatatgtgttcaatcttgaatcaattaccagagtccaagttgatgaagtgttccgattagtcaagccaaaatcacatacccacccatggagccagggggctaagtaagctcccctcaaaccacctggataaagagaagagaagacatagtactaaaaaaaattgaggttttcttacaaaaaaaggggattttgaatagacaaaaataatgaacatcttttaaaacatgattwttcagtttagaggtggcacaaaactgagagatgtagctattaataatattgacaggaagaaggttcaaaagatttcaataagctactggagtgggcttaaactaacacaattaaatttaatcagaatagaaggaaagtttaacattgacatcaaaatctcagttacataagtaatgttggggctattacttcaatgccaaagcatgaaagttttagttgtctacaaattcaattatttattaaccacctaaaaagctaatgtaattctctgctgttttacaagagctatactgcctcagtgatcat

SEQ ID NO: 219298 - DNA, 586 bp, Homo sapiens
aagttttcccagcagaagccctgagatgactcttattgtctgaattggtatatgtgttcaatcttgaatcaattaccagagtccaagttgatgaagtgttccgattagtcaagccaaaatcacatacccacccatggagccagggggctaagtaagctcccctcaaaccacctggataaagagaagagaagacatagtactaaaaaaaattgaggttttcttacaaaaaaaggggattttgaatagacaaaaataatgaacatcttttaaaacatgattattcagtttagaggtggcacraaactgagagatgtagctattaataatattgacaggaagaaggttcaaaagatttcaataagctactggagtgggcttaaactaacacaattaaatttaatcagaatagaaggaaagtttaacattgacatcaaaatctcagttacataagtaatgttggggctattacttcaatgccaaagcatgaaagttttagttgtctacaaattcaattatttattaaccacctaaaaagctaatgtaattctctgctgttttacaagagctatactgcctcagtgatcat

SEQ ID NO: 219299 - DNA, 586 bp, Homo sapiens
aagttttcccagcagaagccctgagatgactcttattgtctgaattggtatatgtgttcaatcttgaatcaattaccagagtccaagttgatgaagtgttccgattagtcaagccaaaatcacatacccacccatggagccagggggctaagtaagctcccctcaaaccacctggataaagagaagagaagacatagtactaaaaaaaattgaggttttcttacaaaaaaaggggattttgaatagacaaaaataatgaacatcttttaaaacatgattattcagtttagaggtggcacaaaactgagagatgtagctattaataatattgacaggaagaaggttcaaaagatttcaataagctactggagtgggcttaaactaacacaattaaatttaatcagaatagaaggaaagtttaacattgrcatcaaaatctcagttacataagtaatgttggggctattacttcaatgccaaagcatgaaagttttagttgtctacaaattcaattatttattaaccacctaaaaagctaatgtaattctctgctgttttacaagagctatactgcctcagtgatcat

SEQ ID NO: 219300 - DNA, 482 bp, Homo sapiens
gaattctatatacaccatttctttggaaccttcagccctcaagattccaacatcatgacctcagtttcaacacagttgtccttagtcctcatgtcactgcttttggtgctgcctgttgtggaagcagtagaagccggtgatgcagtcgccctcttgttaggtgtggttctcagcattacaggcatttgtgctgctcgggagtatatgcacgaaaaagaaatggacagatgtgagtgtgaaaggcctactgagtcaaacctcaccctgraaacctttgtgctatagaggctaaacctgagctttggggtctgaaagtttccaagaatcagtaaataagggagttttacatttttcgttgtttccatgaaatgggaacagacatacatatatgaattgaaaaaaatatgttttctttacaacaaataatgcacagaaaaatgcagcctatcatttgtatttgctagttagaaaggaggtcaaag

SEQ ID NO: 219301 - DNA, 379 bp, Homo sapiens
atgaataagtaagtactcctgcaagttgcagggggaaaatttatgcaagatttttcttcaaatgacagattcatggttggaagtctgtctcagggttatttatttattgtcaggatggcagtctccgctggcagggctttatcgaggggtgtgtcaagaattaatttcggaattggttggtgacaagtgatgctgacttactcaatagcacgtatgtgcatgttgataacccattgagagtcataatcagatgagtgaagaagccccctrtgcatcccaaccaatccttctgaattcagggttaaagtagaaaaagcatcctcaactaacaggactattcgtatgggtgatgtcatccttctctaaacaattatttgat

SEQ ID NO: 219302 - DNA, 562 bp, Homo sapiens
cagagaataacttttgtacttcttttgttaaatttatttctaagtattttatattttttgatgctattgtaaatggaattgttttgttcattttccctttgggtttttaatatatagaaatataatggaccactctgaaaccttgacggaagtatttattagttctaatagcttcttgatggattccttaggatgatagctctacaagatcatgccatctatgaatagaggtcggtttacttcctttctcatatagatatctttcatttcattttcttgcctaattgccctagaacatccagtgcaatgtggggtagaagtggtgaragtgaaacaccttgttcttttaaagattttagggaaaagcattgtcttttaccattataaataaattaggcacagaaagacaaataccacatgacctcatttatatgtggaatctaaaaaagaacttacagaagaagagagtagaataggggttgctaggaccgaggttaaggaaggagtgtttggtgagataatggcgaaagaacaccaaatttcaattaaataagatgaataa

SEQ ID NO: 219303 - DNA, 557 bp, Homo sapiens
agattgtttggatcagaaatggaagataagcattttatatggtataatttattactttaaattcctgtaacactatagatttattctcaaatactttgaaaaatcgaacacttaaattcagggcttttatctaaaacatggaaatggaataatggagcaagtcaaatatcaatattatcattttagctgtttaataatgatggctattgaatgctaaacatttaatrgtaaaggtagtatgatatggaagttactactaaattattagatattgtggcccacctggtgagcttaaatataattttaaaaataaatctaacagtgaaaattatttagaagggttgattttgaaagtggacattgtcactcagcaccattgattggatggcgatcataatggtggtgggaatgatgatgctcatggtggcaggtgtgatgatgaagatgtggtgttggtttcaggtgtggtggagatggtagctaacataaaattggagcctaatatatgcccatccctcttgtaagcactttacacataccacctcattgaagactca

SEQ ID NO: 219304 - DNA, 557 bp, Homo sapiens
agattgtttggatcagaaatggaagataagcattttatatggtataatttattactttaaattcctgtaacactatagatttattctcaaatactttgaaaaatcgaacacttaaattcagggcttttatctaaaacatggaaatggaataatggagcaagtcaaatatcaatattatcattttagctgtttaataatgatggctattgaatgctaaacatttaatagtaaaggtagtatgatatggaagttactactaaattattagatattgtggcccacctggtgagcttaaatataattttaaaaataaatctaacagtgaaaattatttagaagggttgattttgaaagtggacattgtcactcagcaccattgattggatggcgatcataatggtggtgggaatgatgatgctcatggtggcaggtgtgatgatgaagatgtggtgttggtttcaggtgtggtggagatggtagctaacataaaattggagcctaatatatgcccatccctcttgtaagcactttacacawaccacctcattgaagactca

SEQ ID NO: 219305 - DNA, 544 bp, Homo sapiens
tctccttagtaaaactactaagtactaaggttttgtttttgtttgtttttttgttttttggtttttttgggtttttttgttttttgtttttttgagatggagttttgttcttgttgcccaggctggagtgtaatagcacaatcttggctcgccgcaacctccacttcctgggttcaagcgattctcctgcctcagcctcctgagtagctgagatgacagacatgtgccaccacgcctagctaatttttgtatttttaatagaggcagggtttctccatgttggtcaggctggtctcgaactcccgacctcagctgatccacccacctcagcctcccaaagtgctgggattacaggcgtgagccaccgtgcccggccaagcactaagtttttaggagactcaacagggtcccttagagtgagtgttgaggttcccaagaccttcaaccaaaacagttcctctttaatgtttccactcaacaggtttctgctgaatatttcttctgaaggktattctgctgttaagaaaaaggagggtggggactt

SEQ ID NO: 219306 - DNA, 607 bp, Homo sapiens
gaagttcaaagttacagtgagctgtcgtaccacctagcctgagcaattcaatgagaccctgtctctaaaatttaaaaaaattttaaaaaacccagaaagggaacactgacacatactacaacataaatgaaccttgaagacattatgctaagtaaaataagccagacccaaaaggacaaagattgtataattccactcatattaagtacccggattagtccaattcacagagactcaaagtagaatggtggcygccaggggccagagggcgggggcaatgggaattactgtttggtgtgtttggtgggaagacagtttcacagaaggaaaaatgaaaatgttttggaggtggctggtggcaatggttgcacaacaatgtggatgcacttaatgccactgaactggacaactagaaatggttaaaatggtaaactttatgttatgtgtattttaccacaacaacaaaaaaaacacagtggaaaagaggactaaactactgctatatgtgctacaacgtgaaaaaacattggtgaaagaagccaggcacaaaaggctggtagtgtatgatttcatttaaataaaatgtccaggataggcaaatccatag

SEQ ID NO: 219307 - DNA, 581 bp, Homo sapiens
gtaccacctagcctgagcaattcaatgagaccctgtctctaaaatttaaaaaaattttaaaaaacccagaaagggaacactgacacatactacaacataaatgaaccttgaagacattatgctaagtaaaataagccagacccaaaaggacaaagattgtataattccactcatattaagtacccggattagtccaattcacagagactcaaagtagaatggtggccgccaggggccagagggcgggggcaatgggaattactgtttggtgtgtttggtgggaagacagtttcacagaaggaaaaatgaaaatgttttggaggtggctggtggcaatggttgcacaacaatgtggatgcacttaatgccactgaactggacaactagaaatggttaaaatggtaaaytttatgttatgtgtattttaccacaacaacaaaaaaaacacagtggaaaagaggactaaactactgctatatgtgctacaacgtgaaaaaacattggtgaaagaagccaggcacaaaaggctggtagtgtatgatttcatttaaataaaatgtccaggataggcaaatccatag

SEQ ID NO: 219308 - DNA, 412 bp, Homo sapiens
tttaagagataagaaaatcagaaaagagagagggagacaagtgtgtctaataaagaggartagctacagtggctcagttggtacagatttatcataactgctttcaaaaactagtccctgaaattgctcattaaatttcccaaattctttttagagcaaggtaggaaatgatacagattgagaagggtggatcttgtactcctagacatacacatatagacatggtgacacctatgcccaggtacaggagtatagacagattcaaaatagattagctggactccactgggaaggaactctcacagtgactgccctgccactagcattcaaccaatgttcccagacttgatattaagaagaagaggtgaagagagaattgagcttgcagagtgagaccacagggaagagtgga

SEQ ID NO: 219309 - DNA, 412 bp, Homo sapiens
tttaagagataagaaaatcagaaaagagagagggagacaagtgtgtctaataaagaggaatagctacagtggctcagttggtacagatttatcataactgctttcaaaaactagtccctgaaattgctcattaaatttcccaaattctttttagagcaaggtaggaaatgatacagattgagaagggtggatcttgtactcctagacatacacatatagacatggtgacacctatgcccagrtacaggagtatagacagattcaaaatagattagctggactccactgggaaggaactctcacagtgactgccctgccactagcattcaaccaatgttcccagacttgatattaagaagaagaggtgaagagagaattgagcttgcagagtgagaccacagggaagagtgga

SEQ ID NO: 219310 - DNA, 615 bp, Homo sapiens
aagcttcacttaaggattttttcctacaaggactcagctgtcacatttgggggcattttgttttgttttgtgaatgtttaaccaagctaatggaggaactattggtacaatgaactcaaaaaatgtacaggatcagcagggcatagtggctcacgcctgtaatttcagcactttgagaggctgagttgggaggatcacttgagcccaaaagttcaagatcagactgggaaacatagtgagacttcatctctaaaaaattaaaataaaataaaataaatacaaggaaaaaagaaaaatgtactggattgaggggaaaaatttatgatgcaaacagaagagcatttatgattgaagtgagagaaggataatgggggaggatggtgaaagaacatcaatctaaatttatatttaaatttacatgaatccagtgcaggcrgcatctcaggggagggaggagtctatttttctgttgatttcctgggctaaattcctgactgactcattgctgaaagtaaataacatattattatagttgaaagatttttttttagtgtagtgatttcaaactgtgctcatttatatgcaacccatgaacgcctcccttctcctatgtct

SEQ ID NO: 219311 - DNA, 524 bp, Homo sapiens
agagttaatggtgagttaatggttcttctggatcttagcctgctgtcagctggcatttctaatttattgcaaactagacgcttccaaaggaaatggaaaaagtcacacctaaaactaatcctataattaagtaaaacaaaaacaaaaactcaaaatccacaagtagttccagtccactactattagaaactaaaaagcatggggccttgtccttttatcagccttttgtttttttagaaaaaaaaaaaaaaaaaaaactattcagaagacttttccacaaaattctctatttatctgaatcattatgattgaagagacttgatctataaattgaaccatcagtgttagcctcaagaaaagcaaaaacccaytgggttgtgagctccttgaagccccgggccagggcttcatgaccaccaaagccccagctcactctgcaaggctcctagcagttgctcagtgaaaaccagttgcataatgaatgtataacagcttgcactcttaccaacactgatgctggaatt

SEQ ID NO: 219312 - DNA, 592 bp, Homo sapiens
atgttttctcataaatctcgatgaactagctaagtagagcaggccacatgtgcattataaaagaaaatgccaccaaattattgtcatttttatttctataaatgaggctttgatttgccaggttaaaataatttgaacaggtgttgccaatccaaggtctgtgatcaccctgaaaatcaccctgaaggcaattttaagcttargagtccatggcaatctaagagatcatccccatgggattcggctacattgtcccctttcatctcttctagtatgttggaacctccaaatcaagacagcagaagaacagggacactcaaaacatatggctcagctgcatatctcatgctgatagtctgtaagaatttcctcaatatttgtttagtggagacagggagaaaatgaatacctatttctttgtaaaatatacatcagctgtccagtgacctctttccttttaacctctcccataacaaaactctaatcccataaaagtttgaatgagcaatgcagaatttactaatcatttcataggggaagctaggagttggtttatagcatttcctgggaaaacattagaagcatctcttgt

SEQ ID NO: 219313 - DNA, 470 bp, Homo sapiens
acactattttaagttcaaaaatgcaagcttcagaccactattttaggataacaatttaaaaaacagtgtatttttctataytcaggtagacgtagaaatacagatagggtctatgttcataaataagtctgaaaagaaatgcccacattaagtaaatatataacgaatgccaactgaaattacacacagcaaagtttctatttaaaacacaccattggattagtgatttgttttataaaactggaatcaaaaaagcctatatccattttggataatcatatccttgtttaaaggaagtattagtaaattctaaataataggaaatctattccttggcctgtaaatattctacccaaatgaaaagtgaagcaacttcttccaaagaccgtgtcttagcagagctggggaactgtcatgagaagggtcacagctcatgatttaacacagatgtggccaatgtctatttttat

SEQ ID NO: 219314 - DNA, 392 bp, Homo sapiens
gaagcagccggcgggacaggctggccagctggggcggcccggagtctgagcctagagcctggcgccgmgaggtccgcactgcagccgcgccagttcccggagagcagccggcctggccctgcctgcactgagcttttccggggctcacgaccccagaactcgtgtgtgtgtgtgtgtgtgtgtgtgctcacgaccccagaactcgtgtgtgtgtgtgtgtgtgtgtaaagcgcggctgcttctgagcacgggtgggaagaacagaatctgtcggctcctcagattttaagtggagctttttatgtctgtctcacagttacttccagaaacaagacttttctcccggccaccccccaaacgggatttaatgtaatacacacgagtttcatcat

SEQ ID NO: 219315 - DNA, 517 bp, Homo sapiens
aggagtcaataagatagcatttaaatattaaatttttcagtgtaagaaatatatagtttataaataaaatattttatagtatatgttcatttgctgtaactcttatgaatacataggatggattttgcactagttattggaattataggcataaaacattatggaatagtcctcaagtgcccaaagtttaatagtgaagaaataattgaacctttctacatatgtaaatttaactttctttttcttttttttcttttttctttttcttttttttttagaaggagtctcgytctgttgcccaggctggagtgcagtggcccttagaattattctcaggtttattatagaattcaactgattcctttccctactgaatttatcgatgatagtctacctacctatagttagaagttttcctctgatcttaaatttaactcttaccaaatatctagaaatttgaattatttattattctcttttaaaggaataaagcttatattttttagtgcgtgttagg

SEQ ID NO: 219316 - DNA, 576 bp, Homo sapiens
ggttattatattaaacaatgatataataaacactattttcattttttaaaattataatcaatagtccagtgaatcacttgatgtttatctttttggtgatgacttttatgatagaatattagaattggaaatgctagcacaatgattaggcacattaaaaacttgtttgattatttataggttgttctccaccaaaagaaaatatgaatattcattctcaataacaagatatggcattacctatttcaccataagctttgttttaaaaaataagattagtgagttgcatatcatttctgtgttaatttycatgtttctgattaacagtgttttgaatatcataagatatatatttttttaaagttaagtgtgttttgtctgtctttctttcttaaccattaacaaagactgaaataaatggaatttatgttgttaagcatgaaagaaatctttttagtgagaaagagaaaaagggggcaaaatgacacaattgtttttggtaaaattatgtgaatcaatgcaagctgctcagaagggcactaagttaacccagaaccaacctgtcttgaatgtaga

SEQ ID NO: 219317 - DNA, 558 bp, Homo sapiens
cactggacattttcccctgtatataagcccctcagtaaaaccctatgtctctttgctgctatggatctcttcttcagtcccttggacctactgccatccccactggagttgacaggggtttggcacaacaatgccttacctcacttgttatcatttttttgtgatgagaatacttttacatccattcttagcatttttcaagatgatgtattgctaactacagttaccatgaatatatctcttgaaattgtatctcctatctaactgaaattctgcatcatttggccaacatctttccaccaccacgttcccagttcctggtaatcamcatactactctctacttctatgagattagcttatttagattccatgaataagatcatgtgatatttatttttctgtgcctgccttatttcacttaacataatgtcattcaggtttatccatattgtctcaaatgacagaacttccttttcttatgactgaatagtattacattctgaatatatactgcaattcttttaagtatatttgtattagaaaaggaagttgtatt

SEQ ID NO: 219318 - DNA, 558 bp, Homo sapiens
cactggacattttcccctgtatataagcccctcagtaaaaccctatgtctctttgctgctatggatctcttcttcagtcccttggacctactgccatccccactggagttgacaggggtttggcacaacaatgccttacctcacttgttatcatttttttgtgatgagaatacttttacatccattcttagcatttttcaagatgatgtattgctaactacagttaccatgaatatatctcttgaaattgtatctcctatctaactgaaattctgcatcatttggccaacatctttccaccaccacgttcccagttcctggtaatcaccatactactctctacttctatgagattagcttwtttagattccatgaataagatcatgtgatatttatttttctgtgcctgccttatttcacttaacataatgtcattcaggtttatccatattgtctcaaatgacagaacttccttttcttatgactgaatagtattacattctgaatatatactgcaattcttttaagtatatttgtattagaaaaggaagttgtatt

SEQ ID NO: 219319 - DNA, 497 bp, Homo sapiens
gcccacctttgtcatttctactcracataatactggacggtctagatagagcaattaggcaagagagagaaataaagcaatatacatttaaaaggaagaaattaacttgtccttctttgcagatgacatgatcttttgtagagaaaaccctaaagaccaccctagaaattgttagaaccagtatacagtaaagcttagaatacaaaactgacctacaaaaattagtaacatatatacgaataaaggaccatttgaaaaatgaaccaaggaaacaattctgtttataatagctacaaaatacttagaaataaccttttttatttttaattttgtggatatataatagttatacatatttatgtggtaaatgtgatattttgataaaagcatacaatttgtaatgatcaaattagggcaattgggttatccatcacttcaaacatttattatttcttcatgttagaaatacctgttatgataactatagttaatagtta

SEQ ID NO: 219320 - DNA, 537 bp, Homo sapiens
atcaaatagcatccccaagagcaaacaatttatctccctttgttgctgagatttcctccagctctctgagttcttgcccttcatagggcttttttatgcacttctttatcctttgatattctgtgttactctaatagcattcccgttatctgcttatttaattagcatttttgtcccctgtgactagtttctgtgttcctctaaccaaagaagtctatttgtctactgataaatgtgcttacaatattatttagcacctaattggggcccccaaaacattccttaaatgaaagagttgaataaatatgcatagattatcagcatgatgaatgcattaatgaaacaaggaacaaagttataaattatggacatwcatgtgcccaccaagtgtaatactttctgaaggcaagtagttgctgtcacaaacaaatttacagggaatgacgaatgcaagcactgcagattagcatggctgcctcaagtagcactgataatttaaagtgtgtgaacaaaattccagtttcaaaacacatcaaa

SEQ ID NO: 219321 - DNA, 551 bp, Homo sapiens
gtgtccatagaccgtcacaagtctttrttagctttcttttcctgactcttaaatgagaaaagaaggctatgggggctacaatgagataaatgtctcttcacaaggtgagataaaagcctgctggctgggcacgttggatcatgcctataatcttagcactttgggaggctgaggtgggcagatcatctgaagtcaggagtttgagaccagcctggccaacatggtgaaaccccatatctactaaaaatacaaaaaattagacagatgtgttgttgggtgcctgtaatcccagctactagggaggctgaggcaggagaattgcttgaacccgggaggtggaggttgcagtgagccaagatcgcaaaagtgtattccagcctggacaacagagtaagactccatctcagaaacaaaacaaagaaaacaaaacaaaacgaaaacctgctaaactcttttcccttggagaataagcctgtgttatgaagaaggatctgattatatttcagaatgtttactcttcccttttctctaccagcaccttgaggagatct

SEQ ID NO: 219322 - DNA, 555 bp, Homo sapiens
ctctatcagggttcctaggctgtgtccatagaccgtcacaagtctttgttagctttcttttcctgactcttaaatgagaaaagaaggctatgggggctacaatgagataaatgtctcttcacaaggtgagataaaagcctgctkgctgggcacgttggatcatgcctataatcttagcactttgggaggctgaggtgggcagatcatctgaagtcaggagtttgagaccagcctggccaacatggtgaaaccccatatctactaaaaatacaaaaaattagacagatgtgttgttgggtgcctgtaatcccagctactagggaggctgaggcaggagaattgcttgaacccgggaggtggaggttgcagtgagccaagatcgcaaaagtgtattccagcctggacaacagagtaagactccatctcagaaacaaaacaaagaaaacaaaacaaaacgaaaacctgctaaactcttttcccttggagaataagcctgtgttatgaagaaggatctgattatatttcagaatgtttactcttcccttttctctacca

SEQ ID NO: 219323 - DNA, 397 bp, Homo sapiens
tggctgattttagcactggggaagagattatataagacaattctggagcatcttatagtcccctccccaaaaaacggatatcaaaaacatactggagtaaacctgaacttgaaagcctttctaatgatgaaaactgacacaatttgagccacataatcaacaatattactactggattttaacacaaagaataaaataaatatccatgagcatatactgatagaaataaatggaaaaataaatgagagagactaatgtaatttaatacaatttccaaataacattatagatacctcttcttccagamtgcttctcctcctcttgaagttgtgcttgattttgtgacttgctttcaaagaataggcaggctctgaaaaacttatatttaaaaggagac

SEQ ID NO: 219324 - DNA, 423 bp, Homo sapiens
agaattcttgttccattacacaacaactttaggcagtcaaaatttcaaatttgagaaggaggcaagagtcttgtcgtgcaaggcactggtccattttctgcagcaggtttggttcaattaatttctgacatattctttcctttgtaaaggtacaaagataacacagagagagacccacagctttttcaaaggtacaaaaatttgggcaatttgagggaaaatacaaggaagagaggggagatttactctacacctccacacccccaaatagagaaagccagagatgtgtattatctgtgtgtrtgtgtgtgtgtaggtgtgcacatgcatgcatgaacatgcacacatgtgtgtgacttgtgactccaaagtaatgtagcagattttcagacgtggtttttggaacctttcttattacattaa

SEQ ID NO: 219325 - DNA, 529 bp, Homo sapiens
ggtgtattttctccagtattgtaaataatgctccaatgaacacgggacataaatctttgtgtacatctctgattattccttagggcaaatttctaaaagtggaatttctggaacaaattttatgcatgactttaatgctttagaaatatattgtcaaatttccctccagaaatagtgtrgtaatttacactcacaccagcagtgtgtgagtgactgtttccctggacgcttacagggaattgttgttttaaaacatctttgccaatttccacttttaaatttatgatgattgttattaatgccatgaaaaaggtatctttttaacaaatctattgatttctaacacacattgccattgataatcaaatataaaatattaaatataactgactcctggtttatccactggatcagtggttgacagactttttctggaaaagaccagataaaaaatattttatactttgtggaccatatggtttctgtttcaactacccagctcagctgctgcagtgcaaaagcagccaca

SEQ ID NO: 219326 - DNA, 529 bp, Homo sapiens
ggtgtattttctccagtattgtaaataatgctccaatgaacacgggacataaatctttgtgtacatctctgattattccttagggcaaatttctaaaagtggaatttctggaacaaattttatgcatgactttaatgctttagaaatatattgtcaaatttccctccagaaatagtgtagtaatttacactcacaccagcagtgtgtgagtgactgtttccctggacgcttacagggaattgttgttttaaaacatctttgccaatttccacttttaaatttatgatgattgttattaatgccatgaaaaaggtatctttttaacaaatctattgatttctaacacacattgccattgataatcaaatataaaatattaaatataaytgactcctggtttatccactggatcagtggttgacagactttttctggaaaagaccagataaaaaatattttatactttgtggaccatatggtttctgtttcaactacccagctcagctgctgcagtgcaaaagcagccaca

SEQ ID NO: 219327 - DNA, 529 bp, Homo sapiens
ggtgtattttctccagtattgtaaataatgctccaatgaacacgggacataaatctttgtgtacatctctgattattccttagggcaaatttctaaaagtggaatttctggaacaaattttatgcatgactttaatgctttagaaatatattgtcaaatttccctccagaaatagtgtagtaatttacactcacaccagcagtgtgtgagtgactgtttccctggacgcttacagggaattgttgttttaaaacatctttgccaatttccacttttaaatttatgatgattgttattaatgccatgaaaaaggtatctttttaacaaatctattgatttctaacacacattgccattgataatcaaatataaaatattaaatataactgactcctggtttatccactggatcagtggttgacagactttttctggaaargaccagataaaaaatattttatactttgtggaccatatggtttctgtttcaactacccagctcagctgctgcagtgcaaaagcagccaca

SEQ ID NO: 219328 - DNA, 529 bp, Homo sapiens
ggtgtattttctccagtattgtaaataatgctccaatgaacacgggacataaatctttgtgtacatctctgattattccttagggcaaatttctaaaagtggaatttctggaacaaattttatgcatgactttaatgctttagaaatatattgtcaaatttccctccagaaatagtgtagtaatttacactcacaccagcagtgtgtgagtgactgtttccctggacgcttacagggaattgttgttttaaaacatctttgccaatttccacttttaaatttatgatgattgttattaatgccatgaaaaaggtatctttttaacaaatctattgatttctaacacacattgccattgataatcaaatataaaatattaaatataactgactcctggtttatccactggatcagtggttgacagactttttctggaaaagaccagataaaaaatattttatactttgtggaccatatggtttctgtttcractacccagctcagctgctgcagtgcaaaagcagccaca

SEQ ID NO: 219329 - DNA, 577 bp, Homo sapiens
gtctatcaccattgaagacacctggaggctggaagaggtggccatgtcctcaaatgtgcagataccaatgcaagggcacaaggatgttgaagaaccagggaaatattacaccatcaaaagaaactcataaagctccaataatgaatctcgaagaaatggagatctatgaaatgactgacaaataattcagaataatcttctaaattctttgggaaaccataagaaaatacaaatagaaatgcaatgaaattttgaaaacattcatgagcaaaatgagaagtttgatcccctcccccraaaacaaaaacagtaaaaacaaacaaaaaacaaatagaaatcctagagatttgttgaagagaacgaagctttgcataatacaaattctagaatgaaaagacagagaaaaggccccaaaagaatattttataaaataatggctgaaaattcccaaatctaaggacagatgacaaaatctgggcacaggaagctcagaagtctccaataaatttcaatccaaaaaagagttcaccaagacacatcatagtcaaactatcaaaaatcaaacaccataaaaaaa

SEQ ID NO: 219330 - DNA, 577 bp, Homo sapiens
gtctatcaccattgaagacacctggaggctggaagaggtggccatgtcctcaaatgtgcagataccaatgcaagggcacaaggatgttgaagaaccagggaaatattacaccatcaaaagaaactcataaagctccaataatgaatctcgaagaaatggagatctatgaaatgactgacaaataattcagaataatcttctaaattctttgggaaaccataagaaaatacaaatagaaatgcaatgaaattttgaaaacattcatgagcaaaatgagaagtttgatcccctcccccgaaaacaaaaacagtaaaaacaaacaaaaaacaaatagaaatcctagagatttgttgaagagaacgaagctttgcrtaatacaaattctagaatgaaaagacagagaaaaggccccaaaagaatattttataaaataatggctgaaaattcccaaatctaaggacagatgacaaaatctgggcacaggaagctcagaagtctccaataaatttcaatccaaaaaagagttcaccaagacacatcatagtcaaactatcaaaaatcaaacaccataaaaaaa

SEQ ID NO: 219331 - DNA, 404 bp, Homo sapiens
tgcagaattcctctgctggaattttcttcagagatggcggcacattctgttaaatcttcacattaatgactaatctttattctttgagcaaagatatgagtttttttttttcgtttgtttgttttttgtttttttttttttggtagcactctagcaccagaatgattttgagttaagtctaatgaataaagaggggagccaccctgggtaataccatctatggtcaaaaacgaaatgtgactaaaaagaaattagactgatttttcttggtaaagataaggaaataaatagataatttaaaaattattttaaaatattttaaatctaaraaactctttcttgaatcaacaaacctatggaattttaagcaaatgaaaccaataaaagcagagctgctttggtta

SEQ ID NO: 219332 - DNA, 422 bp, Homo sapiens
ttcagagatggcggcacattctgttaaatcttcacattaatgactaatctttattctttgagcaaagatatgagtttttttttttcgtttgtttgttttttgtttttttttttttggtagcactctagcaccagaatgattttgagttaagtctaatgaataaagaggggagccaccctgggtaataccatctatggtcaaaaacgaaatgtgactaaaaagaaattagactgatttttcttggtaaagataaggaaataaatagataatttaaaaattattttaaaatattttaaatctaagaaactctttcttgartcaacaaacctatggaattttaagcaaatgaaaccaataaaagcagagctgctttggttaagggggtgtctggagcctgggtccctgctcccataccttgaatt

SEQ ID NO: 219333 - DNA, 461 bp, Homo sapiens
taggagctagaaggcagcaagactggctggaggcccttgtgaggggataagagatgaacatgatttcctaaaacagatcacagcctttttaagggaaagggaaatgccttgcttttccttgtttccttgtttttcctgtacattcagtccagaatgtataatgctgtggaataaccccttgtagagccactgacttatgagactatctaaagacaggtgctgacctttgccgctgatcactgtatttggcctcctggaacaagagtgcctcatgaataaaacaagttagagmaacctaaggagattcaagcagaggtcactctatagtgaggtgataaattttgtgaccgatatggaggcctagcttagtcgcaggcaatcattactgaattacctggtgataacaggaggtgaagaaaatgtgcattctaagcacaatgcaaatgcgaatcactagcttc

SEQ ID NO: 219334 - DNA, 633 bp, Homo sapiens
aagtaataaggatagcaacagcaacaaccaccaccattagaaagctcaacctggtcaggtgcagtggctcacacctgtaatcccaaagcactttgggaggctgaggtgagagggtctcttaatgccaggggtttgagaccagcctgggcaacatagtgagaccctcatctctacacaaaattaaaaattaaaaaaaaatttttaaaagctcaactcaaatgccaccaccttctctgagaakacttctcaaaatctctcaaagtccctcttcctcttctaaacttgcataatgttttattttgtaccacttttggtaaaagataccatattatggcttatattaaaattatttttatcttttctattagacttttaagttcctgagggaatgttgcccaattgttttatttctatacttttccacagaacttcatattatgcctatgacagccagatcttaaggtgactctggtgatttttgacttctggtattcatgtcctcatataatccacccccccttgagtgggggtgggactgtgacttgcttctaccaaggaaaatggcaaaggtaataggatgtcactcctatgattatgttacattatatacgactccattttgccagcatgctc

SEQ ID NO: 219335 - DNA, 633 bp, Homo sapiens
aagtaataaggatagcaacagcaacaaccaccaccattagaaagctcaacctggtcaggtgcagtggctcacacctgtaatcccaaagcactttgggaggctgaggtgagagggtctcttaatgccaggggtttgagaccagcctgggcaacatagtgagaccctcatctctacacaaaattaaaaattaaaaaaaaatttttaaaagctcaactcaaatgccaccaccttctctgagaatacttctcaaaatctctcaaagtccctcttcctcttctaaacttgcataatgttttattttgtaccacttttggtaaaagataccatattatggcttatattaaaattatttttatcttttctattagacttttaagttcctgagggaatrttgcccaattgttttatttctatacttttccacagaacttcatattatgcctatgacagccagatcttaaggtgactctggtgatttttgacttctggtattcatgtcctcatataatccacccccccttgagtgggggtgggactgtgacttgcttctaccaaggaaaatggcaaaggtaataggatgtcactcctatgattatgttacattatatacgactccattttgccagcatgctc

SEQ ID NO: 219336 - DNA, 366 bp, Homo sapiens
ttgtttaagattaatctaagactttagagaccaaataaaakataagcttttatgtacaaactgaagacagtatttagtatttacaattccatcaactatattttatggctaaaaaagaaaaagaggaattgttgcacaatttgagtcaactggtctcaagtttggtatgaacaatatcttagaaacccttgacgaaaatggataatgtccctatcatgttataccgcactcatacaagtttcacagaggggtagggactaatgccattgtgacactctccttacagaggcatctttattaaattgaatactaatgtaaagttcaggttataagtatacatgattcatttattttaaaggtacttag

SEQ ID NO: 219337 - DNA, 620 bp, Homo sapiens
attaattttttaaaactcccagaaaaataggaatgggggaactgcctcatcttgagcatctacaaaaaacccacagctaatattatacgtcatagtgaaagactaaatgcttttctcccaaggtcaggaacaaaacgctcttattcagcctagtactgaaagttctagccagtgctgtcaggcaagaaaaggaaataaaatgcatacagattgaaaaggaagaattaaaactgttcctatttgcatatgacatgattgtgtagaaaatcccaaggaatctgcataaaaacacctagacctaataagtgaatgtagcaagttcaaagkatacaagataaacatacaaaaataaaagtacaaaagtaaacatacaaagtaaaagatgataaatcggacttcatcaaaattaatttttttttgcctgtgaaagactctattaagaggatggaaaactagcaatggacagggagaaaatatttgcaaaccacatgtctgacaaaggactagtacaacatttggaatatatatcatatacttatcaatacagctaaaatttaaaaaatagttgttaaagatgtggagaaactggatcactcatacattgcttgcaggaatgtaaa

SEQ ID NO: 219338 - DNA, 620 bp, Homo sapiens
attaattttttaaaactcccagaaaaataggaatgggggaactgcctcatcttgagcatctacaaaaaacccacagctaatattatacgtcatagtgaaagactaaatgcttttctcccaaggtcaggaacaaaacgctcttattcagcctagtactgaaagttctagccagtgctgtcaggcaagaaaaggaaataaaatgcatacagattgaaaaggaagaattaaaactgttcctatttgcatatgacatgattgtgtagaaaatcccaaggaatctgcataaaaacacctagacctaataagtgaatgtagcaagttcaaaggatacaagataaacatacaaaaataaaagtacaaaagtaaacatacaaagtaaaagatgataaatyggacttcatcaaaattaatttttttttgcctgtgaaagactctattaagaggatggaaaactagcaatggacagggagaaaatatttgcaaaccacatgtctgacaaaggactagtacaacatttggaatatatatcatatacttatcaatacagctaaaatttaaaaaatagttgttaaagatgtggagaaactggatcactcatacattgcttgcaggaatgtaaa

SEQ ID NO: 219339 - DNA, 404 bp, Homo sapiens
ttcctaactgatatctatctcagcctcaaactrtggtttcacaggttgctttgtctttttatcaacagtctgaaaacttttttctatattaatggaactgatttccaatggagattaaacatatttcctcatctaggcaaaatcttgatcaaattacgatgtgatcatcatccctttaccttctgtataattttactgattgcgtaaagaagcacttagagccttttagatattccctgaaattgagagaatctgatttgcacgggaaactttgcctaagttaatgatttgggaagggatcaatgatctaaaacataagggtaaactgccagcttcttttcctactttgcagcaagcctttctcctgtttgcatgacgttactttgactttccaagtccaacgg

SEQ ID NO: 219340 - DNA, 412 bp, Homo sapiens
gaattctgagatgtcctaggattctgaacccctggtgtacacaccctgtgtagtcctctccccttcagcagaagtagagcctgtgaatatgatgggctatcactcccatgattaggttatgttatatggtaatgatgatagaattatgcagatataattaaagtgagagatcagctgactttgagttattcaaaagggagatggcctctacctaatcaggtgagtccttaagagagagattctcccactggccttgaaggagcaacctgccatgtggcttggaggagaccatgtggctagaacccaagaacagcctttaattgctgaaagtggtcacagccaacagccagcaagaaaatgargacctaaatcctatattcacaatgaattgactttcactgacaacctgaat

SEQ ID NO: 219341 - DNA, 393 bp, Homo sapiens
ttctctccgtgggtcacgccagccttctagtcaattttgataagagaacctggataccttggttgccgatgaaggcttcacatgcttattatgtttttgttttgttttttcgatggtagcctccgaacgtctctgtttctagtaagccatcttgccacacggccatttctatcttcactgctcttatttgtctcccttaacccaatccagcctggggactcatacagacttcgattggcaagttaatctttgaccacaaggtggcagtatgcaatgtataaatgctttggtaaggcattttctctggctacaaacacttctctctagggtaaattggctattraccaataagttttaaagaaatgcaatgctataagatgtgtagaggttgtt

SEQ ID NO: 219342 - DNA, 464 bp, Homo sapiens
ctaattgataaatcagaatttttagttaatgattgaccataagaaataaaagtgcctttcatatagtgggagtttaacaaatattttctgactgaataaacaagtgttatatgcatcagaacactccagctggttatgcagtaacatttctccccaacttggaagtctacctagaaaaatcacatgagggtcaagagatttcctgcaaacttattttcaaaagaaatcagcagttgggkgatcctaagttattagagcttgatacaatcaaccccatatcagtaggatatttgccaagaggacaaacatagtcagtggtcagaaaacctctcctaggcacacacaagcaatgtgcactaataatggtctctggtctaggaaaatgctatgatttccttgaaaactcatatttctgcaatcctagtcaagtgctgtcaattaaaccactttttaaaaatagtttt

SEQ ID NO: 219343 - DNA, 596 bp, Homo sapiens
ttacttaaagagttatgtaacttagtgcccatgtactgtaaagaactgttgaatcccacaaaggatttgttaggcaatcaataataccaatgagagcagatattaactccctggtttttgtttaccattagcttacttttcctgagggtccatatctgtgtattaaagacaagcattgcacwgagctctaaatgctcttgatttggaacagttgtgaaataaatcctctgtaattatccatctcctaagccagacacaccacaatacctaacctcaaattgtgttgcaaacatcttctgagtatttgtgcttgttgatgtcactctcatcttttactgcacaaaggggaagaaaaatcaaaactgtgggcacagccaacaaatttctgtggcatggttttgcatgagcatcctttaaaaatacaccatgctcataacaatccttgtcacagcaccactattctatctgctaacacctgccaccattccgtaatatttcattatcattgtatcattaagtttttccatccacagccttatggattcagaaacacttaaatatttctcctctaaggaagtatctacagtttttgcaac

SEQ ID NO: 219344 - DNA, 628 bp, Homo sapiens
acctaattcccttgccaggcatttgtttctcagaaacaaaaaattctgcagtaacctattcaattagtattatgcctatgcgttgttttgtaaatcacaaatgtaaaatagatattctttaaagagtacctactacatgtcaagcaatgaccctgagggataaataccattatacccattttagtgatgaaagaactgaaacaaaaagcggtaaagtaacttrtgcaaagaaatatacctaggaagtagaggggatatgacttgtacccacaaaggattgttaattacttctctattcttcagtctgaaaaataatttcaaacatgtactgtatatatgtcttgactattttatgtacgtcctgtaaaaactcagaaggactggtcagccaacctacaaaatcttgcaagctcttctaatctccctcacactcaatacagtcaaaaattcgaagacagaatcaaggtctgatctgttgatatctcaatgagtctacgacaagtgaagaagttatacattgctgtaaacaacaatgacaaaaattttcgagaaaataattataagggttgagcttacatcctctctatcacagttttatgtacctattccaccaggacaagaaaacaat

SEQ ID NO: 219345 - DNA, 628 bp, Homo sapiens
acctaattcccttgccaggcatttgtttctcagaaacaaaaaattctgcagtaacctattcaattagtattatgcctatgcgttgttttgtaaatcacaaatgtaaaatagatattctttaaagagtacctactacatgtcaagcaatgaccctgagggataaataccattatacccattttagtgatgaaagaactgaaacaaaaagcggtaaagtaacttgtgcaaagaaatatacctaggaagtagaggggatatgacttgtacccacaaaggattgttaattacttctctattcttcagtctgaaaaataatttcaaacatgtactgtatatatgtcttgactattttatgtacgtcctgtaaaaactcagaaggactggtcagccaacctacaaaatcttgcaagctcttctaatctccctcacactcaatacagtcaaaaattcgaagacagaatcaaggtctgatctgttgatatctcaatgagtctaygacaagtgaagaagttatacattgctgtaaacaacaatgacaaaaattttcgagaaaataattataagggttgagcttacatcctctctatcacagttttatgtacctattccaccaggacaagaaaacaat

SEQ ID NO: 219346 - DNA, 628 bp, Homo sapiens
acctaattcccttgccaggcatttgtttctcagaaacaaaaaattctgcagtaacctattcaattagtattatgcctatgcgttgttttgtaaatcacaaatgtaaaatagatattctttaaagagtacctactacatgtcaagcaatgaccctgagggataaataccattatacccattttagtgatgaaagaactgaaacaaaaagcggtaaagtaacttgtgcaaagaaatatacctaggaagtagaggggatatgacttgtacccacaaaggattgttaattacttctctattcttcagtctgaaaaataatttcaaacatgtactgtatatatgtcttgactattttatgtacgtcctgtaaaaactcagaaggactggtcagccaacctacaaaatcttgcaagctcttctaatctccctcacactcaatacagtcaaaaattcgaagacagaatcaaggtctgatctgttgatatctcaatgagtctacgacaagtgaagaagttatacattgctgtaaacaacaatgacaaaaattttcgagaaaataattataagggttgagyttacatcctctctatcacagttttatgtacctattccaccaggacaagaaaacaat

SEQ ID NO: 219347 - DNA, 587 bp, Homo sapiens
cctcttgcaaacagcttttattcctttaagtattcctccttatgttctttttttaaacaaattttgtgctaagttatttcaattacatcccttctttgtccattaacctgcagtattttcctgcaatactcagtaacaaagtctcaaatttgctgcttgacttcaaagactctccataatgtgaccctactttatggtctctgatttcttaataaattctgttccaagaagcccagtctctttacctcttctcatttaaccggatcgtcctgcctctaatcttttgtcaatttcgtcctttccgctcrtgtccttgcttctttctcttcatctatccttttaaagcacaactcaagcccaatcttttcagtgaatttcagaacatacttcatcttcacttcctcctacaaaccttgtagtgatcagtgacatcgttccttcagcaaaatctgtgtgtacatctgggatttaggcattcccaagtatgtctgggtagcttgtgggccatttatttgagctgctttgtgtgggggaggaagtttgcacaaagaaacagatgagagaaaagaagatgacagagaagatat

SEQ ID NO: 219348 - DNA, 334 bp, Homo sapiens
actctatgaactagatatcagacctttggagcaaatgaagaggactgggcaaaataatgcaggactttgttgacctgttttaaagaccttaagttgtatttgaaatagttataaaaacaaatatatacatatatatattcattatttatttttatatatttatttttaagttctgggatacatgcscagaacgtgcaggtttgttacataggtatacacgtgccatggtggtttgctgcacccatcaacccatcatctacattaggtatttctcctaatgctctctttccccttgccccccacccactaacaggccctggtgtgtgatgttgcc

SEQ ID NO: 219349 - DNA, 493 bp, Homo sapiens
taatcacagttttaacagtggaactctttcttctaacaaactgttactttgaacacaaatatataacagataaaagcaataaatcaattacttgagcaatttaaacctttattacttgacctccaatattcattgtttagggaacccctaaatcccctccaggaaacatttggattttgtggagcacaatgtgaaaaccactgaccggaaacacactcccacacatgtgcctgttccacacactttataccatgcttaaagacagcctgatactctagcaactatgaaaatagtgcatattacacagtactcayagcaaccatggaatttacatgcagacacttggcattttcagaaggaaaacaaaccatatctaagcttgcttatttagaccactgcttttatttattcctaccaaattcttatgttccttgcaattgcactcgtgctttcttcaatcatgccccacatactgctttttctcaggaatttc

SEQ ID NO: 219350 - DNA, 493 bp, Homo sapiens
taatcacagttttaacagtggaactctttcttctaacaaactgttactttgaacacaaatatataacagataaaagcaataaatcaattacttgagcaatttaaacctttattacttgacctccaatattcattgtttagggaacccctaaatcccctccaggaaacatttggattttgtggagcacaatgtgaaaaccactgaccggaaacacactcccacacatgtgcctgttccacacactttataccatgcttaaagacagcctgatactctagcaactatgaaaatagtgcatattacacagtactcatagcaaccatrgaatttacatgcagacacttggcattttcagaaggaaaacaaaccatatctaagcttgcttatttagaccactgcttttatttattcctaccaaattcttatgttccttgcaattgcactcgtgctttcttcaatcatgccccacatactgctttttctcaggaatttc

SEQ ID NO: 219351 - DNA, 525 bp, Homo sapiens
ctctacttcatttcctctgatcaattgcctcactcaccgtgcagagaaagagttccattcctcacagccaggaacttgactccatagggaaagaagggagttgagtaggaactcccgtagagtgtgatctgagctctgccttggaagggcttgtcttcggatccaatccggagctctccaccatcagaaacaaggatggcgtgtgccctgagctcgatgggtcctggggccatgaaaatcagcttgccccctaatggacaaagggaaaattgtcagtccctgggaggataaggctyaccgttttgtcagtttcaatgcctgatgaaatccccttcatttaaatacttctgctggaatgtagacttattttatcatgctctctcttgtagaagcacagtagggtagaccagacattcaggagtggaagcactattatttagccagtttaggttagctattactattctctgctgctttattacattttcatgacaataatctaaatgtccagcaatttaggaatgg

SEQ ID NO: 219352 - DNA, 451 bp, Homo sapiens
gctcacttggggagcttggctcttgagacaggagtcttgccaatgctcccggctgaataaaccccttccttctttaactcagtgtctgaggagttttgtctgcagctggccctgctacatttcttggttccctgacygggaagcaaggtgattggcgaatggtcgaggcagctccttaggtgacttaagcctgccctgtggaacatccctgcaggggactccaaccagcccaagccatgcggatcctgagagcactcccgggtaggcatttgcccagtgagacgcctcaccagagcagtgtgtggcagccccctgtggaggatcaacgcagtggctgaacaccgggaaggaactggtacttggagtctggacatctgaaacttggtaagactagtctttggaacttgcctactctgtttgagtggaagtgtggtctgatgacccacggtgt

SEQ ID NO: 219353 - DNA, 451 bp, Homo sapiens
gctcacttggggagcttggctcttgagacaggagtcttgccaatgctcccggctgaataaaccccttccttctttaactcagtgtctgaggagttttgtctgcagctggccctgctacatttcttggttccctgaccgggaagcaaggtgattggcgaatggtcgaggcagctccttaggtgacttaagcctgccctgtggaacatccctgcaggggactccaaccagcccaagccatgyggatcctgagagcactcccgggtaggcatttgcccagtgagacgcctcaccagagcagtgtgtggcagccccctgtggaggatcaacgcagtggctgaacaccgggaaggaactggtacttggagtctggacatctgaaacttggtaagactagtctttggaacttgcctactctgtttgagtggaagtgtggtctgatgacccacggtgt

SEQ ID NO: 219354 - DNA, 451 bp, Homo sapiens
gctcacttggggagcttggctcttgagacaggagtcttgccaatgctcccggctgaataaaccccttccttctttaactcagtgtctgaggagttttgtctgcagctggccctgctacatttcttggttccctgaccgggaagcaaggtgattggcgaatggtcgaggcagctccttaggtgacttaagcctgccctgtggaacatccctgcaggggactccaaccagcccaagccatgcggatcctgagagcactcccgggtaggcatttgcccagtgagacrcctcaccagagcagtgtgtggcagccccctgtggaggatcaacgcagtggctgaacaccgggaaggaactggtacttggagtctggacatctgaaacttggtaagactagtctttggaacttgcctactctgtttgagtggaagtgtggtctgatgacccacggtgt

SEQ ID NO: 219355 - DNA, 631 bp, Homo sapiens
atttcaaatgtatgatttatgagttttgacaagagcataaagtcataccactactgccaccataattttgatatagaacatttccgttacttccaaaacattcttttgtgctctttttttgatgccctttctacaccgtgacccttcacaatcactgctctgccactacattttttctttattagactactctctaaatgaaattaaactgcatatacattttcgtgcctggmttcttttacttagcataacgcttttgagattcattaatgcatcgcatgtgtcaatagttcactcttcttaggtgctgagtaataatccattgttcaggtataccacaatttatgatcactgcagcagttgatagcaatgttcattgttttcaatttgtgatcattacaaatgaagttgccacattttgttatgttattgtatgaaattatatgtctgttattatatcttgtctagatacctagaagtggatacttttggttataggtaaaatggagtaagccactgcagcttgtctctcccactgattacaactaaaaacattgagcaaaatacataaaacaactacctaaggactctgagaagtaagtaacagcaggcagactggtgaaagaagcta

SEQ ID NO: 219356 - DNA, 631 bp, Homo sapiens
atttcaaatgtatgatttatgagttttgacaagagcataaagtcataccactactgccaccataattttgatatagaacatttccgttacttccaaaacattcttttgtgctctttttttgatgccctttctacaccgtgacccttcacaatcactgctctgccactacattttttctttattagactactctctaaatgaaattaaactgcatatacattttcgtgcctggattcttttacttagcataacgcttttgagattcattaatgcatygcatgtgtcaatagttcactcttcttaggtgctgagtaataatccattgttcaggtataccacaatttatgatcactgcagcagttgatagcaatgttcattgttttcaatttgtgatcattacaaatgaagttgccacattttgttatgttattgtatgaaattatatgtctgttattatatcttgtctagatacctagaagtggatacttttggttataggtaaaatggagtaagccactgcagcttgtctctcccactgattacaactaaaaacattgagcaaaatacataaaacaactacctaaggactctgagaagtaagtaacagcaggcagactggtgaaagaagcta

SEQ ID NO: 219357 - DNA, 486 bp, Homo sapiens
accaatagaatgtaatagagaacacaaaaataaatccctatgctcacagccaactcattttggacaaagttgcaaagaacatccattgagaagatgacagtctctttagtaaatggtactggaaaaactagatatccgtatgtagaaaaacaaaactaaatccccatctttcatcatatacaaaaaaacaactcaaaaaggattaaagacctaaacgtaagacctaaaattatgaaagtgctaaaataaaacattgggaaaatgctgcagaacactggtttgggcaaaaaaaaaatttggtgagacctcaaaagcacagacaacaaagccaaaatagacaaatgagattgcatcaagctaaaagtttctgcacagtaaaagaaacaatgagtcaagtgaagaaataacctacacaatgggagaaaatatttgcaaactcttcttcctacaagggattaataarcaggacatacaaaaaaaactcaa

SEQ ID NO: 219358 - DNA, 536 bp, Homo sapiens
  misc_feature (1)...(536): n = A,T,C or G
tcagtttttttaggattgtttttatcataagaaagtgactgtttgcaaactcttttcatgctggatttgaaaccagaagtaaaataatactttttaatatctgtccttacagkctatacattgttattaatgacttgtgccttttagcaatatagcttccatctaaagaaagtcagttgcgatcttctgataacaatattttgacacttaaattcttttatgaaaaaaatgaaacaattgttggtagcttcctgtaatattactgtgtaatcatttttatgttcatttcttactggctgtgaaagaattccctgatatttatttttattcatgctctgatgtgtcttagcacatttctaatttatntaaattgcaggttagtgaaataataagttttaaggtggtttcattctgtaaaaatctgtggaacaatagattgaaagcatanaatagagtgaagagaatcatgccatgttctacggggagatatgttttaccctttagcagcatattagaaatgcacgctttagaaatgg

SEQ ID NO: 219359 - DNA, 214 bp, Homo sapiens
tatggcatgtagaaagaagatgacacacaagccaaggctatgtcctagtgtaacttatctctgatgccyttgcctactttctccttacctgctatcccctttacttgataactaacaaaaccgaaaactgaaagtaactgggagaatgtctgcgtaaatgttagctcacagcgtaattcttggtgcttgggaaaattccaaatcacgaatatag

SEQ ID NO: 219360 - DNA, 524 bp, Homo sapiens
tggtcccttgctttggaaatccacttcaaaaaatgtttgcaatgaaagctattacttctcacatatggaaattgacaataaaatgataatatataactggattatttacaaacaacctctgtcttacaacaaacctttgttttttttccattattctaggtctttatctcataaatctyagagagattttcctctcaagctttgtagatgtcagctcattacttgtgacagtgagggactggctagctaatctcaaccttggttcaacagcaaagtgaactttctcaccaaggatggccattcttgaaaagacatatctgggtcagtgagtgcaggtaggtgtgctgtgttcaattaacgcaatggcagcgtaccaaactgagatccttctcctcctctcgtctctgatgcaagcacctgttcattaaatctgctcatttccccttacttttggaagtcagcacaagtgactaggagcagaatgactgtatatgcatttcaaaaacacttctgttagtgaccgt

SEQ ID NO: 219361 - DNA, 468 bp, Homo sapiens
acctcacaaagagcatctcttcctaaggccagtgaggtatctgctggggccacctgtattttgagatctaaataacattagcccaggaccctgtcacagtttctcagcctatggaagtcacaccccaagatttctctgaattcctttctctcctttcctctttctcctttcctctcctttattttccttctcctttttttatttccctttcccttttcccttttccttytcctctcccctcctcccctcccctctcccacccttcccctttgccttcttctcccttccttttacctcctctctcctctcaattgcactcccaaataacttgactaaataaattcctcttgtaagcaacattcagatcacagggtatgactactgttatgtaaaggctgcccttggtatcaaagcggaaggttaaagagccattttcagaaattgaatctaacaacagccagataaaat

SEQ ID NO: 219362 - DNA, 449 bp, Homo sapiens
aaggccagtgaggtatctgctggggccacctgtattttgagatctaaataacattagcccaggaccctgtcacagtttctcagcctatggaagtcacaccccaagatttctctgaattcctttctctcctttcctctttctcctttcctctcctttattttccttctcctttttttatttccctttcccttttcccttttccttctcctctcccctcctcccctcccctctcccacccttcccctttgccttcttctcccttccttttacctcctctctcctctcaattgcactcccaaataacttgactaaataaattcctcttgtaagcaacattcagakcacagggtatgactactgttatgtaaaggctgcccttggtatcaaagcggaaggttaaagagccattttcagaaattgaatctaacaacagccagataaaatgaatg

SEQ ID NO: 219363 - DNA, 470 bp, Homo sapiens
gaacctcacaaagagcatctcttcctaaggccagtgaggtatctgctggggccacctgtattttgagatctaaataacattagcccaggaccctgtcacagtttctcagcctatggaagtcacaccccaagatttctctgaattcctttctctcctttcctctttctcctttcctctcctttattttccttctcctttttttatttccctttcccttttcccttttccttctcctctcccctcctcccctcccctctcccacccttcccctttgccttcttctcccttccttttacctcctctctcctctcaattgcactcccaaataacttgactaaataaattcctcttgtaagcaacattcagatcacagggtatgastactgttatgtaaaggctgcccttggtatcaaagcggaaggttaaagagccattttcagaaattgaatctaacaacagccagataaaat

SEQ ID NO: 219364 - DNA, 447 bp, Homo sapiens
aggccagtgaggtatctgctggggccacctgtattttgagatctaaataacattagcccaggaccctgtcacagtttctcagcctatggaagtcacaccccaagatttctctgaattcctttctctcctttcctctttctcctttcctctcctttattttccttctcctttttttatttccctttcccttttcccttttccttctcctctcccctcctcccctcccctctcccacccttcccctttgccttcttctcccttccttttacctcctctctcctctcaattgcactcccaaataacttgactaaataaattcctcttgtaagcaacattcagatcacagggtatgactactgttatgtaaaggctgcccttggtatcaaagcggaaggttaaagagccattttcagaaattgaayctaacaacagccagataaaatgaat

SEQ ID NO: 219365 - DNA, 419 bp, Homo sapiens
gaaggtgaagaataagtaaaatagccagtagtctagaataaaagtaaaatataatgcattggataggcagctgaaattttatagaagctttgtagaagaatctcatagaagagttttgaattgtagtagagatatttttggaggtttcagatgtctcaaataatctmcatgtagttttacattactataccttggaattgggagacttgtgtagagcaagttgatgtaacatcacaataggaaagattaatatttttatattctaaaaactactcaagcatatgagtggcacatgaaatatcaaatatcatccctcagtgtggcaataatatttccagggcaaaagcaattcttgttgtcactttagtttgaatgagtaattttctggccaaaaacattgcagattttttttttaagat

SEQ ID NO: 219366 - DNA, 614 bp, Homo sapiens
ctaccttgtaaaaatcagcattgaaaaaaagtatgctatctttctttctttctttctttttttttttttttttttttttttttgagacgtagtcttgctctgtctcccaggctggagtgcggtggcgcaatctcggctcactgcaagctccgcctcccgagttcacgccattctcttgcctcagcctcctgagtagctgggactacaggcgcccaccaccacgcccggctaattttttctattttttagtagagattgggtttttcactgtgttagccaggatggtctcgatctgctgacctcgtgatccacctgccttggcctcccaaagtgctgagattacaggcttgagccactgctcccggccggaaaamagtatgatatctttcaatccacctattctatcatgagcaagacattttttaacctctactttgtgtggccactggagctcatgaatttaaatcttttcactcccagattgctaatgaagtaacaatacagcaataagcaaagtcctggacccagagaagaagggaaaatagcagatgctacatttacctgtttaattcatttgcttagagatttccagaaatatttgttggggggaaatt

SEQ ID NO: 219367 - DNA, 580 bp, Homo sapiens
gccctggggaaaagagagttttgaagttttgaagattttacttttctattaatwtttttttttcaggctctgaaaatacctggagattttgtggagtagcattagcattgcacagagtccttttgcctgaggttttccctgaatcctatctcctgggaacctaggagacactgtgggaaagaagagtccacagaggcaagagaaatggcatcctaacaatctaaaatcccacatatagtctttccttggtgattctcagtttctactattgaacttccctgagttatttccagctatagggtgaggagggggaatttaaattcctctttctatattgttttctattgaatctcgaaactgtcaggaaaagaaagataaattggatgctgttatggttagtctctgccactgtttttttttgttcatgcattggtattctgagattggtcagcagtgcagttctagccctgtgggagaaactataaaagtctaaaaggaaaagaaaaaaactgcatgctaaattgggatgggggaaaagaaaaagggaatctctgtagatcaaggaggggccagtaaccta

SEQ ID NO: 219368 - DNA, 485 bp, Homo sapiens
tatggtaacaagcaaaccctacttctcagtgccttattttggtaagcttttgttgtttgcacactttacatgttggctctggctgtattctatgttatatctttactgaaggacttggctgaaggagcagctcctgtttgagttgcactgctctcatggccaagggagaaagaataatggcaagacaccatgatggctctttgcactgccactcccgtgtgacatcagttattctgcttatactttattggccaaggtaggtcagagggccacgattgatgctaataggtaggaggtgtatctttttacaacaaaggccaagaagtatttaaaaacagtaatatacttaccacaacctctctctatcacctattctccacaatrtaatcagagatgttcttaaaataaaattgaattatgtaattttctcctttaaaaaaaccttcaaatgttcaatgctgtatttgtcagagttctccagagaa

SEQ ID NO: 219369 - DNA, 613 bp, Homo sapiens
gaatgagaggactggagacccaagagagccaatagattagttctgaaagtctgagaatcaggacagctggttgtgtagttctgttaatagtttgaagctgagcaggctcmagacccatgaagagccaaggtttcagttcaagtctgaaagcaggaaaaagccagtgtcccaacttaaatgccattaggaagaaagaatcctcttttacttggggaagggtcaggcttttcgctctattcagggcttcaactgattggatgaggcccacccacattagggagagcaatctgcttaattagtctaccaattaaatgttaatctcattcaaaaacaccctcatagaaactctctgaataatgtttaccagatagctgggcatcctgtggcccagtcaattgacacacaaaattaaccattataaatccattttcaaattcccaaaacacttgattataaattcaaactcttacccatgatccataaggtcatgttcctccaagcctcacctcaggccatattcccacatgcttgttctatcgtaatcacagcaccggtctgactgctcctgaaactcatcaaaatcttggccgctgcagtatttttatattcactg

SEQ ID NO: 219370 - DNA, 613 bp, Homo sapiens
gaatgagaggactggagacccaagagagccaatagattagttctgaaagtctgagaatcaggacagctggttgtgtagttctgttaatagtttgaagctgagcaggctcaagacccatgaagagccaaggtttcagttcaagtctgaaagcaggaaaaagccagtgtcccaacttaaatgccattaggaagaaagaatcctcttttacttggggaagggtcaggcttttcgctctattcagggcttcaactgattggatgaggcccacccacattagggagagcaatctgcttaattagtctaccaattaaatgttaatctcattcaaaaacaccctcatagaaacwctctgaataatgtttaccagatagctgggcatcctgtggcccagtcaattgacacacaaaattaaccattataaatccattttcaaattcccaaaacacttgattataaattcaaactcttacccatgatccataaggtcatgttcctccaagcctcacctcaggccatattcccacatgcttgttctatcgtaatcacagcaccggtctgactgctcctgaaactcatcaaaatcttggccgctgcagtatttttatattcactg

SEQ ID NO: 219371 - DNA, 542 bp, Homo sapiens
gtcatatttgcagactctttttccaaattcttggaaaccttttccacagattcttggatatccttttctcgggggtgagtgtaggaggaggcattttccactgtacctcaatatccagggggagttattgaactgaatatgcgcatttgaactygaaagaagagaataggaactacatacatgaattcaggtgtggtatatagacagtagataaagaaatggcacaagtgtaatcacttaagatgggatggaagggagggttaagaaccagtccctatggcagccccaaatttagaagtttgacagaaaaagaagcacctgcaaaaaaagactgaaaagggaaatctagtgggatagaaagaaaaacaagaaaatgtggtgcttctgactccaaagtagaaaaaatgttttagaaaaaaatgattatggagtacagcataaaacaaattttataaaattaatatcacagaatccattaactttaatcacaatacaactaaggtagacatctgctacaaaattactgaaacatattatctatc

SEQ ID NO: 219372 - DNA, 620 bp, Homo sapiens
ttcattattttctttcatcactgtgtctagtgaacttaggagcaaccaaccagcttcattatgttccttggttctccgcatatggtcaaaggtattatgtatagagtcactaaactccttgtctctcacgagcagtggatcaggagtgtcaaatacatttattttgcctaactttctaaacagtttatgccagggactctyggtatcctccatactattagaagtacagtccttagtatttttgggtctaatcattttaagcagccacctccagaaacccccaaaccaacaaaataactccatccttaatattctgttcctctagaaccactcctggtaccaaaatctgtattagggttctctagagggacagaactaataggatagacatatatataaaggagagtttattattaactcacatgatcacaaggtcccacaatctgcaagctgaggagcaaggaagccagtctgagtctgagtctgagtcccaaagctgaagaacttggagtctgatgtttgagcgcaggaaatatccagcatgagagaaagacgtaggtggggaggctaagccagtctaacctttccaggttttcctgcctgctttatatttgctggca

SEQ ID NO: 219373 - DNA, 620 bp, Homo sapiens
ttcattattttctttcatcactgtgtctagtgaacttaggagcaaccaaccagcttcattatgttccttggttctccgcatatggtcaaaggtattatgtatagagtcactaaactccttgtctctcacgagcagtggatcaggagtgtcaaatacatttattttgcctaactttctaaacagtttatgccagggactcttggtatcctccatactattagaagtacagtccttagtatttttgggtctaatcattttaagcagccacctccagaaacccccaaaccaacaaaakaactccatccttaatattctgttcctctagaaccactcctggtaccaaaatctgtattagggttctctagagggacagaactaataggatagacatatatataaaggagagtttattattaactcacatgatcacaaggtcccacaatctgcaagctgaggagcaaggaagccagtctgagtctgagtctgagtcccaaagctgaagaacttggagtctgatgtttgagcgcaggaaatatccagcatgagagaaagacgtaggtggggaggctaagccagtctaacctttccaggttttcctgcctgctttatatttgctggca

SEQ ID NO: 219374 - DNA, 545 bp, Homo sapiens
cagctatgaaattagggacctgattacctttctgtaggtgggttcgtgccatgcttccattccaaacascaggcccaaggatggactgtgtccacatcctgctcagggactgtgaaggagggcagttgggagttggtcaccccaggcaagatgctgacttagcagagaatcaaacacctggagagccatctggacactagcttacacagcttcctcaccgtgccaggcaatccctcagagtccatcctaatgcccaaatattcccatacgcttgcatcacgcttcatgttctagaaacagtattaaatttctttctccaagggaggagtgcctccttaacaggtgcttctgtctttgtagtatgtgatttctgctgtcaacaattacagtatctgaaaattctattttttaggagccttcatttttccaatcctgatcctgagatttaggtacctggccaccaggtggcatttgggtgccctgatctcagggtctacaccaaaaagctcttgccaaaggcctttttttgccttgtgtggcagact

SEQ ID NO: 219375 - DNA, 463 bp, Homo sapiens
ttttggtttcttagttttgacatgggtaccatgttctataattgttaacaatggaggacactgggtgaggggtctatggcaactctawgtactatctttgcaaggtcttaaaataaattgaaaattatttaaaaatacgacatttatgccaaaaaatttcccttgaagtcaggacaagcaggatgacctcaagatgctaactgacagtgtaacaaaacaaaaagaaacaaaatatatcaggattaaaaaggaaaagctgaaatgtgcattattcaatatcattggttacacagaaaatccaaaacaataaacaaaccattagaactgataaggcttcagtcaatttctatcaacacacacacacacacacacacacacacacacacaaatatttacctacataacagcaacaataacaaaatgtatttttaaagattccattacaatagcatgaaaaagctta

SEQ ID NO: 219376 - DNA, 468 bp, Homo sapiens
tagagtttagtgaatattgatacatcagttttggtttcttagttttgacatgggtaccatgttctataattgttaacaatggaggacactgggtgaggggtctatggcaactctatgtactatctttgcaaggtcttaaaataaattgaaaattatttaaaaatacgacatttatgccaaaaaatttcccttgaagtcaggacaagcaggatgayctcaagatgctaactgacagtgtaacaaaacaaaaagaaacaaaatatatcaggattaaaaaggaaaagctgaaatgtgcattattcaatatcattggttacacagaaaatccaaaacaataaacaaaccattagaactgataaggcttcagtcaatttctatcaacacacacacacacacacacacacacacacacacaaatatttacctacataacagcaacaataacaaaatgtatttttaaagattcca

SEQ ID NO: 219377 - DNA, 462 bp, Homo sapiens
agttttggtttcttagttttgacatgggtaccatgttctataattgttaacaatggaggacactgggtgaggggtctatggcaactctatgtactatctttgcaaggtcttaaaataaattgaaaattatttaaaaatacgacatttatgccaaaaaatttcccttgaagtcaggacaagcaggatgacctcaagatgctaactgacagtgtaacaaaacaaaaagaaacaaaatatatcaggattaaaaaggaaaagctgaaatgtgcattattcaatatcattgkttacacagaaaatccaaaacaataaacaaaccattagaactgataaggcttcagtcaatttctatcaacacacacacacacacacacacacacacacacacaaatatttacctacataacagcaacaataacaaaatgtatttttaaagattccattacaatagcatgaaaaagc

SEQ ID NO: 219378 - DNA, 457 bp, Homo sapiens
tcagttttggtttcttagttttgacatgggtaccatgttctataattgttaacaatggaggacactgggtgaggggtctatggcaactctatgtactatctttgcaaggtcttaaaataaattgaaaattatttaaaaatacgacatttatgccaaaaaatttcccttgaagtcaggacaagcaggatgacctcaagatgctaactgacagtgtaacaaaacaaaaagaaacaaaatatatcaggattaaaaaggaaaagctgaaatgtgcattattcaatatcattggttacacagaaaatccaaaacaataaacaaaccattagaactgataaggcttcagtcaatttytatcaacacacacacacacacacacacacacacacacacaaatatttacctacataacagcaacaataacaaaatgtatttttaaagattccattacaatagcatg

SEQ ID NO: 219379 - DNA, 391 bp, Homo sapiens
ctttgatagcagagactttaaaatgtgtggaccattagttgtctttggatgtgctccctagaggctgcgcctgacacagggagctgtgtatacatgatttattaaaaggaaatcctcttaggagaaacatattagcaggataaacacaagaaagaatgcagttacaagtggagtctcaatcaatcccagaggaaattctgggacttcagcctcagcttgacctatgggggggctctggaatgtcagatttctcctgatcccaastgtgctctggggcttccattgcagccaagagagagcattccccagaaaactccaggtgaggagtctccagtggcccaagggtgatcctccagaggaggttacactgccgaactgggacattggcacc

SEQ ID NO: 219380 - DNA, 614 bp, Homo sapiens
gtacaagccagaggatattaatttcctttgtgggtagtgcttggacttctctgattttagatcccaaaatcattaagaaaaagctaagaggttggcatgagaggttggatggaaagcatctatctgtgtttgtcagtagctctcgatgttggctgcamattggaatcacctgggggcctttgacaatcacaatgtctggacccatttcctgagaacctgatgtaacttttctgggttagggcctgaacattgagatttcttttaaaagctttctaagtgattataatgtgcagtcatggtgaagaactactgattttatatggggagtcagtgaaggtggtgaggggctgtgaggttgaaatattggaaatgttatctggatttcaaacagtagagtatgataaaaatttaaaaactggctctccaggaaaaaagagacatcctaatatgatgtatttgccaatataccatgggttttcttgggctgggatgaactttcagaagttttacagtgagcatttttttttttatgaatttaaattggttctagctaagcaattttggagtatctttgatgtacctgggtctctcattttaataaacataacagtggt

SEQ ID NO: 219381 - DNA, 384 bp, Homo sapiens
tggggaaatgaaattgtaaatgaaaggcaacttcactggctaatacaataaagaatcaaattaaacaaaatttactagtattatcataactttgggaaactgtattacttccacttktgtgaaacatttttgctttctttagatgtagactggaactatgtacaaaataagctggtcaacagcaaatcgttggaagatcaacaggcacaaaacacgataaaattgaatctcacaaactgattaaaacattaaactaaaatgcagacttacattgctctgctttcataataaaggtaggttaagtaaggttaatcatgggttcccttacctttacaaagttgctttgtcatttttgcttacttatcttaacattacaactcttgc

SEQ ID NO: 219382 - DNA, 563 bp, Homo sapiens
cctttcatctttgtcaaagtgctcctgaaatgggtgacattagtgctacaagtaaaggaacattttgttggagaagtaaaaatgatcaagaggaaggaaatcaggcctttgaaggaaggtgcaaagagcagggacagttgtcttacactagagaagrgtgaaggtgatgaatattctcctcattgacaagaaagaatcttgcataggagtggaagtggatctttttcctgttcactgaggacagaagacacaggaaggaattcatcagaatggttgataagacatgaaaatcttagagaagggatatttggaaagcagatgttgtacatttttctaataggggagaatcaagcagacttgtttctaacttggtgaaaattgtgtaccattaggaggtcaaatttcgttagaatcttctttactcttttaaagacagaatatggtttctgaatataatttctaaatggggaacattctgggtttttttcatgggtcttttcctgctgagatatgaattcattttctttcctatgctctccatagaacatttcttactcgattcc

SEQ ID NO: 219383 - DNA, 370 bp, Homo sapiens
ggtggcaggtctacccctacatcttgtatgattcatcacatgagggaatcgaggcccaacgagctttaaaagactcacacaaggtcacacaggtagtgagcatggaagctttctctaccacagcgatggcaggtagatttaacttcatgcccaactctgatagattggcaagggctgtcgagagcatcacgtggaggaaagagtctttgatctattagcaatgtctggcacacacttgggaagaggaaatggcagcaagaccaccacatatttactgtaactactaatkatttattaaattgttattgagaggctccttcatgtagggcactggtccttatactggagattcagtgataaacaagagcag

SEQ ID NO: 219384 - DNA, 419 bp, Homo sapiens
ctaggacaggcagtcacttgatacttctcccagccactaagttgtgactggggaactttacgcttttcacatgcctttctaattatgcccaaaagccccactcctttgttagggagagacatcctagcaaaagcaggggccattatacactagaattagaaggaaaaaggttaaatatacagactctaagcatgcttacctagtcctccaagcccacgcagcaatatggggagaaagggaattcctaacttccgagggaacacctatcaaacatcaggaagccattaggccccccaaattctcttcacctctgaatctacatcctccgatccckgcctaaagataattttatggggaagaggatttgcttgtgtctccccaggtgacaatcaggtgtctgtgtgggtgcccaccaacca

SEQ ID NO: 219385 - DNA, 496 bp, Homo sapiens
atcaattagacctaataaacatctacagaatactccacccaacaatcatagaatatacattcttctcatcctcataatggaacatagtctaagattgaccacatgctcaaccgtaaagccaatctcaataaattaaaaaaagcaaaatcataccaagcacaatgtggaccacagtgcaataaaaatagaaagtgatgccaggaagatctattaaaaaaaaaaggaaattagacaacttgctcctgaataacttgggtaaaaaacaaaattcagggagaaatkaaaaaaacaatagaaattaataaaaatagagacacaactttccaagtctctggtatgcgggtaaagcagtgttaagtggaaagctgataatgctaaatacctttatcaagaagttacaaagatctcagattaacaatttaacatcataccaggaggaactggataaaaaaacaagcaaaataaccacaaagttagcgcaaaaaaaaaaaaaaaa

SEQ ID NO: 219386 - DNA, 566 bp, Homo sapiens
acaccagaaatatcccagaagttaaattwgaggctgaaacaatccctacagccaaagagaagtgaaaatctctgagcaggcagtaagaaagtaagactttttaatgcatcaagtcccaccaacaatataccaggcaccacatgtggaaaacttccatcagactcatggtgtccacattggaaaaaataacataaagccagacactcagctttcccagcatgttgtgttttcttgccggaaaatcattcctgtctcaacccatgggaagcatagcatcacaagtgcctgtagggagaaaaagtactgggaggcagagtgagagacaaagggaggtgaactagcaatcccagcctgcaaagctctgctgtttatctcagccaaagaagatgccaaatctgagtggctatttatcagcaccacattgtagaaggcatgctccatgaatcttctgaacacaaacttttagccaggttttccatacagtttgggtatcccttttgggacctgtcacatccaatataagcaatgctccaaacctatgcaaaagctgagacaaatcccatctc

SEQ ID NO: 219387 - DNA, 609 bp, Homo sapiens
gttctgtccctctagaaaactctggctaacacaccagaaatatcccagaagttaaattagaggctgaaacaatccctacagccaaagagaagtgaaaatctctgagcaggcagtaagaaagtaagactttttaatgcatcaagtcccaccaacaatataccaggcaccacatgtggaaaacttccatcagactcatggtgtccacattggaaaaaataacataaagccagacactcagctttcccagcatgttgtgttttcttgccggaaaatcattcctgtctcaacccatgggaagcatagcatcacaagtgcctgtagggagaaaaagtactgggaggcagagtgagakacaaagggaggtgaactagcaatcccagcctgcaaagctctgctgtttatctcagccaaagaagatgccaaatctgagtggctatttatcagcaccacattgtagaaggcatgctccatgaatcttctgaacacaaacttttagccaggttttccatacagtttgggtatcccttttgggacctgtcacatccaatataagcaatgctccaaacctatgcaaaagctgagacaaatcccatctcaatgcaccagaat

SEQ ID NO: 219388 - DNA, 440 bp, Homo sapiens
acattcccttgttatctgccctttgcttttagcctccagataagagaatttggctgccttcagccataattctctcccgaagcttttgccaaacctcctggccttccagtaaggtttgcacctttccctataactttttcttataacgtttcccaccacmctgaccaatgtcctacatctcccccttttctgttttttgcatcaggttttattgattgaagagtacagatgtgtgcagcaacaggtttgtcaggtgctgctgttataactcgtgttctggctctgtatcctggaattattaaataacacaagacaaacatgagtataatcagtaacactcttttccaatcaaggagtgacccccaggagtaggggtctatccaggagagacgtcctcccacattcttccatatggctatttgttgggcattagatctatg

SEQ ID NO: 219389 - DNA, 587 bp, Homo sapiens
ttcatattataatcttaaaaatatttccacaaatgttactctaaccaccatgcatgtcctttaaaataacattggcatatagtcatatctatatataattagggctagtgtttctgtgtgccatgttgaataatccaacaccaaaagtagtatatagggaatgtactataaaatgtattttcaaatagaatataatttttttgaaatatgtacaatgtaaccaagaaaacagatggagctcttagtgagttgatgaaaactaaattgcaaaaattatttttcaaagatacaaaatttctgtcaggaaggggtaactgaagttataataaacattcatattttatgttacaaagaaggaatctatacaaatgtcacattaataatctaaggaaaastggtgggaaacaaaatataagcaatttgtaaatctttttttttttttttttcagaatgggatgtatttgataaaagaaaaacttaaggccacgcatggtggtgactcacacctgtaatcccagcactttgggagggcgagactggcggatcacctgaggtcaggaattcgagaccagcctggctaacatggt

SEQ ID NO: 219390 - DNA, 457 bp, Homo sapiens
tgtttgccttatttgaatacagttcaaacagtttgctacatttgattgaccaaaacttggtgactggcacaagtgtaggctacagtctgtttaaacctacacttgttatagttcaggatgtacaaaaaacttttaggatgaacttaaaatatgtgggaaggcasctttaagctaaacttgatttaaaaattccccacttttgtcatcttctcaatattgagagagtaaccaaaactctagtcattgatgtccatatcaccatcataagtacttatttggtcttgaaacccattggcaaacaatagaacagtgggttttgcaagttgggaacaaggactttaagttatttttattattattattttaagggttacagtagagggtgcctccttatgctggaatgtcttgtttacaagagaaaaaagaaaatctggtctatgtttccttaaattcttag

SEQ ID NO: 219391 - DNA, 421 bp, Homo sapiens
gcaatgctatctttaatccatgatgtgggttaagaggagtgaaccaatgttctgtttctgcctgattaggaggcaatgtacataccattaaaatagatgaagatggccttcatctttcatcttacatctatcaaggtataagattatccatgtatatgggttatatcaaggtataagattatctatgtttaaggctggctgcaaaatccttcaaaaataaacrtatatgccatgagtgcacacaacagacccccttttcacttctattgtttatagaggcataatccagggaaaaaatattcaaagataacagtctcgtaatagtagagaagtcttgatccatgatcttggaaaaagctgttcacatcaaggatgccgtcttctgctggagagaaacttccctggttagctttaccttaag

SEQ ID NO: 219392 - DNA, 577 bp, Homo sapiens
tttttgtgagaattaagtgactttgtcctatagattttgatttgtaatccaattatatgacataataatcacagtatctgcaggaacatagtatttttaatgagttgtttcatactgtggatttataattaacattgaacattattgctactgaagttcttaaagatgaggtcatcaattgatatttatacttcatacatgattttgaatataatcttgatgctttatacttaaggaacaacaacaaaaaataggctttcttatcttagtcacaattaaaatgaatttttttttttttttagatggagkctcattctgttgcccaggctggagtgcagtggcatgatctcggcttaccacaacctccgcatcccaggttcaagcgagtgtcctgcctcagcctcctgaagctgggaccacaggcacgcaacaccatgcccagctaatatttgtatttttagtagagacagagtttcactatgttggccatgctggactcgaactcctgaccttgtgatccgcctgccttggcctcccaaattactagaattatgggcgtgagccaccatgcccggcc

SEQ ID NO: 219393 - DNA, 577 bp, Homo sapiens
tttttgtgagaattaagtgactttgtcctatagattttgatttgtaatccaattatatgacataataatcacagtatctgcaggaacatagtatttttaatgagttgtttcatactgtggatttataattaacattgaacattattgctactgaagttcttaaagatgaggtcatcaattgatatttatacttcatacatgattttgaatataatcttgatgctttatacttaaggaacaacaacaaaaaataggctttcttatcttagtcacaattaaaatgaatttttttttttttttagatggagtctcattctgttgcccaggctggagtgcagtggcatgatctcggcttaccacaacctccgcatcccaggttcaagcgagtgtcctgcctcagcctcctgaagctgggaccacaggcacgcaacaccatgcccagctaatatttgtatttttagtagagacagagtttcactatgttggccatgctggactcgaactcctgaccytgtgatccgcctgccttggcctcccaaattactagaattatgggcgtgagccaccatgcccggcc

SEQ ID NO: 219394 - DNA, 588 bp, Homo sapiens
cttagcccggtgacatctatgtcagaatcctgatctctagacctgaagacaagatatttattgttttaaatcattaaatttgtggtaatctgttacactagyaataagaatctaatacagcaaaagttcaacattgctaacaaacttcctcaaataaggacttgtaattcttgagcatgtgatgctccctttaattatcatcatagtatgaataaaaaaaatagcacctcattaaagcaggatgaactttactgggttagaatagagatgtcaagaccaaaagaatcaacttcaagtctcaaaatgcaaaacaattgacaattgatcatcatatccaaaaaggcttccacatagtttcttcatgtttaagtctcttctattttatctccaacttccattcataatctattctataaaacttaaatgctattcatgaatttgttcatgtgcttacaaaaaatagctgaaagcatcataatctgaaacacactcaattctgacataactcgggtctgttggagcaagttaatattcgcgggtaattaaacttggtccacatttttacacgctttctctgaacacaaaaca

SEQ ID NO: 219395 - DNA, 413 bp, Homo sapiens
taactgccccccataattcaattacctcccactgggtccctcccatgacacatggggattatgggaagtacaactcaagatgagatttgggtggggacacagtgaaactatatcatcaggcataatggtgagtacctttcatcccaaccactttagagactgagatgtgaggatggcttgagcccagcagtttgaggttgcagtaagctgtgattrcaccactacactccagcctgagtaacagagcaagaccttgtctcggggggaagaaaaaaaaaatatatatatatatatataaataaatatatatatatataaattattattaaacttaaaaatttggatgtgaaaaagttcaaaataaaataactttcatgaaaagtttttttgaaaaataattgtgatatgaattc

SEQ ID NO: 219396 - DNA, 408 bp, Homo sapiens
gaattcactatcatgagagcaggatggaggtaactgccccccataattcaattacctcccactgggtccctcccatgacacatggggattatgggaagtacaactcaagatgagatttgggtggggacacagtgaaactatatcatcaggcataatggtgagtacctttcatcccaaccactttagagactgagatgtgaggatggcttgagcccagcagtttgaggttgcagtaagctgtgattacaccactacactccagcctgagtaacagagcaagaccttgtctyggggggaagaaaaaaaaaatatatatatatatatataaataaatatatatatatataaattattattaaacttaaaaatttggatgtgaaaaagttcaaaataaaataactttcatga

SEQ ID NO: 219397 - DNA, 413 bp, Homo sapiens
taactgccccccataattcaattacctcccactgggtccctcccatgacacatggggattatgggaagtacaactcaagatgagatttgggtggggacacagtgaaactatatcatcaggcataatggtgagtacctttcatcccaaccactttagagactgagatgtgaggatggcttgagcccagcagtttgaggttgcagtaagctgtgattacaccactacactccagcctgagtaacagagcaagaccttgtctcggggggaagaaaaaaaawatatatatatatatatataaataaatatatatatatataaattattattaaacttaaaaatttggatgtgaaaaagttcaaaataaaataactttcatgaaaagtttttttgaaaaataattgtgatatgaattc

SEQ ID NO: 219398 - DNA, 408 bp, Homo sapiens
gaattcactatcatgagagcaggatggaggtaactgccccccataattcaattacctcccactgggtccctcccatgacacatggggattatgggaagtacaactcaagatgagatttgggtggggacacagtgaaactatatcatcaggcataatggtgagtacctttcatcccaaccactttagagactgagatgtgaggatggcttgagcccagcagtttgaggttgcagtaagctgtgattacaccactacactccagcctgagtaacagagcaagaccttgtctcggggggaagaaaaaaaaaawatatatatatatatataaataaatatatatatatataaattattattaaacttaaaaatttggatgtgaaaaagttcaaaataaaataactttcatga

SEQ ID NO: 219399 - DNA, 423 bp, Homo sapiens
agatttggggtattttctttcttgagtgtgaagtttctaaagttgtttaggattcaaaatttttaaatactactattaatagacttaataattggcaaatataataagaaaaataagatattaaaataccgtttctagattacaaaatgcatatttactttaaagagagaaaataccctgaaattaatatctgtgctaaatagrttttatttatttatttacttatttatttgagatatggtcttgctctgcagcccaggctggtgtgatcgcagctcactacagcctccacctcctgggctcaagcaggtcacctcccttcgtctcccacatagctggtactacaagcatgcactgacacacctggctaatttttaaatattttgtacagatgggatctcttgttcaggctggtttcaaact

SEQ ID NO: 219400 - DNA, 529 bp, Homo sapiens
ggattcaggctcctggcttgcccctatgccaggatagccctagaccctaggcttctccccactgacccagcttcaggtgaactcatggtctaggcctactctaatagacccaagttccaagcttgttctaatacatgccagcattaggttgacccctgtggacacaggctccaaaaccactcttacaaatccaggatccaagccagtatatgtggaaacagcacttatgcttgactcccagagaccaacacttctggtctaccccagtgccaagccagcccacacaaaattaggctcaaagcccacccagctccaggagakctaccatagactcaagttttaagctggcctccaaggacacaggctctagcatgccctcatgaacccagtagacaggtctaccccagttaattccattatcagccctgcccctacaaacccaggatccaggtcctctttatagcgtatacaacctctaggtctgccctagagaatccaagttccaggcattaccctaaaaaaacaggta

SEQ ID NO: 219401 - DNA, 449 bp, Homo sapiens
gaagcagaagaaaatatcaataagctcaaaatcaggcatttaaaattttctagtcagaggaagaacaacaaaaacaagaatgaataaaagtgaggaaaataagcaggagttatgagacactgtcaataggacaaaaatatgcacaaatcagataaagaaatggggcagaaagcttattttaagaaaatgacagaaaataccccagacatggagacaaaattgaacatccagatccataacacaaaaatccccatatagattaaatataaggakatttttactgaaatactttagaatcaaattttcaaaattcaaagacaaggacagaattttgaaagaagcaaggaaaaagcaattcaccacatacaagtctgctataaagctaaataattttccagcagaaacacagcaggccaagaagagtgtgaggatatattcaaagagctgac

SEQ ID NO: 219402 - DNA, 402 bp, Homo sapiens
gcgcaagaaagaatccagggcgagttcagacagtaaagtgaaagcaagtttattaaaaaggaaaggaataaagaagcrgccactccataggagagcaaccccgagagcagcctgttgctcatttttatggttattttttgatgatatgctaaacaaggagtggattattcatgcttccctttttcagaccataaactgtcatggcgctggtgggagtgtagcatcgaggacgaccagagctcactcttatcgccatcttggttttggtgggatttgggctctcctctactgcaaccagttttatcggcaaggtctttatgacctgtgccttatactgacctcttatctcatcccgtgacttagaatgtctaacttactgggaatgcagtaggtctcaccctt

SEQ ID NO: 219403 - DNA, 611 bp, Homo sapiens
attatattaaaaattactatgcagaatatgaagcatagacagaagatgaaaaaatgtatagagcttcattaatgtttaggccaatatcaagtggtttaaaaaatgagtaattggaacaccagaaggtgggcacagaaaaataaagtaataatgtttcaaaaattttcatatgtgatggaaagcataaacttccagatctaagaagctcaataggccacaaacaggataatcataaagaaaaccagcaccaggatacatcataatcaaattgctgaaaataactgataaagagaaaaatcttaaattcaggtagattaaaaaataggcctattaaagaggaataaaggtatgcttatcaagacatatcagaaactataaaagtcagaagataagagaatgacatctttaaagtgttgagaggaaaaamaaagctgtcaacctagattactatatccattgaaaatatcataaatagaggtgaaatacttttttgacaaatcaaagctgaaagaagtcatcacaaacagatcaccagtatgagaaatgttaaacattgttcttcagaaagaagggaaacgatacctaatggaaactgagctacacagaagaat

SEQ ID NO: 219404 - DNA, 586 bp, Homo sapiens
ggtgccactttctcctgtttctgtctagcctctgaagtcacacaaaggctacgaatgcataatcatggagcaaccccctagccaaggatatagatttgttttagtccagctgcaaatccattcagcctttcagaaccagttccaggaatgggatccagaagttttagacatttgggtaaaaactgaaacctcagttggaatattaacaccaaattcacattatttgggcatcaaaactacatcagtttagtttacggtttgtgctgaaaagtcagaggcttcatggaacaatcaatatgaacttgatctattccaygattttcaagttactataaatgtcagggtaaataaactctaaaacattcccttttttgtcatggaaaataaaaataaacaccttaatgttttgatatattgctacaaaagcagaaaacaaagatttataaaacttcaagccataaatctcaaagctttcatgaaaggggcaagatgaaagagagaaaacgaacaccaaaattttttgtagtacagctacaagaaatgactattacttctgttgtatacactattgtatgaagaagccaaa

SEQ ID NO: 219405 - DNA, 569 bp, Homo sapiens
tatgtttcttaaggtgaacttaagttaaaatggaaagactgctttaacaggtcagggtaactcagccaactgcatttttagcctccaaagtactagaaattggagataaagctctaaatgagtagttttttaagtgagcaaagtttacagagatgagactgcagaaaagaagtatgttcaaatgtgggccgcagaagtttataattctgtgtggtggagatcttttaaatatttagaatagtatgtttggttcttaataacattacatctgtattaataaattaatatgagataaaacagaaattaaaatataaatgcaaataatactgttttaaatatgtagctacatgtatgagaaaactgatgatcccttctgttaaaatattgaaagtatatactacttaacataacttcaaatttactgcataagaccttgactctcattgcttattctgaatcaagggcgaaaacttctagtattttcatatcttgcatacaaaatagcttgtttctccaaaaatcaataagtcaaatayttgactgatctgtatggtctgattagagaattc

SEQ ID NO: 219406 - DNA, 417 bp, Homo sapiens
gaattctgcctcaatattgtaatatagaaatcctgcccaagtttcctgcatggaggccttccctatgaatttcagactcaagattacaatttcaactcttacctgagtttccrggcagccctacagacttcagccctcccatttcataagccaggtatgttgtagtgtggtctagttagctcagtttaaaaatctagtttatcactgtacaggaacctaccatttgtgaaaaagatcagttataagagcatcttagattctcttcaaaaagaaattattaaatttgggctaaaaatgtccacctaagaagatcgttttattcaattcctaatctcacagctgattcctttctatgagatttttaacaagtaatcatgcacttgaataactctaccaacagggacagcaaggtggaaa

SEQ ID NO: 219407 - DNA, 385 bp, Homo sapiens
gaattcaataaatatttgactgattgatcatataaatcattagggaaagcacgtgctttataaatcacttactgcatgcattcatgcttcatatcrcaaacaaaaagctaccaatgatggctagcttggctaacgggccagatgtagtaattctaaatctaaaacccaaatagatactaacacgttaaattagccatatgacaggggaaactgagaatctcaagagcatactgaacttaatatttgtttaaacacatgccaagccttttagatagaaataggaagtacttaactggaaaactattatggttggcactatgttggcattatgctaagattcttcagagacaagaatcaaagagcactcaaaaagtcctttataaac

SEQ ID NO: 219408 - DNA, 584 bp, Homo sapiens
attctttactgttttatcattatgtaaatcaaatagattttcttttccaataaaattctatctgtaaattgcccctgtgcatatcttgctggcaaaaaaattacaggaatgacaccaatttcatggtaactttaataaaaaaaatgctcctcagctttacaacctgaagatgaagaaagtttacamactttcttgaagtctctcactaaaaactgatgaccagtggaaatttctcttctcaacagccataaaatagtgactgcaaaattcaataatcttgaatgcatagttcaaaatttgtgatttactgtttggcaaataaaagttattttctaaccataataatagctatttattgagggcttactctgttctaggcactgttttacctatattattgctcctttacatcctggaaagccacttgatacttttttattagaatccccagaaaagaatccatcctttcaatgttcatttcctgagtatttgacaacacaattagaaaaattatcttaatgttagaaaaacagtgctgttcatagatatgaagagaaagccagcagcatatagagaaatgggat

SEQ ID NO: 219409 - DNA, 509 bp, Homo sapiens
tgaaataaaaactgaaggttgatgaattcaccttagaattcacaggcagattataaacctcaatatatatttttctcatttaattatacttctacaagtttatgttcaaattctattttcaaaaaagtctgagtaatgaacatagatgatggcattcagggagaaaagaaagaccataagcaaatctagacttagaacttscttactttttgtagttatcagtgttttggttttaagaaaaatcaatattgtttacttaattttgcaacaattaatttttaactaatccaattacttaaaaaattattggaaaattatgctcttcacaaatgccacttactgttaatatctgcaacttttcctgctatcaaaagggctcatttacttcctttcaaattaacatgcataaaatagtatttgttaactatcaataatttttttaaagtaaattaacaacagctacaacttagagtgcctatatgtgctcagcagtgtgtcaggcacttgac

SEQ ID NO: 219410 - DNA, 509 bp, Homo sapiens
tgaaataaaaactgaaggttgatgaattcaccttagaattcacaggcagattataaacctcaatatatatttttctcatttaattatacttctacaagtttatgttcaaattctattttcaaaaaagtctgagtaatgaacatagatgatggcattcagggagaaaagaaagaccataagcaaatctagacttagaacttccttactttttgtagttatcagtgttttggttttaagaaaaatcaatattgtttacttaattttgcaacaattaatttttaactaatccaattacttaaaaawttattggaaaattatgctcttcacaaatgccacttactgttaatatctgcaacttttcctgctatcaaaagggctcatttacttcctttcaaattaacatgcataaaatagtatttgttaactatcaataatttttttaaagtaaattaacaacagctacaacttagagtgcctatatgtgctcagcagtgtgtcaggcacttgac

SEQ ID NO: 219411 - DNA, 509 bp, Homo sapiens
tgaaataaaaactgaaggttgatgaattcaccttagaattcacaggcagattataaacctcaatatatatttttctcatttaattatacttctacaagtttatgttcaaattctattttcaaaaaagtctgagtaatgaacatagatgatggcattcagggagaaaagaaagaccataagcaaatctagacttagaacttccttactttttgtagttatcagtgttttggttttaagaaaaatcaatattgtttacttaattttgcaacaattaatttttaactaatccaattacttaaaaaattattrgaaaattatgctcttcacaaatgccacttactgttaatatctgcaacttttcctgctatcaaaagggctcatttacttcctttcaaattaacatgcataaaatagtatttgttaactatcaataatttttttaaagtaaattaacaacagctacaacttagagtgcctatatgtgctcagcagtgtgtcaggcacttgac

SEQ ID NO: 219412 - DNA, 509 bp, Homo sapiens
tgaaataaaaactgaaggttgatgaattcaccttagaattcacaggcagattataaacctcaatatatatttttctcatttaattatacttctacaagtttatgttcaaattctattttcaaaaaagtctgagtaatgaacatagatgatggcattcagggagaaaagaaagaccataagcaaatctagacttagaacttccttactttttgtagttatcagtgttttggttttaagaaaaatcaatattgtttacttaattttgcaacaattaatttttaactaatccaattacttaaaaaattattggaaaattatgctcttcacaaatgccacttactgttaatatctgcaacttttcctrctatcaaaagggctcatttacttcctttcaaattaacatgcataaaatagtatttgttaactatcaataatttttttaaagtaaattaacaacagctacaacttagagtgcctatatgtgctcagcagtgtgtcaggcacttgac

SEQ ID NO: 219413 - DNA, 601 bp, Homo sapiens
ctaccaaaaatcacagcttactttaaacatgctcagaacacttacatttgcctacagttgggcaaactaatccaacacaaagcttaccttataaaagcattaaatatctcatgtaatgtattgaacactgtagtaaaagtgaaaaacagaatggttttacatcataaaataaaaaaattttaaatcaagccatcaagaaattcaaacacaaaaaatctaaaacacaaacattcagattttatacatcttctcaaccactatctacaagtttatgattattacaatatttttcttttttttttctaatccccatgctgatcaaaattacaatatttctaatgtttggtttggatgactggtagaagtaaaggtatggccatgggacagttttatttctgaaaagcaaaatgatattgagtacttactatgtacaaggcatggttctaagcactttctttgtattagctttmtttcgtcctcacaacaaccctttaggacagatactattaggatcctcttttcacaaatgaagaaactggagcacagaaaggttaaggaaactgccaaaagtcaggttacagctgctaagtggcagagcaag

SEQ ID NO: 219414 - DNA, 435 bp, Homo sapiens
actgtttagtatgatgacagatatgtgagaatttgtatttgtatacatttggaatttttgataatgttaaatttttttaaagtattttctccacttgtttcataaactattatgatcattgagaaaaagtatataaaagcgaaaacacatatcagtgtgttttaatgtcagtgtgttttaatgtcagtttgaaaaaggaataaagaaaaaaatttaaggamtccacattctaaattaggagatggccaactatggccagtccacaggccaaatccagacagctgcctgtttttgtgatagtaacacagctacatccatttgtttaaatattgttgatggttgctttcatgctgcagcagcaaagtaagtgcaacagaaaccatatggttcataaagcaaaatttatttactatctggccctttaaagaaagttta

SEQ ID NO: 219415 - DNA, 435 bp, Homo sapiens
actgtttagtatgatgacagatatgtgagaatttgtatttgtatacatttggaatttttgataatgttaaatttttttaaagtattttctccacttgtttcataaactattatgatcattgagaaaaagtatataaaagcgaaaacacatatcagtgtgttttaatgtcagtgtgttttaatgtcagtttgaaaaaggaataaagaaaaaaatttaaggaatccacattctaaattaggagatggccaactatggccagtccacaggccaaatccagacagctgcctgtttttgtgatagtaacacagctacatccatttgtttaaatattgttgatggttgctttcatgctgcagcagcaragtaagtgcaacagaaaccatatggttcataaagcaaaatttatttactatctggccctttaaagaaagttta

SEQ ID NO: 219416 - DNA, 462 bp, Homo sapiens
ctggctggaagggttccctgaaagaacgaaaacacattacttagcaattatactttttaaatgaaaagtctgtctttacgacaacagcaagatttaaatatgaaggaaaaaaccatgaagtagcatatccttcaatttttcaaagagaaaactaatggcttaacacacttaggtccattttcggccaacgaatacataytaagaaaagactaggtgcagagcattctttcctatgcaagagatgggtggggagaatataaaaactttaagatagaatccctgctatttagacacttaaaatttagtgaagattgaaagaggtgttagtcactgctggctaaggtgctcaggaaaggattaacacagggctgggccttctgtgataaacagaaaggattctagagctcttatcaacagaggcttaaactaaatctagttcatccctagtgtactaaaattaat

SEQ ID NO: 219417 - DNA, 553 bp, Homo sapiens
tttaccattctgactttattcttacatatggatttactgaacaatatcacttaaccactatttaagctagtgacaatggtattgtttcatatttactcattctgacaaacattttgtttttgagtacactgtctaaatctagtagaataaaatacaatttatttgcaatttttaaatattacagtggagaaaatctgagatgaatgttcatcacagtgttgttttgaaagcctacggaaaacaaggggtttcttcgtacaaaaaaaagtctaaaaactgccaaaggaaggggcagaaaagataggtggagagaaactatgtagwaatatttgtttttttgaggcttacatgaaaattcaaagggtaaggatggcatacaggaatgcaactggagagcttaaaaaatgtctcaaccaatgcaaaggaaaaggaaatgagaggttgaaataaaaggccttgaggtccaaagatgtggagacaaactaaagcatatagtaggtaaaaagattaattgtgcccaagactcacacaccttattgtagacatcattcat

SEQ ID NO: 219418 - DNA, 280 bp, Homo sapiens
gacgttcaaaactttaaatacttcttgtgaatcattcacaaatccaaaaaatctgattcagcaacctaagtgcaattttcaaatttctccatccttcactgacaagggttaactcaaagagctttattttaacattttamatatatcaatattcatattcaacaatttaagaataaaaaccctacattatgaaaccaatgtttttttggagtaaggtatactgtgaaaagcaattggtttgctataagatcatacaacaatggaatgttctcttagaaat

SEQ ID NO: 219419 - DNA, 280 bp, Homo sapiens
gacgttcaaaactttaaatacttcttgtgaatcattcacaaatccaaaaaatctgattcagcaacctaagtgcaattttcaaatttctccatccttcactgacaagggttaactcaaagagctttattttaacattttacatatatcaatattcatattcaacaatttaagrataaaaaccctacattatgaaaccaatgtttttttggagtaaggtatactgtgaaaagcaattggtttgctataagatcatacaacaatggaatgttctcttagaaat

SEQ ID NO: 219420 - DNA, 600 bp, Homo sapiens
gaattcctaataaaaagatcaaaaacwgttttaaattaataatacataatgatgtcaatggcagagcaaaattctcacatcgcttgaagagggtctaatttaaaacctttctgaacagtcatttcacagcatgcattaaaactttaaaattgtgtgtagtttcctttttttttttttcttgagatggagtctcgctctgtcactcaggctggagtgcagtggtgcgatctcagctcactgcaacctccacctcccaggttcaagtgattctcctgactcagccaccccagtagctgggattacaggcacctgccaccacgcccagttaatttttgtagttttagtagagacggtatttcaccatgttggccaggctggtcttgaactcctgacctcaggcgacccacctgcctcggtctcccaaagtgctaggattataggcatgagccaaccttcccagctgtgtgtagtttcttataattttatttcctggtgaatgcatacacacacacacacacacacacacacacacacagaatataatcaaaactataatcaattatctatgtccacaggatattagctatttgactctgttat

SEQ ID NO: 219421 - DNA, 613 bp, Homo sapiens
ctaaaaatgaaatatcatttcttactttaatttttcacttatggtttcaattgcattctctatgacttccttaaatattctcccaagacttaaattcttactccctcacatatgccttagcaagttcacttcatctataagaaagagcaggtctcactttgcttgactttgctgttccctctagtgaccatctagtttctcttcattcttttacagtaacaacttctgaatttttccatccccagtctagttcattcagacctatatcctcccttggtagaactaactagaaagcctttcagctcattttcatgagaccatttttgttgcttcatattaatatctgatttttttctaaacattgttctaatccatacaatcaatattcaacatccttagtatgaacatgcaaggtttcctcaatatctggtaactacttttcttttttttcttcttttttttatttttttgagayggaatctcactctgttgcccaggctggagtgcagcagtgccatctcggctcactataacctctgcctcccaggttcatgcgattctccttcttcagcctcctgagtagcagggattacaggtgcctgccaacatgccc

SEQ ID NO: 219422 - DNA, 420 bp, Homo sapiens
caatacctaattgcaactgtccattcttctctcatttgtaagaagccataatagacaggatgcaaatgtggcttacagcaaaatcctaagccagagtggaaagarttcctccctcatcctcagggggtatttctctgccctccctccccaccagcagacagagtttctgacgttcataagacaataacatataaaacatatttccattctttgtcaagcatttcccagtattcttaagcctaaagaggttaacaccatttactcctttctatctggcaggttatagtttatcatattttttaaactagcataaaataaaaaagcagtgaagaaagcatcacaaataatcaaaactgatctctgcatcaaagaaacatatttatttggaccattaaaaagtaagctaatacatctttcaaa

SEQ ID NO: 219423 - DNA, 420 bp, Homo sapiens
caatacctaattgcaactgtccattcttctctcatttgtaagaagccataatagacaggatgcaaatgtggcttacagcaaaatcctaagccagagtggaaagaattcctccctcatcctcagggggtatttctctgccctccctccccaccagcagacagagtttctgacrttcataagacaataacatataaaacatatttccattctttgtcaagcatttcccagtattcttaagcctaaagaggttaacaccatttactcctttctatctggcaggttatagtttatcatattttttaaactagcataaaataaaaaagcagtgaagaaagcatcacaaataatcaaaactgatctctgcatcaaagaaacatatttatttggaccattaaaaagtaagctaatacatctttcaaa

SEQ ID NO: 219424 - DNA, 420 bp, Homo sapiens
caatacctaattgcaactgtccattcttctctcatttgtaagaagccataatagacaggatgcaaatgtggcttacagcaaaatcctaagccagagtggaaagaattcctccctcatcctcagggggtatttctctgccctccctccccaccagcagacagagtttctgacgttcataaracaataacatataaaacatatttccattctttgtcaagcatttcccagtattcttaagcctaaagaggttaacaccatttactcctttctatctggcaggttatagtttatcatattttttaaactagcataaaataaaaaagcagtgaagaaagcatcacaaataatcaaaactgatctctgcatcaaagaaacatatttatttggaccattaaaaagtaagctaatacatctttcaaa

SEQ ID NO: 219425 - DNA, 420 bp, Homo sapiens
caatacctaattgcaactgtccattcttctctcatttgtaagaagccataatagacaggatgcaaatgtggcttacagcaaaatcctaagccagagtggaaagaattcctccctcatcctcagggggtatttctctgccctccctccccaccagcagacagagtttctgacgttcataagacaataacatataaaacatatttccattctttgtcaagcatttcccagtattcttaagcctaaagaggttaacaccatttactcctttctatctggcaggttatagtttatcatattttttaaaytagcataaaataaaaaagcagtgaagaaagcatcacaaataatcaaaactgatctctgcatcaaagaaacatatttatttggaccattaaaaagtaagctaatacatctttcaaa

SEQ ID NO: 219426 - DNA, 620 bp, Homo sapiens
caagtataacagatcactaactcttatataaatctcattttaaaaattagtattactgggtaaattttgccctttgacatctatctggttacaaaaataatgcatttttaccaactaataatcctccattaaatgccaataaatcaggtggttactctagacttcaccactacacaatatatccatgtaacaaaactacacttgtacccttgtaaatcataaaaataaagaaaaatgccaataaatgtcaaatamattcaaagtacaagagacaaaagagagtctggaggtgcctggtccaactttgtcattttatgcatgaggaaagcaggttcctcaggccataagcaactagttgctggcatggccagaagccttcacctaatctcagagcacttctgtctcctttgagtccctcacccctcaaaacaggacagcactattcaagattcactttacctcacagattttcagtcttcaagattcccaaattttttcatggaaaatttcttcacatcatttgggatttggctcaaatatcacctcctcacagaggccttccctaacctttggtaaagagtaactgatgctttaccaagggtttagaattttatttctca

SEQ ID NO: 219427 - DNA, 545 bp, Homo sapiens
ccttccctaacctttggtaaagagtaactgatgctttaccaagggtttagaattttatttctcaagatatactataacacgcaccaccaaaagactgacaacaacatagttccttcttttttttttttttaagacagagccttgctttgtcacccaggatggagtgcagyggtgtgatcttggcccactgcaacctccaacctccgcctcccgcattcaagcaattctcctgcctcagcctcctgagtaactaggattacaggtgtgtgccaccatgcccagctaatttctgtatttttagtagagatggggtttcaccatgttgtccaggctggtctcgaactcctgacctcaagtgatccacccgcatcggcctcccaaagtgctgggatcgtacacatgagccactgcacccagccatagttccttccttctaatctatgtctctctgatttttggtggagggggctgggtcactaaatgattgttagaaataaagcagaaatattgactaaatctatactttcccaacaaaggtttggtaa

SEQ ID NO: 219428 - DNA, 545 bp, Homo sapiens
ccttccctaacctttggtaaagagtaactgatgctttaccaagggtttagaattttatttctcaagatatactataacacgcaccaccaaaagactgacaacaacatagttccttcttttttttttttttaagacagagccttgctttgtcacccaggatggagtgcagtggtgtgatcttggcccactgcaacctccaacctccgcctcccgcattcaagcaattctcctgcctcagcctcctgagtaactaggattacaggtgtgtgccaccatgcccagctaatttctgtatttttagtagagatggggtttcaccatgttgtccaggctggtctcgaactcctgacctcaagtgatccacccgcatcggcctcccaaagtgctgggatcgtacacatgagccactgcacccagccatagttccttccttctaatctatgtctctctgatttttggtggagggggytgggtcactaaatgattgttagaaataaagcagaaatattgactaaatctatactttcccaacaaaggtttggtaa

SEQ ID NO: 219429 - DNA, 585 bp, Homo sapiens
tggtttcatcacaacaatgctttgatacacggaaatttctctatcagctggctgcaaacatgattttcaatatgtaagctctaaaaagcaaccaacgaccttgtcaagcaaaacgcatagattccatttgagctctaaacatgcccaagtagtttaatttccaaagaatattaaacagtgcagagttaacaagatatttccagttcaggggtctggatgatatgaagaaccgaggaagcaaacctgggaatagtgcaagcagacatcccagtgctaatttttgatcatgaaacctatggtgtgaaaagaagcttgttattcaaaggctaacctaagcaccytactgatgctctacatcacttagaaatgtaaaacaatcgcttgagcaaggggaaaaaaggtattaagagatatgcagtgataaatgtacatggatcactgacttttctcccttggatattatctctgaggctcctcaaggcctctcaaactgttcagccaaaggtacctggaacattcaaggagggtgaacaacaggtgacctttatgccctaaccatcaacttcctttaatgtcatatagtta

SEQ ID NO: 219430 - DNA, 402 bp, Homo sapiens
taaattacatatgtggttcacatttctattggacagacttctgtccggtacacaagcaataataacatgatatttaaatgaattaaaatctaggagcatgaggacatgttgaaaggagttagccatcttgctttaggcagacagtaagggaagggtccccrgacaacctccgacacgccccacaagtgtttacaccagatgttttgtgcaggtaagggaacttacagagggggcttgcctaaacatgcccgcagtagaaaattccattccttaacacatgcgcagcacaggaaataaatccatatggagcggctcaaactaaggggccacatgcacactggaaggactgggtggagctgccaggaattggcatcttatacaaataaggaacccagcctcatc

SEQ ID NO: 219431 - DNA, 515 bp, Homo sapiens
catgatatttaaatgaattaaaatctaggagcatgaggacatgttgaaaggagttagccatcttgctttaggcagacagtaagggaagggtccccagacaacctccgacacgccccacaagtgtttacaccagatgttttgtgcaggtaagggaacttacasagggggcttgcctaaacatgcccgcagtagaaaattccattccttaacacatgcgcagcacaggaaataaatccatatggagcggctcaaactaaggggccacatgcacactggaaggactgggtggagctgccaggaattggcatcttatacaaataaggaacccagcctcatcagcttttaaataaaagccctggtattcaactgtgagggggcatccagcaacctgcattcaggacccctctctttgctaagagctttccttttgcttaataaattctactccagtcaatctctggtgcctgtgagcctaaatgttcctggtggtgagacaagaagccaaaactagctga

SEQ ID NO: 219432 - DNA, 515 bp, Homo sapiens
catgatatttaaatgaattaaaatctaggagcatgaggacatgttgaaaggagttagccatcttgctttaggcagacagtaagggaagggtccccagacaacctccgacacgccccacaagtgtttacaccagatgttttgtgcaggtaagggaacttacagagggggcttgcctaaacatgcccgcagtagaaaattccattccttaacacatgcgcagcacaggaaataaatccatatggagcggctcaaactaaggggccacaygcacactggaaggactgggtggagctgccaggaattggcatcttatacaaataaggaacccagcctcatcagcttttaaataaaagccctggtattcaactgtgagggggcatccagcaacctgcattcaggacccctctctttgctaagagctttccttttgcttaataaattctactccagtcaatctctggtgcctgtgagcctaaatgttcctggtggtgagacaagaagccaaaactagctga

SEQ ID NO: 219433 - DNA, 515 bp, Homo sapiens
catgatatttaaatgaattaaaatctaggagcatgaggacatgttgaaaggagttagccatcttgctttaggcagacagtaagggaagggtccccagacaacctccgacacgccccacaagtgtttacaccagatgttttgtgcaggtaagggaacttacagagggggcttgcctaaacatgcccgcagtagaaaattccattccttaacacatgcgcagcacaggaaataaatccatatggagcggctcaaactaaggggccacatgcacactggaaggactgggtggagctgccaggaattggcatcttatacaaataaggaacccagcctcrtcagcttttaaataaaagccctggtattcaactgtgagggggcatccagcaacctgcattcaggacccctctctttgctaagagctttccttttgcttaataaattctactccagtcaatctctggtgcctgtgagcctaaatgttcctggtggtgagacaagaagccaaaactagctga

SEQ ID NO: 219434 - DNA, 515 bp, Homo sapiens
catgatatttaaatgaattaaaatctaggagcatgaggacatgttgaaaggagttagccatcttgctttaggcagacagtaagggaagggtccccagacaacctccgacacgccccacaagtgtttacaccagatgttttgtgcaggtaagggaacttacagagggggcttgcctaaacatgcccgcagtagaaaattccattccttaacacatgcgcagcacaggaaataaatccatatggagcggctcaaactaaggggccacatgcacactggaaggactgggtggagctgccaggaattggcatcttatacaaataaggaacccagcctcatcagcttttaaataaaagccctggtattcaactgtgagggggcatccagcaacctgcattcaggacccctctctttgctragagctttccttttgcttaataaattctactccagtcaatctctggtgcctgtgagcctaaatgttcctggtggtgagacaagaagccaaaactagctga

SEQ ID NO: 219435 - DNA, 457 bp, Homo sapiens
tcatcaaaagtctttggcctcatgcactttgtgccaccctcctcactaacattctattcatgatattagtctttttgagacctcccaaatggtgctgatctaattcatttctgcaaacagacttcagatgttatgaggtgtctgtcagatgaggctcagggtaccaagcattgtttttgcttgccatattgatcactgttaaaggtgtatctgaaagtaagtcttgatagtccctagcaatcaaaagtgtttcctcaagtcctaattttttaggtgtttttccctataccttctgagtctcttacttcaggctgctatcacaaaatgcmatagactaggtgccttataaacaaaagccatttcttaccgttgtggaggctggaagtccaaagtcaaggtgcctgcagattccgtgtctggagagggccctctttctggtttgtagatggtcttgtca

SEQ ID NO: 219436 - DNA, 604 bp, Homo sapiens
tctttgttggggaccagcctcaacaccacccatagggtagttaaagtctttgtggcgacgaaggaatgagaagagacaggtttaaagtgtataaagagtgggggccagggggccaattgcaaaatggaggctgcaaaaggcaccaagctccagtctccacactatttattgagtacaatcacttacatctaagaagcagacgtttagggcaaaacggtgaaagggaggcagtgtgttataggcataatctatagcaatagcggtttaaatgaatctcctttgtgcccaaacatcgtatctataacttatcggagtgtagctagtgggagcgggcttaactaggagcctgcacgtctgtctacattccaatgcttcaaaggagtgtctttcttcttgaacacagtgtttatagataagagagcaggttgcactcagagcatgggaacataatggcgataagaaggctttcctcttcagaggcmtcttgtggctttccacaacttattgtctcatatttttatggccagcttatgcaggcaccccacaagcctttttcccaatatgccccactttttttaaaaaccaccattgttattaaggcttg

SEQ ID NO: 219437 - DNA, 448 bp, Homo sapiens
ctctatcttcaggaatataagtgaaggaaaggaaatttttttcttttttttgagacagtcttactctgtcgccaaggctggagtgcagtggcactgtgtcagctcactgcaacctctgtctcctttgttcaagcaattatcctgcctcagcctcctgagtagctgggattacaggtgcccaccaccatgsctggctagtttttatatttttagtagagatgggatttcaccatgttggccaggctggtcctgaactcctgacttaaggtgatccacctgccttggcctcccaaagtgctggcgtgaaccgggccagtgagccaccgcactgggcctgggaaatttgttcatttgctttatcctactttctcattctttattgaactaggatttttttgtctttattgtatgtgtctgaaagccagtttgttactcttaagacactact

SEQ ID NO: 219438 - DNA, 588 bp, Homo sapiens
taggaattcctaaggtgggccgaatccaattaatatctcctaacaatttttgaaaatcatttaaggtttttaaataatctttttaaatttgaaccttttgaggcttaatggctgtatcctgtacttgcatccccaaatactgaaaaggagtggttgtttgaattttgtcaggtgctatacgcaattcagcgtttgtaattgccttttgtaaagatgaataacattgaataggttgatctctattttttgctgcacacatctggaaattgatctctaacaggctggatagttctgcctacaaaagtttgacagattgtgggactgtttaacataccccggagtaaaaccttctaatgatatctggctgcaggttctttgtttttaatggcagggacagtaaaggcaaatttttcgaaatctgcctctgctaaaagaattgtaaaacaaggcagtcttttaaatctataataatgagcagccagtctttaaggagcatagtgggggatgggagcccaggttgtaaggctcccatyggttgaattacagcgttggccactcgcaagtcggtcagcatgtgccatctaccgg

SEQ ID NO: 219439 - DNA, 653 bp, Homo sapiens
agacaacttctctattaaatcatattatttaaggcattctttgcctcattaataaaattgtgtggcaagatcttccactgtcatgactaatgttattaaggctcatctatgtttgctaaaacgcatttgaaaaataaaagtagttgccaatgttttgaagctactggagtgaaacacaaaataaaacaaaaacacttaccaaaagaacctgcaaacctatttacctactagcagtcttgcttgcacagttatatgcttcacaagcctctatttcattaaaatcatttcttcttgaaattctgctataaaacatgcatcagtcgcctgcctcagtctcagtaacctgtccttgcccagcacttycttcaaccataaccacaggaaaacgtagcacatcatccatcttgctgaagtgggagacaggtcacatcttccccgacccctccatcccttttagtaaagtgctgacttctgatgcaaactgaaaagcctccctgtgggctaacagaaggaggagagcttttttcactcctatgaagcacccagtctccccagcatgccaccaagcatggccttgaccattgcatctataatttgactaacaaagagctagtcaaaagtaacagaaacctctcaactgggatttataggct

SEQ ID NO: 219440 - DNA, 595 bp, Homo sapiens
ccaagtaagcatatagataaagagataatagataaataggtaattaatcatttcatttctcacaacaaccatttaacaaactgtcttctaactaaaccagcatggcaaaaaaataaaatcccagagatgcatacaatcagcctaaaatacagtaagctttttttttccttcccatgcaataatacttaatttactctctgccatttgttatactttggatcccacaggaataaaaacaactcttggaaatagaccatgcagtcagcaagtacagcacagtgaacagaacacttaagattatgattctaagagatgggtcagcaatattctccccttttggcttttactatctcctaacattcttatgatatccttttttataaagttcatgtatccagatattcatctggactcaamatctcaaacatgaatggaaaacaaaaccatcaccgtcttttgaatcaaacaagtttctataaatgctgcagattataacagcagaaatcatttcttctacaagaattaacatacattagatcacacaagatagatgattatacccaaagatttcagaagttatccactgtttctcagt

SEQ ID NO: 219441 - DNA, 435 bp, Homo sapiens
aacactttaccagctctttaggaattccttaatccagtaaagctgatagctaaaattaaccatcacaatgtctattcagtttagtttgcatcacagtctcttggccacttctgtttcttcaataatgttgctagtgcagggcatgctacaattaaggatagactggaaatctaaaacctaaagctgaagaggaatagtcaccaaacacatgaaccctattatacttctagtcctaaaagtcaatttgaaagagtattatgttttcaaattcctaaagtcatgtgtrttttgttattaatggttctttatagattaaatgaatcttcacttctagtatgattgaatattattcattcttcagttcattgccagaaagccaagtgcagtaagtcttttcaagtttaacccctctgatcaaggcataaagtttatgtg

SEQ ID NO: 219442 - DNA, 550 bp, Homo sapiens
atgcctcttttaagataattacaattttctgtgaatatgcactcatccccaaaagaatattgcacacaacactaccactactaccaccaccaccaccactaattgtttcttagtgtcccagtaacaaatctagtcatctaccatgcaacatctccttgctggccctaatatataatgttcatctttggtgccaccactgctactgcgcttcccactagctaacatctgaatcctctttggaacccttgaggtacctgctgcctgatgttccatgtccaactaaaagagagtattttaaggctcttttgtattacactcagatatagggccaccaagttagttatcaggccctaatactttacctagaggtatcgcatgtggcatctacacaaggcttgtccatggacatgagcacaaagtagactgagccagaaactaatctatgtcacattgaaatgctctcctcctgccaaacattttattaccaggtaagtaatttaygctaggttcaaccttgttactaggttagtctgtcttcttcataaaatga

SEQ ID NO: 219443 - DNA, 417 bp, Homo sapiens
aaatggccccatttattaccagaaaaaggcacatactaagaaaatctgcaaggtgaactgtaggtctagttcctgtcataatgccccattacttatctacctttgatctcatgggaaaagtcggtatccttctaattacacctctgttttatgaaacaataagtcactatataatatgcatgatttttaaatcaatttcaagacacacmtgacaactgtcatatgaagattataattagtgttaatggaaggccagctaagattgcattgcaaatttggtgtccttttacacttcataaaggataacctctgcaatgaacatttaattggtaaattatatgttctaggttttcagatccatggcaaaatctataggataagctaaggaattatgttttgatttgacagacactaggg

SEQ ID NO: 219444 - DNA, 411 bp, Homo sapiens
tttatgcttccaagatggcaccttgaatactgtgttctcacatggtaggggagatggacgggccaaattcaccctttaaagctttttcataaggcctcatcaccttttgaaggcctcgcctcttagtaatgttacactgggatttaaatttcaacctgaattttgtaggggacataaacattcaaaccayagcagagatttaatttatgtatactaaagatgaagttgcctctatctcagctaacttaattcattcacttaaaaaatagttattgaatgcctaatatgtgccagagattgctctgggactaaagacacactggttagaaaatttattaaattaatagttttaatgctccagcagctcatttataattagctaaccatttccaaccataaatgcatacttga

SEQ ID NO: 219445 - DNA, 295 bp, Homo sapiens
tcattgagcttccttgtcaaccaaattctgaattctatatctcttattttagccatttcaatctggttaagaaccatttctggggagatagtatggtcatttggaggtaaaaagacactatgttttcagagttgccagaattcttgtgctggttctttctcatctgtgtgggctgagttactttaatctttaaagttgctgtcctttggatggggcttyttgcttttatgttctttgatgtccttaagaagttgattgtgatataagttgggtttagtcaactggcttcatttat

SEQ ID NO: 219446 - DNA, 558 bp, Homo sapiens
agggtcactctgctgtgtacagtctaggcacttggtgctctgcatcccagccactccagccgtgactaaaaggggccaaggtacagctcaagctgtggtttcaatgtgtggaagccctagtccttggcagcttccatgtggtgttgagcctgcgggtgtagagaagtcaagaattgaggttggggaacctccatttagatttcagaagatgtatggaaacaacttcacgcccaggcagaagtttgctgcaggggtggggccctcatggagaacctctgctagggcattgtggaagggaaatgtgggattggagcccccacacagagtccctacttgggcactgcatagtggagcagtgagaagagggccacagttctccagaccccagaatgayagctcctctgatggcttgcaccatgtgcctggaaaagctgcagacactcaatgccagcccatgaatgcagctgggagggaggctataccctgcaaagccacaggggaggagctgcccaaggccataggggccaacctctgcatcagcatgaactggatgtgaga

SEQ ID NO: 219447 - DNA, 439 bp, Homo sapiens
gtttttgttactgtttgttttcatcagagctaatgtgctataccctgaacaaatgggggaacatacaacatgttcatccaatagtgaaagagatgatgctccttttggagacatctgattataaaagtagtttaaataaaacatgcarttaacaaaggagagaaaacctgcaaaacctgctttaaaaacctctgcgcggtcctacgaattcatccattttctgtgacacagacaaaattaacttttcctttttatgttgaacattagcctataatcattttgaactaaaaaagtctaaatatactgaatatcctatgatcatctccttcaagtctttactcttgtttgttttcccaagaacaaccatcatcttctagcagattatataatttagatatttcttatgaatagggcttattgcctatcatcatgccaagat

SEQ ID NO: 219448 - DNA, 565 bp, Homo sapiens
ggtgttttcatctctgtagtagaatgaatgttgtcatgcagtatttgtataataaacgtttgtggaactacatttattgctagccataggaaaagatatttcacttaggaaaagtactgtacaaaatggctggagggatgggggacacaactatgtttgtgaaaagaatgctaactcagggagacagctggcattttggcagagtgagaggtgaagctggcaatgtcagctcctgatcatttatatcttctctgatgttcctgtctgccaagaaatagaatccagctaaatgcccatcagtgaatgaatggataaagaaaatgaggcatatatgcacagtggaataatatttagcatttaaaagaaggaaatcttatcattcgcatcaayatgaatgaacctgaaggacattatgctaaaagaaataagccaggcacacaaagacaaatgccacatgatctcatttatatgtggaatctaaaaatgttaaactcataaagggtagaatggtggctaccaagcacttagagtactagaaagttagggagatgttagtcaaaggaaa

SEQ ID NO: 219449 - DNA, 461 bp, Homo sapiens
cacataattatatatctgagaacatgtagtataattcatattaaggtagaattttgggaatcctggtaaatataatgtattttatcaaaatctcatgtcattayttgggagtgctaaattagtttaaaggcaggatggtttgcctgatcctcttcccctaaatgaaaaaccaagagactgctttcccagcacggtcccacacacctggactggtggagaaatgcatctctctcccgaggttgtggattgccaaaaccaatggggcatgaaaggcatgagtcaggtcaggaacatctagaaagctaagaaagaatacaacttgctctataaacaagaaaaacaattacaattatcatttgggttcaactaatcccttcgctgctcatctgtcctcaaagtgccagaatccatattttatgcatctttgaaaaccaagcttcaactctggtcctcaaatatag

SEQ ID NO: 219450 - DNA, 461 bp, Homo sapiens
cacataattatatatctgagaacatgtagtataattcatattaaggtagaattttgggaatcctggtaaatataatgtattttatcaaaatctcatgtcattatttgggagtgctaaatkagtttaaaggcaggatggtttgcctgatcctcttcccctaaatgaaaaaccaagagactgctttcccagcacggtcccacacacctggactggtggagaaatgcatctctctcccgaggttgtggattgccaaaaccaatggggcatgaaaggcatgagtcaggtcaggaacatctagaaagctaagaaagaatacaacttgctctataaacaagaaaaacaattacaattatcatttgggttcaactaatcccttcgctgctcatctgtcctcaaagtgccagaatccatattttatgcatctttgaaaaccaagcttcaactctggtcctcaaatatag

SEQ ID NO: 219451 - DNA, 515 bp, Homo sapiens
aaatgaaggttcaaggaacaaaggtatactgtaccaatttaaagagcaaattgaataaagaggaaataaagacatttaagatatctgatgtaaaataaataccattttagttcaatgtgttaacaagtcaaggtatagctattctactcactaagttgcagataaatggccargcttaagaaaattgaagtggaaaaatgttatgagatattcaataaataaagactttaatagctcaaagatcatggaatttataactcaacaataaacctttgctggaaaagaataagtgaataagaagtaagggatgatggaacttatcagttattttgagttgatgaaggaggtagaaatggaagctactatcatgagtctgttagtaccttcattagaactcagatcttgctgcataatttgggtggccaaatgcaaaacaaaaaatgaggggcccaagattcaaaaattaaaacagttataaatatatcatatcatgttcagggaaacattatttagaa

SEQ ID NO: 219452 - DNA, 374 bp, Homo sapiens
ttccccagggtctcatccccacttcttaaaatgacaccaaggtggcctttaaagtttaaaatattcctttcatctattgaatgactaatactcaatgatgtgaatacaaatacttttccattaaaaccaggaaaccaaagaagtaacatccttcactcctctgatgagtgtaggtggtatagtgagtcctctttttgtgtcccttctctctgtcagacacaggggcatgtgtaactttactcttatttttagagacaagaagcttcacattaaatgcacatgtgccaggctgctgacagttctccctgcatagctgcacagtgatactsatttttaggtttttcaaacttctcttctttcttttgtagtatcta

SEQ ID NO: 219453 - DNA, 522 bp, Homo sapiens
aatctctatttattatacatgtgttcagatttttttatttctccttaagtcatcagttttggtagtttgtgtgtttcttggaatttttccatttcatctaggttatctaattatttggtttttcatggtattctcttataattgttttttatttctgtaaagttagtaataatttgcagttgtcagttctgattttatttatttgtgtcttcatttttccttagccagtctagctaagatttttccattttgtgtatctttacaagtaattatttttttgttccttgattctctttactgttttcttagctctattttatktatctctactctaatctttactatttccttctttctgctaactttgagtttagctgcatattctttttctggtttcttaaagtgtaatattaagatatgatttgaaatctttcttctaattgcctttgtgctgttttctttgactcactggttgcttaagtgtattttatattgtttgatttcagcatatttgtgaatttt

SEQ ID NO: 219454 - DNA, 566 bp, Homo sapiens
agtgtcaagttctgtaaagaggtagctgtcatttttaggcaggatggtggtatcgcaggaactgagggtagatgttacatgttcagttcccaggtttttcactaaatagccatgactggagacagttgcctaaactatatttttacgagaacaaaaggaggtaattttttccaaaagtggctagcatagtgctgttagcttagagtagacacaggtaacatgttattttcctgccttcccttgcatcaagatttgtaatcagagtagtcaatckttttagatttttagactgccaggatggtcttcctattccccaaatatctccattaacagctggcttctgacttttgaaagtctattggttattgtattaagcttctatcagttattcccatttaagttaattcattaaaatattccccaagattaggattgaaattataaaattcttttttattaaaaaattattttttaaaataaaaaactaacgagaagggaagaggaagagtcaggtcaaagggaggattacgtaaggggactgagtggctggataaagaggacaggac

SEQ ID NO: 219455 - DNA, 432 bp, Homo sapiens
ttgttctcttttaaaacggtgtctttgttatcatattattttttcccaaagctaattcttgagaaagagtaagttctaaaattattttaattaaaattccatgatgacatggaaaamctgctcttttagtattcaagacattgcctttattttttcatttggctaaaaagaattattacaccagctgaatacagcaaatttcccacgtgtgttagtctgctctcacactgctgtaaagaactacccgagactgggtaatttataaagaaaagaggtttaattgactcacagttcttcgggctatacaggaggcatggttggggagacctcaggaaacttacaatcatggcagaaggtaaacgggaagcaaacacgtcttaacatggtggcaggagaaagagagagtgaagagggaagttttacacactttca

SEQ ID NO: 219456 - DNA, 567 bp, Homo sapiens
agcagataactctgagagtcaaaaactctagggggctcagtcataagaggtgcctacattggtgagttttacctcaggagctcaaccagattctcacagtgaatactggagaaaaattttctggggcttatagcagagggaggaaaaaggaaacattttgaaatacaccagagyattttgtccttcttaacaagaactgccctcaagagaaactgccaaatcagagtctaagctattggggttctatcagtgcctaactgacatgggagaagggaaatacccaactccagcctagtctagccatcctgtcccacctatgaagggcggagggagactgagaagcacttgtgtaattcacagttcagaggcacaggctcactaaaagactgagacctaatcataggactatagactacttccccttccccacaccttaccaacactttagtaaaggctcatttccttttgttcacttgacccagtacataacatttggctactaagaaaaaaattacaagtcatgttaaaagacaaaaaacaaaacaaaacaaatatcacagtttaaag

SEQ ID NO: 219457 - DNA, 413 bp, Homo sapiens
caaaatatgactgctgtccaattctaaattagattttttaaaactaagtaaaatgcaaggaaaaaatacagaaaaatgcaccacaatgctaatggtttttaaaattataggcayacttagagtttccaggctggcatgtaaaaccttagaagttgtcactttgtcctgacaacaagtataaggctgaacaaaccaaaaaaggcaaattcctcttagatccctaggagaactgaggtcagagcacaaaccaccgagcccaaaattggagagaccagcaggggaacacagagaatcacaacggcaacctccatgggaaccagttccctggtaagaaaacctatactgaaatgggtgaatttctagagtctcggtgtgaacaactgtgagagttaaaaactccggggcgacccagt

SEQ ID NO: 219458 - DNA, 558 bp, Homo sapiens
attatttaagcaatttccttaataattagaaaatggtatttgtgaagccatttatttaatcacacacaatttaatggaggccattacaattctctatctactttattctgttagaaccaaaagcctaaagagaaatgtgttcctaaggctctaaaygctttcaagaaactgagtctgactcacagtgctttctacagagaagtggaagaagcacacagcacagtcatccaccacatgtgaaaatcagttaatatttctcccagttatagacatgtcattattcataaggtactgttaaatacattaaaagatcaaacaaaagcatctgctttggtaaggctctgacctacccaaatttctgcctgggatagtgcatagagcaatagtttacttctaactttctatcgtgtataaaaaaaattgttatcaatgaaaattgaaaggaaacaaaggaattacaaagcaaaaccataaattagctgtgaaggagagttcctcttaccatacccttcaccaaattgagtattattacttcttgaatctttgtcaattggtaag

SEQ ID NO: 219459 - DNA, 483 bp, Homo sapiens
aaaagtctgccccagtctttgctttctcctcatcatgatttacctcctgcttttgccagaagataagtgatgaatgggtggtttgacacaagacatgctatgtggatgctagaaagacaggtaaatgcttttaaaaaacgttttgaacataacctgccactaaatcaggagatttggggtgggagagcaagaatgtagaaatgatattaatacagtgaggagtaagaccctkatttcatcacagagatgaatgtagatctgctgcaatttgcaaataacacataattatggatagtttttgtaatgcaaaaaataaaccctctaattatatatagaactgattgtagataatgatagtgatctactaggaatagattaaaggattgagaccatttttttccatctcattcagacattgaggttttctgcattgacctgtggaaatggcattaatgagagacactgaagagagactgtctagat

SEQ ID NO: 219460 - DNA, 483 bp, Homo sapiens
aaaagtctgccccagtctttgctttctcctcatcatgatttacctcctgcttttgccagaagataagtgatgaatgggtggtttgacacaagacatgctatgtggatgctagaaagacaggtaaatgcttttaaaaaacgttttgaacataacctgccactaaatcaggagatttggggtgggagagcaagaatgtagaaatgatattaatacagtgaggagtaagacccttatttcatcacagagatgaatgtagatctgcygcaatttgcaaataacacataattatggatagtttttgtaatgcaaaaaataaaccctctaattatatatagaactgattgtagataatgatagtgatctactaggaatagattaaaggattgagaccatttttttccatctcattcagacattgaggttttctgcattgacctgtggaaatggcattaatgagagacactgaagagagactgtctagat

SEQ ID NO: 219461 - DNA, 454 bp, Homo sapiens
agcatggccatccattcatccatctgctcacccatccatccacctgtccgtcaataaatattcactaagcacttctatgtgcaggacattgtggtcagcactggagacaggaagatgaatatggtctagctcccttcttcaaggtgctcacagttcagtgagggcagaaacatttacacataactaattatgcrtgataattttaaaatgtatatttagaacagagatggtgttttggtaatatcttgatcctcagaactttgtacaaagttaaagcaaaataattgttttttctgaatatcagaatacatggaacaaacagcattttagaaaattctacagggagatatgggaaagagggatttaaaatatttctttaaactaaaaatagaactaccctttgacccagcaatcccattctggatatatacccaaaggaaaataaatcattcta

SEQ ID NO: 219462 - DNA, 299 bp, Homo sapiens
tcccgtttccaacgaaatcttcacagctatccaaatatccacttgcagattctacaaaaagagtgtatcaaaactgctcwgtcaaaaggaaggttcttctctgttaggtgagtgcatacgtcataaaggagtttctgagaatgtttctgtctagtggttatgggaagatatttgctttttcaccgtaggcctcagagcgctccaaatatccacttgcacatactacaaaaagagcgcctcaaagctgctctctgaaacggaatgttcaactctatgggttgaatgccaacatcacaaag

SEQ ID NO: 219463 - DNA, 587 bp, Homo sapiens
tgtatcaaaactgctcagtcaaaaggaaggttcttctctgttaggtgagtgcatacgtcataaaggagtttctgagaatgtttctgtctagtggttatgggawgatatttgctttttcaccgtaggcctcagagcgctccaaatatccacttgcacatactacaaaaagagcgcctcaaagctgctctctgaaacggaatgttcaactctatgggttgaatgccaacatcacaaagacgtttctgagaatgcttctgtctagatttgatatgaagatattcccgttccaacgaaatcttcaaatctatccaaatgtccacttgcagattcaacaaaaagtgtttttcagaactgctctatcaaaagaaagatccacgtctcttagctgagttcacacatcacaaacaagtttatgagaatgcttctgtctagtttttatttgaagatatttcctttctcaccatagacctgaaagctgtcctaatgttcacttccagatactacaggaagagtgtttcataactgctgtacgaaagggaatgttcaactctgtgacttgaatgcacacatcacaaagtagtttctga

SEQ ID NO: 219464 - DNA, 299 bp, Homo sapiens
tcccgtttccaacgaaatcttcacagctatccaaatatccacttgcagattctacaaaaagagtgtatcaaaactgctcagtcaaaaggaaggttcttctctgttaggtgagtgcatacgtcataaaggagtttctgagaatgtttctgtctagtggttatgggaagatatttgctttttcaccgtakgcctcagagcgctccaaatatccacttgcacatactacaaaaagagcgcctcaaagctgctctctgaaacggaatgttcaactctatgggttgaatgccaacatcacaaag

SEQ ID NO: 219465 - DNA, 299 bp, Homo sapiens
ttcccgtttccaacgaaatcttcacagctatccaaatatccacttgcagattctacaaaaagagtgtatcaaaactgctcagtcaaaaggaaggttcttctctgttaggtgagtgcatacgtcataaaggagtttctgagaatgtttctgtctagtggttatgggaagatatttgctttttcaccgtaggcctmagagcgctccaaatatccacttgcacatactacaaaaagagcgcctcaaagctgctctctgaaacggaatgttcaactctatgggttgaatgccaacatcacaaa

SEQ ID NO: 219466 - DNA, 566 bp, Homo sapiens
tgcacatactacaaaaagagcgcctcaaagctgctctctgaaacggaatgttcaactctatgggttgaatgccaacatcacaaagacgtttctgagaatgcttctgtctagatttgatatgaagatattcccgttccaacgaaatcttcaaatctatccaaatgtccacttgcagattcaacaaaaagtgtttttcagaactgctctatcaaaagaaagatccacgtctcttagctgagttcacacatcacaaacaagtttwtgagaatgcttctgtctagtttttatttgaagatatttcctttctcaccatagacctgaaagctgtcctaatgttcacttccagatactacaggaagagtgtttcataactgctgtacgaaagggaatgttcaactctgtgacttgaatgcacacatcacaaagtagtttctgaggatgctgctgtctactttttatacgtaatcccgtttccatcgaaatcctccaagctatccaaatatccacttgcagattccacagaaagactgtttcaaaactgctctgtcaatagaaagtttcaactc

SEQ ID NO: 219467 - DNA, 566 bp, Homo sapiens
tgcacatactacaaaaagagcgcctcaaagctgctctctgaaacggaatgttcaactctatgggttgaatgccaacatcacaaagacgtttctgagaatgcttctgtctagatttgatatgaagatattcccgttccaacgaaatcttcaaatctatccaaatgtccacttgcagattcaacaaaaagtgtttttcagaactgctctatcaaaagaaagatccacgtctcttagctgagttcacacatcacaaacaagtttatgagaatgcttctgtctagtttttatttgaagatattkcctttctcaccatagacctgaaagctgtcctaatgttcacttccagatactacaggaagagtgtttcataactgctgtacgaaagggaatgttcaactctgtgacttgaatgcacacatcacaaagtagtttctgaggatgctgctgtctactttttatacgtaatcccgtttccatcgaaatcctccaagctatccaaatatccacttgcagattccacagaaagactgtttcaaaactgctctgtcaatagaaagtttcaactc

SEQ ID NO: 219468 - DNA, 566 bp, Homo sapiens
tgcacatactacaaaaagagcgcctcaaagctgctctctgaaacggaatgttcaactctatgggttgaatgccaacatcacaaagacgtttctgagaatgcttctgtctagatttgatatgaagatattcccgttccaacgaaatcttcaaatctatccaaatgtccacttgcagattcaacaaaaagtgtttttcagaactgctctatcaaaagaaagatccacgtctcttagctgagttcacacatcacaaacaagtttatgagaatgcttctgtctagtttttatttgaagatatttcctttctcaccatagacctgaaagctgtcctaatgttcacttccagatactacagraagagtgtttcataactgctgtacgaaagggaatgttcaactctgtgacttgaatgcacacatcacaaagtagtttctgaggatgctgctgtctactttttatacgtaatcccgtttccatcgaaatcctccaagctatccaaatatccacttgcagattccacagaaagactgtttcaaaactgctctgtcaatagaaagtttcaactc

SEQ ID NO: 219469 - DNA, 566 bp, Homo sapiens
tgcacatactacaaaaagagcgcctcaaagctgctctctgaaacggaatgttcaactctatgggttgaatgccaacatcacaaagacgtttctgagaatgcttctgtctagatttgatatgaagatattcccgttccaacgaaatcttcaaatctatccaaatgtccacttgcagattcaacaaaaagtgtttttcagaactgctctatcaaaagaaagatccacgtctcttagctgagttcacacatcacaaacaagtttatgagaatgcttctgtctagtttttatttgaagatatttcctttctcaccatagacctgaaagctgtcctaatgttcacttccagatactacaggaagagtgtttcataactgctgtacgaaagggaatgttcaactctgtgacttgaatgcacacatcacaaagtagtttctgaggatgctgctgtctactttttatacstaatcccgtttccatcgaaatcctccaagctatccaaatatccacttgcagattccacagaaagactgtttcaaaactgctctgtcaatagaaagtttcaactc

SEQ ID NO: 219470 - DNA, 559 bp, Homo sapiens
cacgggctgagtgtttccatctgcggtgatgaaaaaattctggaaataggtagtagtagtgattgtacatcatgaatgtaattaatgccgctgaattgtaaacttaaaatggttaaaatggggccgggtgcagtggctcgcgcctgtaatctagcaatttgggaggctaaggtgggcggatcacttgaggccaggagtttgagaccagcctggctaacatggtgaaaccctgtctctactaaaaatacaaaaattacatggtggtacacacctataatcccagctacttgggaggctgaggcaggagaatcgcttgagcccgggaggcggaggttgtagtgagccaagatcatgccactgcactccagcgtgggcaacaaagcaagactgtctcaaaaaaaaaaaggttaaaatggtaaattttatgttaaatacatttaaccacaaaaatattttcaattcaatttccaagttaaactagctacatttcttttttttyttctccacaacgttactgctcaccactagctgcatttcagttgcttaataattagccaca

SEQ ID NO: 219471 - DNA, 606 bp, Homo sapiens
tgaggccagcctgggaaaaaaataaaagaaaacyttggcattaatctatgagaaattcctccaatttaaagtgatttcatcatttttaaaccatgatattatatgtaaaacagtaaaatataatttttaaatttgctacactaaatttgtttctttttgatagtttataaatataaatcaaaattgattctgttttataaatctatatgttattgcccacatttaatctaaagtttcagcagaattcattaagtactttgttcaaatgtgggtctatatactaatattattatggatatcttaatctagttgaaaaaatgcttaatctagttgaaaaattactacagggcttagtaaccaaaacagcatgatactggtaagtacaaaaacagataaacagaccagtggaacagaatagagaacccagaattaagacagcacacctacaactatctgatctctgagaaatctgacaaaaacaagcaatggggaaaggactccctattcaataaatggtgctggggtaactgactaaccacatgtagaagattaaaactggaccccttcattagaccatatataaaaattaactcaagatggattaaa

SEQ ID NO: 219472 - DNA, 606 bp, Homo sapiens
tgaggccagcctgggaaaaaaataaaagaaaactttggcattaatctatgagaaattcctccaatttaaagtgatttcatcatttttaaaccatgatattatatgtaaaacagtaaaatataatttttaaatttgctacactaaatttgtttctttttgatagtttataaatataaatcaaaattgattctgttttataaatctatatgttattgcccacatttaatctaaagtttcagcagaattcattaartactttgttcaaatgtgggtctatatactaatattattatggatatcttaatctagttgaaaaaatgcttaatctagttgaaaaattactacagggcttagtaaccaaaacagcatgatactggtaagtacaaaaacagataaacagaccagtggaacagaatagagaacccagaattaagacagcacacctacaactatctgatctctgagaaatctgacaaaaacaagcaatggggaaaggactccctattcaataaatggtgctggggtaactgactaaccacatgtagaagattaaaactggaccccttcattagaccatatataaaaattaactcaagatggattaaa

SEQ ID NO: 219473 - DNA, 442 bp, Homo sapiens
gtctataaatgtgaattttaatcttactcatcagagtgtacaatttcaaaatatcatcttttatgtaagctccyaattaactacatagatatattaatgctctcttgttataaaaatcagaaaacttaattccaaatgacttaaacaaaccaggagctttttctgacttcgtacgactaaaaagtcccaaagtgggcacactgttggagccaaaacttttcaatatcatcaagtcaccagattatcttctctgtggtcctgttgattctgtcttcctccatatattagatttacctgaacattatgttataatcttatttaaaaacctgtaattttaaacatgaaacaaagagcaagatatttatcttttcagtgagtggatttttacacagcagcatggaatgaataaaacagatttaatgtcatctcccagcctccctag

SEQ ID NO: 219474 - DNA, 448 bp, Homo sapiens
atagatagtctataaatgtgaattttaatcttactcatcagagtgtacaatttcaaaatatcatcttttatgtaagctcccaattaactacatagatatattaatgctctcttgttataaaaatcagaaaacttaattccaaatgacttaaacaaaccaggagctttttctgacttcgtacgactaaaaagtcccaaagtgggcacactgttggagccaaaacttttcaatatcatcaagtcaccagattatcttctctgtggtcctrttgattctgtcttcctccatatattagatttacctgaacattatgttataatcttatttaaaaacctgtaattttaaacatgaaacaaagagcaagatatttatcttttcagtgagtggatttttacacagcagcatggaatgaataaaacagatttaatgtcatctcccagcctcccta

SEQ ID NO: 219475 - DNA, 592 bp, Homo sapiens
tagatttacctgaacattatgttataatcttatttaaaaacctgtaattttaaacatgaaacaaagagcaagatatttatcttttcagtgagtggatttttacacagcagcatggaatgaataaaacagatttaatgtcatctcccagcctccctaggccagacttcaaaaaaaataagatctttaactcaagggtgaagcaatatagcctttcaacactttagacagggcacaagactgatggcagagaaccagatgggttagtgagtatgttcaacattctactgattctgagaaactgaggtgtccctgtctagttaaaggacaaaaagaaaggtcaccgatccatgttaactgatctaacaggacaggcatggggttcagtatcctgctgcctcagacttcctagaaaacacaaccatggcgccatgggagccaagaagcaatgggcttctttmttctatgagactaattattacatgtagtcacagctcttacaaataatggtctagcattaataaactaggccatccatgaacatgtgacccttccattttttaaaattatatttttagtaattgcattacatttt

SEQ ID NO: 219476 - DNA, 554 bp, Homo sapiens
acaaggcttctttgaaatcattattttctcatgtttagtttcagctgtacaatacaatctttgtagatcttatcaacaaaagtgatgagtgaagtttggctcttgatatagaataagagagttaaagacacagagtcctgccatgttctgtgtcacaaatctctaaatcagttccgatctatatttgttgccacctcccctggcatacagcagtaaaaactgtgatcctctttatcattatcttggtkttttcttttgcttgcatggcttgcatggtttctaatgagaattccactgtaattcttattctgttcctctatcagtaagataccctccctccttttaatcatgtgaccttgctaaacttactagttctaatagcttttttgttgattccttcagattttctacaagatcattttaattttcaaattaaggcagtttctgcctttttaatctctatacctttaatttttttcctttacttattgcattggctacaatttaaatagtgaactgtaaaccagtagtaaaattcaaaggttctccataat

SEQ ID NO: 219477 - DNA, 554 bp, Homo sapiens
acaaggcttctttgaaatcattattttctcatgtttagtttcagctgtacaatacaatctttgtagatcttatcaacaaaagtgatgagtgaagtttggctcttgatatagaataagagagttaaagacacagagtcctgccatgttctgtgtcacaaatctctaaatcagttccgatctatatttgttgccacctcccctggcatacagcagtaaaaactgtgatcctctttatcattatcttggttttttcttttgcttgcatggcttgcatggtttctaatgagaattccactgtaattcttattctgttcctctatcagtaagataccctccctccttttaatcatgtgaccttgctaaacttactagttctartagcttttttgttgattccttcagattttctacaagatcattttaattttcaaattaaggcagtttctgcctttttaatctctatacctttaatttttttcctttacttattgcattggctacaatttaaatagtgaactgtaaaccagtagtaaaattcaaaggttctccataat

SEQ ID NO: 219478 - DNA, 554 bp, Homo sapiens
acaaggcttctttgaaatcattattttctcatgtttagtttcagctgtacaatacaatctttgtagatcttatcaacaaaagtgatgagtgaagtttggctcttgatatagaataagagagttaaagacacagagtcctgccatgttctgtgtcacaaatctctaaatcagttccgatctatatttgttgccacctcccctggcatacagcagtaaaaactgtgatcctctttatcattatcttggttttttcttttgcttgcatggcttgcatggtttctaatgagaattccactgtaattcttattctgttcctctatcagtaagataccctccctccttttaatcatgtgaccttgctaaacttactagttctaatagcttttttgttgattccttcagattttctacaagatcattttaattttcaaattaaggcagtttctgcctttttaatctctatacctttawtttttttcctttacttattgcattggctacaatttaaatagtgaactgtaaaccagtagtaaaattcaaaggttctccataat

SEQ ID NO: 219479 - DNA, 628 bp, Homo sapiens
gggttgtttaaatggtgctgggaaaactggctagccatatgtaggaagctgaaactggatcccttccttacaccttatacaaaaatcaattcaagatggattaaagatttaaacgttagacctaaaaccataaaaaccctagaagaaaacctaggcattaccattcaggacataggcatgggcaaggaaagtctctttcttatatgggttaaataaaattttcttctgcctgctggataattttttagatttaattagcatgtgctgttttccaggtttcaaaacatttttctatcttgggttgggtctccagatattcttgatcatttaaatgcttatttcttctactgcttgaaaggtacctcctggcctagggaaactcatgaaaagggaatactgtatttatatgcrtggttctcaagatttgttatgagacagttttcaacagaaccattgttgctcttcattttattgtttaatttgtttttcagactttccctctaccaactccacgctccaggagggttgctttctacaaattgcactttgtgtttctcaagcaaatcacactcctcctccctattgatgttgcaaccacactggatttcctaacatttctcagtaaaag

SEQ ID NO: 219480 - DNA, 590 bp, Homo sapiens
aattcattcatttaaagtgtgcaattcgatgattttgtagtatattcagagttatgcaaccaccaccataatcaattttagaacatttttatctgcccaaaaagaaacccatacccattagcagacattccccatttccaacaccaccagttccagctctaggcaaccatgaatctactctctgtctctgtagattgcctattcttgataattcatataaacacaatcatacaatgtatggccttttttgacttacttctttcatgtaacatgatgttttcaagatttattcatgttacagcatgtattagtacttcattcctttttgttgccaaatcatataccatttcataaatataccatatttctttatccattcatcttttgatgaacatttgggttgtttctagtttttggctaatgtgaatatgctgctatgaacatttatttacaagttttgtgtggacatatgttttcttttctcttgtrtatacacctagaagtggagttgctgggtcgtagtatagctttatgtttaatttttttttattgatatggtgtattcgttgatttttagattttaaaccacc

SEQ ID NO: 219481 - DNA, 487 bp, Homo sapiens
gaattccttaacttttatttgttttagaaattgaggcaaggtagatgaggacaaaactgrtttctaaaaataattacatttgcaaatatttgcagaagctttagtcaaaccagagtttacttcaagaaattttttaggccgggcgcggtggctcacgcctgtaatcccagctactggggaggctgagaattgcttgaacccgggaggtggaggttgcagtgagccgagatcgcgccactgcactccatcctgggcgactgagtgtggcaccatctcaaaaaaaaaaaaaaaaaaaaagatgcctgtaatcccagcagtctgggaggccaaggtgggcggatcacttgaggtcaggagttcgaggccaacttggtgaaaccccgtctctaccaaaaatacaaaaaaatcagccaggcatggtgatgtgtgcctgtaatcccagctactcgggaggctgaggcagaatcgcttgagtctccagctgccc

SEQ ID NO: 219482 - DNA, 490 bp, Homo sapiens
ttgttttagaaattgaggcaaggtagatgaggacaaaactggtttctaaaaataattacatttgcaaatatttgcagaagctttagtcaaaccagagtttacttcaagaaattttttaggccgggcgcggtggctcacgcctgtaatcccagctactggggaggctgagaattgcttgaacccgggaggtggaggttgcagtgagccgagatcgcgccrctgcactccatcctgggcgactgagtgtggcaccatctcaaaaaaaaaaaaaaaaaaaaagatgcctgtaatcccagcagtctgggaggccaaggtgggcggatcacttgaggtcaggagttcgaggccaacttggtgaaaccccgtctctaccaaaaatacaaaaaaatcagccaggcatggtgatgtgtgcctgtaatcccagctactcgggaggctgaggcagaatcgcttgagtctccagctgccctaccaaactgcttttgaattc

SEQ ID NO: 219483 - DNA, 474 bp, Homo sapiens
aggcaaggtagatgaggacaaaactggtttctaaaaataattacatttgcaaatatttgcagaagctttagtcaaaccagagtttacttcaagaaattttttaggccgggcgcggtggctcacgcctgtaatcccagctactggggaggctgagaattgcttgaacccgggaggtggaggttgcagtgagccgagatcgcgccactgcactccatcctgggcgactgagtgtggcaccatctcaaaaaaaaaaaaaaaaaaaaagatgcctgtaatcccagcagtctgggaggccaaggtgggcggatcacttgaggtcaggagttcgaggccaacttggtgaaaccccgtctctaccaaaaatacaaaaaaatcagccaggcatggtgatgtgtgcctgtaatcccagctactcgggaggmtgaggcagaatcgcttgagtctccagctgccctaccaaactgcttttgaatt

SEQ ID NO: 219484 - DNA, 579 bp, Homo sapiens
tttaaaaatatatgttggccacttgtttgtcttcttttgagaaatattatatatatacatatatgtgtatatatatacacacacacacatatatacatatattcttgaatcctccctctcttcataaagattttggatctttatgcgtgggcaggtcctagaatctgcatttttaatataaattccaggtggttctgttaaaaggaagtttgaagaccacaatttgcaaaacagtgttagtggcagcgaaataatttttcaagagaggatctacataaaattttaggtatattcagtgtagaatgaaggttaaacttgagaaatgtagaaatgtagcattatgaaatgttcaggcagggagggaagatcattctascctaatgccttcatttcacacatgaggaaatacaggctctgagaagtgcccaaaggttatataataagtttgtggcagaatcagggctaaaaataaggtcttaactcccagttcaagctcttctcctcttcatgttacattctaaaatgaaatagtattcaaagaattagacatgttcttgtagctgtttaacgttttataag

SEQ ID NO: 219485 - DNA, 581 bp, Homo sapiens
tcagggctaaaaataaggtcttaactcccagttcaagctcttctcctcttcatgttacattctaaaatgaaatagtattcaaagaattagacatgttcttgtagctgtttaacgttttataaggctctagcatttctcattgtttttcaaactacagctccagtctatttaaacattttgggagaataacaaaggagttgatctccacaaaagtagaaaaagagcatggaaaaaatacagctgatagcagacaaggttttctctgtgaaaagattttaaacaattattttatgttttaaatacctgtaattaaacccctttctgtaaccactccagtctccttttggcttttccaaaataaaatcttttttctgcacaggaaggtcagattgtgtcttgttgattcacacctgatgagcaaagtgcatgtatcatgaatgctaacacccattgttattattttcaagaaccaggtattaagtgcctacgatgccaacatggaaaaacaaccctttgacagayttttcttcatttttgttaaactcttctgcatttctataggataaaaatctatttcaaag

SEQ ID NO: 219486 - DNA, 556 bp, Homo sapiens
atgtttcatcagtgaaatttttttatttcctaaaatggcctgagcatttactttagagtacagtttccatgaaccactttttccctctttcttctcttttcagattagaataactgttgggaatacatttttaaccaatggattgaaaaaaatcagtacaagatctatttaattgtcacagcaagtccatgatgagggctgcacaaaagaaggaggtaatttgttttcttggrtcatgaagacttttcttttctaggcagggtttagaattgggaccctggtcacatgattattattcttagtatcctcagccctctagcctgccaagaattgtcagagttaagaatatgctgttgtttatatgataaaattggtgaagtgctaggaagagttctaagtcttcatacatctctcctagatcattcctaggtacttaaaattcctaccttcagagtcagtgcttttgtgaattctctcccacaaatgtaaatagcctgaagggatttcataatcaaccattttcagtcatcagcaactctgtgtgaattggcccatt

SEQ ID NO: 219487 - DNA, 571 bp, Homo sapiens
agtttaagtttttgtcaattgtgatggtatcatattatcattaactagcatctcaaggcacaaactcaaggtaggttaaggtttatcattataaatgtaaatgcctatttcaaatagtccttgacaatttttattttcttgcccatttcttgtcatatctgattagatagtcattatttttgtattgtaatttggctgacaaggagctcttacttggattcagagaagtgtcagcgatgtcattttcttgttcactcactcttacattatcarcataatcttcaatataaagtttctttgctcaaatctttttgaaatatgtatacattatgtgagtttagttaaccacataacatagtacacaaatacacttaacctgacttcctgggtttcctcaatagtagaccctgaatcaaggtcttgggtgtaggtaattttccttttctttttcttttcttttattttcttttcttattaaaacttttattttaggattgggggtacatttgaaggtttgttatgtaggtaaactcaggtcatgggtgtttgttgtacagattatttcatcatc

SEQ ID NO: 219488 - DNA, 610 bp, Homo sapiens
tctgcaacaagtaatttattatttcatatggtactagataaacttaacccaaattccatggcctagcaatttccttaaacctagtctatttgggagtctaccaagctgacatttagtaataagcagatttgggtttagaaaagacaaagagatctgagataggcctttacctcagtrtcaactatactgggccctaaaaaggtctttgagagacaaaaccaagtacttctttaatgtcctgtggcctagttttaagccataaattttttctttttttttttgagatggagtcttgcactgtcacccaggctggagtgcagtggcatgatctcagctcactgcaacctccacctcctgagttcaagcaattctcctgtctcagcctccccggaagctgggactataggtgcgcaccaccatgcccggctaattttgatatttttagtagagacaagatttctccgtgttggctgggctggtctcgaactcctgacctcaggtgatccaccttccttggcctaccaaagttctgggattacaggcatgagccactgtgcctggccttaagccataaactttttaaaatacaaaagcaaacactgaaacaaaa

SEQ ID NO: 219489 - DNA, 527 bp, Homo sapiens
cctgtgaacgcctaatttcatatctcaaaatgagggcacagtcccatattgttcattcatttcaatcactgattcattcaggtggtcctcaaacattagctgagaacctattatttgccaggccccatgttttagtagaattaattgtgtgggaaaatgagtatttctaatcaaatcatattttaactgcattaaagaaaaaataataccattattatggtaaaatcctttttagaatgtgatcttttggtaacctgcttgttagtggaacttcttggaatggaaagagttttgttcgttttcattcttaaggtggggttcacctaaactgtcctaaaaatcacagaatagtrattgcgattaattgaaaacaaaatattttaaaataaaaaccttaaaattgccaaaataaaaagacgctttactctaatatctatctcagccctgggccttcagggaagcccaggacatatcatccaagttcaaacccaggagacttagcagtctctctttctccttcacaatgg

SEQ ID NO: 219490 - DNA, 527 bp, Homo sapiens
cctgtgaacgcctaatttcatatctcaaaatgagggcacagtcccatattgttcattcatttcaatcactgattcattcaggtggtcctcaaacattagctgagaacctattatttgccaggccccatgttttagtagaattaattgtgtgggaaaatgagtatttctaatcaaatcatattttaactgcattaaagaaaaaataataccattattatggtaaaatcctttttagaatgtgatcttttggtaacctgcttgttagtggaacttcttggaatggaaagagttttgttcgttttcattcttaaggtggggttcacctaaactgtcctaaaaatcacagaatagtgattgcgattaattgaaaacraaatattttaaaataaaaaccttaaaattgccaaaataaaaagacgctttactctaatatctatctcagccctgggccttcagggaagcccaggacatatcatccaagttcaaacccaggagacttagcagtctctctttctccttcacaatgg

SEQ ID NO: 219491 - DNA, 527 bp, Homo sapiens
cctgtgaacgcctaatttcatatctcaaaatgagggcacagtcccatattgttcattcatttcaatcactgattcattcaggtggtcctcaaacattagctgagaacctattatttgccaggccccatgttttagtagaattaattgtgtgggaaaatgagtatttctaatcaaatcatattttaactgcattaaagaaaaaataataccattattatggtaaaatcctttttagaatgtgatcttttggtaacctgcttgttagtggaacttcttggaatggaaagagttttgttcgttttcattcttaaggtggggttcacctaaactgtcctaaaaatcacagaatagtgattgcgattaattgaaaacaaaataytttaaaataaaaaccttaaaattgccaaaataaaaagacgctttactctaatatctatctcagccctgggccttcagggaagcccaggacatatcatccaagttcaaacccaggagacttagcagtctctctttctccttcacaatgg

SEQ ID NO: 219492 - DNA, 527 bp, Homo sapiens
cctgtgaacgcctaatttcatatctcaaaatgagggcacagtcccatattgttcattcatttcaatcactgattcattcaggtggtcctcaaacattagctgagaacctattatttgccaggccccatgttttagtagaattaattgtgtgggaaaatgagtatttctaatcaaatcatattttaactgcattaaagaaaaaataataccattattatggtaaaatcctttttagaatgtgatcttttggtaacctgcttgttagtggaacttcttggaatggaaagagttttgttcgttttcattcttaaggtggggttcacctaaactgtcctaaaaatcacagaatagtgattgcgattaattgaaaacaaaatattttaaaataaaaaccttaaaattgccaaaataaaaagacsctttactctaatatctatctcagccctgggccttcagggaagcccaggacatatcatccaagttcaaacccaggagacttagcagtctctctttctccttcacaatgg

SEQ ID NO: 219493 - DNA, 547 bp, Homo sapiens
ctttttgtctcagtatctctggtgcacagcacagtgcctggcacacagaacaaatacatttcatagaacaggggttggcaaactatagcttgctgcctgtctttgtaaatatggttttaccagattgcaaccatgcccattcattcatttacaaattgtctgtggctgcttccacattgcaatgacagagttaaggagttgtgcaagaygatgacttgcaaagcccaaaatatttattttctggcttcttacagaaaaaaaagtttgctaattcctaccatagaagcctcacagatgatgtagttggttggtaaataaaaatttaatttctaagtagggaatcataaaaaaggacacagatgtagcttcaacatttcattataatgtaaaacacttaagcatacatttatttgccaatcagtttaatgcaggaccaaggccttccctttgatcatgggtttgttctccacattgtctgtcttatataaactacaaccacaatgcatcattcaccatttcaaatgttgctacagatcgtccagccaac

SEQ ID NO: 219494 - DNA, 547 bp, Homo sapiens
ctttttgtctcagtatctctggtgcacagcacagtgcctggcacacagaacaaatacatttcatagaacaggggttggcaaactatagcttgctgcctgtctttgtaaatatggttttaccagattgcaaccatgcccattcattcatttacaaattgtctgtggctgcttccacattgcaatgacagagttaaggagttgtgcaagatgatgacttgcaaagcccaaaatatttattttctggcttcttacagaaaaaaaagtttgctaattcctaccatagaagcctcacagatgatgtagttggttggtaaataaaaatttaatttctaagtagggaatcataaaaaaggacacagatgtagcttcaacatttcattataatgtaaaacacttaagcatacatttatttgccaatcagtttaatgcaggaccaaggccttccctttgatcatgggtttgttctccacattgwctgtcttatataaactacaaccacaatgcatcattcaccatttcaaatgttgctacagatcgtccagccaac

SEQ ID NO: 219495 - DNA, 264 bp, Homo sapiens
gtgagcaggtgagccagggaataggagggagggcctccagtgccacgcgggcttcacccgggtttcccatggcactgcccactcctgtcaagacatgcttccccagtyctagttcctcagctctggctgtgccccactacctgcttcacttagcagctgctggtaccttcctggggattcttctcatgctgacctatccccaaagcagcaacagtgaggtctgctaatcaatgtgggcaaatgttcccctttccccagaagcaa

SEQ ID NO: 219496 - DNA, 616 bp, Homo sapiens
ttcagtctagcatctctcattgcatttgtcctgtcttcttggtttcttccaatctgcatcagtttcttagccttgccctggttttttaaaatcttgacattattgaagggtactgatcaggtatttggtagaatgttctttatttcagtttgtctaatgttttttcatagaccttggctatggatttttgggaagaatatcatggcggtgagatgctgttattatggcaacacagaaaggggttctgtgatctcaacatgacctgttattgatgatgcttacttygatcacttggttaaagtggtgtctgccagatttccccgctgtaaagttactatttgtccctttccatgttctattcattagtagtgggtggctaagtccagcccacactggagagggggagtgccatctgtttttattcctatcatttcaatttgtttaatcctcatggctttattatcacctcactactttttagagatatggttgtaatgagctagacttgcccaaagttactcagctagtaaatggcaaagctagaatttgaacttatatgtgtctggcttaaaaggccatgttctttccacttcatgttactgccaccaagtaaaga

SEQ ID NO: 219497 - DNA, 424 bp, Homo sapiens
acctgaaatccgagcctagtcttttgcccctttcgggtatgccagggtctggacacatattatgtccttgggacacaccaacctgagttactacaaggcaaaaaaaaaaaaaaaaaaaaaamcagcacacacagagatggacagtcacagggaggcaccagctggggcaatgtctcagggtgggaggtggaggcagagacagaatgaggccctgctttgttggggctgtgtggggtggccggagtctactggcctggggtttcttggatgtgcaagataggaggctgcttttgacaaattcctttgtgagcaaagtcatcacgagtgtgtgggctcagagacaggccctccatgccaaccaccacctgcttccctcgtcccacaccagcagccagaagtggaccatccacagcccctggtgacc

SEQ ID NO: 219498 - DNA, 560 bp, Homo sapiens
ccccactgaagaccatgctttctgatttctgcctctgtcatttccttattgtccctgctcccaatccagctcactgtccaattcagcatggacaggagagacatggaaagaaaaacaactgttataattattgccaaaagctgtgttctgttactatgcattgtgcatagtaagagttcacattaaattcctcattttaattctcacagtatcctgttgggacagacagatgaagaaccagagaccagagagtttaagtagcttgccaaaggtcacacagcagtgtaagcagtacgggtgattcttaagcccacattgtttgacttccgagacatatcagaaaactacgtcaaagaacacgcacaactcagacctatttccagtggcctatgcagaagagctaccctgcttgaatggaaaccccttaagatacactattctcaaaaacctaagtgcttagcctggcttatggaggaggcaatgcaatctaccacaagatgattaagacaacaatgaacttaagwcccagccactgctggagaatatctgcctgtgaattc

SEQ ID NO: 219499 - DNA, 431 bp, Homo sapiens
gaattctgccaaccatttaaagaaaaattaatgccaatccttctcaaacttttccaaaaaattaaggaggagggactactcactcctaaactcatttcattaagccagcrctaccaaataccaaggccaaagatagtactagaaaagaaaactacagaccaatatccttcatgaacagtgatacaaaaatcctcaataaaatactagcaaatcagatttgacagcatattaaaaggattacacaccatgacccagtgggattgggatttattcctggaatatagaataaatcaacatacaaaaattaatcaagaggatttccagttccaaaatgtcagcacagaagcaagctggcttcactcctctcacagaaaaccaaaaacaaatatacagagccgatgttattaccaggaatatcccagaactcatat

SEQ ID NO: 219500 - DNA, 550 bp, Homo sapiens
tatggaacttctgagctgtctgtcttcagtttggcttagttttgaacgatattcctccaaaaggtgcaatgctctctgggtatctgagaagaaaaagcagagcctgattaaaactctctatttacaaaaaaagtatcacatactagtgcaaataattctgcatgacatctaaatagttccgcaaatccttcaggtcaattgatgtcactatgttcatgtacacatattccttagaatgaccaaaaaataaaaaaaaaaattaaagaaatacaagaaaaatttaaacatatatcacattagaaaacggaggagagtgagcagtttggaataaatgtgtactggtagtttgccaaagtaaaagatcaaagtattagcaacagtttcagattacctgatatgcaaaagcagattatctacaatttgtcatcataatccaaatttttaacatttcaaaatacaaattcttagtatcccacagttgctyacagaatagtgcttagtaagaatgatagagtgaaatactaaaacaccaattcagggttattaagga

SEQ ID NO: 219501 - DNA, 348 bp, Homo sapiens
gaattcagaagaaacagggagggaaatttgccctctcccttgataacatttattgttcatatatgttcacttgctaggaaacggggatagaaataaataagatccragtcctgctctcaaggatacacagccttgtagcaagtacacaaaggccaatgcaccttttcccaggggacactgaggagtcaaaaacaaaatttgtgtgagttctcaatgtcatcctagccttcccctaaaagcaaaaaggaggaaggggaggaaagaggacgtgtcttttttcttgtcattctgtgtgacagccctatttggttgtcagcggtgtacaaaagcagcagtgaacccagcact

SEQ ID NO: 219502 - DNA, 480 bp, Homo sapiens
ttctgtcttgttgccaaatcagctgccaagccatatgcttcatattttctttggggaaatatatttacctacttatgcttcagttccttgaactctgctcatgaagatttttattagttttacataatagtttatgaaaattttttattagcttaaaatgtagctcagatgtcttttcccttgggaagccctccttcacagtcctcctccctagatgatactctcaccgattaggattgccttccttggtagggttgggaaaagtgaaggtgaaaggggttgctccacatctgttatgggtttacccacctgcactctgctgctcaagarggcttctctgcccagttagaggatactcttcatttttctgctgcagatggtttgagccatttccctcaatggtagaaatggtttgctacatcttcctcccatctcctggtagtctatggatctgagtatctttagtagcacattgcctca

SEQ ID NO: 219503 - DNA, 488 bp, Homo sapiens
ttcaaatattctgtcttgttgccaaatcagctgccaagccatatgcttcatattttctttggggaaatatatttacctacttatgcttcagttccttgaactctgctcatgaagatttttattagttttacataatagtttatgaaaattttttattagcttaaaatgtagctcagatgtcttttcccttgggaagccctccttcacagtcctcctccctagatgatactctcaccgattaggattgccttccttggtagggttgggaaaagtgaaggtgaaaggggttgctccacatctgttatgggtttacccacctgcactctgctgctcaagaaggcttctctgcccagttagaggatactcttcatttttctgctgcagatggtttgagccatttccctcaatggtagaaatggtttgctacatcttcctcccatctcctggtagtctatggatctgagtayctttagtagcacattgcctca

SEQ ID NO: 219504 - DNA, 251 bp, Homo sapiens
gtgatagcacaatggggtgacctgagttgataatttaattctacattttaaaataactaaaagagtataattggattgtttgtaatacaaaggataaacacttgaggtggtggatattccctgatatggtttggatctgtgtccccatccaaatctcatattgaaaygtagtccccagtgttggagttggggcctggtgggaggtgattggatcatgggaacagtttctaatggtttagcaccatctgcct

SEQ ID NO: 219505 - DNA, 532 bp, Homo sapiens
aactactgtttttaaaactatcatatctcatgagactcattcactaacatgagaacagcacaggaaagacttgtccccatgattcaattatctcccactaggtccctcccacaacayatgggaattatggtggctacaagatgagatttgggtggggacacagggccaaatcatatcgtattttatgttcacagattgaaataattggcattgttaaaatgcccatactacccaaagcaatctacagattcaatgtaatctctatcaaaataccaatgacatacttcatagaaatagaaaagatgattctaaattaatattgaaccatcaaagaccccaaaagccaaagtaatcttgagcaaaaagggcaaatctgtagaaatcacactacctgatttcaaaatatactacaaaactatagtaaccaaaacagcatggtactggtataaaaacagatacatagatcagcggaacagaatatataacccagaaataaatccatgcctttacagccaacctatttttaacaaaa

SEQ ID NO: 219506 - DNA, 532 bp, Homo sapiens
aactactgtttttaaaactatcatatctcatgagactcattcactaacatgagaacagcacaggaaagacttgtccccatgattcaattatctcccactaggtccctcccacaacatatgggaattatggtggctacaagatgagatttgggtggggacacagggccaaatcatatcgtattttatgttcacagattgaaataawtggcattgttaaaatgcccatactacccaaagcaatctacagattcaatgtaatctctatcaaaataccaatgacatacttcatagaaatagaaaagatgattctaaattaatattgaaccatcaaagaccccaaaagccaaagtaatcttgagcaaaaagggcaaatctgtagaaatcacactacctgatttcaaaatatactacaaaactatagtaaccaaaacagcatggtactggtataaaaacagatacatagatcagcggaacagaatatataacccagaaataaatccatgcctttacagccaacctatttttaacaaaa

SEQ ID NO: 219507 - DNA, 618 bp, Homo sapiens
aaatatcaatgaaaaagaaacaaaaataaagactcaattaattctccagtgaacacttcagtcctctaaaggtacttccctgtgtccacccaaactgctctctaaccgaacgcaagcaaggggactccaatgctctcaggccatgaactaatgaggagcttcatgcctgccctcagtctttcttcatacccagggcaaagctggcccacagacttccagacatgctytcttcgtttgggtagagatggggatccaagtcccctatgtatttcctccagagccacctgtaaaacatgggtgaaatctacctgccctctagctcaccacttccaggtcaagcccactcatggaccactttaacagtgacagttggcttgactggggaaactgaaaaaaaggagctttctttagattttctgataatctgcattgccattgctgctcctttttcagcagcacagagagttggattatggagggttgcctgcttattatgcagctacatccaggatgctgagtgtcttctgatcatgatcaagagcagagtgaagagatacaggcggaggagaggatcacagagaggtagaagtgggagactggtggataggtcactaggca

SEQ ID NO: 219508 - DNA, 575 bp, Homo sapiens
caatacaataatagtgaaaacttcaacccctgactctcagcattaaatatatcatatagcaagaaaatcaacaaagaaacaatagctttacatcagactttaggccaatgggcctaagagatgtttacagaacaggtcacctgactgctgcagaatacaggttcttttcattagcacatggaatattctccatggtagaccatatattagaccacaaaacaagtctcaacaaattaaaaataatcaaaattatatcaagcatcttctcatgccacgttggaatgaaaccagaaatcaatactaagataagctttggaaactatacaaatacacgaaaattaaagaacatgctcctgaatgaccactgggtcaatgaataaattaacatggaaataaaaaaatttcttgaaataactgaaaatggaaacagaacataccaaaacctgtggggcacagcaaaagtagtattgagggaagtttatagcaagaaatgtcyaaatcaaaagagtagaaatattacaaattaatcaagcaacacaacacagagaactaaaaaagatctaattaaaccccaa

SEQ ID NO: 219509 - DNA, 520 bp, Homo sapiens
agatgcagttaatgcaatgcacagagcacaaattatagctttaaataattaaaattttaaaaagcaatgtgtaaaattaataagctaagcttctaccttaaataactggaaaaaagaagaacatattaaatccaaaacaagtggaaagaaaaaaataacaacaggggaaataaatgagttaaagatgtaaaaaattagaaaagaattatttaaatcaaaagataactcttttgaaaaatcattaatacagttacatctctatccaggcaaaaaagagaagacacaagttactaatatcaggaatgaaagggaggagattgtactattcatgcagatttcataaatatgataaaagtaataaaacaactttatgctggtaagttcarcaacttagattaaagaaatttattaaaagaaacaacctagagtcactcaaaaatatatagataatctacataaccttatatatctttgaaaaacgtgaatttataattgaaatacctaacacaatgaaactata

SEQ ID NO: 219510 - DNA, 376 bp, Homo sapiens
ctcttctgaggagacaggacgctgagtctgaacatgttaaaattggaatgctccaggtagcgggagcctgtaagtacttggacacccagggcagaggtgacrtggaatccacggaacgggggaaacagttgaggaagatggagtacagtgatcaaggatgagagtcaagagtggatggattcctgagaaacaccaacagttaaggtgcagaggagagattacagcaagagagatgatccaaagtaaacacagaggtagagaaagaaccccgagaacatggtgtccgagagtaacagtgagactgtgcacacatgtagtgttcacaacccatgcagtgttctcacacatatgatcacatggaactctcccgtcacct

SEQ ID NO: 219511 - DNA, 376 bp, Homo sapiens
ctcttctgaggagacaggacgctgagtctgaacatgttaaaattggaatgctccaggtagcgggagcctgtaagtacttggacacccagggcagaggtgacgtggaatccacggaacgggggaaacagttgaggaagatggagtacagtgrtcaaggatgagagtcaagagtggatggattcctgagaaacaccaacagttaaggtgcagaggagagattacagcaagagagatgatccaaagtaaacacagaggtagagaaagaaccccgagaacatggtgtccgagagtaacagtgagactgtgcacacatgtagtgttcacaacccatgcagtgttctcacacatatgatcacatggaactctcccgtcacct

SEQ ID NO: 219512 - DNA, 340 bp, Homo sapiens
agtgggttaggagtcccctcctacttttaattcaatcataaaatacttcttgagcacttactatgtgtcatacattgtgctaatctttaggataacatatatatatatatatatatatatatatatatatatatatawataaataaataaaatgctggatccttctttcaatgaccttatttgtagtagaatacaaatgatacaccatgtactaagagcggtgccattacgggtatagttggatatagatatacatatatggaaactcagaaaagagaggcattacttaaggttgtaggaatcagagaaggcttcatggaagaggggttatttgaactgg

SEQ ID NO: 219513 - DNA, 468 bp, Homo sapiens
gacaggaggagggggaaggggcagtgtgtctcaagctctaagcctgctggagagcagggcgggagcttgggaaaaggaggcactgcgtggagctgcttagctcagccacaatccagcatgccaaagtgcatggaccagcaagtttttaaaaagcatgcattttattccaatttttatgaaatttatttcacatctgaatatacagaaattcctctgcaccctgctcttctgcccacagacccagccctgctcctctgtgtatgcctgggcccccttctgtccctgaagttcctgagggtcacactgaagctcagccagcctgatctcttgcctctgttcccttgattgcatttcttccttttstcagctctgtcccaccacagacagttagtgaatgtaaagcatttcaatccactcaattaaatgaatcctcttaggtcacctgagaaaggcagaggcagaaccact

SEQ ID NO: 219514 - DNA, 399 bp, Homo sapiens
tcaataagaactcccagagctgccatyacttaatggcaggggtccaagcacaactgaaacctgtgccctctgtggtaaagccagtgagcagagtcagggctgcatcagagaaggagtaggagggaagagacagaaagaggcctcactagaccagtggcctctgaaaatagggcaaaggaggcctcatatcccaatccacacttcccctgtccattactcatttctcctcagtgtattatgtttctctgtggtttttttcccttcttcgacaagttggaattccactgcttggaatccatgagggattggttccaggacccccttcgttaccaaaatctaaggatcctcaaaggccctgatatgaaatcgcataatatttgcatataatctgcgcacatc

SEQ ID NO: 219515 - DNA, 311 bp, Homo sapiens
aaaaccaacataggtggagtagttctactccactgacccagaattatgagaaatcattgctgttttaagctactaggttttagggcggttacacagctatagacaactgacagtcaaagacagagggagatcaaaaaaagacaacctgaaatgttatctcgaaygacctaaagatgtgcaaaaacccttaaacagtagaaagtttagggagaggtgatccagtaattcctagcaccaaatgcctgaataacaagataattggaatgttaattacagaagttaagaatctaccttttggttaaagtagccaa

SEQ ID NO: 219516 - DNA, 628 bp, Homo sapiens
aactcttggcatatttatttctaattacaaactacttttgagttgggcttaatgaatgtaatttagagatgttattggttcattgataagcttctgctatgtagtccctgtatgctgtgaagcaaaacactataggaaatgggctaatcaaactagttttatttttttctgctgcttaagttggtagtctgagtctccatagcttgtcttcagacaatgaattgtacatcaaatactctgttactatcatgctttcaaaataatgctttattacagtatgtctttgttaatagtaacttaaaaattgaaatctttagaagaaactaactgcgcagcataaacattcaaactaaaatcttgctgcaaacctgaatttttatagtgtattcagtagagttgtaaattctgccctatttttgttctaagactttgatgattagggctatctgcgtctttcagtttctaaggtgtgatgtaaaaggacattatcktaagttttcagtgataaaaaatatactattttaaatataggcaggaatattagagctttgagtgaaattgaattactggattaaaatcaataaaatccttcttcaaccttgcatttgattaacttgttcaaattttg

SEQ ID NO: 219517 - DNA, 447 bp, Homo sapiens
gacaaaataggaaaactgacagcacttgacgttcttgttctctgcagtagagtgaaggataacttaatttctaaaatgaaaacgtcttaacgttcctttttactataacttttaggaaactcaaagccaagtttacccagtttaatagtaactgtaggtgtttggtatgtttgctacccccgagatttcatggttttttgttttctatttttagtcttttccttgtgcaagtatctcttgtagagtcttttttgaagtgtatgtgcgttgtaaatttatacacgactgaataaaagtgttagtggaaggttactgttgcagctgaaataactgtattcctttggggttttctttttcacttggagacatattactttctccggatattgctkatgtatcttttcctctttcaatttgaaaccatgtatgaatgactctttccacaag

SEQ ID NO: 219518 - DNA, 540 bp, Homo sapiens
tcccaccctttcaggaggggcctaggttttcaggcagaaggggaattaggttgggccttagaaggtccttcaagtgtacatccacgatcccagcagcagacactggcatctggctctgcccctaccgtatagatgaggtgacaagctggaaggtcccagggcccttccttggtgcagctctcagggatttctgggtgaagggctaactttgcccctggctatctttgtggggttgcttccctcctaggcctgaggcccagccagcgcccaatggatgacaaaaagaagaaacggagtcccaagccctgcctggcccagccagcccaggccccaggcacactayggagggtccctgtgcctaccagccacagcggctccttggccctaggacttcctcatctgccatcccccaagcagcgggccaagttcaagaggtgggtacagaagggaaggaaaggaggagggaccccaactctgggttgcactgtagagaggaaggcaaggggggcctccgcctttagttcctaagcaataattgat

SEQ ID NO: 219519 - DNA, 593 bp, Homo sapiens
ggattcctgagtttgagactagccttggcaacacaggaagactccatctcttaaaaaaaaaaaaaaattagtcgagcatggtggcatatacctgtagttccagctactcagaaggctgaggcagtaagatcgctcaagcccaggagtttgtggctgcagaaagccatatacgcaccactgcactccagtctgggtgacagagtgagaccttgtctcaaaaaaaaataaaaataaaaaagacaattgactgtttgaagcaaaaaataacattatattgtgatgtttatagcatatgtaggaataaaacatgacagtaatagctcataggccaggagaataaaaaaaatagaaatatactgttatatggttcttgtatgtgaagcagtataatattgcttgaaggtagaatgtgataataagttaaagattaacattgtaaaccctatggaaacctctataaaaacattttttaaaagaggtataactcataagctaatagtggagctaaaacataatcatgtagcttccacttccataaagatgagctagggaccttargaccagagaaatgacatgagatgacaaagttcact

SEQ ID NO: 219520 - DNA, 601 bp, Homo sapiens
aattatcctttatggcagttaacttgaacttcatgttttttccttgttaagggctattaacattaatattgcaccacagaggggatttttgtttttcttctgatagccatctttcaacaagtctggctgcaagtaaatgagatcagcatttcaagagccaactattgtgtggcttattgcctatacttgctaaacttttcattccccatagtttgcctctgtttctatcactgactttatcttgtaatgaaaattaatgccctgatttaaatgagtgatatgaaatatgatctattatgcctgctggcaaacagtgtgtttcacctcattaccacattcttaaagaataattagcatctctagggatgaattggatattacatawccaacatttgcagatacctttattcacagttaaaacacagtgcttctctcctttccacacactaagcctcagttataagttttacgaatcttgaacattaaaattattctctggggaatacagattgtgttactgttaaatcagctgcatgctagtggaacccagaaactttctacttgcatacttgtaaaattgtcactattgtcttatctttgc

SEQ ID NO: 219521 - DNA, 573 bp, Homo sapiens
aagccccatgaagtaaggcctttgggctcttctacttaccagtatatccccagtgtcacagaaagaggcacatagtaagctcccagtgaatatttgcctgatacaggaatgaactatccgttttatcagcaaacatgtctcatgcattaagttgaacccatttctaatcattagaagagatggagaattgctgttcactttcttctagttctgactttgctttgggatgcaatatactattactttggtgaaaatgcacagatgtctcattaacaatgaaattgggcagtatacattaatttaaatatcatcagtttagttaacaacaggtgttgttaattttattctttttttcagttgattagttattctttgtgttcaaattctgatttggtggtaactggaaagtgttaactccactactttttcttcttgctagaaagaaaattgctagaagaaaaagtttagtgtttttttttttttkttttttttcccggtgtaaatagcagcatagagaaataaagcagcaagggacagaataaagaaataaatgttagaataaactttaaaaat

SEQ ID NO: 219522 - DNA, 430 bp, Homo sapiens
tgacttggtctaagagtggttttatttttttctaggcagacatacaggaccatcctagagatctgaaacaaatgcaagtaaaaagctttctgtctgatggatatgggacaccaaaagkttccaatgattgaagatgacagagcttccacaatgagagaatagatactcatgctctcctaggctcccctagatttcagagtcactgactataaacacatgtgaaataaaggggaaacaatattgcttagacgatccaaaccaaaaaacctacctgcttatgcatcaagggttttgataccaatatgaactacagctcttcctctccctagctataatcatcttaggcaagttaattattaggttggtgcaaaagtaactgtggtttttcccattgaaagtaatggcaaaaactgcaattcataagttgaat

SEQ ID NO: 219523 - DNA, 406 bp, Homo sapiens
aattcctgtggaaaagagaacacaggtatgacttggtctaagagtggttttatttttttctaggcagacatacaggaccatcctagagatctgaaacaaatgcaagtaaaaagctttctgtctgatggatatgggacaccaaaagtttccaatgattgaagatgacagagcttccacaatgagagaatagatactcatgctctcctaggctcccctagatttcagagtcactgactataaacacatgtgaaataaaggggaaacaatattgyttagacgatccaaaccaaaaaacctacctgcttatgcatcaagggttttgataccaatatgaactacagctcttcctctccctagctataatcatcttaggcaagttaattattaggttggtgcaaaagtaact

SEQ ID NO: 219524 - DNA, 406 bp, Homo sapiens
aattcctgtggaaaagagaacacaggtatgacttggtctaagagtggttttatttttttctaggcagacatacaggaccatcctagagatctgaaacaaatgcaagtaaaaagctttctgtctgatggatatgggacaccaaaagtttccaatgattgaagatgacagagcttccacaatgagagaatagatactcatgctctcctaggctcccctagatttcagagtcactgactataaacacatgtgaaataaaggggaaacaatattgcttagacgatccaaaccaaaaaacctacctgcttatgcrtcaagggttttgataccaatatgaactacagctcttcctctccctagctataatcatcttaggcaagttaattattaggttggtgcaaaagtaact

SEQ ID NO: 219525 - DNA, 622 bp, Homo sapiens
caaagcaataaaatgaacaatggccccactttgtttcacttcatcaatacaagaacttgcagtgttatcctccccatcagtcagcagcagtacttcggatccatcgagttgggaatgtagctctccaatcacctgcaaacataatkcagagcacagttaccaacagatgttcctagatcaaatagacaaatgggaaatgagaaaaaatttacagagaaaataaacaaagttatgcagaatagaagagataacctctattttaaaataaagaattttcaatcaacaatccttggggaaagttaaacatgaatttttttaactcccagctgcaggtagtatttatttaaaggaattcggtgggaccaggctttggaaaatcctgtctagactaaatgacaataacatctcaacctgggaaactcaggtcaaccagataccaaaggtataatcacagtatgtgacattaattagtgttatgttttctttgactggactaccttctgacagacaagccttcagtttataaagtctcttgcatttaaagctagatgcattaagaatccacttcaacatttgaaaaagtcagtgattacaaattagtaaaccctcagtatgcttataa

SEQ ID NO: 219526 - DNA, 354 bp, Homo sapiens
taccattctcaatccagccaggtatgtacagtgctccactctgctggggtatcactctccgtctggctgcgttaactcctcccagagcccgcacttttacactgtatctaccattcgtgtcataagttgtgaaataccttgagtagacaccgtcatccttagtagcatcagcaccttgataaagaatgaaggaattaataaatargtaacggggagggtatttgtatatttccaactcatatgtaggctatgaattttcaaagcaacaagaaattcagcattagctccaagagaccttaagattttggtgtgttgagggtaaggcttacttcttttatcactgtgtgtggtttt

SEQ ID NO: 219527 - DNA, 618 bp, Homo sapiens
ctgggcacatagtgtctagaacttagcaggcattcagtgatatttgttaaacttgagtgaatgacttatgtacagctcagtttttctggaatgtaaattccaaggaaggctgaatttggagggttatgtgaggtggggcattctgtggaaactcagtatcccacactaaggattgggactttattctgtaggtattggtggtctctttaaagatgattgtgagagagttggagtggagtcacaatacagaaaggaaacactattaaggaatggttttatatatgatcatgatggctggagtgggctcaggagtgggatgrggcagtcaggtcaatcaattcaacacttatttgttgagtcatacattgagaatgttctgttcctgttatggaggtgaaatgtgttgtagaacaacaaagaggtacgcttgacacatccttttgaccaggtctttaagcgctctagtgtgtttggggatggggcttggatagcgttcttttgtttgcttgttttctgtgccttatatgttaaaaaaaatcaagctggttctaggggatccaaatcttttttgaggtaaagaaatctaatgctagttatttagtaaagagtcacatttga

SEQ ID NO: 219528 - DNA, 512 bp, Homo sapiens
ttctggaaaagatgtcctagtagttgaatataggtggtcaagaccaacttggggctagtattttctgacacatgaacttgagtgtgaatgggatataattgcgtctgctactgaatgtgtagggttaaagttcagaaaagagatgctgcattcttctctaatcttataaaatttcattttattttttwaattttatttttttgagacaaggtctcactctgtcgcgcccaggctggagtgcaggggagtgatcactggtcactgcagcctcaacctccagggctcaagcgatccttccacctcggcttcccaaagtgctgggattacaggcatgagccaccacacctagccattgttctctaatcttacatgaggcagcaaaagttaccccactagaaattattatgctgtggctccttttgaaccaaggcaaaaaaaacaaacaacaaacaacaacaacaacaacaaaaaaaacactcatttgagaggtacattacatctgagagaaataa

SEQ ID NO: 219529 - DNA, 566 bp, Homo sapiens
gcatcttgcataattcagaacttcatcatcttgcataactgaaactttgtgcctgttaccagagttgagttttgattccttgaatggaaggtgacctttgtggggagatgccagagggaaggtatatcggtcaggggtagcgtcaggctgcggataggggctatgatctttgcyccagcagggcgaagccctacagtgtaaagtaccattcacatggctcccacttggcagttcactcagagaggctcctctgaccccattgcctgggagtctgaggtagaagccagatgaggagctgaggttaggggcctgcctggctctaccacactttgctaggaagccgctgggtctgggaaagttgcaagctgaaagttgccagagacagtggggggcaggaaggcagcagcattgtaacaggagctgggatgagctaactcccaagccctaaagaccagaaccagggtaaggggatttgggctgaaatagcaaactccttcatcttctggaagggagacccacttagatactctctaggcagaagaggtgaattcagcctgatagttcag

SEQ ID NO: 219530 - DNA, 556 bp, Homo sapiens
ttcagaacttcatcatcttgcataactgaaactttgtgcctgttaccagagttgagttttgattccttgaatggaaggtgacctttgtggggagatgccagagggaaggtatatcggtcaggggtagcgtcaggctgcggataggggctatgatctttgctccagcagggcgaagccctacagtgtaaagtaccattcacatggctcccacttggcagttcactcagagaggctcctctgaccccattgcctgggagtctgaggtagaagccagatgaggagctgaggttaggggcctgcctggctctaccacactttgctaggaagccgctgggtctgggaaagttgcaagctgaaagttgccagagacagtggggggcaggaaggcagcagcattgtaacaggagctgggatgagctaactcccaagccmtaaagaccagaaccagggtaaggggatttgggctgaaatagcaaactccttcatcttctggaagggagacccacttagatactctctaggcagaagaggtgaattcagcctgatagttcagtat

SEQ ID NO: 219531 - DNA, 604 bp, Homo sapiens
atgtgtagtagaaatatgaaaacatgaatcaaaggatatcaccaaatttgagaggtggaaagtagaatgggcacagatctgagacgttttccataaagaattattttctctctgtaccattctatttctttaaaaatatctgaagggaaatgaaaaaaaattagtatttgctaagttgtggtttcaggtccatgggtctttttgacattctccatacttttctttatattaatctttcatrtaatcaatggggcaaatttttgtctaagaaaaaagggatccaattgacttttatttaactctttggaataaaaatacgaagccaggtcaacctgtaagaatgtgaatcaattcccatctcagattcctcatcacaaaggcctaaagatcatgggagtggggaaaaggttgcacaaaaggacacgatttgttcacttcatacaagtgtcctttgaaaatagaagcacaagtaaaatcttttttaaaagaatttttttgttttaatttcaactactttttcagtgctgtgaatgttccatatgaaatgcttttcatggtagaaatttctttttttattgtatatatttatggtaaacatgacgtt

SEQ ID NO: 219532 - DNA, 528 bp, Homo sapiens
ctagatcatcaatttagtatcaataagtgatatagtgctaaccaaacacagatacacacgctcacacaatgatgtggcatgtcaaaggaacacatgagccagcagaaaaagctccaaatggtcaaaattagaacaataaaataaataatgtaatataggagtcgcagctatttgggaggctgaggtgggaggatcgcttgagctggagaagcagaggttgcaatgagctaagactgtgccaccgcactccagcctggatgacagagtgagacccagtcaaaaaaaaaaaaattacaccatatcaatagaatcaaggaggtgaaaaacttcattattatcccaatttacacaaagagggaatttgacaaacacaatgtcccttcatgataaaacattcagcaaactagaaataaaaggggacttcctcaccaagaaaaaaggcacctatgaaaaatcccatagttaacttcaaacttaatttaaaaggtggaraatttccctaagatcaagaatcaagcatagattccc

SEQ ID NO: 219533 - DNA, 532 bp, Homo sapiens
ttatcttgtctcatgagacaaggcacacagtctttctccaaatgcaaaacctgcaacagggacaagcacctgaggactctacccaccagtcctctcctgttccactcacttggcccttaatccttccctgcagacaaatatctctcgaattgtttggctcatttttcatgcatgtagagctcttcaaccagacagaaagcttcttgaggaggaggacttggatttactatcttcatactccataaagtaacagggatcatattccagaaatcaacatgaggaaagacgtttttgtgtgtatgagtttacttacttgggtaataaggcagaatgtttgaaatgagaactgtttcaggaaataccaagagcaacacagttccatatgcaatgaatatttcttcagtggccttaaaagtagtatgagctcctccctccaatygaatctgtttgagaatgtttttattctcttagttaagacgccttctcaaatcctgcttctaatttaggacaggaagataaagaggcatgtctt

SEQ ID NO: 219534 - DNA, 580 bp, Homo sapiens
tcatctccctcactttgctttattttttctccatatgatttatyaacatcaggtatactatgcataatgttatacgctccattaagtatgaaattcattcacagaataccacctgacctgtgaaaattgctgaattttatttgtcaaattaattaaaagattaagtcttttgttcatgaacatggtacacctcatcatctagttgaaacttattttatgtccttactaaccttttattattttctctctaaaggacttctttgtctttcattagttttatttttagctacttctacagtttttaatgttgtgaatatctttttaaaatatgccatggtctaattgtattctttattgttaggaatacaactaatttttcatcattgttcttgtacctgtctgccttgtttaacttttttattagttcccatagattttctgtcaatttttaaagttttctgtagacaatcacaccatctacaattaatggtattccagtcctttagtttttattccttttccttgtttttctgcattactagggcatccagagtcatgatgaataatgtgataatcagcc

SEQ ID NO: 219535 - DNA, 566 bp, Homo sapiens
gaggttcttgttcacacccatatatgtagtaggtggtccataagtatttgttgaatggatgaataaataaaatgggaaaaatttttagtgtatcaattctgctcagtattgtactggaaaatrcctaccgaacaatttggaggattctttagaagatgttagaaaaccattccgctataaaagcaaaaggccaactgcactgaagtccgaatcttaactttaaacctgtcattcttgctggtgcctctttcttcaaccagaacactctacttgacactcatctacttaattgaaaagcattcaggcccctgcgttattagcatttgttgctagtataatctccttctacaccaacacgaaatttgtatcaaatcctgacagcaggtgaggtgagaaaagtttcttattgaacggcttgaccacaagcctgtagagaattgtagaatcttgaaagcaataaatcaaaacagcaatcaggttctgcacactctaacgacagcagtaacaacaatgataaaacagcccggtgtactgagtactcactgtggacaggcacggtgcaaagc

SEQ ID NO: 219536 - DNA, 404 bp, Homo sapiens
caactgtgcaacaggcagacagagacttcagtcaagggcaagggggaggtgtgccactgctcttggctttggctctctgggccttcctatctgtagccacatcgttgcagcacctgggataaaatgagtggtgcccatccgcacagtcagattcctgacatcattgatggcagcgaacaagttcagtgtttgctcagatcatttgccaccctatggggtgggaagacttgaatatctggtgcagctttgtcatgtaaatctttgcccacacagtttttgcagccaccactgctcgctatgaatccatatgcatttcaagtactgccttgaaggctaaataaataaaagtacaacggctgtaatacrgggataataaagtattttgatgaaatgttgggaaccat

SEQ ID NO: 219537 - DNA, 397 bp, Homo sapiens
gaattcattcttactttatccttttttaaaaaatccagacaatttgtcacaaraaagtgatagcagctgcagcctcagtcaccctcagaatcactgtccctcttcatggggacagagcattgcactgaggacagcaatacatcttcaactggcttcttagggttttcctccaggtccctcttaattgctccagattcagacagttttcactgcaactcatctcttgtcaggttaatgccgccaaacaccagaggaccaataaactgagccttgatatctccttccacgtaaacaaatatcatgggcagattcctatcaggataactgggtatgcaggttgttgaaatggctttgataaatttgacatcaggaaacttcctggcaactccactgaggt

SEQ ID NO: 219538 - DNA, 605 bp, Homo sapiens
ggctggtattgtttctgggtgtctctgtgagggtactgccagaggagactgacatttgagtcagtggactgggagaagaagacccactctcaatgggggtgggcaccatacaatcagctgccagtgcactaaaacaaagcaggcagaagaagcaaagataagcctgcttgctgagtcttcctgcttgctttctctttttccttgccagatgcttatatcctctcctcctgcccatgtacatcagactccaggttctttgggctctggattctaagacttgcactagcagccttctgggggkctctcaggccttaggcctcagattgagggctgcactgttggttttcctgcttttgaggctttcaaacttgggctgagccctaccactagcttctctttcccgaggttgccaatagattattgtgggaattcaccttctaaccatgtgagttgattctccctaataaactctcgtatatatacatatatcctacctattaaagtcatatatatatatctatatatctccacatcctattggttctgtccttctgactaatacatgctacgacatggatgaaatgtgtagacacaaaggtacaaac

SEQ ID NO: 219539 - DNA, 529 bp, Homo sapiens
aatgaaatcataattagtaaagtcagtagattgcccaggcacagtggctcatgtctgtaatcccagcactttggagagccaaggcaagtggttcacttaaggtcaggagttccaggccagcctggccaacatggtgaaaccccggcctctactaaaaatacaaaaactagccaggcccgttggsgcatgcctgtggtcccagctactccaggaggctgaggcaggagaattgcctgagcccaggaggcagaggttgcagtgaactgagatcacgccatacactccagcctgggcaacagagactctgtctcaaaaaaaaaaaaaaaaaaaaaaagattgccatgacatcataaattccaatttatatacctctgaatccccattacctagcctagaaccttttatatattagacacaatatatgcttgttgcagtaaagggaatatagctataaatattaagtaattactacgtatgcttaatttctactgaaatggaacaaactttctttttttcaatatataacatt

SEQ ID NO: 219540 - DNA, 529 bp, Homo sapiens
aatgaaatcataattagtaaagtcagtagattgcccaggcacagtggctcatgtctgtaatcccagcactttggagagccaaggcaagtggttcacttaaggtcaggagttccaggccagcctggccaacatggtgaaaccccggcctctactaaaaatacaaaaactagccaggcccgttggcgcatgcctgtggtcccagctactccaggaggctgaggcaggagaattgcytgagcccaggaggcagaggttgcagtgaactgagatcacgccatacactccagcctgggcaacagagactctgtctcaaaaaaaaaaaaaaaaaaaaaaagattgccatgacatcataaattccaatttatatacctctgaatccccattacctagcctagaaccttttatatattagacacaatatatgcttgttgcagtaaagggaatatagctataaatattaagtaattactacgtatgcttaatttctactgaaatggaacaaactttctttttttcaatatataacatt

SEQ ID NO: 219541 - DNA, 578 bp, Homo sapiens
cctcagcacctggttcaagttcatcatcatcaytgagaatacaaatattaccaagattttctaaataatgtcctcaaaccctagggcccacattgattcaacattcactgggcacaagtgctaaatactagagaaagagtagtaaatgctgcatttactacattacttctcccaagcatgccctctaaaatagtcactcattcatctccctgttcatcctgccttcggaattaccatctgcaatcagtgtgctaggctaagagggactcaagatcagtaagatccatggagtgtgcagtagttgctgggcaagccacatctctgcaaaaataggaatcagacatacccttaagtaatggagacatgggattaaagctaaactaagagaagagcaaaaacgaatcatgacaccacgattaaacacccatgacatccatgactgggaagtagtacaagacaaagggattagttttgtgcctgacctgtaaaaattactctgagttctttgaaacctgggctttttgttgaaatggctgatttcagatctgaggcagaaaaggtacaaggtgagcccaaga

SEQ ID NO: 219542 - DNA, 578 bp, Homo sapiens
cctcagcacctggttcaagttcatcatcatcattgagaatacaaatattaccaagattttctaaataatgtcctcaaaccctagggcccacattgattcaacattcactgggcacaagtgctaaatactagagaaagagtagtaaatgctgcatttactacattacttctcccaagcatgccctctaaaatagtcactcattcatctccctgttcatcctgccttcggaattaccatctgcaatcagtgtgctaggctaagagggactcaagatcagtaagatccayggagtgtgcagtagttgctgggcaagccacatctctgcaaaaataggaatcagacatacccttaagtaatggagacatgggattaaagctaaactaagagaagagcaaaaacgaatcatgacaccacgattaaacacccatgacatccatgactgggaagtagtacaagacaaagggattagttttgtgcctgacctgtaaaaattactctgagttctttgaaacctgggctttttgttgaaatggctgatttcagatctgaggcagaaaaggtacaaggtgagcccaaga

SEQ ID NO: 219543 - DNA, 295 bp, Homo sapiens
taccagctaggccacagtaaggtagagccctaagtaggttcttccaggccttcgctsttagacgggatgtcttgaactgccctgggtcagatgagagccaactttcctgaatgcagaatcccaggactagcagcattcaccacaggctgactgaagagactttgagccttgagtgaacatcagcagtagctaggcagttctcactatgggcctgggatgtcagtggctatgggaacactcctctgtttgtggaaaggagagggaagagtagaattctttcttgtggttttggtgc

SEQ ID NO: 219544 - DNA, 398 bp, Homo sapiens
cagtagaatagagcaccaagtagatccctaagatttctgactccaggcattggctcccagatggcatctctggacccattatgggccaggattaatttgctaccctgaagggaagaacacaagcttgactggccgcaccaaccactgattgtagagccctaggaccttaagcagacaaagagggtagccaagcagtggttaccatgagcattgggcaagayccactgccctgctagcttcaagtctgagctggcacactcccagttgtggtggtcacaggggttcttgtgtcagccctatccaagctccaggcagcccagcactgatagagactccatttgtttgggagtaagcaagggaagagaacaagagcaactgcctggtaaaccagggaattc

SEQ ID NO: 219545 - DNA, 415 bp, Homo sapiens
gaattctttcttgtggttttggtgccaacccagctgcagtagaatagagcaccaagtagatccctaagatttctgactccaggcattggctcccagatggcatctctggacccattatgggccaggattaatttgctaccctgaagggaagaacacaagcttgactggccgcaccaaccactgattgtagagccctaggaccttaagcagacaaagagggtagccaagcagtggttaccatgagcattgggcaagacccactgccctgctagcttcaagtctgagcyggcacactcccagttgtggtggtcacaggggttcttgtgtcagccctatccaagctccaggcagcccagcactgatagagactccatttgtttgggagtaagcaagggaagagaacaagagcaactgc

SEQ ID NO: 219546 - DNA, 415 bp, Homo sapiens
gaattctttcttgtggttttggtgccaacccagctgcagtagaatagagcaccaagtagatccctaagatttctgactccaggcattggctcccagatggcatctctggacccattatgggccaggattaatttgctaccctgaagggaagaacacaagcttgactggccgcaccaaccactgattgtagagccctaggaccttaagcagacaaagagggtagccaagcagtggttaccatgagcattgggcaagacccactgccctgctagcttcaagtctgagctrgcacactcccagttgtggtggtcacaggggttcttgtgtcagccctatccaagctccaggcagcccagcactgatagagactccatttgtttgggagtaagcaagggaagagaacaagagcaactgc

SEQ ID NO: 219547 - DNA, 398 bp, Homo sapiens
cagtagaatagagcaccaagtagatccctaagatttctgactccaggcattggctcccagatggcatctctggacccattatgggccaggattaatttgctaccctgaagggaagaacacaagcttgactggccgcaccaaccactgattgtagagccctaggaccttaagcagacaaagagggtagccaagcagtggttaccatgagcattgggcaagacccactgccctgctagcttcaagtctgagctggcacactcccagttgtggtggtcacaggggttcttgtgtcagccctatccaagctccaggcagcccagcactgatagagactccatttgtttgggagtaagcaagggaagagaacaagagyaactgcctggtaaaccagggaattc

SEQ ID NO: 219548 - DNA, 596 bp, Homo sapiens
atgagcttctgactaaattctgggcacgttttttaaagccttctgtcaagaggttcctctgtgcccagttcctttcacttctctggaccctatttatggtagccgagccggtcactttgctttcctccacatcaatatgcactctctccatgatttctttttaatgcttttctgtctattcagaaagctctgtgtgtgtgtgtgtgtgtgtgtgtgtgtgtgtttyctttctagttcatgtaggtgcttgttggttttaactattctgtaaactctttgttgaaaaggaccgaccagggatttccctctccactgggaattcttagatctctactgagtacacagaaaataccagaaaaacacttctagtcttcaacactccagtctatgggtaaatcatctggagacttatcaaagaaatcctgtattcatcatctattgccatatttaaactacaatttatgagaaagacagtgaactagtttagtgacttctagatgttgcattctatggagcagtagaatctcaggaacatacctttgggtatagaatagaattgataacttttttattttgccaattataggcaaatacta

SEQ ID NO: 219549 - DNA, 556 bp, Homo sapiens
ttagaatggctattaccaaaagacaagagagaaagcattggtgagggtgtgaagaaaagggaactctggtacacagttggtgggaatgtaaattggtatagctattatggaaaacagtctgcaggttgctcaagagaattaaaaatagaacaaccaaatgatccagcaatcccacttctgaggacataaacaaaggaaatgaaatctgtatgtgaaagagtatctgcactcccttgttcattgcagtattattcacaatarccaagatatgaaaacaatcttagtgtccatcaattggtgaatagattaaaaaaaaatgcggtacacatatacaattgaatattattcagcttttaaaaagaagaaagtcttgtcatttctgacaacctagatgaacctggaggacactaagctaagtaaaataaactagacacaaagggacaaataatacattatactactgatatcaggaatctaaaacagtccaactcatagaaacagagggtagaatggtggttgctgggaggaagagaacagggaggtattagttgaaagg

SEQ ID NO: 219550 - DNA, 600 bp, Homo sapiens
tgcacagtgcaagctgttgatggatctaccattctggggtctggaggatggtagccctcttttcacagggagcaccccagtggggactctgggtaggggctcccactccacatttcccttccacactcccctagcagaggttctccatgagttcctgctcctgcagcaaacttctgcctggacatccatgcatctccatacatcttctaaaacctaagtggaggttcccaaaccttaattcttgactcctgtgcatccgcaagctcagtaccacakggaagctgccaaggcttaaggcttgcactctctgaaccacagcctgagctgtaccttggcccccttttagtcatggcttgggatgcagggcaccaagtccctagactgcatacagcatgccttggcccagccaatgaaacaatttttttccttttatgtctctgggcctgtgatgggaggagctgccacaaagttctctgacatgccctggagacattttccccactgtcttggtgattaacatttggaccgtcattacttatgcaaatatctgtagctggcttgaatttctcctcagaaaatggtattttctttcctgttgca

SEQ ID NO: 219551 - DNA, 435 bp, Homo sapiens
aatgggaacacagcacatgtaatytaaaacatcattctcaggagtccaagtcattggcatgaccataaaccctctctgatgttacagaaggagcagatgggagggagagatggagagaaaaagatggagagaaagatggaggggaaaggacgaggtttgaaaagaaaccattaggtttcctacagtgaggctttaaaaaaaacactttattgaagtatgattgacatacaaaaagctgtacatatttgttgtatacaacttgatgaatttggagatacgtatacacctatacagaaaaaagtagaaaagaaaaaaaaagaataaagtacacctatgagatctagaaaacagccttaaaaaggaaaatctaaaaattataggccctaaagcagaattagagagagagatttgggtagaaagtttaatcaaagaact

SEQ ID NO: 219552 - DNA, 584 bp, Homo sapiens
tacctctccaacctgcacccccactcacaccaccaacctccaaggacatcagcctgcattggacttgatgtaagtgagaaccttgattaagccattgggattttaggcattgttacatatcccccaaagttggcataccttaaaaaagagggaaaaaggaaagtgggccactcttgacaaatgttaccacaggacagcaagatttgaggaaaaaaaaagaatgcgcagaattttcaaggacaaatcagcagagcttcatgattgactygcattatgaatcagagccttctgcgttctaaaacataaatgacacatatggactgtttacatagcagtgcctactcaacagttgagcttttatagagctgggcaaatgtatttgaaaaatggagctctttgcatagctgatcttaaagaaggaagatggacaggcagtcaactctgagctatgattggaagcttcccccatgtctctacacacaatacctgaaattgctgattacttctgttgaagcaatctaatatactggtaaatatagaaaaattatctgagaggactcacactttagacctggagtcagaaa

SEQ ID NO: 219553 - DNA, 584 bp, Homo sapiens
tacctctccaacctgcacccccactcacaccaccaacctccaaggacatcagcctgcattggacttgatgtaagtgagaaccttgattaagccattgggattttaggcattgttacatatcccccaaagttggcataccttaaaaaagagggaaaaaggaaagtgggccactcttgacaaatgttaccacaggacagcaagatttgaggaaaaaaaaagaatgcgcagaattttcaaggacaaatcagcagagcttcatgattgactcgcattatgaatcagagccttctgcgttctaaaacataaatgacacatatggactgtttacatagcagtgcctactcaacagttgagcttttatagagctgggcaaatgtatttgaaaaatggagctctttgcatagctgatcttaaagaaggaagatggacaggcagtcaactctgagctatgattsgaagcttcccccatgtctctacacacaatacctgaaattgctgattacttctgttgaagcaatctaatatactggtaaatatagaaaaattatctgagaggactcacactttagacctggagtcagaaa

SEQ ID NO: 219554 - DNA, 584 bp, Homo sapiens
tacctctccaacctgcacccccactcacaccaccaacctccaaggacatcagcctgcattggacttgatgtaagtgagaaccttgattaagccattgggattttaggcattgttacatatcccccaaagttggcataccttaaaaaagagggaaaaaggaaagtgggccactcttgacaaatgttaccacaggacagcaagatttgaggaaaaaaaaagaatgcgcagaattttcaaggacaaatcagcagagcttcatgattgactcgcattatgaatcagagccttctgcgttctaaaacataaatgacacatatggactgtttacatagcagtgcctactcaacagttgagcttttatagagctgggcaaatgtatttgaaaaatggagctctttgcatagctgatcttaaagaaggaagatggacaggcagtcaactctgagctatgattggaagcttcccccatgtctctacacacaatacctgaaattgctgattacttctgttgaagcaatctaatrtactggtaaatatagaaaaattatctgagaggactcacactttagacctggagtcagaaa

SEQ ID NO: 219555 - DNA, 529 bp, Homo sapiens
accaacagatgtattatacagtggtttcctttggacaaaattaaagctttcatccccagaatccctctagctgcttcaaggtgtgytgagcccaaagcataatttagtgtttgctccactgtggctaattaaaatatgctttaggtggttcagctattttcccaagcaacttgtccccctgagttgatctagttctttccttccttccttttgtttctgtgattcatccaacaatcatgttatttcagaaaccacggtgcagagaataatcattagccaactttagttgaaatgcaacattaatccttaatttattcttctgaggaaagtcatgcttaagcattctttcattcattttccatgaagagctaagctttcagcccaaattgtgtcaatggtagcttcccaaatgaaattccagcatgctttcagactcaggcaccacagggatgcaggtggatgagaaaaagctcaatttaaattgagttagaaacttctggacattactttcactgaataaccttgtagt

SEQ ID NO: 219556 - DNA, 475 bp, Homo sapiens
tggaatcttagagatctcctccttcccaagcaatgatgctgttattgaaccaggcctgttttgcccatgatgcagtatgccaatcaccaagacaacgagttttgcagcaaagaaagcatttatttatgtagcagccaaaccaagagatgggaaagcaggtcccaaacccacctccccaaagatggggattgggaatccttatggaatagcggagcagagtggtgtgaggcagagaaaagtgagtggggataaggaaaagtgtggtaatctgtrttctgtgcaagaattagtcaagattcatggcccttcataggatgtatgtttgcaaaatggcaatattagcgtgatctgagggtggagctcatggccctctgatgtcaaaaggtcacccactggacatttgcacaggcccagctgaagagtcagtggtctcaactggctcgaactggatgagaggagactgtaagtttttgaa

SEQ ID NO: 219557 - DNA, 475 bp, Homo sapiens
tggaatcttagagatctcctccttcccaagcaatgatgctgttattgaaccaggcctgttttgcccatgatgcagtatgccaatcaccaagacaacgagttttgcagcaaagaaagcatttatttatgtagcagccaaaccaagagatgggaaagcaggtcccaaacccacctccccaaagatggggattgggaatccttatggaatagcggagcagagtggtgtgaggcagagaaaagtgagtggggataaggaaaagtgtggtaatctgtgttctgtgcaagaattagtcaagattcatggcccttcataggatgtatgtttgcaaaatggcaatattagcgtgatctgagggtggagctcatggccctctgatgtcaaaaggtyacccactggacatttgcacaggcccagctgaagagtcagtggtctcaactggctcgaactggatgagaggagactgtaagtttttgaa

SEQ ID NO: 219558 - DNA, 523 bp, Homo sapiens
ttaaagtttggtaaacctagtcaggtttgcccttagcttccatgctttcccttaatcatgtacctctacttccagccaaattagaccacattgaccacgctgaaatcacttcagattcatttctgaaaacgtatcttttttctccaaagaaaggaaacagagctggtcaaattaggaaaaaacagacaaaaacaacaaaaccccttgrtcaagaccaatgggcaatatcacactgaatggaagtgagaaattcgtttaactcaagcttaagtctgaattttgctctgtgcaatgaataatctggcatttccctatttacaagtgagcttctgacaggcaccctagcacaaaaagcccaaacctgtcccctttttttcattttataatgaaagccaacaccacagctgtggaaagggaaagtaattgttagttaaaaaccctttttaagaattaattttatttaaagattgttacaaatctgtgtatttcagattaaacttaaaacataccatatctcacagaa

SEQ ID NO: 219559 - DNA, 465 bp, Homo sapiens
aaatcatacctaatcctaggaaattttacactgttagggtggcctacaacagcaaagactttttaaaaacctttcctgaagtacctttttgcaaataaatcacccttgcaaacaacttttaaaatcaggatacctccaatagcaatgccatttgccttgcaaaagtttccttggctctggcatattcacccagtccagggtctctctaaatttccatccttacccatatttctagtgtagagaaaaaacaaaacctgtcatcattttcatctcctgcccccagctccttccaaaatcaaaataaacaaaccaaagctaattaaaggaaaagtcagagctagtgctaacctagtattcactaaaatggttgtaccagttgttaaaaagttgaaatatttyttcaactttcctttaagagtcctcttcctttccagcaaccccataatctagcaaataaaaggttaa

SEQ ID NO: 219560 - DNA, 619 bp, Homo sapiens
gtttactcatgttgcttatcaggagatgctggggctccctctacccctaggggtgtctctctacattttgttgtagtgtagtattggaaaacaaagttcaaaggactctagagacaacaaaaataacagatgaacaattaaactaaagccgtgaatgcatcttctcttcaatgaagggaacagataattcatttgaattaccaaattttaacaaggttgttatttgccatggttgaagaggcaatctgactttaaaatcattataggtctttaaagaaatacaatgttattccacagaatatggataaaataaaagcaaattatgcatcagaatggggattggcaatcttgccaaagtcagggggaaagtcttctctctccagctccctgagggtgggagagcrtttcccagcaggagggaggggacaggcttcagctaccttcataccctgttgagtggctgctatttcggccaagtggaactccaatgctgctgtgggagaaatgccccaatctccagctccggcatgtcttatgtacacgaagcaggcatttccacaccttctgtacacaccccactgcaagccctgaccaagtgtggaatcctccaactcaaagg

SEQ ID NO: 219561 - DNA, 606 bp, Homo sapiens
cttttggccttccttttccaaaatgatgtctacacatttaaaattaacttgtcactctaaagaaacaagaatttacaacttggattctttttttctcacttcaaaattggccatatatcctatgatttgctgtattaatgttgcagtgtaggaatgctctcttcccagagaacaaccagagatgactattctttaagccctgaaatagtcacgatcagtctgaatgcttgcagatgcatgttttattagaggggaatgaaaggagttaataatctttttctctagaccaaagaagggtggaccaacttgcctacagcattggcaacttgtctacacaacatgcctcttttcattgttatacttcctgcccaggttagtcaggaggctacttatgaaaccagtgtctgtgatgattacatgttaggtgtgaactatacagtcagtgagaattagttattaaagtgattatttgtgtttgattgacagaacayatgcatctctgtggacagcatagtatttcttaccccctggcattagatactctacatcagaatgtagtgcatttctgaggaaacatagaaagtatttataagaaaagttatgtgt

SEQ ID NO: 219562 - DNA, 606 bp, Homo sapiens
cttttggccttccttttccaaaatgatgtctacacatttaaaattaacttgtcactctaaagaaacaagaatttacaacttggattctttttttctcacttcaaaattggccatatatcctatgatttgctgtattaatgttgcagtgtaggaatgctctcttcccagagaacaaccagagatgactattctttaagccctgaaatagtcacgatcagtctgaatgcttgcagatgcatgttttattagaggggaatgaaaggagttaataatctttttctctagaccaaagaagggtggaccaacttgcctacagcattggcaacttgtctacacaacatgcctcttttcattgttatacttcctgcccaggttagtcaggaggctacttatgaaaccagtgtctgtgatgattacatgttaggtgtgaactatacagtcagtgagaattagttattaaagtgattatttgtgtttgattgacagaacacatgcatctctgtggacagcatagtatttcttaccccytggcattagatactctacatcagaatgtagtgcatttctgaggaaacatagaaagtatttataagaaaagttatgtgt

SEQ ID NO: 219563 - DNA, 407 bp, Homo sapiens
agagtgaagagttggtatttgcattacccagggccttcaggaacacttgtgcagaatcaattgcagcaactgttagtcatcacaggttaccctggaggactgatctgctttatagagtagggtgtcagtgaagatgttcacagcagtaagcacaatggcggacgttttcgtagctagctctagtcacctaggcagggaacaactaggcctggagagtcagggaagggatttacaggtggctctgtatttcaggaagctctcccatgatctgcaaatgactttcccttacactaagaaagttggggcttatttggttggcaaaatgatcaacaagggtccttttgccaaagtmatagaagggctgggtctccccatgggtgaaaaggcaagtacacattgacaaatag

SEQ ID NO: 219564 - DNA, 618 bp, Homo sapiens
cactctgtcatcatctctgcagagctagcacccagcacactgttgggggcttaacagggcttactgattgtttaytggatgaactttcaaattatctatgaatattaacgaaccattcattctccatctgccattaggtatttaagcagaacactgtaatgacagagctcaggtttaacatgtgccaaacttgtgctaaaatatactaatgctaacaaatggtgtccaagaagtcaaatgggatcactttaagaaagaagagcatgtgataattaatgtgccaatgttctacaagcattttatcattttattgtccagtaagattcaattgtccatagaagcatagagttaatgaagaaaaatctgcaaaaggattttatcttaatgaattttaagactccccttggaaatcatatttgcactctttattcttgtaacaaaccttttccttcataaatactgcaaataacatgtcagaattactgtgtccaaaataccacaatgtctaatctagaaaagtctaaattgatattttattatatgaagaaagataatgggatgaaatattattttaatgtaaattagtaaggaaaggagaaaaaaaggaaaagctaatag

SEQ ID NO: 219565 - DNA, 534 bp, Homo sapiens
cacttcaggcaggatatggaagcagagaaagagacccaacctaagcacacacaccatgtaaatcctactttactgtcagttcacatctgaaggtcagttccaaatgcattttgcaaatagcataaagtggaaaaaaaaaagaaggcaaaaaataaaaagagttggcagtgtgtttattggagtggtcaatgtkatctgtaagcaaatgggtcagcagggtgtccaagaattaccaatgcattaaggcagatataagcagctggctcacccttgtactgggtgaaggtaattttctagaacatgggcaatacacccttagttctgctcttagctgaacatgtaggggggtgaggctgggtttggaaaaaatgtactaaattggttcttttatggcttcaagactggccatctatgagacacaatgaaaattaatttgtaaccctggagaactgtttttttaggatgtatttttggattgcagcttgtctagctctgaatggaaaacacaaaattacattaagataacataaatgt

SEQ ID NO: 219566 - DNA, 534 bp, Homo sapiens
cacttcaggcaggatatggaagcagagaaagagacccaacctaagcacacacaccatgtaaatcctactttactgtcagttcacatctgaaggtcagttccaaatgcattttgcaaatagcataaagtggaaaaaaaaaagaaggcaaaaaataaaaagagttggcagtgtgtttattggagtggtcaatgttatctgtaagcaaatgggtcagcagggtgtccaagaattaccaatgcattaaggcagatataagcagcyggctcacccttgtactgggtgaaggtaattttctagaacatgggcaatacacccttagttctgctcttagctgaacatgtaggggggtgaggctgggtttggaaaaaatgtactaaattggttcttttatggcttcaagactggccatctatgagacacaatgaaaattaatttgtaaccctggagaactgtttttttaggatgtatttttggattgcagcttgtctagctctgaatggaaaacacaaaattacattaagataacataaatgt

SEQ ID NO: 219567 - DNA, 534 bp, Homo sapiens
cacttcaggcaggatatggaagcagagaaagagacccaacctaagcacacacaccatgtaaatcctactttactgtcagttcacatctgaaggtcagttccaaatgcattttgcaaatagcataaagtggaaaaaaaaaagaaggcaaaaaataaaaagagttggcagtgtgtttattggagtggtcaatgttatctgtaagcaaatgggtcagcagggtgtccaagaattaccaatgcattaaggcagatataagcagctggctcacccttgtactgggtgaaggtaattttctagaacatgggcaatacacccttagttctgctcttagctgaacatgtaggggggtgaggctgggtttggaaaaaatgtactaaattggttcttttatggcttcaagactggccatctatgagacacaatgaaaattaatttgtaaccctggagaactgtttttttaggatgtatttttggattgcagcttgtctakctctgaatggaaaacacaaaattacattaagataacataaatgt

SEQ ID NO: 219568 - DNA, 503 bp, Homo sapiens
tggcccacagctgatttgttccctagagaattttcttattcttttatccagaactgcttttccaactatagaatttactctccttccaccctaacctcgcccctaaattgaaattctgcaggttttatttctttgactcttgggacactcctttaaaatttgaaaactgaaaaattgataccattctttgtactaaatgtctaaggtagaatctttgtctcatttgtttaatgtgtccttgttaaaaattacattgtgcagaacagtaacttttaattttacttatttataagattcagattaattatagmtttatttattcctcctcctcttttttgccttttctggtcagtatcatcaaaagtaaaggaacaaaatcaccagctaccatgttaactatcatcatttgatcctttaaattcagaactccagagcaataagagactatgtgttcttaagtttagcatggacaaattccaatgctcacctattcctctccatga

SEQ ID NO: 219569 - DNA, 431 bp, Homo sapiens
aattgggaaagaacagaaactaaaatttggcccacagctgatttgttccctagagaattttcttattcttttatccagaactgcttttccaactatagaatttactctccttccaccctaacctcgcccctaaattgaaattctgcaggttttatttctttgactcttgggacactcctttaaaatttgaaaactgaaaaattgataccattctttgtactaaatgtctaaggtagaatctttgtctcatttgtttaatgtgtccttgttaaaaattacattgtgcagaacagtaacttttaattttacttatttataagattcagattaattatagctttatttattcctcctcctcttttttgccttttctggtcagtatcatcaaaagtaaaggaamaaaatcaccagctaccatgttaactatcatc

SEQ ID NO: 219570 - DNA, 631 bp, Homo sapiens
atatttctcacattttctacataatgcagaaagcttccctagactctaagcttgagcttcaggtgatgcaaattaattccttcagtctacctggctagctatcaaagaagattctgccttttcattagttcattactcctactttagaagctgctaatgaattgatttttttaatgaacctgaagatattgaacacatacaagaaaaccttcaatattaatgccagcccatttggtttttcattcataagaaggagaaaatgggggctgaactcccccttttataacagcatcaatcccactcatgagcactcaaccacctctaatgtcccacgtcttaatattgtcacaatggtaattagatttcgacatgagttttggagggaacaaacattcaaaccatagcagacasaaagcagaatcaggaacgtgatctagaagtgacttttctttgtactttctccaaggttcccttgcaaggctaagatacatacacatagtaaagactgtcacacactcttggaatatttgggaaaataaataatcttagaattctctgctttttctgcctcacttgggcatcagtctgcctcaacatgctgtagcccaaactctcttcaatttcccactta

SEQ ID NO: 219571 - DNA, 499 bp, Homo sapiens
aaactatcaaaaccaacttttttgatctctggaaagtgatcaaaggcttacaacatctgaagaactgaaaaactgctgaagttgataagaagaccagggacaataaagtttttacttaggttactcccatctaccccctcctcagttccatggcaggccttgaaatccacaagcctaacagtcaccagagaggcagacagggtttggagctcctgaaaaaatcctactgccaaaccacggttactttttgacctgactcacagttccctagagtagcctyatccacagggtgttgtctatttgaccagactcagagctcagctaaacaggaaaagctttgaccctagggcattgaggaaactaatcagcttcaattttttaaacttccatttggcaaaggatgttttaccagctggagcaaataaaagcctggaaaaatatatatatggaagatctagagaaaaaggtttctatagatggctttgaaaaattctgacat

SEQ ID NO: 219572 - DNA, 499 bp, Homo sapiens
aaactatcaaaaccaacttttttgatctctggaaagtgatcaaaggcttacaacatctgaagaactgaaaaactgctgaagttgataagaagaccagggacaataaagtttttacttaggttactcccatctaccccctcctcagttccatggcaggccttgaaatccacaagcctaacagtcaccagagaggcagacagggtttggagctcctgaaaaaatcctactgccaaaccacggttactttttgacctgactcacagttccctagagtagccttatccacagggtrttgtctatttgaccagactcagagctcagctaaacaggaaaagctttgaccctagggcattgaggaaactaatcagcttcaattttttaaacttccatttggcaaaggatgttttaccagctggagcaaataaaagcctggaaaaatatatatatggaagatctagagaaaaaggtttctatagatggctttgaaaaattctgacat

SEQ ID NO: 219573 - DNA, 499 bp, Homo sapiens
aaactatcaaaaccaacttttttgatctctggaaagtgatcaaaggcttacaacatctgaagaactgaaaaactgctgaagttgataagaagaccagggacaataaagtttttacttaggttactcccatctaccccctcctcagttccatggcaggccttgaaatccacaagcctaacagtcaccagagaggcagacagggtttggagctcctgaaaaaatcctactgccaaaccacggttactttttgacctgactcacagttccctagagtagccttatccacagggtgttgtctatttgaccagactcagagctcagctaaacaggaaaagctttgacccyagggcattgaggaaactaatcagcttcaattttttaaacttccatttggcaaaggatgttttaccagctggagcaaataaaagcctggaaaaatatatatatggaagatctagagaaaaaggtttctatagatggctttgaaaaattctgacat

SEQ ID NO: 219574 - DNA, 594 bp, Homo sapiens
acaaagtaggttaaaagtacaggtagtaaataacacattttgtagatttcctttggttaarattcatagaaaaaatgttttctggaaattgatcacaccacttctctgagcagtgcacggtattctaattgtggtgggtcatggaggaagaagaaagtacaaacggctttataccaacggtgaggcacaattgaccattgtcccttacatctgtacatttactttgctagtatatagtgtatataaaagacaaacaagtcctaatttgcaacatctagtctttctacatgttaaagaggttgccagtgtatgacaaaagtagagttagtaaactaatatattgagtacactttgtgttaaaattcataggaaagactgttcttaaaaacaccatctttcttgtggaaatgaaattgttaaaatctctaagcattacagatgcttacacctgttcactgagttgatagaggtaggaaggggaagggttctaggtcagactgtttcttgtttagaagacactttcaaattatagcttttgtcatatatgtgtaacatttattcaatgctactgtgtatatagtggaaaacttgtgt

SEQ ID NO: 219575 - DNA, 429 bp, Homo sapiens
atacaacatatgttaaaagtaaatggctaaagcattttttgttatttcatacaatcagttagatttgggaataacattgttaaacttgatgtcttagagagtatgctgactgtttactaagcagtggcaggtaggggaaagagaagggttctgtgcctatgagttagatttgttcagatggtctaaccactrttctgtgtgtgcattttaattaatattgtgttttaaagggtaaacaagtcctaaagctcaaagtatattaaaagtagagatagtaaaataattcctttataaatattcttttgttagtttttaggaagggctgtactgtgggagtagacctttgttaatccacctcttgtagctagatgtaactctgtatttagtcactggaatgttggaagaggaagaagaagaagggtaaaggga

SEQ ID NO: 219576 - DNA, 495 bp, Homo sapiens
attcttaaaggaaagaaattccaacccagaatttcatatctggcaaaactaatctttataagagaagaagaaacaggatcattctcagacaagcaaatgctgagggaattgttaccatcagacctgtcttataagagttcctgaaggaagcactaaatatagaaaggaaacaccattaccagccactacgaaaacacactgaagtacacagaccagtgacactataaagcagccacataaacaagtctgcaaaataaccagctaccatgatgacaggatsaaatccacaaatcaatactaacttttaatgtaaatggactaaatgtcccaattaaaagacacagagtggcaagttggataaggaaccaaaagtcattgttatgctgtcttcaagagattcgtctcacatgcagtgacacacacaggttcaaaataaagagatggaggaaaatttaccaagcaaatagaaagcagaaaaaaagcaggggctgcaat

SEQ ID NO: 219577 - DNA, 365 bp, Homo sapiens
aacatggcacatgtatacatatgtaactaaccggtacattgtgcacatgtaccctaaaacttaaagtayaataatacttaaaaaaaaaaaaaagaatgattggatggtagctagaagagccatagggtttaagggggaatttttttcttaacctatgagagaaacttgatcattttcccaggctgagcataagtaagcagttagaagagaggcgttgagttgaagaagggatggctgataaagtctctaaaagataatgaattagtctagaacaaactataaaaaggaggggatggtagggataggtttgtagaaagtgaggtaggaagcttagagggagagtagcaagcaaggtggaccactga

SEQ ID NO: 219578 - DNA, 558 bp, Homo sapiens
aggattctaatttttaacctaatacacatgtgtcttcttctctaacagaggtgtttggcggttattttggatcccaggttatcaaccttaacctaagccctgtgtccaacagtcttcaaaatatctgcatcttcctcttacttgtgtgaatggccataggtttctgraggggggattattacatatacctgccatggtattacaagatacctactcacgaggatacagcctttcctcaatcagcaattcagaatgtaaaaatattgtgagatctgtaagttaaacaagggatcacaatgctttaatgaggggaccttccaataaatctgtgagtttttttttttgttgtatgaatcttatgaattgagcagaactcattggctgtccatttatcttgctcctaggaataccatgttttatatatccatagctctctgtaggccagttcccctgggcttcccttttgactttgctaccagttataatcactgcatctctattacttttgatgcttaaatttcctgtcacctgacctttcttattctggagcccatcatc

SEQ ID NO: 219579 - DNA, 586 bp, Homo sapiens
agccctagtgaaaagttgtatcagagaaaattaataaaatcatagtgtatagagtcagagctaagactcagaataccagggctttagattttacttgctgtgtattttgagctatcattttttgaacacttactatgcatcagacactatgctaaatttttgcatgtattatctcatttaatctgtacaatatttctgttcccttcatttattcattcagcaaatatgcattgagcagctactatgtgcctggcaacattctaggcctggagaatacaaaaatgtatattatggacaacattccacttatctggattttataacttggcagctgagaaagctaataagcaaaataaatatgtaaaatagacagcatgttagatgattaggtataagagaaaacatatggcagagaaggaggacagggtggttggaaagcctcagagagaaggtgaactttgagtaaagacctagaggaggtaaaggaatgggccgtcagagtatttgaggaaagagsactacagagaaagttgaaaatgcaaagctctggagaacagcaaggaggccatcatatggctatagtgga

SEQ ID NO: 219580 - DNA, 575 bp, Homo sapiens
aagctattataataatatgactatgattataataaaaatattattaataactaacacctataatatagtataatatagtatagtatagaatagaatagtatatgccagacactgagcaaagcaaagaatatcagttatctcccaaacacctatgagttttacagatgagtgaatgggtgcttaaagtgtaattacttaaactcacagagacagtaaagggcagccctagagcttggccctgattctagtttaacttcactctaggacctcagctgccaccctgcaatattgctgagcaccagagaaatgtgaggcatakagtaggtggtcaagtttattacctctctggtggaaactaccaagtattgccccagaccgtaaatgcaaatggcttaggaagctggtggtcccaaaggatgctagatcaccattcatacagctgaattaacacactattgatgaaaaggactcccctaaactgtgcctctctaattatttgactattagacaattagagggatattgaaaactggacatgtccacaataatctgagtctctctgctttctaaagtta

SEQ ID NO: 219581 - DNA, 658 bp, Homo sapiens
agttataggatataaacacaaatcttcttgaaaggagctcgggtttttgcaaaagtctcaggatagggttatggttgaaagcagcctaatccttaccttgagtaaccgagttagagcagatacataggaatgtaaaggagtttatctaaataacttatttactcatgtggtcctaaaactaacctttgatcattcacgggcatgatggctctctgggggtggggggaggcaaccaggttgattaccttstaatggtgttgactcaaagtctttgtcatttaatgtgtgctgaataaatgctagcagggccagtgagtcagggccgtggctgcaactctttacagcactctccttggagtctgtaagtggcccggaccctcagctggactgacaagcataatatctgtgtcagtgtacatgattcatctgttgttgggtcagggtctgtgggacagacccccgtactccacctccctgtattcttcaacccattcccatctgtctgatgtcccttccactgaaatattttgccctaccttggccactcttttcaggtttcctggctgcacttcctcgcgaacacctagtccagctctcttcctttctctctacattctctcctttagactacctatctagttagtcgcttacttcaagt

SEQ ID NO: 219582 - DNA, 589 bp, Homo sapiens
ggccactcttttcaggtttcctggctgcacttcctcgcgaacacctagtccagctctcttcctttctctctacattctctcctttagactacctatctagttagtcgcttacttcaagtacaatttgtcccttgatgacccctagatgtatattttcagccttaatctccctcttaagcatcaaacttatatattcawttgcttatctgacatgatcatattgatgtctaacaggcttcccaaacttaacaggtctaacacaattaacgatttttgcaaacctcccccaacaaaacaaaacacaacaaaaaaatacctgtttctttcttactctttcttgtcttggaaaagactatcaggagtcattgttgattctcttgtttcttctccctctatttctgatccatcatcaaatcctgttgactctatttccttgttcatttccttcctctcctctgtaactaccacagcccaagctattgccatctttcacctagactcctgcaatagcctcataactcatcttacagtgtccagttttgccccactcttctctaatctccacccagtagtcaaagtaagtctcata

SEQ ID NO: 219583 - DNA, 485 bp, Homo sapiens
tttgagaaacacataatggttgctgaatgaataaagatagttctgaaagcctttgtcaagaggagttgttggatttattaattaaaattaaactataaaatttgttatggtttcacttacttattctctttattccaataataaatataattgagaatctgctgttcggtgaaaggagtggtaatgttgaagtgawtttactcacagataatctttgtgctcttgcaagagtagtcatctgttaatggtaagcaataagggcacaatttaggctgtcagggtacttcagcgtacttcacctggctctgaatggggtcatgcatgaaacaatatatttgaggcatttatttaccttgagtgaaaatgagagtatacattattttgaaactttctcctagatcaaaaagaagttcaagacaattcagaaagttttatatctctgcaaatgctaaagaaaaccatacccattttacagaagttagcct

SEQ ID NO: 219584 - DNA, 485 bp, Homo sapiens
tttgagaaacacataatggttgctgaatgaataaagatagttctgaaagcctttgtcaagaggagttgttggatttattaattaaaattaaactataaaatttgttatggtttcacttacttattctctttattccaataataaatataattgagaatctgctgttcggtgaaaggagtggtaatgttgaagtgaatttactcayagataatctttgtgctcttgcaagagtagtcatctgttaatggtaagcaataagggcacaatttaggctgtcagggtacttcagcgtacttcacctggctctgaatggggtcatgcatgaaacaatatatttgaggcatttatttaccttgagtgaaaatgagagtatacattattttgaaactttctcctagatcaaaaagaagttcaagacaattcagaaagttttatatctctgcaaatgctaaagaaaaccatacccattttacagaagttagcct

SEQ ID NO: 219585 - DNA, 661 bp, Homo sapiens
acagagcaggcacatgatattgtgtcattatcagccacttcacacaaccaatttgacatatgatcgctcttcatctttttatctccttcccaggtaatttattactttcatattgaaaattcatgattaagaaaaagaatagatgaccctttcttccattgccccattactccaagccagtcaacagccgcacccttggatcatgagacacgcagcattaaacaagccaggcaaggctccagagagtccatttgtaacatctgtgtaaccatcgctttaaaatggacaaactaaaagttgctttattaaattctgacaaccctcaaacaaagtgaatacaattcaaggtgacacttactgtcaaggaaatcttgcttcttccaggacagtgtttttcaacactctgcacattgcaatcacctggggagttattttttaaaatacattgaaaggttataatttaattggtttgaggtgggatctgattgtaggtatttttttaaagctctcccagaggttctgatgagctgccacggttgagaaccaccacagtaggtgggtgagcaggcacctccagcttccagaagacccagcgaggagcttgactggraagtgcagaccccagctttgcagcactgactgtcagagccaataataagca

SEQ ID NO: 219586 - DNA, 642 bp, Homo sapiens
tttaccttttccaaattgactttcacaggagtggaactccctgagtcattcctctgcctgaagccctgctttgatgtgtttaaggtaggggaaaaaatccttttaaatgaacttcaacactatgtcaaaagcagtttaaaagttagaaaaatattatcataaaattgctaaagtcagtaatgttttgatgtttcacagcagcacaatgaacagttgaaagtatcgctcagtatgtattttgtggttctttgtagcctattggctttccaactttattcctaagagtccttttggaggggcttactctgttttgtttttgccatttctttacccagactctctcagttcatttctaggataagaagtttgatagtttgattgtctcccttccccaggttggttttttgtttttgtttttgtttttgtttttkttttggtttttggttttgtttgtttgtttgttttttgagatggagtctcactctgtcacccaggctggagtataggtgtgcaatcttggctaactgcaacctccagctcccaggttgaagcaagtctcctgcctcagcctcctgagtagctggcattacaggcctgtgccaccacacccggctaatttttgtattttttagtagagacggg

SEQ ID NO: 219587 - DNA, 612 bp, Homo sapiens
gaattaaaaaacatcacaatgataccagccatactctccarccacaatggaatacaaatagaaatcaataccagtaaggactctcaaaactacataaatacatggaaaataaaccacttgctcctgaatgacttttcagtaagcaataaaattaaggcagaaatgacaaattatttgaaacaaataaaaatggagacacaacataccaaaacctctgggacacgacaaaaacagtgtttaaggggaatatttatagtgctaaatgcctacattaagaagatggaaggatttcaaatgaacaaactaaccttgcatctaacagaattacaaaaacaaaaacaaacaaaaaaataaaaccaaaaagactaaacacaaagctagcagaacagaaacaactaaaattagagcagaactaaatgaaattcagaccaaaatgatcaacaaaatgaaaagttgtcctttgaaaggataaacaagattgacagaccactagctagattaacagaaaaaaagaacattcaaataagcacaaccagaaacaacaaaggtgacattacaacttctccaatagaaatacaatcggtacccagagactactatgaacatgtctat

SEQ ID NO: 219588 - DNA, 612 bp, Homo sapiens
gaattaaaaaacatcacaatgataccagccatactctccaaccacaatggaatacaaatagaaatcaataccagtaaggactctcaaaactacataaatacatggaaaataaaccacttgctcctgaatgacttttcagtaagcaataaaattaaggcagaaatgacaaattatttgaaacaaataaaaayggagacacaacataccaaaacctctgggacacgacaaaaacagtgtttaaggggaatatttatagtgctaaatgcctacattaagaagatggaaggatttcaaatgaacaaactaaccttgcatctaacagaattacaaaaacaaaaacaaacaaaaaaataaaaccaaaaagactaaacacaaagctagcagaacagaaacaactaaaattagagcagaactaaatgaaattcagaccaaaatgatcaacaaaatgaaaagttgtcctttgaaaggataaacaagattgacagaccactagctagattaacagaaaaaaagaacattcaaataagcacaaccagaaacaacaaaggtgacattacaacttctccaatagaaatacaatcggtacccagagactactatgaacatgtctat

SEQ ID NO: 219589 - DNA, 500 bp, Homo sapiens
gaattctagctttctagctgtagtattatcatatgaaaaagatttttttttccttgagacagagtcttacttgctctgtcacccaggctgtagtgcagtggtgccatctcagcccactgcaacctccacctcctgggttcaagtgattctcgtgcctcggcctcccaagtagctgggattacaggtgtgcatcaccatgccaggctaatttttttttttatttttagtagagacaagttctcaccatgttggaaaggctggtcttgaactcctgacctcaagtgatctgcctgcctcagtctcccaaagtgctgggattacaggcatgagccaccaygccgggcttgaaaaatattttctgtaaagcatttctaccataacttcttgagacttaaaacagagaaaaacatattcattgaaaaaatgcagttttgattttttattgtttagatcaagaatacgaacattgaaaccaattactcataaagggtgcttcctct

SEQ ID NO: 219590 - DNA, 568 bp, Homo sapiens
agtggagactgaggagatcattatttatacgtggaaatggagaagacattagtgtagaactgagtcaatcaagtcagtttgggttttgttgttcgtctccaagccagacacwctcttcctctctggaggaatcccctccacaccccacagccctggcagaggaggcaaggttctcttctacccttaatccccacaggtcagaggtgaaggccagagggtggcagccaggactcaggtgggagccaggactcaggtcggggccagaagttgatgtgcatctgtaccaccggtgggggctcttactggcctcctactccagtttgtcttgtgagcacccaatgggactcatgcaaaggaggttgcaaaggagtgccaactccttttgtgctagagacccccccccccagacattccaaaaggacccactagcccatgctttaataatttgatgaaattttggtgatttctccttacactttttataaacaactctttctcctgtgctatgctaaagggaaacactccacctctcctgggagcactttgtcagtctttgaaatctggatta

SEQ ID NO: 219591 - DNA, 508 bp, Homo sapiens
tcagtatttttttaaacaaagaagtcattatcttttatatccctactgtccttcacataattgtgcaaatacacaaagtatttatttttgtaagagatgaggaaaaaacctacagggcagggtgcagtggctcacatctctgatcccagcactttgagagactaaggtaggaggattgcttaaggctatgagttcaagatcggcctgggtaacatagtgagaccctgtctgtacaaaaaataaaaatagccgggcatggtggcatgtacctgcagtcccagctacttgggaagctgaggcaggagagacacttgagtgtgggaggtcaagaggcttcagtaagctgtgactgcaccacttcactccagcctgggtgacagagagagacccctgtcaccaaaaaaaaaaaaaaaaaaaaaaaaaaagagagagagaaagaaagaaaagaaaagaaaaagtaaaacmtacattcactggaaaagttttgccccatggaaaagtctatgca

SEQ ID NO: 219592 - DNA, 456 bp, Homo sapiens
tctctgggtcttgaatcgttccaaaacactttcttaagagttctacttctgctgtcctgcaatatctcacttttactgaggtcaccattcaacccaaaactctctatccaagagtccattcttagacatcttagatgacttacccatgacagtggacagaattcttcattcctgcctccttagaatacaaccttgactcagctttccagatgctccactctgctgatttgtgtcccacctttctggatattcccccttagacacatttgctgaactcctcgtctccccactgtcttcatgttgcagtgtcccaaggctcatctgtggacctkttattttccatcactccctgctcccttggtgatctcgctcagcctcatgggtttaaatctgaatactaatgacgcttgcacttatatgtttagcccagaccctcccctaaactctacattcatg

SEQ ID NO: 219593 - DNA, 583 bp, Homo sapiens
taccattctgttgggtaagcagcatataattaatgacaataaatgagaaaaataggtactacgatggtagaaggtgacctattgctctgagaaaaagcaaacacagmaggatgatgggagactagggccatgagggcatgctccatggagacgaggcattcagcagagtcggaactggtgaaggagtttgtaatgtggtgtctgtgtaaagaaggttctgggccgagggatgagctgctgtgatggcttgatggtgagagtatgcccagcgtgttggagaaacagcaaggaggccagagcggccgaggcagagggggcaagaagtagaggccagcacctgaggcagacagcaagccctgcaggtgcttccaaggattttggattttactctgagtgaaacggagggccagccattccttggtggtgcaaagcatgacatggtatgacacacattatagaaggatgtctctgaccacagggaggaaaatggactggaggggcaggtgggaagcagggagacccaggaggaggctactgaaggaaaccaagtgaggcatgatgtttgctcacagcaaggcggtac

SEQ ID NO: 219594 - DNA, 583 bp, Homo sapiens
taccattctgttgggtaagcagcatataattaatgacaataaatgagaaaaataggtactacgatggtagaaggtgacctattgctctgagaaaaagcaaacacagaaggatgatgggagactagggccatgagggcaygctccatggagacgaggcattcagcagagtcggaactggtgaaggagtttgtaatgtggtgtctgtgtaaagaaggttctgggccgagggatgagctgctgtgatggcttgatggtgagagtatgcccagcgtgttggagaaacagcaaggaggccagagcggccgaggcagagggggcaagaagtagaggccagcacctgaggcagacagcaagccctgcaggtgcttccaaggattttggattttactctgagtgaaacggagggccagccattccttggtggtgcaaagcatgacatggtatgacacacattatagaaggatgtctctgaccacagggaggaaaatggactggaggggcaggtgggaagcagggagacccaggaggaggctactgaaggaaaccaagtgaggcatgatgtttgctcacagcaaggcggtac

SEQ ID NO: 219595 - DNA, 533 bp, Homo sapiens
aagtaagaagccagtggatgagtctaaagtttaaagccaatgcacagacacagtgaaagagaaattattcaataagaaagtgcatcaggataaactactcagactagaacacatagtgaccaaatatggggaatatcacaaaacataagagatattaaaagggtctaaattggtttaccaaaaatgccagaaaaactgaaattatcaaatagggtagmggcaacaattgaagagataatggctaataatttcccagaactgatgaaaaatcaactcacagattcagaaagcccagtgaatctttagcaggataaataaaaagatatcctgacctaaacacatcatgcaaaaagagagtaggcagagttgaaaaaaatgaactatctccaaagaagaaaacactgactgatgaattctcaaaaaatgagaaaggaagcctgaagacagaggacggacatcgtcaaagaaggtgctgaaataatggccaatactcaataatgaagtgaaagaaagacactgtcattcaaacagtg

SEQ ID NO: 219596 - DNA, 517 bp, Homo sapiens
aaagtataaatttaaaaatttggcttggttaatgtgatggttaatattgagtgtcaactggattgaattgaaggatgcaaactattgttcctgagtgtgtctgctgcccgctgccaagggagattaacatttgaataagtggactgagaaaggcagacccaccctcaatctattcaagccagcatggctagaataaagccaactggctgagtcttccagccttcatctttctccggtgctggacgcttcctgccctygaacatcagactccaagttcttcagctgttggactctaggacttacacaagtggtttgccagggacccttgagcctttggccacagactgaaggctgcactgtggtcttccctacttttgaggttttgggacttggactgatccaccactggcttccttactcctcaacttgcagatggcctacggtgggactttaccttatgatggtgtgagtcaattcttcttaataaactccctttcacatatacatatgtcctatt

SEQ ID NO: 219597 - DNA, 577 bp, Homo sapiens
ggatgaggcccacccacattatggaagacaatctgctttacccaaagttcaccaatttaaatgttaattttatccaaaacaacctcaagttgtcacagaattaaccatcacagatatagacagacctatatctatatytatagatatagatatttatcttttgcactctctctttttatcttgcttgggtcaaacagacctgaatccaaattcctgccccaacaattaagtattactcgtgtcatgttatggaacctccacaagggtcagtctcctcctttttacaatggaggtaccatagctatttcttaagattattttaagggtaattgaggttatacatataaagcacctggtaccatgtctgacacatagtaaatactaaacaaatggaaacattttcattcattcaagcaaatgtttatgtaacttgattctttccacttccctatctctactgctgtcaccctggtcaggttatcctgatccatctcctcagtgcttcttcagtagcctcctaaattatctcctcacctggccctagggtgatgaaagaaagcctgactgataaattaag

SEQ ID NO: 219598 - DNA, 595 bp, Homo sapiens
ttattttgccctgggctcactacttttatgactcaggttttttggtctaaaaatccctgatcaaaaatataaagtgttcagcaccaaagccaatcatcacaaaagaagagagaatttttcttttttcttttaatgtgagtcttaaaagtggtcaactttgttatgaggtgctatggcctgaatgtttatgttccttcaaaattcatatgttgaaatcccacccccaacaccgacccagtaataatattaggaggtaagcccttttggggggtggttaggtcatgaggactctgcccttgaaaatgggactactgccttataaaagagaccccagatagctgccttgctccttccaccatgtgaggacacagggagaagacgccatctatgaaccaggaaacgggtcctcaccagacactgaatctgctggttctctgctcttggactytctggcctccagaactgtgagaaatgaattttgttgtttataagccaccatgcagtttgtggtattttgttatagcagcctgaacagactaaaaccgaggtgtatttcttggcaattcaatttgttttagaacatgatgggctgtga

SEQ ID NO: 219599 - DNA, 595 bp, Homo sapiens
ttattttgccctgggctcactacttttatgactcaggttttttggtctaaaaatccctgatcaaaaatataaagtgttcagcaccaaagccaatcatcacaaaagaagagagaatttttcttttttcttttaatgtgagtcttaaaagtggtcaactttgttatgaggtgctatggcctgaatgtttatgttccttcaaaattcatatgttgaaatcccacccccaacaccgacccagtaataatattaggaggtaagcccttttggggggtggttaggtcatgaggactctgcccttgaaaatgggactactgccttataaaagagaccccagatagctgccttgctccttccaccatgtgaggacacagggagaagacgccatctatgaaccaggaaacgggtcctcaccagacactgaatctgctggttctctgctcttggactctytggcctccagaactgtgagaaatgaattttgttgtttataagccaccatgcagtttgtggtattttgttatagcagcctgaacagactaaaaccgaggtgtatttcttggcaattcaatttgttttagaacatgatgggctgtga

SEQ ID NO: 219600 - DNA, 549 bp, Homo sapiens
ggtcctcaccagacactgaatctgctggttctctgctcttggactctctggcctccagaactgtgagaaatgaattttgttgtttataagccaccatgcagtttgtggtattttgttatagcagcctgaacagactaaaaccgaggtgtatttcttggcaattcaatttgttttagaacatgatgggctgtgattctagaataaaatatttgcaaagtggtagttaacaaaacagaacaaaaaccaaacgttgaacaaagcgccagtttaaacaatcaaattacaaattgaatacaaactaattaccaatattctycctgatggatgtttgggaaggcaaacatagtttcactgttctactgcatttcataaattacaataatttatgatttacaatgtgcttatgaaggcagtgatctttagaagagctggctgttatattgcctagattgtttaaaactgcaggagtgtagggcgagtctatgtaatgaacagttctaaccggatattttttcttgtttttagagaaaaattgggctgctaaacaga

SEQ ID NO: 219601 - DNA, 483 bp, Homo sapiens
ttctatttgctagtattttgctgaggattctttcatctacgttcatcaggaatattggaatatagttttcctttttcattgtgtctttgccagattttggtattagggtgatgctgtctttgtagaatgagctagggaggagtccctcgtcctcaattttttttgaatagtttcagtagaattgggacaaactcttctttgtatgtctggtagaatttggctgtgaatccktctggtctgggttttttttttttttggttggtaggttttttaaattgcaattcaactttggaatttgatattggtctgttcagagtttcagtttcttcctgattcaatcatgggagatagtgtgtttccgagaatttatttattaactctagattttctagattatgtgcataaaggtgttcctaatagtctctgaggatattttatatttctgtgggatcagttgtaatgtcacctttgtcatttctgatt

SEQ ID NO: 219602 - DNA, 581 bp, Homo sapiens
agatgggtagttgggttcagatgaactttaatctcagctgctctgtaacatgctaatgctaagccttaacattaaggcttattttatagggaaaatatttattttataaggaaaatataatgttggacatatatactattccttcagtacagcatcacgtaaccattcacctcattagtcattatctgcccatcacagctaagatgagtctagctaggatggagggcagaagaaagattctcatgggggttgtagcaattcagaagtacggtctatggtggtcatccaggactgtgtcttttagggaagcatgagaaagtttagaaaaaaaaaaaatagtcccaagatactatgtgtactaacatagaaaaattcaagtccttgaggtaaatgccaaataattgaatccataattttgctattttgaaggggagaatttctgagtgaattctgcacgctgatatctgaatggcttagctctaagctccaggcctcttatttcatcttctctgttgagccatccatcttctacaaattaatctatgcttttkagtcccaatgtggggtgctgattctataat

SEQ ID NO: 219603 - DNA, 584 bp, Homo sapiens
atatactaatcaaataagttatacatgaaagttaaagatagtacacgttcctatttggtaaaaattaggagtgttttggtaaaataatattcrggttaagtgtgtctatatatagaatatatagtatttatatagaatatataatataaatatgtatatagatatatagtttcaaattttggtcaccatggaaccatgcaaagtgatatgcatggatatgtatgagtttcatttaacacagttttgtacaaaagtaaacactactatatatatatatatgcaccattataaatcatacagatagtaatatataaaatacagtaaaatatgtttaatactaaaagtataataaaaataatacaatgttttgttgataaagtacttggggctttatattttgagtccaccattatagatgtcaattttctttgcaggctactgtacatatgcaaggtttggaaatggaaataatttattacataatagaaaatatctaagaaaaaaaataaactttactgttagaatgtggcatggcccaatgggaaaaaatgtatgtagacctcagaagacttggttctgatgcc

SEQ ID NO: 219604 - DNA, 552 bp, Homo sapiens
atttaaacattttcatgactccagaccaaacgaaaatgatcaatattcagagaaaaacaagagagataaaaatcttgagatcaagaagttgaataatctttcttagcagagatttctaagtaaatagggaatcctttatgaggtttaattccaaagtctttattcagacaactattcccttagttaatagaacttctatttggatagagaacatagaattaggagattgagaggcaggttataaagaatccagaagccctgacacttggttagcagaactcctgttggaagccaagcagtctgatcccaggcactttccttttcccctctccttgcccctgtctttatttctttctttattttttgagacaggctcttgctctctctcamctaggctggagtgcagtggtgcaatcgtggctcactgcagcctcaatctgggctcaagtaatcctcccacctcagcctcctgagtagctaggaccacaagtgtgtgccaccacttcctccctgtcttggcaccctgctctttactgccttctcaaacttacc

SEQ ID NO: 219605 - DNA, 560 bp, Homo sapiens
atttaaacattttcatgactccagaccaaacgaaaatgatcaatattcagagaaaaacaagagagataaaaatcttgagatcaagaagttgaataatctttcttagcagagatttctaagtaaatagggaatcctttatgaggtttaattccaaagtctttattcagacaactattcccttagttaatagaacttctatttggatagagaacatagaattaggagattgagaggcaggttataaagaatccagaagccctgacacttggttagcagaactcctgttggaagccaagcagtctgatcccaggcactttccttttcccctctccttgcccctgtctttatttctttctttattttttgagacaggctcttgctctctctcaactaggctggagtgcagtggtgcaatcrtggctcactgcagcctcaatctgggctcaagtaatcctcccacctcagcctcctgagtagctaggaccacaagtgtgtgccaccacttcctccctgtcttggcaccctgctctttactgccttctcaaacttaccaaatgaga

SEQ ID NO: 219606 - DNA, 610 bp, Homo sapiens
gaacgtaagtagaggagtaattttcagttttatattttcaattatcaatgcttgattaaagtgagcaaatactaaataaatgcataaaagtgcttactaaataaatggaaacaaaaagtggctctaataaaaatgttgcaatattttctcatcaataattgaaaagacaaatgattccaagttcattcattcatttgatgtttaatttgtgcatccaactgtccatccatccgtccatccgtccatccatccatccatccatctttctacccacgccttcttttaaaaaatactttttaaacaccttctctggtatggcatgtaagaggattttaaaacaaarcaaaacattacataaaacaccaatggcatctccaagaaggtaaacatcaacagcctagttataattcttggagtggatattttggggtaatatttctcaagaaaaaagtcataaagttgatttatacaagccaaagtaaattatcttggaaattaaaattagagatagaaatttgtatttcatggccttaccctggaggatctcaatttaatagatttgcatacatagttattaactgtgagttcttgatcaaattatttttttcag

SEQ ID NO: 219607 - DNA, 402 bp, Homo sapiens
tatgctgctcagttttctgtgattatatagtgtaaatctttcctctcagtgttataacttgtataactattctttctctttatactttgctattttacactttaaaatgtttcactttaaataaagtagaactgaacaggaatacatgctatgtgtatatctatctatctatctatctatctatctgtctatctatctatgtacctatctatctatctatcacctcagttatccacayctttaggaaatcaaactccttactcattgatgtttgaacgtaggaagcttgtcatttttgcaattcttatttcttggaaagaataatcttgaaagtgatagctcagtgaaatagaacttggaaaatgacgatggctagtgagatggcttgtccctgataattaa

SEQ ID NO: 219608 - DNA, 404 bp, Homo sapiens
tatgctgctcagttttctgtgattatatagtgtaaatctttcctctcagtgttataacttgtataactattctttctctttatactttgctattttacactttaaaatgtttcactttaaataaagtagaactgaacaggaatacatgctatgtgtatatctatctatctatctatctatctatctgtctatctatctatgtacctatctatctatctatcacctcagttatccacacctttaggaaatcaaactccttactcattgatgtttgaacgtaggaagcttgtcatttttgcaattcwtatttcttggaaagaataatcttgaaagtgatagctcagtgaaatagaacttggaaaatgacgatggctagtgagatggcttgtccctgataattaaaa

SEQ ID NO: 219609 - DNA, 595 bp, Homo sapiens
caaagctttgttgaaaatgacatatgaaagtaacagtgtatttttaaagcccctatcccatggaacttggagccagagaaaaattgtataggtcagttcactaggaataggtccactatgaggacctatcttaatattttccttttttgagacagtcttgctgtgtcgcccaggctggagtgcagcggtgtgattatggcttatggcagccttgacctcctgggcaaagtgaaccttgcacctcagcctcctgagtagctgcgactacaggcagtcagccaccacattatctaattttttattttttgtagygagagggtctcaacatgttggccagactggtctctaactcctgggctcaagtaatcctcccaccttggtctcccaaagtgctgggattacaggcatgatccactgcacccacccctgaaaacatactttatataaaccattattttgtttactttatgggaaagatagtctttaaaaaaataaataaataagaaccatttcctcccagattataaaggtgaattatgcttattgtggaaacttctgaaaatacaaggaaatatatagaaggaaaaaaaaaaca

SEQ ID NO: 219610 - DNA, 595 bp, Homo sapiens
caaagctttgttgaaaatgacatatgaaagtaacagtgtatttttaaagcccctatcccatggaacttggagccagagaaaaattgtataggtcagttcactaggaataggtccactatgaggacctatcttaatattttccttttttgagacagtcttgctgtgtcgcccaggctggagtgcagcggtgtgattatggcttatggcagccttgacctcctgggcaaagtgaaccttgcacctcagcctcctgagtagctgcgactacaggcagtcagccaccacattatctaattttttattttttgtagtgagagggtctcaacatgttggccagactggtctctaactcctgggctcaagtaatcctcccaccttggtctcccaaagtgctgggattacaggcatgatccactgcacccacccctgaaaacatactttatataaaccattattttgtttactttatgggaaagatagtctttaaaaaaawaaataaataagaaccatttcctcccagattataaaggtgaattatgcttattgtggaaacttctgaaaatacaaggaaatatatagaaggaaaaaaaaaaca

SEQ ID NO: 219611 - DNA, 402 bp, Homo sapiens
tttagcattgaacgctatgttttctggggtgaagtcatacccagtaatgctgggtcaggacatgcggctgtggcaactcagattcagagctttgttgctgggagaaatctctactgtaagcacagaaaatactgatatggctcaaaagcaggtgcagagctggacctgggttttttggttggctttggattatccttatattctttcctcaaagggaagcagtgggtttgtggccacatgcttgccccaaggccctgggcttttctgctgtaaacaaagggcagctgcctcttcacacttctctgctgctyggtgctgtcccatctgttgggaaagggggtctctggagcctccagtgctgccctgcaaacccaaatccggctgcctgttgtcaggaaccat

SEQ ID NO: 219612 - DNA, 571 bp, Homo sapiens
agctttagcaaaggcagtttcagtggagtggcagggatggaagccagaatggtgtgttgaaggctgcgttgaagctaacaacatgaaagacagctaatgcagtcagctcattaaagacatgttgttgaaaataggagcagattatattatcacaaagcagtgaaaatgatcatttgcagagcaaacttctttctcacaaggcagaaggagggtgagctagggtgaatataagaggctggctgtgattgagctgaacgtaggggcaagaacagagctgcagcctgggagcccttctcataaagagggagatttaggagtcttcttcgttggtcgcccaaagactgtctgcccacttggagataagcaagcaagatctccaagcagctcagccactgcctgctttggctctcatgagacctcctgccaggaatccccattaatcaaagtctgggaacaaaagcagaccagtcagttcccaggagcgctcacatgtcttgcaggctggcttggrctttctgtttctttcggggtcattgctctgactacccacaaatataacttaaaatctcat

SEQ ID NO: 219613 - DNA, 627 bp, Homo sapiens
ggggggtaggggttgcagtgagctgagatcatgtcactacactccatcctgggtgatagagtgagactccatgttaaaagaaaaaaacaaaagaatggtccaattctcaagtatcttggagtgtgccccaatctattgtttccttctaagatctctcttcctggggaagttagaggatcatcagacatttctgtcctttctagtccataggcacagtggggctgttggattatgacctgccctttcctgatcccttgagtccatgggkcatacacacttggcaacctgcccaggaatgccctatacgtctgagtctgggttgaccttggacagtcttctagatctcctaaattgttatttgcagtttgaatcagaccagttcaaaggccacttgaggatggtgggctagctatagaatagctgaaagtcctcagccacactctgggaggccctcctccctggggtttcctttgatggaagggatgaaaataggctaggaaaattactcctaggaaatgagctttgtaagtacctgagattttttttccccctcatttaatcttcctaataatccttagaaggagtgatgttctattgataagcaatcgggtttagaagggcataagt

SEQ ID NO: 219614 - DNA, 627 bp, Homo sapiens
ggggggtaggggttgcagtgagctgagatcatgtcactacactccatcctgggtgatagagtgagactccatgttaaaagaaaaaaacaaaagaatggtccaattctcaagtatcttggagtgtgccccaatctattgtttccttctaagatctctcttcctggggaagttagaggatcatcagacatttctgtcctttctagtccataggcacagtggggctgttggattatgacctgccctttcctgatcccttgagtccatggggcwtacacacttggcaacctgcccaggaatgccctatacgtctgagtctgggttgaccttggacagtcttctagatctcctaaattgttatttgcagtttgaatcagaccagttcaaaggccacttgaggatggtgggctagctatagaatagctgaaagtcctcagccacactctgggaggccctcctccctggggtttcctttgatggaagggatgaaaataggctaggaaaattactcctaggaaatgagctttgtaagtacctgagattttttttccccctcatttaatcttcctaataatccttagaaggagtgatgttctattgataagcaatcgggtttagaagggcataagt

SEQ ID NO: 219615 - DNA, 627 bp, Homo sapiens
ggggggtaggggttgcagtgagctgagatcatgtcactacactccatcctgggtgatagagtgagactccatgttaaaagaaaaaaacaaaagaatggtccaattctcaagtatcttggagtgtgccccaatctattgtttccttctaagatctctcttcctggggaagttagaggatcatcagacatttctgtcctttctagtccataggcacagtggggctgttggattatgacctgccctttcctgatcccttgagtccatggggcatacacacttggcaacctgcccaggaatgccctatacgtctgagtctgggttgaccttggacagtcttctagatctcctaaattgttatttgcagtttgaatcagaccagttcaaaggccacttgaggatggtgggctagctatagaatagctgaaagtcctcagccacactctgggaggccctcctccctggggtttcctttgayggaagggatgaaaataggctaggaaaattactcctaggaaatgagctttgtaagtacctgagattttttttccccctcatttaatcttcctaataatccttagaaggagtgatgttctattgataagcaatcgggtttagaagggcataagt

SEQ ID NO: 219616 - DNA, 627 bp, Homo sapiens
ggggggtaggggttgcagtgagctgagatcatgtcactacactccatcctgggtgatagagtgagactccatgttaaaagaaaaaaacaaaagaatggtccaattctcaagtatcttggagtgtgccccaatctattgtttccttctaagatctctcttcctggggaagttagaggatcatcagacatttctgtcctttctagtccataggcacagtggggctgttggattatgacctgccctttcctgatcccttgagtccatggggcatacacacttggcaacctgcccaggaatgccctatacgtctgagtctgggttgaccttggacagtcttctagatctcctaaattgttatttgcagtttgaatcagaccagttcaaaggccacttgaggatggtgggctagctatagaatagctgaaagtcctcagccacactctgggaggccctcctccctggggtttcctttgatggaagggatgaaaataggctaggaaaattactcctaggaaatgagctttgtaagtacctgagattttttttccscctcatttaatcttcctaataatccttagaaggagtgatgttctattgataagcaatcgggtttagaagggcataagt

SEQ ID NO: 219617 - DNA, 377 bp, Homo sapiens
ggttggggaggggaggggaccgcgggcgcgccctgggacctctctcccagaacggtgctgttgaagccagggtcagatgtcgtggctaaaaaaaggcagccggcggcggcgtgactggcagggtcgtcggcagctgcgggtgtcagtctcgccccgcgtcgccgcgggaggggcccacccaggtagtggctggggagacccgcggggcggcggggggatgctcgccaagctgttgtgggagtctccgagaggccgcagatttcccgggatccacgcaaacaccgttgtcaggacaccttatctgctctcggtatcaccacctggacatggcagtgcctgcccgggagtgagsgcgcggcggggaattctttgcttca

SEQ ID NO: 219618 - DNA, 494 bp, Homo sapiens
ttctgttgtcttctcatatcygtgttgttgataagcatctgatgcctttctagttctttcataggtaattgtttccccctctaaggattttattgttatccttgatttaaaaaattttttttcacttctctttttgttcctatagatatccttgatattttgaagttacactatgatttttttttttaggtgtgggcttgtttttaagtttctccattttattttgtgagtctgttcattttgagttttatcttttgttaatttaggaaaggcttctctattatttagttaaatgttgcttcctccccatattctgcattctctccttttggaacttctttagtaaaataatggttcttctgaatcttattcctgatgccactttaactttgatttcatactttccagtgctctattcttttgtactgcatcttgagagactttgactagccagtccactatttccatcttcatctgtgtttattctgcttttt

SEQ ID NO: 219619 - DNA, 580 bp, Homo sapiens
gccagtgggcagggtccttaaggaggccatctgttttggcaggatacgtactatcagccccgtgccctggagaaacatgctgacagcatcctggcactggtatgtctaccctggcatctgggactctgcatctttcagacccacctgtcctcttgaacttagccctccctaacttgggagcaacagtgccctggggttgggggatgccctgggctctgcagcagacctctccaacacagacacacaggcacactctaaatgtgcatacttggcactcccctttggtatgtagcactgctttctctgggggcaacctgagccgtaaggaaaacatgtttactcttgggaccatctgcaggtgctaagtcctgcagttccccagtgacctgtcctccctggcaactaacctctttggctgcagggacagctgttctttctggcacagttcctgtgrtgacgtttgcgcatctcttggggaccaggccaggggctgtcctgagcagggccaattgaaaaggcttgattaacttgagtagacagagagactgcctttaaatgtgatggaattatgtctggagat

SEQ ID NO: 219620 - DNA, 558 bp, Homo sapiens
tttaagagactgcgttagtattactagaacaggatacttcacgaattgctaagactgtgccaggcactcagtatctcttctgtggagtgcaagcatcaccttttagagttaaaagggtcaaattagtcaacatcttgagtttacaggtgaggacaaggagtcccaaaggggtgcaccttgcagaggtcctatggctactyaacagtagggctaggcaagactagaatttgtgtcatccagagcacgagtccccacccctgggccatgaaccagtattggtctgtggcctgttaggaatgcggcgagtgagcatgaccacctgagctccacctcctgtcagatcagcggcggcattagattctcataggagtgggaaccctattgtggactgtgcatgcaatgaatctaggttgcacgctccttgtgagaatctaactaatgccagatgatctgagatggaacagtttcatcctgaaaccaatcccccgccaaccatccccctgccaccccgtctgtggaaaaattgtcttccacaaaaccagtccttgatgccaaaaa

SEQ ID NO: 219621 - DNA, 540 bp, Homo sapiens
tgctttgaagctgactagggtctgctctagagacttctgatttgacattatrcttttttattgagtggctaatacagactttatttttctgtttgaaaataagagaccaaacattttacctttagttaaatgcttagttttagttaaagcttaactaaattcaaggaaggaagggtctgttatatttcctggttcttgtgaggagtgggagaaataaaaattagaaatgagcgatttccaaatacgcttcaaaattgttggctttagggagatcaagaagaccttacaagttactcttagagttcagattatagaccccccatttttaaaggttatttttgtttttagccttatgagcgcaggagcatctttgtttagttcagtgattagagaatattgtgggtattatcccagagtctagcactttgcttttagctcttttggttagatgcttggttccaagtttcttttaagattaaattttaactaccgatgggtttgttctaaattagcagaatcacttccttgtactcaccaagt

SEQ ID NO: 219622 - DNA, 315 bp, Homo sapiens
gtaaaaaaaaaaaaaaaaaaatcagctggayacagtggcctatacctgtcatcccagcacgttgggaggttgaggcaggaggattgcttgaagccaggagttggagaccagcctggacaatatagtgagaccttgtctgaacaaaaaaattaaataaaaattaactgggcatgctggcatgtgcctatactcctagctatttgggggactgaggtgggagtattgcttgagcctgggtgttagaggcttctgtgagctatgattgtactactgcactccagcctggccacagcgggagaccctgtctcaaaaaac

SEQ ID NO: 219623 - DNA, 402 bp, Homo sapiens
tcagaactagtgaaagagcccagtcacaaaagcacctcctgatgcccaaaatcattttcagctcctcagacacagagcctgaagcaaagattaggtactgtgtgatttataaaggaaagaacctgtaagggatgaagggaagcaagacagggagggaaacaagaaaagatgtggtctcaggtaaagtctagcaaaaargctggctttgtgtacctctgtacgagtcagctgttggctgccagccaccctgtgggtgaggggaataaactccagggtgaggtgattcctgagatggcagttctccgtagaaatggaaatagtaagccattcgaagccaacaactgaagcatctggggggatggtgttggtgtgctagcccatgaagggctcaagaggttccca

SEQ ID NO: 219624 - DNA, 567 bp, Homo sapiens
ccccagttgggaagcatgaactatttttaattagccacacaagttagtaatgtcggtaatggtgctgaaatcacacgggtcagtgttttgaacaaaattcacatggaagtcatatttagtgagcatctacctacatacctggtgctaacagaaaccatacatttagatacatgtatatgtacatgtaaacacacatatgcacacacacatagtgtgaagtaagtgttgctgtcctcattttttaaaacctttatattatagagcaaaacagttgcagaaaaccacacaaattaaatttgtagcagccaggtgcagtggcttacacctgtaatcccaccactttgagaagccgaggtgagtagatcacttgagctcaggagtttgagaccaacctggggaacatggcaaaacctgaaatgccatctctacgaaaaatacataaattagccaggcatggttggcacgtacctgtagccccagttactcaggaggctgaagcaggaggattacttgagtctagggaggtctgaggccacagtgagctgagrtcacactactgtactccac

SEQ ID NO: 219625 - DNA, 587 bp, Homo sapiens
taaagtgccacaaagtcttaggcaaagagataaaaaacctcaggaaagtgaatccctgccagtaacaagtcaattattcttttttgctttaaactgccagttattagattccaaatttatgtaatagctttagggaaaaccacatttgtttatagttatgtatcttcagatgcaaaggtttgtcacctggtttcagcttgaagcrattcctttaagctttgagcttttctcttcagagcagcaacaatgtggaatgtcgaaacttaattttttttgtgaagtgccacgtgcctctggagctgcctaggttccatgactatgtactttgtgttctgccaattttgattcatttttattccttatgaaatctctgtaccagaagatttaggaataaaaagacttgcaacaataacttgttactgcacaagaagcagaaactgctgctgccttactgtttttttcttccctaattcaagaaagaaaaatgttctgaaattgtataccataaagcctccaaagaacttttgcctgtatcaaaacccaaattcaaaagccacaaactggaaaattaaaactttaaaataccc

SEQ ID NO: 219626 - DNA, 376 bp, Homo sapiens
gagtagtcctcagtcagtggttttggctgcctggctcaggtggctgagccctccagttatacattccagaattaaatccccataaaacccaataccaacttaaatggtatattagtcactgatgacttggctaatgaatgagtcccaggaaatttgttagatcttctgtgatgaccatatgtgcctggttgatcattaaggtcagagtcagcaggctatttgctttatcccactcatgagctccaggctcttggagtcctagaatttctttgcagattctattcatagtactcttctgtctggacttaaaactaaagacatatctgttcatccctattcytgaacacccttaagaaagtaggtcagtttgctgtgt

SEQ ID NO: 219627 - DNA, 376 bp, Homo sapiens
gagtagtcctcagtcagtggttttggctgcctggctcaggtggctgagccctccagttatacattccagaattaaatccccataaaacccaataccaacttaaatggtatattagtcactgatgacttggctaatgaatgagtcccaggaaatttgttagatcttctgtgatgaccatatgtgcctggttgatcattaaggtcagagtcagcaggctatttgctttatcccactcatgagctccaggctcttggagtcctagaatttctttgcagattctattcatagtactcttctgtctggacttaaaactaaagacatatctgttcatccctattcctgaacaccyttaagaaagtaggtcagtttgctgtgt

SEQ ID NO: 219628 - DNA, 573 bp, Homo sapiens
atcatttttgtggtctgggcctctgtatgctcatcctttttgggaaggctttccaggtatttgaagggacttgggtgctgtgatctacatcttttgtcactgcagctatatctgccttagggggcacctcaagcccataattctgtggctcttgcagactcatagagctaccaccttggaggtcttgagtagaatcaagagcttcccctggattactaggtagagactcttgttctcatccctgactttctccccaaaaaatgaagttttgctctccatgctaagctgcctgcagcctggtgggggaggagtgacacacgacccctgttgctgccaccactgaggctgcactgggtcagacctgaagcctacatatcactgggtgtcacccaaggcctgccaggatcacttcctgrttaccaccaatgttacttcaaggctctaggactctacaatcagcaagtgatgaatcaagccaggcttgtggccctcccttcagggcagcaagctccccctttgtctaaggaaggtccagaaatgttgtcctggagccatggcctggagtcagtaacc

SEQ ID NO: 219629 - DNA, 573 bp, Homo sapiens
atcatttttgtggtctgggcctctgtatgctcatcctttttgggaaggctttccaggtatttgaagggacttgggtgctgtgatctacatcttttgtcactgcagctatatctgccttagggggcacctcaagcccataattctgtggctcttgcagactcatagagctaccaccttggaggtcttgagtagaatcaagagcttcccctggattactaggtagagactcttgttctcatccctgactttctccccaaaaaatgaagttttgctctccatgctaagctgcctgcagcctggtgggggaggagtgacacacgacccctgttgctgccaccactgaggctgcactgggtcagacctgaagcctacatatcactgggtgtcacccaaggcctgccaggatcacttcctgattaccaccaatgttacttcaaggctctaggactctacaatcagcaagtgatgaatcmagccaggcttgtggccctcccttcagggcagcaagctccccctttgtctaaggaaggtccagaaatgttgtcctggagccatggcctggagtcagtaacc

SEQ ID NO: 219630 - DNA, 609 bp, Homo sapiens
tggccaccactgccccagggccatagcaagtactacctggctactgccagttttcactcaaggacaaagggccattcagccagcttgtgrtgaatgctgctaggcatgagtttcttacttcagggcagtggactaccctctggcccagagtcaatcaggagtcaaggcctggaattgagtactccaggagcctgcttggtgctcttcctcactgtggctgaactgataaccaagctgcaaggctgcaaggctaagttcaccttattcttctctctccttttctcaagccaaatgagtctcttctcatggccaccacatctgtgaatgtgctgggtaacacaaaaagtcagcatagtgcagggtctcattcaaggcctgcattgagtactgcctgggtaacactgatgtttactcaaggcctaaggctttttagtcagcaggttatgaatcctgccaggactcagtccttccctttaagacagtgggtatgcttctagcctagggtgtgtctagaaatgtccaggagctagggcttagaatgggggcctcaggaatctgccaggtgccctattctacgatggctgagctggtatccaacttgtaagacaa

SEQ ID NO: 219631 - DNA, 586 bp, Homo sapiens
gttcaagctttaagaccataaaggttaacttaatcctcaggatgaggatattaaaaatgtgatttttgaatcagttgaaaaaccagtaaaagtcaagtcaataaagctgggcaatagtatcttcaggttttaaaaaagtatgtcagtaagagacagatagtctcatgtggttttgtaacttactctgaaagccaatccacgtgacagcattccaaatttgttatgctgtggcagttccaacggacttagtttgccaaagtgaccctttgaatgacaatatctttttgagtacacaaattatgttttgtattttaatcacaccaatcagccacatattattcaaaaattattgttttctatgttgtcttctaaaaatcaaagattgtaagctccgtgaggtcagaatttttgcctaatatgttcatattcttcacaaggcataatagttttatttctaaggaagtggctattgtggattcactgacagaagtycacacgatgtgtacagtgcttcatgatataattcaagaatcagagagatggcccacatattttaaacaacttttgattttgctatgagatttac

SEQ ID NO: 219632 - DNA, 556 bp, Homo sapiens
cttctactcttgctttaattcttctgggttagacctcctgccatctccacagccttctctgctggatcctgatgctttcaacataaygttgaacctcctggctatgtcagtcctcttccggtccatggcctgaaagcagctgattggttatcagcctgggagtttggttttcttcagagatgggctgagaaaattattctgcttgcctgtcacactagagcagtggtcataactctggctagcgattataattaagtagggtgctttaagaaagttctgagacccagatcccaaccccagagattctgaattgttatggggtatgacctggatattgagattttaaaaatttatgcagccaagtttgagaagcatttgtgttcctcttttctctgaagtatagggtactttaaatatgagacagatttctgttttgacaagactttgggggcagtatttagctgttttctttttgctggcaccttcctcctactatctaattttttggcccaactgtgattaagaatacacttgtattctcatctgagttcttaat

SEQ ID NO: 219633 - DNA, 607 bp, Homo sapiens
ttaattgttcttaaactttgttggacatcagaatcacttgaacttgytgaataaatatctctgagctccacccaaaaactactgagttggatttcagggaatgtctcagagataatatatgctttgtgaaacataaaaagagcatttttttttacattggtgagttatggcatgtgcaataaagtaagttttaaaaactgatggctactgtcccttgcctttggtccagtaatacatatatactttttcaattttgttgaaaagggaatttaaaggaaaggttagtactagttagtgtagtcaaagattattaatcgtggcagttaaagttagttaaattttaggattcagttgtccaaagagaaaataatagttatgataacatttgaatttttgcattggttgttatctgagacttgctctttgtagaaatataggtctgaagcgggagaagtggtcttaagtctgcagctttggataggaactacaactaagaagaggataaatttaaacaatacatgcaatttgaaatcattgacacagacatttgagagctaggagagggaaatgtcaaagattactaaggcttttggttatcactgccctc

SEQ ID NO: 219634 - DNA, 608 bp, Homo sapiens
cttcaattcttacaaccctgctagatattttggtttccattttgaaggtgagaaaamcaaggctccaagagtttaaggaatttcccaaggccacaaagctaaagctgctaaagccaagatttgattccagtctgcctgatgacatgagttgggcttgtcctccctgaaaacacttcccacagtctccattcgcagcttccatgagagcagtgggtgtatcttgtccagtgttagtgaccagcatgatagaaggaagcacagagagtaggggttcaggctaagaatggcagctaaatacattagtgttgggaaagagatatggtatttacatttagctagagattttaacataaaggaagttcattatacttaaagctgactgttaaaacttcacagtaaaaatttaaactgattcactttcccattggcccagtggctctaacttctctcttgttctcccagtccacactagcaaggatcaagggtgctcctcaggttgtgtaaatcggatcatgtcactccttcacttacaagccttcagtgatttcccattgccttaaagattaattccaaactccataaaatagcaaattaagttcttaactttt

SEQ ID NO: 219635 - DNA, 438 bp, Homo sapiens
aactcgggccattgcttcagagggtgcaagccccaaaccttagcagcttacatgtggtgttgagcctatgggtgcacagaggtaaagaattgagatttgggaacttytgcctagatttcagaggaggtatggaaactcctggatgtccaggcataagtttgctgcaggggtggagccctcatgcagaacctctgctatggcagtgcagaagctaaatgtggggtcaaatcccccacacagcagtcccctctgtggtactccctagtgtagctgtgagaagacggccaccatcctacagaccccagaatgatatgtccactaacagcttgcactgtgtacctggaaatgccacaggcactcaatgccagcctgtgaaagcagctgggaggggtgctgtaccctgcaaagccacaggagcagagcttcccaaggacatgg

SEQ ID NO: 219636 - DNA, 525 bp, Homo sapiens
cccaataaaactctatttacaaagcaagcagctggccagatttggccagtgagcttagtttgccaactcctgtcttagtaactccctccatttttttatctaagaagctgcttgttggaaatcaggacttgaactatggtagggggaatattcaaacgtaatctgttcacctttccaaacgaggtactggaatgagcttgcacagcaccacactgactagactattggtgttatttaaggttgactaacacaaactttgagaagtgagttgagctctgatcctaactataggagtcagacagtccacattaatggggataaragcctggggtggtagcgcacatctgtagtcacagctccttgggaggctaaggtgggaggattgtttgagaccaagagtttgagactgcagtgagctatgattgtgctactgcactctagcccaggtgacagagtgagaccccatctccccaatcagcctaaggcatggacagcatcttctctcttgaggtatgagcatgtgag

SEQ ID NO: 219637 - DNA, 606 bp, Homo sapiens
aaggaatactcccgaatcttaacagtggttgaattttggtgacaagtcccaagacagtttttcacattttccttgacaaacaccttttccttttaaaatgagaaaaattaggacctttgttttccaaaaaagtccaattttcacttaaagcatttaaaaattatctatatgctgagaatatgactaagcccatatgtttaaagacattccytatatacgtatgtattttttattattgtttaaatcaagctaggagctaccccagaacaaaaagaaaaattcttccttagccccttctagctataggccaatacttaggcagcatgtccaagacacctcaagccaaatgaagaaggaagattccatagcattttttaaattaaaaagccagcaggcaaatctttgagactagacagttcagcttgagggtctgagaaagcctctgctcatctcaaaccagcaacaaatctttagaaagtaattcacatgccatgagattgctcgtggcatgaatgtgacactataattcaacatcctgaattaagagagatgtgttattttagcttaaagcagcagattaaaaataaaaatcctaaactactacac

SEQ ID NO: 219638 - DNA, 606 bp, Homo sapiens
aaggaatactcccgaatcttaacagtggttgaattttggtgacaagtcccaagacagtttttcacattttccttgacaaacaccttttccttttaaaatgagaaaaattaggacctttgttttccaaaaaagtccaattttcacttaaagcatttaaaaattatctatatgctgagaatatgactaagcccatatgtttaaagacattccctatatacgtatktattttttattattgtttaaatcaagctaggagctaccccagaacaaaaagaaaaattcttccttagccccttctagctataggccaatacttaggcagcatgtccaagacacctcaagccaaatgaagaaggaagattccatagcattttttaaattaaaaagccagcaggcaaatctttgagactagacagttcagcttgagggtctgagaaagcctctgctcatctcaaaccagcaacaaatctttagaaagtaattcacatgccatgagattgctcgtggcatgaatgtgacactataattcaacatcctgaattaagagagatgtgttattttagcttaaagcagcagattaaaaataaaaatcctaaactactacac

SEQ ID NO: 219639 - DNA, 470 bp, Homo sapiens
ttatgttggagaaaccacaagaggtcactggagcactttcttttatcattaaaagcaaagtacaagatttatgaamtgcttcccgcagctgagcaagaatacttggtataaatggtagctaaacaactaaatttaaagccttatttaaaactattatttctatttttttgttaattgagaagttaaggtaaagtgaatctaaagcaatcagttacaatctctgaaccacttttttttgcataataaaggtctatccctgaatccaaattgcagtgtttttatttagcttaaacatcctttgcctacagaattattatcagttaatcttctctataaaatatctgatatagtttggctgtgtctcacccaaatctcatcttgaattgtagtccccacaatccccatgtgtcatgggagaaacctggtgggaagtaattgaatcatgggggcagttatccccatgctattct

SEQ ID NO: 219640 - DNA, 390 bp, Homo sapiens
aacatgtttagatcacagggcatrcgttcttagataatttgtgacaagaaatatcagcacataaaaaaggaatctattgattctaccttctgagttagaaagggcgtcactgagaatacactcgatgtaagctccaaaaaagattaaaagatgaatttttcaggatgtgagcgaaggacctttcaggccaagggaacagtatgttagaagcacagggggtgaagtatttcttttttaaatttgtttttgtagagatggggtttcgccatgtggcccaggataatctcaaattcctgggctcaagtgatccacccaccttagcctcccaaagtgctaggattacaggcgtgagccaccgtgctcagagcgtgaaaagattatcaccacgtt

SEQ ID NO: 219641 - DNA, 390 bp, Homo sapiens
aacatgtttagatcacagggcatacgttcttagataatttgtgacaagaaatatcagcacataaaaaaggaatctattgattctaccttctgagttagaaagggcgtcactgagaatacactcgatgtaagctccaaaaaagattaaaagatgaatttttcaggatgtgagcgaaggacctttcaggccaagggaacagtatgttagaagcacagggggtgaartatttcttttttaaatttgtttttgtagagatggggtttcgccatgtggcccaggataatctcaaattcctgggctcaagtgatccacccaccttagcctcccaaagtgctaggattacaggcgtgagccaccgtgctcagagcgtgaaaagattatcaccacgtt

SEQ ID NO: 219642 - DNA, 608 bp, Homo sapiens
tgagtttggaagagcacctggatgaatgggaggaaagggtagcttttgcagaatgcaggggtagataaggcagaggctgggctaaaaaatggcaaagaagtcagaatgtgatgggcagacaggagggaacagagaccttcaccagtgaaagaggggaaagctgcaatgtctcaaggtatgagggagcaggtgccctgagagtcrttcagcacagggttaaaacaagatgtctcctctaactcagttctataacagttacccaagagcctgaaagaatggaggacagagttaaaaagcagagggaaaaagaattttcattgcaagtttgcctgaatagagatcataataatggtagaaagtgagagaaattataaaatttcctagagcaagcaaaaaataagaacagattcagaagctgtaaaggagaaaagacagttaacacagatgagagaatcaatgtgtgattcgagctgaaggctggttaccctgggatttaatttgacagggttagtattagatgaatcaggttcagggaaagtcagtttactcacctggaaaatggggataataacggtaccgagcccaatggaatatgaggactaaatgtg

SEQ ID NO: 219643 - DNA, 324 bp, Homo sapiens
attatttagtttgtccctgttagaacgtccattttgattaagcattgtggaaaaccaaatcctccaattttgcatatctgataattggaagaaatttcagcagactagctccagttctacacatcctaagctttgtttacctgaacaacctgcatagttycagggctaggtagatactgcatgttcacagtgaaacataatctctggacctatatacttcatgtttcatgttggatgcatcagcaccgtgaacaatagtggtattcttgaaagtcattcctatacctagacaactaacaataaataacaatgccaaaaatgacc

SEQ ID NO: 219644 - DNA, 430 bp, Homo sapiens
actactgttaggttttttttttgttacttgtaagaaaaatcaccctaactgatagaaggctcttccacaaagagttttaccctcctgcttttctctgctcccctcacaaccccataatacctagtaaaatgtggccaaacatgatgctacacatttagaaccacagaatgtcagagctgaaagtcacrtctccaattctcagatgataaaataagaaatttagaagtgattcctcttgtttgagaggttgacccttgcctagtgcaaatgccaatggaaaaaggaaaagacgcatcccccatgtgaactgtggtgtgaatgactctcctaagattagcctgtctgtggacagagaacatgagccactagcaactagaggtgaaggaggctctttaagaagggggaaaggtatagaaagggaatctggggc

SEQ ID NO: 219645 - DNA, 430 bp, Homo sapiens
actactgttaggttttttttttgttacttgtaagaaaaatcaccctaactgatagaaggctcttccacaaagagttttaccctcctgcttttctctgctcccctcacaaccccataatacctagtaaaatgtggccaaacatgatgctacacatttagaaccacagaatgtcagagctgaaagtcacgtctccaattctcagatgataaaataagaaatttagaagtgattcctcttgtttgagaggttgacccttgcctagtgcaaatgccaatggaaaaaggaaaagacgcatcccccatgtgaactgtggtgtgaatgactctcctaagattagyctgtctgtggacagagaacatgagccactagcaactagaggtgaaggaggctctttaagaagggggaaaggtatagaaagggaatctggggc

SEQ ID NO: 219646 - DNA, 397 bp, Homo sapiens
gctgacagaagagcccatgggctttaagtgaacattggtggcggcctgacggagcccmtctgtggaccagtggtggtggtggccacagagaaaggctcctctacttatggaaaggggagagaagactacaagtctgcaaaaaccacaacactatttggcatggggcccaagtgcttcaaatacctggaaagccttcccaagaaggacaggtacaaagaagcccagactgtgaagactgtagtacatacataactcttcaatgctgagacactgatgaacatctgtaagcatcaacaccatccaggaaacatggcctcacaaaatgaggcactaaggaccaattcttcagaactaaatgaggcactaaggaccaattcttcagaaacagagatttatg

SEQ ID NO: 219647 - DNA, 516 bp, Homo sapiens
gaaaatcaccttcactaaaaggaagacaggatgaaatgaaagaagagaagaccacaaaacaaccagaaaacaaataacaaaatggcaggagtaagtccttacttatcaataacaacattgaatgtaaatggactaaactcttcaataaaaaaaagagtggctgaatggwtgaaaaaacaagacccccatgatctgttgctgacaagaaacacactttgccttataaaaatacacagagactgaaaatgaagggatgaaaaatgatattctatgccaatggaaaccaaaaaagaggagtagctgtactgcagtgtatcagacaaaacagatttcaagacaaaaactgtaagaagagacaaggaaggttattatataatgataaaagtgtcaatcaagaggatataatgattgtaagtatatatgcccccaacactggaacactcagatatataaagcaaatattattagagctagagaaatagacctccaacaaaataatagctggagacttcaaca

SEQ ID NO: 219648 - DNA, 538 bp, Homo sapiens
aactaggctgccaatgaaatgaaaataaaatgaaactataattcagagaagataagcacagatgcagccagagggcactacagttagttgtcaccatttcttacagagtagtagaccagtaccttaagtatataagtgtatgactgaggctgggaagtggtgggaccaggttttgcagtttttgtacagttttgaattgtgcactagtttgaaactttgccataacttttgcttgatggttgacatatttgctaaaattaaagactttcataccaaatgygatgaaatttttctagaacaaaatgttcagaatcagatggaacaggattagaactcagctatcacaaatctcatttgcatagaccagtttgcttacagttctttttctttaatttggattaagaaacatgggtataccttgatctaaaggctgaaactcaagatttaggaatttaccagaacatacaaatgaaaaagatcacagactgatcttttataagacattatttgatgctttgtgtttcaaagggataatgac

SEQ ID NO: 219649 - DNA, 553 bp, Homo sapiens
agggataagttaggaacagtcagggttgagatcaggaaccaactttgccattgaacatgcrtgggaggggtggcctgccttccaaatcacaaaataaaagggatccaaccaagctggcagctttatccagggtcttctgtggtgaacagagtgccacagagcaccctgcagacggggtaatcatcaggtctggtcctagctaaatggaggggcaaaaggacccatttgaattgaaacaagtccttagtcagcaactgagctgactcagggttcaactcccaggaagttcacagttgaagtagtctgggcctgactaagaattcacacgttctccagctccagacacatgacctgtattttagaacagagtccagtgccagcaggagactggagaacgaatcagtgaccagtgtgcactgcagtctgcagccatattgcagtctccatgaaacccttggttttggtctttcctcatttagggggctgggctttcatgtgcatttgaaagccaacatcctttagttcttggaaatgtcacttattacttctttag

SEQ ID NO: 219650 - DNA, 607 bp, Homo sapiens
gactcattttagggacagcttcctccctccgtcatgatcccaatctatagaaagtaaccactacagaattttccaaggatgctggtggaacttaccaatagatatctcaaacatagagaggggctagtcaagtgggtcacacatggtagaccttctccaacactcctaactccattaagtctctggagtctctcctccacattattccaaagagtttctaacatatatctgagtttaatataggctgccactgagtccctgwttcagttgaacaactgaaaaaccagtaaagctgctcctcactgttttagctatgtcctcaaaataagaatttttggtaatatataagaactatatcaataatttcagttcattctaaagaaatgtttctccctgccttaacacgctgagaacctattcctacacattcctgcaaatgaaaattagccaaatcctatcattctaactgcctcctcccaggatagattttgtatttgttctcctggggcatgctgcgatctaattctctttgcagctctgatggcactgaaaggggagaaggcaggcataaaggggatcagcatccccttggaaggtaactaccttg

SEQ ID NO: 219651 - DNA, 607 bp, Homo sapiens
gactcattttagggacagcttcctccctccgtcatgatcccaatctatagaaagtaaccactacagaattttccaaggatgctggtggaacttaccaatagatatctcaaacatagagaggggctagtcaagtgggtcacacatggtagaccttctccaacactcctaactccattaagtctctggagtctctcctccacattattccaaagagtttctaacatatatctgagtttaatataggctgccactgagtccctgattcagttgaacaactgaaaaaccagtaaagctgctcctcactgttttagctatgtcctcaaaataagaatttttggtaatatataagaactatatcaataatttcagttcattctaaagaaatgtttctccctgccttaacacsctgagaacctattcctacacattcctgcaaatgaaaattagccaaatcctatcattctaactgcctcctcccaggatagattttgtatttgttctcctggggcatgctgcgatctaattctctttgcagctctgatggcactgaaaggggagaaggcaggcataaaggggatcagcatccccttggaaggtaactaccttg

SEQ ID NO: 219652 - DNA, 546 bp, Homo sapiens
tctggatagacttgagcttgttgctttagttttatatgtgaagactggaaaaattctgttttgttttgaaaaatattttgagctaaaaatgttgtattccacatttgttaggaatggaagtctttaaaatatgaaatatttccaattgaagaaaaatagtgaacatgaactttatctgaataagattaatgaaaattatatgttgaaaaagtaaaatagttatgtgtactaacagtgactactaacccaacaatataaaattaagtaaaaatattattaccatgttaaatacaaattaaaattaattataaaaaagttaagatctatgattaaagtattaaaataaaatgagactgtattcacaaatttaaaagcaaattggtgaatgacatattttttgaaataataaattctttggcatattttatattttttattataaatgaaaattatttatttgaaatatttaaaggaacaaaatatttgcagctctattttattgagaaagkaattacaaaacaaaaacaaggagtttttgtaattaca

SEQ ID NO: 219653 - DNA, 417 bp, Homo sapiens
ccgtgtcctgggcctggcgctcatggcatgttaacggcggtggggtgcccctgtggttgtgggcgccacccaggccagctgcccgctggcgaaatgggcttggtctcttcctgctccgcacactttgacatcagctcgttgtggctccctgtctctgctctcccgggtggccagtgacgctgtgcggggtgcagcgcctgtgctgtctgcttctgaaggtaattctcccctcctcagggtactctgtacattctgcrggcaggggcctcccagggtctttcctctaggaaccccgtccgctctcagacctgctgcctctgggtccagggcccgggtggctttctttcctctttacagccccgtctcccacactttctgctccacttacaggactggctgccaggtgggccactcaaa

SEQ ID NO: 219654 - DNA, 607 bp, Homo sapiens
aactatagtacacctgttattagattctagtctcgcctaatgctttaaagtttcctttgttttctagtttggactgaattttaaaattttttctggctacaagtctccaaaataatgttttcacttttttcccttctttcctccctgcccctcatttttcttgatttgaaactactaaaaattaagctgtgccttcttaaaggctggagcctggagcacatgaggagaattcacagaagtgcctggaaagggaactgcggtggatcttacagagacttgaaacatgtggagaagtttggctyttattcataaaggacaaagtgctgcctccacctccccacctgtctagttttattcagtgatgtctatcctcatgacttgggccattttcatcatcacgtctatttggttacctaggtctgccgttttttgtttttgttttttcccaaatgctttccacataagatggcctaggtgtcaattgcttatctcagtggaatcatttctactcacctataaaatgggagtaataaaaatgctatgtatccgattgttgtgaggatgaaatgggaatacttggacatggggcctggttgctggtggaggc

SEQ ID NO: 219655 - DNA, 607 bp, Homo sapiens
aactatagtacacctgttattagattctagtctcgcctaatgctttaaagtttcctttgttttctagtttggactgaattttaaaattttttctggctacaagtctccaaaataatgttttcacttttttcccttctttcctccctgcccctcatttttcttgatttgaaactactaaaaattaagctgtgccttcttaaaggctggagcctggagcacatgaggagaattcacagaagtgcctggaaagggaactgcggtggatcttacagagacttgaaacatgtggagaagtttggcttttattcataaaggacaaagtgctgcctccacctccccacctgtcyagttttattcagtgatgtctatcctcatgacttgggccattttcatcatcacgtctatttggttacctaggtctgccgttttttgtttttgttttttcccaaatgctttccacataagatggcctaggtgtcaattgcttatctcagtggaatcatttctactcacctataaaatgggagtaataaaaatgctatgtatccgattgttgtgaggatgaaatgggaatacttggacatggggcctggttgctggtggaggc

SEQ ID NO: 219656 - DNA, 591 bp, Homo sapiens
acatgagtcacccgcctctaacacgaatccctaaatctacaattgtgtgctcaaatagatattcctggcacttgtcatcactttgcattarttttgtgttttctgttattttattctgtagtttccaatgactggttcattttttaacaatagcgaacaattacacagtgcttcgtttatcctacacactgttccaggtgctttaggcaaattaattagttgtgacaacaacctaacgtggtgcatgctattattgtccccgaagctcttacacaggtgcgttttggaggtggggttcccaccctggcacccagagctcacccactttctctgcccccttttgctctatcatcacctgggccaccattcccatgacctttgcatatcctcggagtgtttcctgtggctactggcacccagaggacctcagtgtgtacttctttgcctaatgttgtgcaggccctatctcggaatgttccattccagatccctccaccatgggctcattgtgaaataaacaatgcatggccactaaagcagttctttgaaaatgcagcgtcaacacacccacattgacagcaatgcaaagtc

SEQ ID NO: 219657 - DNA, 602 bp, Homo sapiens
aatatacgtatatgcaacatgagtcacccgcctctaacacgaatccctaaatctacaattgtgtgctcaaatagatattcctggcacttgtcatcactttgcattagttttgtgttttctgttattttattctgtagtttccaatgactggttcattttttaacaatagcgaacaattacacagtgcttcrtttatcctacacactgttccaggtgctttaggcaaattaattagttgtgacaacaacctaacgtggtgcatgctattattgtccccgaagctcttacacaggtgcgttttggaggtggggttcccaccctggcacccagagctcacccactttctctgcccccttttgctctatcatcacctgggccaccattcccatgacctttgcatatcctcggagtgtttcctgtggctactggcacccagaggacctcagtgtgtacttctttgcctaatgttgtgcaggccctatctcggaatgttccattccagatccctccaccatgggctcattgtgaaataaacaatgcatggccactaaagcagttctttgaaaatgcagcgtcaacacacccacattgacagcaatgca

SEQ ID NO: 219658 - DNA, 605 bp, Homo sapiens
atacgtatatgcaacatgagtcacccgcctctaacacgaatccctaaatctacaattgtgtgctcaaatagatattcctggcacttgtcatcactttgcattagttttgtgttttctgttattttattctgtagtttccaatgactggttcattttttaacaatagcgaacaattacacagtgcttcgtttatcctacacactgttccaggtgctttaggcaaattaattagttgtgacaacaacctaacgtggtgcatgctattattgtccccgaagctcttacacaggtgcgttttggaggtggggttcccaccctggcacccagagctcacccactttctctgcccccttttgctctatcatcacctgggccaccattcccatgacctttgcatatcctcggagtgtttcctgtggctactggcacccagaggacctcagtgtgtacttctttgcctaatgttgtgcaggccctatctcggaatgttccattccagatccctccaccatgggctcattgtgaaataaacaatgcatggccactaaagcagttctttgaaaatgcagcrtcaacacacccacattgacagcaatgcaaagtca

SEQ ID NO: 219659 - DNA, 561 bp, Homo sapiens
cctccctgtcctgtgtccagtcgactccaatgctaaagggaacctatgactcttatattccacgtggcgtggctctcaccagtcctgcttcttcctcacaacttctctcctcgtggtcttcttatcctgtgtcttttcccttcttaatcacagtgttatagataaagggtccctcgcctcatgaaatccagtccccagctgatttgcttgcctggcatacaacttttaagtactctccactgcagtctataaagccaggacaataacactcaccctcacacctcaggattttgcacattaacttgttaatggtttggcaaacattagccccaccataaaggctgagataaaactctgtcttccctttctgttctttttttttttttaactaaagctaaaaatcttcytgtgcattagaaagctgatattttctttatgataactgtaaaaatcagcaagttggatgcactggggaaaaaaaccaaattgcacatacctgtacttcactttttatctaaccaaacagtgcaatgttatggggacacagatgccttctctgtg

SEQ ID NO: 219660 - DNA, 267 bp, Homo sapiens
tcttcacgggcctcaggctcttcccatgaaaaaattaagtctacgtttcttttgaactctaaaaytcaaagacttataattttactttcccacaatagttttatataggagtattgacccaatattgcaatggttctcagactttggagagcatgaacatcactaggggagtgtttcaaaaacagatgccttggttgcaacttcattgattctccactatagactgttaaccagacatctgtgcaagtcttgaagacttaagcattg

SEQ ID NO: 219661 - DNA, 381 bp, Homo sapiens
agacagggaaatactgggtggaagagggcagctccctggcagaggccccgccccaaagcctggaaacctgcaaccctaaatgggaacaggcactcctgttttcatgcccaaatgttgccttttggcctgccatgktcccctatcctgtacccatataaaccccaaacccaggttccacgagcagatgagcagaagaatggagtggtggaggaggagagaagagaaggagcgtctgaacgtctgctggggacagtcagagagatcggcccagggacagccaaactccagggaaagatcatcttcccacgccattccctttccaggtccccatctgtcctgctgagagccacctccaccaccaaataaaatccctgcattcac

SEQ ID NO: 219662 - DNA, 381 bp, Homo sapiens
agacagggaaatactgggtggaagagggcagctccctggcagaggccccgccccaaagcctggaaacctgcaaccctaaatgggaacaggcactcctgttttcatgcccaaatgttgccttttggcctgccatgtycccctatcctgtacccatataaaccccaaacccaggttccacgagcagatgagcagaagaatggagtggtggaggaggagagaagagaaggagcgtctgaacgtctgctggggacagtcagagagatcggcccagggacagccaaactccagggaaagatcatcttcccacgccattccctttccaggtccccatctgtcctgctgagagccacctccaccaccaaataaaatccctgcattcac

SEQ ID NO: 219663 - DNA, 307 bp, Homo sapiens
gcttggcctgcatcctgggatggcagaggaatcctgaggttgggctagtctgccaggccctctctctttgcaacagggtcactaatctaggacccgcccacgtgcttctaatttattcattaatattttgaagttcaaatgcgagtcctctatttatgcatgttggaaattttgaaattgccactttgagtaattatgtttatttcatgaaaartaaggttaaaagcaaagtgcaaacaaatgacctaagagccccgttgagtgaaacgtgggatcacctcttttctctgacacgttcaactcattc

SEQ ID NO: 219664 - DNA, 586 bp, Homo sapiens
ggcttggtgaggatgaagtggcactrccggtaaggggcaaagctggaataagcccccagactggtgtggttcaaaggttgatcttggctaggcatggcggctcacccctgtgatcccagcactttgagaggccaaagcgagcagatcatttgaggtcacgagttcgagactaacctggccaacgggattaaaccccatctctactaaaaaaaaaaaaaagtacaaaaattacttttcttacattagagtgtaagtggagcttacactctaatgaggaacgctgaccaaaaacaggaagggaaactcatataatacatagcacaattatgattgtccaagcgccatgaaaaaatgaaacagggctgaagagttgttggcaaagacaggcttcggtatagcgcccttgctgtgaagaaagcatgtcaacagagatctgtatggtgacaaggagctcactgctctctgaaccacaaagtaaggatagggttgggagatgatcttggccaagaggaacttcatgtgcaaaggcctgggggaaagcattgaactgggccagttcaaggggtgaaaggatctgcataaccct

SEQ ID NO: 219665 - DNA, 586 bp, Homo sapiens
ggcttggtgaggatgaagtggcactaccggtaaggggcaragctggaataagcccccagactggtgtggttcaaaggttgatcttggctaggcatggcggctcacccctgtgatcccagcactttgagaggccaaagcgagcagatcatttgaggtcacgagttcgagactaacctggccaacgggattaaaccccatctctactaaaaaaaaaaaaaagtacaaaaattacttttcttacattagagtgtaagtggagcttacactctaatgaggaacgctgaccaaaaacaggaagggaaactcatataatacatagcacaattatgattgtccaagcgccatgaaaaaatgaaacagggctgaagagttgttggcaaagacaggcttcggtatagcgcccttgctgtgaagaaagcatgtcaacagagatctgtatggtgacaaggagctcactgctctctgaaccacaaagtaaggatagggttgggagatgatcttggccaagaggaacttcatgtgcaaaggcctgggggaaagcattgaactgggccagttcaaggggtgaaaggatctgcataaccct

SEQ ID NO: 219666 - DNA, 570 bp, Homo sapiens
tgggacactgcctcccttctctcctgggtataccaaacataactgaacctgcgctggtttctgcttgtgaatggtctggtttgttctccagagtgagtcactttggttgtgtttcgtctacactcttctcttgcagccaggggagaccaaactccaagatctgcagcaatcaggttccacatgaggggctcctctgtctcccaggcgttctayatcggctcattcattccgttcatgtcgtcatccagcaacacatacgtcccaaccctctgggcttcaggtcgcacagaggcagctgacttgggtcactagttatttcttcctcttttcactatcatctcactgtcctgggctggtgtttctcaactgcgggcaatttggtcccttcaggggacattttgcgatggctgcagacatctttggttgttaggactagggatgggagtgttcctggcctccagtgagtagaggccagggatgctgctcgacaccctacactgtgcaggacagccccacaaaagaagtatccaggccacaatgccacaaatgccaaggtgaagaaaccctggt

SEQ ID NO: 219667 - DNA, 607 bp, Homo sapiens
tgtcttctgtgactgtcctcttcagcacttttccgggggatttgggcacagatccatttttgctgtctatcacagttgtggttgtagatgcatttcctaatcaaacattcagaaaggaaaatataatttagagattcatggtaaatattgatgatgagaaacactgactatatgagtgctgaacctgtttatactgctttctagagcagcacaactccttagtggcaggacaaagcctccctgcccactarcacattatcttttcctcagcatttactattctccctaaaactcgtgcgctcatataatcagtgtttctcatctcctaagtcctctgagggagaatcaacacaagtgataaaatggttcaaatggataaaacttcttctgaatattttaacttaattgtataattgacccatctagtgaggtcatctaatgaggtcattcatgttttgtttgtttgtttgtttgtttgtttgtttgtaggggcacagaagatctaagataatgatgttagaaagtcttactatatccagtacctcttttattcctgattttaagagtccacatgttcatgagagaaaattcaaaaaatataaaaata

SEQ ID NO: 219668 - DNA, 618 bp, Homo sapiens
taacattatctggcactccttcctacctacccactccattcactcttccattgagtggaacggrtgaggagtctctcccaggccgcttttataaggtcactaattccattcatgggctccaccttcctgccctaatcactccccagtggccccaactcctaatgccatcaccttaggaatgaggatttcaatgtgtattttggagagacacaaacattcagaccatagcaatgaaggtctactgccaggaaagggaggtctgggaaacaagggctggttccatttctagtcccaccactagaaaaagaaattcacttaatggaacagtggattgagtgaaattcacttaatggaacagtggatggagtgggtggcaatttagggctttcatgaaaagtgtcaggagacatgtgacatcagtttacatataactcacctgcacatgtactgccaaacttaaaataaaataaaaaaaaaagaaaatgccaacttcataaggtagggggaaagtgaatttacaggagttaaaataagaaggaacattagcactgttgagaagtaggctatcaaatcacagcaagtgccttcatttgctcaggctgctttgacaaaatacta

SEQ ID NO: 219669 - DNA, 607 bp, Homo sapiens
tccttaatgtttttaaacatgcatacatacatcaaataatattttcttatatcaaaaaatttttgtacatttgttgagatggtcatatgagttttctcccttatttggttaatatgataaattatattaatgattttctaatgttaagccaaacatatgcctggggtaaacccaaattagacatggatgcagcatcttattatatattctggrgtagttttctattttttttttttttgcttaggacttctgcatctatacgtataaagaggctggctgacttgcaatttttttcttgtgattattatttctagttttttattgaggttattatgaactgttaaaacatattttagagtaatgatttgttatctagtctctagaagattttgtgttaaaacttgcattcattttttcttaaatatttagtaggatttacaagtgaaggtatctgggtctggagttttttctttgagaaaatttaaaattatggatttaaatttattttttccagatatctatagtttctagatcttcttttgttagcttttataatttatatttttctaaagttttgtgtactagtttgttcttgcattgttataag

SEQ ID NO: 219670 - DNA, 607 bp, Homo sapiens
tccttaatgtttttaaacatgcatacatacatcaaataatattttcttatatcaaaaaatttttgtacatttgttgagatggtcatatgagttttctcccttatttggttaatatgataaattatattaatgattttctaatgttaagccaaacatatgcctggggtaaacccaaattagacatggatgcagcatcttattatatattctggggtagttttctattttttttttttttgcttaggacttctgcatctatacgtataaagaggctggctgacttgcaatttttttcttgtgattaytatttctagttttttattgaggttattatgaactgttaaaacatattttagagtaatgatttgttatctagtctctagaagattttgtgttaaaacttgcattcattttttcttaaatatttagtaggatttacaagtgaaggtatctgggtctggagttttttctttgagaaaatttaaaattatggatttaaatttattttttccagatatctatagtttctagatcttcttttgttagcttttataatttatatttttctaaagttttgtgtactagtttgttcttgcattgttataag

SEQ ID NO: 219671 - DNA, 494 bp, Homo sapiens
ttttttaaattgttcaaatcatccatgatacaaaatttgcagtgacaatgagcagaaaatatagctgtgtagtgtcagcccttgttaggttccgttaagaagctttttcttgtagtttttattattatttgtaataggaactatttttctccccaccccataagcacatagtatccatgaaaatgttccgtttatgagcttaaatgtttcttattttttttcctatttatttttggttatcattatgactgtaatttaaaattcatgctacttttacaatgcaaaaatgaaytgaggctattcagttattatactaaaggcttaggaatccatagagacttaaggcctccaatactgttggcattaatttttaatcagttaacaatatttaatatgagagaaacataaaacagtgcaactaagcaattttaaaatcatctacattgacctttgtgttgaatatatcaatttgaaaagaaaatggttaagatttt

SEQ ID NO: 219672 - DNA, 584 bp, Homo sapiens
tcataaatcttatgattatttcactttgaaacttgctgaaaataatttagtataactaaagaatgtcctattcttaacactggtaattcgcagtgcacatgacattattgtgaaggtgtaatgatttttcaaggagtaaggagatcaagagtacatttsatcaatgcagaaatgacaaaaaaaaaaaaaagagacaggaagtaggtgagaattagtagtctgtgggatgtagccctgggatgactgggataccaacttaccttgccaagaaattgggtaaaattcctgatttaaatactaaattttcggtcaggcacactgttgctataatactataaaagctggatgtttcatgtttctgattcgtttttaacagttattatgtttcctagttccctgtcatcccatctgagtgttctcccattatttgaacctctattgctgatttccatccccacatacgctactttgagcttactttgtatgtatagagaccatttccagttcatgaagaaataaaaaaaaataccaactgtcagaaaggtaatcattaaacgagtttcttctggcttacaaagaagaat

SEQ ID NO: 219673 - DNA, 584 bp, Homo sapiens
tcataaatcttatgattatttcactttgaaacttgctgaaaataatttagtataactaaagaatgtcctattcttaacactggtaattcgcagtgcacatgacattattgtgaaggtgtaatgatttttcaaggagtaaggagatcaagagtacatttgatcaatgcagaaatgacaaaaaaaaaaaaaagagacaggaagtaggtgagaattagtagtctgtgggatgtagccctgggatgactgggataccaasttaccttgccaagaaattgggtaaaattcctgatttaaatactaaattttcggtcaggcacactgttgctataatactataaaagctggatgtttcatgtttctgattcgtttttaacagttattatgtttcctagttccctgtcatcccatctgagtgttctcccattatttgaacctctattgctgatttccatccccacatacgctactttgagcttactttgtatgtatagagaccatttccagttcatgaagaaataaaaaaaaataccaactgtcagaaaggtaatcattaaacgagtttcttctggcttacaaagaagaat

SEQ ID NO: 219674 - DNA, 674 bp, Homo sapiens
gattcaacttaaagtcaccagctgcattagctcctaatgatagagttagcctgtcctttgaagctttgaagccaagcattgacttctctctaggagtcaattgatttataaaaatcctaaatggcatcttctttcaatataaggctgtttcatccacattgaaagtttgttgtttagtgtagccattttcatccatcatcttagctagatcttctggacacctygcagcatatatcctctacattagcatttgttgcttcaccttgcacttctatcttatggagatggcttatttcactaaatctcataaaccaacctctgctaccttccaacttttcttctgcagcttccttacttctctaagccttcacagaattgaagagagttagtgccttggtctggattaggctttggctgaagggagtgttttggttggtttgatctattcagaacacttgaattttcttcagatcagcattaaggctgttttgcttttttatcatttatgtcctcaccagggtagcactttttaatttctttcaataacttttcctttgcactcacaacttagctgtttggtgcaaaaggcctagcttttggcctagctcagctttgaacatggcttcctcactaagcttaatcattgtagcttttgatttaaaagaagagatgtg

SEQ ID NO: 219675 - DNA, 342 bp, Homo sapiens
caaatggtctgaggtgcctgacatccaggcattcttttacacatcagtccctctatagtctctgttcccaatgcaactcatcccaaatcttcctcctttccctcccacctgtcccctcagtcccaaccccaagcatcactgagtctttctactcttccttttctacagacacatctgacctctcccctcctcgccaggccgagctaggtcccaattcttcctcagcctccggtcctccaccctataatccttttatcayctcccctcctcacacccggtccggcttacagtttcattccgtgactagccctcacctgcccagcaatttactcttaaaaaggt

SEQ ID NO: 219676 - DNA, 543 bp, Homo sapiens
tatccctcgtgcagattttctccttctcatctggccactctcacccactccctcactgaaacttccatctatcaatctcttcccacacaaggcaaatggttyttggaccaaagaaaatatccccttccagcctcacaggcccattctattctgtcatcatttcataacctcttccatgtaggttacaagccactagtccgccttttagaacctctcatttcctttccatcgtggaaatctatcctcaaggaaataacttctcagtgttccatctgctattctactactcctcagggattgttcaggcctcctccctttcctacacatcaagctcagggatttgcccctgcccaggactggcaaattgactttactcacatgccccgagtcagaaaactaaaataactcttggtctaggtagacactttcactggatgggtagaggcctttcccacagggtctgagaaggccactgtggtcatttcttcccttctgtgagacataattcctcggtttggccttcccatatctatacagtccgat

SEQ ID NO: 219677 - DNA, 543 bp, Homo sapiens
tatccctcgtgcagattttctccttctcatctggccactctcacccactccctcactgaaacttccatctatcaatctcttcccacacaaggcaaatggttcttggaccaaagaaaatatccccttccagcctcacaggcccattctattctgtcatcatttcataacctcttccatgtaggttacaagccactagtccgccttttagaacctctcatttcctttccatcgtggaaatctatcctcaaggaaataacttctcagtgttccatctgctattctactactcctcagggattgttsaggcctcctccctttcctacacatcaagctcagggatttgcccctgcccaggactggcaaattgactttactcacatgccccgagtcagaaaactaaaataactcttggtctaggtagacactttcactggatgggtagaggcctttcccacagggtctgagaaggccactgtggtcatttcttcccttctgtgagacataattcctcggtttggccttcccatatctatacagtccgat

SEQ ID NO: 219678 - DNA, 453 bp, Homo sapiens
ggaattcttcagggccacggaggaaattaataattaagtcaagattagggctctggttttaaaactcccagtatggagttggtgagaaaaaaatattggaatgtcattgttagatttccaaacacaggtacacacacacttgcacactcaaacatggatatagctataagatacagtacatcaaattaaacatgttgcttaaaaaattctatgactaactcaaaggcatacacacatttatcttgagttctgggttttattttacatgcagaacactcaggaaaataaggcagraactatcttgctatgaatattctccataatggccctttcaaacatttcataagattaatatttcaagtaatttcaagtaattgttagcttaccagagttctaagcacttaaatatgaacagtaaaatataaacaaataaatgcataaatggaaatgtgg

SEQ ID NO: 219679 - DNA, 453 bp, Homo sapiens
ggaattcttcagggccacggaggaaattaataattaagtcaagattagggctctggttttaaaactcccagtatggagttggtgagaaaaaaatattggaatgtcattgttagatttccaaacacaggtacacacacacttgcacactcaaacatggatatagctataagatacagtacatcaaattaaacatgttgcttaaaaaattctatgactaactcaaaggcatacacacatttatcttgagttctgggttttattttacatgcagaacactcaggaaaataaggcaggaactatcttgctatgaatattctccataatggccctttcaaacatttcataagattaatatttcaagtaatttcaagtaattgttagyttaccagagttctaagcacttaaatatgaacagtaaaatataaacaaataaatgcataaatggaaatgtgg

SEQ ID NO: 219680 - DNA, 583 bp, Homo sapiens
tcaggaagaaaaaaaagagccagccatgatagaaagaatcgcaagcctataaattgtgctgaagtgtgtttatataactagattagagtttaaataaagcaatycaacggtaaactaaactacaagtcctagtggtaaaagcaacctctgaagagtcagtggaacagacaggttacacttgttttgattgtgcacacaagggaatactgatttccaaacggatggctagcacctcaggacactgcttccagagggcagttttcatcattgtcattctcattttgagaaactgaagttcaaagagatgggtgactgccctaagtcagacagagcccttatttcaagggccagggatacctatgacccctctgacctaatccaggtgacaatttacagctgattcatatgaccctggtgactcaagccagtaccccaaagctatttcccatttaatgagacaaaaatctcacctgagagtgccatactagctgtgaattttcatcagattcttagagatgcctgcgactttctgccttctcctcccatcaatatttagaactcttgaatcatagttcaactatca

SEQ ID NO: 219681 - DNA, 583 bp, Homo sapiens
tcaggaagaaaaaaaagagccagccatgatagaaagaatcgcaagcctataaattgtgctgaagtgtgtttatataactagattagagtttaaataaagcaattcaacggtaaactaaactacaagtcctagtggtaaaagcaacctctgaagagtcagtggaacagacwggttacacttgttttgattgtgcacacaagggaatactgatttccaaacggatggctagcacctcaggacactgcttccagagggcagttttcatcattgtcattctcattttgagaaactgaagttcaaagagatgggtgactgccctaagtcagacagagcccttatttcaagggccagggatacctatgacccctctgacctaatccaggtgacaatttacagctgattcatatgaccctggtgactcaagccagtaccccaaagctatttcccatttaatgagacaaaaatctcacctgagagtgccatactagctgtgaattttcatcagattcttagagatgcctgcgactttctgccttctcctcccatcaatatttagaactcttgaatcatagttcaactatca

SEQ ID NO: 219682 - DNA, 579 bp, Homo sapiens
aacaatgctatgctccttgggctgagaaagtagattatgatctgcattgagaaaaaagagttcaaaagagataatcccacttaattatctgtaaaatcacttaccactagttactaaaaactgtcttagaaaatgagagggttggccagatgcagtggctcacgcctgtaatcccagcactttaggaggccgaggtgggtggatcacttgaggtcaagagttcaaraccagcctggtcaacacagtgaaaccctgtttctactaaaaatacaaaaaattagctggatgtggtgacgggtgcctgtaatccctgctactcaggaggctgaggcaggagaatcacctgaacccaggaggcagaggttgcagtgagccaagattgcaccattgcactccagtctgggtgacaagagcaaaactccatctcaaaaaaaaaaagagttgaaattcagttattataataattatcaaaaagcaaagcctatctattggaatagatcagctctctccaatagaaatataattcaagccacatatgtaattttaaagtttcaagtagtaaaatcaggtaaaattaat

SEQ ID NO: 219683 - DNA, 489 bp, Homo sapiens
aaacagaggaggaaatgatcaaaacaaagcaaaacagcttcccagaaataaagggcacaaacattcatattagaaaatcctggccggacacggtggctcacgccggtaatcccagcactttgggaggccgaggtgggcggatcacgaggtcaggagatcaagaccatcctggctaacatggtgaaaccccatctctactaaagatacaaaaattagctgggtgtggtggtggacgcctgtagtcccagctactcgggaggctgaggcaggagaatggcgtgaacccaggaggcggagcttgcagtgagcagagatgtctccactgcactccagcctaggtgacagagcgagactccatctcaaaaaaaawaagaaagaaagaaactcctaccaagttctcaggacagcaaatggcgaaataaaaacttcaccctttgaacatactgaaatttcaaaacaccaaggataaatagaaggagactctttaaa

SEQ ID NO: 219684 - DNA, 440 bp, Homo sapiens
tgctgatgttcagatatctatgagatgttccaataatgatgttaattgtgtgagtgaagtcatccagagaagccatccagtctggggaaataaattggaattcattggcttataaatgttatttacagctaagtaactggatgtgatcaccaaggaatgactcctgggctacttcaaagctgaggggtcagatggcacaaagcagacagaggagtgtccaggggataggaagaggactgaaaggaaatggattgcctgaaaccaagctaagaaagtaattcaacaaggagagagtgaaccacatacacttattcctaatggataaatgtttcttatcattgtctctgtgcctctttcaaattctaccctgtayagggcttattcattttttctgaatatcttgttaggtcaaacagtactttgaagcttttggtttactt

SEQ ID NO: 219685 - DNA, 507 bp, Homo sapiens
tcttctagggctgtttcatcacataactaatctcatcaatatcatgatagaaaggagagtggttttggcaaggaaattactgaagtagttcaaataatccatcccataatttcatttgagtaagaaataaagataatcctttaggagtaaagaggtgaaattgcaactttgtccccaggttctgtaactaggccttcccttatctttccatgtcatgactataggtctatcttatgttccatccaaataaaatttaaaaaataatatatgaaagtcttcatwataagcaccccatggttacaaaatacatataaccattataagcagtaagtagctttaccttctaaagcatatataatgatgaaaatttatttcttcaaacaccttgcacaatttgtataattcaatgctacttaagtatctaagatacaaatacagctccacaactggtatgtcacatgctatgaactttttaaaagttgacagctataactttcagtgaataaa

SEQ ID NO: 219686 - DNA, 659 bp, Homo sapiens
ctacaagaaataagaaactcagtgcagtgattatattgtacagacttgactgagaagaaaacaacataggcctgtaattatgggaaatataggatcaagaaagagcttgggatatgtatgtatatattcgtttttgtcagttagcttttgttgcttaacaaaccatgccagcatttagtgttttaaaacacaatattttatttagctcaaaaattttttggtcaataatttgggctgttttcagctagggggttctgcaratatgggctggattcagttaatctttactgtgacctacccatgtcagtgattggctgttgggttagctggtggctggttacctgtctggtggctgattagttgtgtgctgagacgtggtcttgtatcttccagtaaactagcctgagctcattcatattatggcaatgttctgcacgtaacaagccagtaagcctcaatgcacaaatgtttttcaagatactgcttcttgtattgcatctgataatgttgtatgggccaaaacaagtcatttggctatccagattaaaaggtggaacaaaagactgcgtttatgatggaatgaatgggaaagaacagagaattgtgggtactttcactattcaccacaatgatatttattatcatgtttttaaaagatt

SEQ ID NO: 219687 - DNA, 659 bp, Homo sapiens
ctacaagaaataagaaactcagtgcagtgattatattgtacagacttgactgagaagaaaacaacataggcctgtaattatgggaaatataggatcaagaaagagcttgggatatgtatgtatatattcgtttttgtcagttagcttttgttgcttaacaaaccatgccagcatttagtgttttaaaacacaatattttatttagctcaaaaattttttggtcaataatttgggctgttttcagctagggggttctgcaaatatgggctggattcagttaatctttactgtgacctacccatgtcagtgattggctgttgggttagctggtggctggttasctgtctggtggctgattagttgtgtgctgagacgtggtcttgtatcttccagtaaactagcctgagctcattcatattatggcaatgttctgcacgtaacaagccagtaagcctcaatgcacaaatgtttttcaagatactgcttcttgtattgcatctgataatgttgtatgggccaaaacaagtcatttggctatccagattaaaaggtggaacaaaagactgcgtttatgatggaatgaatgggaaagaacagagaattgtgggtactttcactattcaccacaatgatatttattatcatgtttttaaaagatt

SEQ ID NO: 219688 - DNA, 547 bp, Homo sapiens
gatcagggcttggttgagctttcatctcaggactgatgtcagggagattctgactcaggtaagacagacgtgatcaccgaggagcagaaagtgtacatgtagagtgatgctctcatctctgcccaggaatgcttctggaagaagttggacatggtggtagtgaggcccttcaccatggtttcctcatcctattgtttatataacccaagtttcttgcatttactgcaccggtccccaacctttttggcaccagggaccagttttatggaagacagtttttccatggattgagggtttggggatggttttgggatgaaactgttccacctcagatcatcaagcattagattcttataagggacacacaacctagatcctttgcctgtgcagtcacaatagggttygcactcctatgagaatctaatgctgctgctgatctggtaggaggcagagcttaggcagtcatacacgctcacctgctgttcacttcttgctgtttggcccaattcctaacaggtaccagtttatggtctgggggttaggggcc

SEQ ID NO: 219689 - DNA, 602 bp, Homo sapiens
ttactttttaaaaaataatgctatttttaaaagcaagattttttcctaattgaaataccggcatcccttgcaatgagatgttaagctctcattgaattactggattggtttcagttttaatcaaccctggatgaagcccatcatttttaaaagagtacactttgttggcagggaacatgaggtttctggtacttctgttctgtaatttattgtctgcatcaaaatttaaatttatatcttattccatattctatcatttttcccctgtgaacctttaagaaggaagcatttrtagcttaagtcttaaataaggatttctagggagagataaatgtaaggtatgatttttattgtgttggcttcatcagggtccttggcttaacctcctgccaataatcatcttctccaagaatgacatgaggatgaaatgcaaatgattataaagtaatcagattacattgtgactgtccatagactttattacaatatgttcaacaatatactaaggtctgtagataaaataagttgatatggactttagttttagtctttgtattaatctgttttcactctgctgataaagatataactgagaccggaag

SEQ ID NO: 219690 - DNA, 602 bp, Homo sapiens
ttactttttaaaaaataatgctatttttaaaagcaagattttttcctaattgaaataccggcatcccttgcaatgagatgttaagctctcattgaattactggattggtttcagttttaatcaaccctggatgaagcccatcatttttaaaagagtacactttgttggcagggaacatgaggtttctggtacttctgttctgtaatttattgtctgcatcaaaatttaaatttatatcttattccatattctatcatttttcccctgtgaacctttaagaaggaagcatttgtagcttaagtcttaaataaggatttctagggagagataaatgtaaggtatgatttttattgtgttggcttcatcagggtccttggcttaacctcctgccaataatcatcttctccaagaatgacatgaggatgaaatgcaaatgattataaagtaatcagattacattgtgactgtccatagactttattacaatatgttcaacaatatactaaggtctgtagataaaataagttgatatggactttakttttagtctttgtattaatctgttttcactctgctgataaagatataactgagaccggaag

SEQ ID NO: 219691 - DNA, 562 bp, Homo sapiens
cttgccaaaaagcaatctctggtcagaattcttactaatggagatttaaagtatgcttttaagagaaaattttggacgatagaaaaagaagctactttttatggttgctagaagtggtgtatatcacaatgatacatctgacaagtaacgcacagtcaattaaaaaaatcaattctagtaaatttcaagaccatttaagttcaaaataagccccccatccaatttttaaaaatacagcctgagtattttgtgccatttcagaatttcagcattactgacctaacacctgttatcttccatagttttccaagggamctgagtagatagttctgtcattctctgagtgaatttcaatatcacaagtaacctaataaaagttatgtttgccagagtaagtttccacagactaattaaaatattagtcttatttggtttggtttgaaaaaggaaataatcgcattgcactagcattgattatatgctcaaatctttgatggtaaacaaatttaactgtaatatagagaaagatatagtttatttgtcaattaaattactcaaagag

SEQ ID NO: 219692 - DNA, 609 bp, Homo sapiens
gaattcctgagtatgccttagtaataggttccagttcaaacaagccaatcatatcctttggtggaaccaggggtgcattactctctggatacccacaacccctggttgttccttattgtgacctccatgtggccctgcatgttttgtggcrtcccccttccctggactgtgagtatatgtgactaacaaactgttgtggattttatctgtacagtgtcaagagttatgtaaccttctatccctgtaacacaaggaaaggaacctctccccctttaacaaggtgaacaggaggtgattgaaacaccatgccaggaaaatattaaaccatctgaacaccagtgaagagttatttttatgaaattttcagttcctgccaatcatttctcatgattaatcataattttaaagaatgatgaaagaaagcacaaaatagatttttgttatggtaagaaagaagcaatattgaatgtttttattaggttatcataaccaaccttccaaattttgttatttaatacagagaagtggattttgaaaacaaaatttccagacaatatttacccttatgagctattaaaacatgggatggtaaaattttatcttttaaag

SEQ ID NO: 219693 - DNA, 609 bp, Homo sapiens
gaattcctgagtatgccttagtaataggttccagttcaaacaagccaatcatatcctttggtggaaccaggggtgcattactctctggatacccacaacccctggttgttccttattgtgacctccatgtggccctgcatgttttgtggcgtcccccttccctggactgtgagtatatgtgactaacaaactgttgtggattttatctgtacagtgtcaasagttatgtaaccttctatccctgtaacacaaggaaaggaacctctccccctttaacaaggtgaacaggaggtgattgaaacaccatgccaggaaaatattaaaccatctgaacaccagtgaagagttatttttatgaaattttcagttcctgccaatcatttctcatgattaatcataattttaaagaatgatgaaagaaagcacaaaatagatttttgttatggtaagaaagaagcaatattgaatgtttttattaggttatcataaccaaccttccaaattttgttatttaatacagagaagtggattttgaaaacaaaatttccagacaatatttacccttatgagctattaaaacatgggatggtaaaattttatcttttaaag

SEQ ID NO: 219694 - DNA, 609 bp, Homo sapiens
gaattcctgagtatgccttagtaataggttccagttcaaacaagccaatcatatcctttggtggaaccaggggtgcattactctctggatacccacaacccctggttgttccttattgtgacctccatgtggccctgcatgttttgtggcgtcccccttccctggactgtgagtatatgtgactaacaaactgttgtggattttatctgtacagtgtcaagagttatgtaaccttctatccctgtaacacaaggaaaggaacctctccccctttaacaaggtgaacaggaggtgattgaaacaccatgccaggaaaatattaaaccatctgaacaccagtgaagagttatttttatgaaattttcagttcctgccaatcatttctcatgattaatcataattttaaagaatgatgaaagaaagcacaaaatagatttttgttatggtaagaaagaagcaatattgaatgtttttattagrttatcataaccaaccttccaaattttgttatttaatacagagaagtggattttgaaaacaaaatttccagacaatatttacccttatgagctattaaaacatgggatggtaaaattttatcttttaaag

SEQ ID NO: 219695 - DNA, 365 bp, Homo sapiens
agaacagtagctgtttttaattttaaagtggtaatggtgattaagaggataagaattacaattattatgttggtaatgatagaaataataaattttgatggtgtcaatagtaatgataatgatgatggcaataatattaataacagcaataataataatattttatttagctaccagctttgaattcttttatcttattgtagaagccactcctgatattgcctaagtttttccttttccctggtatcaaaattcattttcaaggaagaatytgaaacttgctgtaagataaaaaaaaaaaaatgaagctctacatattgaggcttaattggcaggtatggagaagtattttgagagaaaactca

SEQ ID NO: 219696 - DNA, 609 bp, Homo sapiens
ctcccacttgctggtacttcagatggagtgtgactgaggctctagcagcatctagcaggtaggcgatgtatgaartaaagtaaaaaaggcatgttctgcacaacaaaaaacttatatcttatgcaaagtaaataccaattccaggaagcagaagggaaatgttttgaaaagatttgttcttacaaaggaactttttaaattttttggtcagatgtgtggtgcatgcctgcagtccaagatacttggaactttttaagaccttttttgggggcacaggaaaatttgtcttctgaactttgtacagattatatttcttataccaagcttggaatacattcaattgaagagttctgtaagtatttatcaaatacttactataggtttattattaaaattggtactttggaaagagaagcataaaatgctgacatagtatggtagacacagaaatgtggtgcccagatcccgttttgagaaaggtcttgctgttgagctgtggaaggtgtggttggcaggtagcatccaactgtcacctccttcagggtcaacctcatctgcagagaggctctccactgagtgtaccttctcggggaagcccacagctggtga

SEQ ID NO: 219697 - DNA, 440 bp, Homo sapiens
tgctgatgttcagatatctatgagatgttccaataatgatgttaattgtgtgagtgaagtcatccagagaagccatccagtctggggaaataaattggaattcattggcttataaatgttatttacagctaagtaactggatgtgatcaccaaggartgactcctgggctacttcaaagctgaggggtcagatggcacaaagcagacagaggagtgtccaggggataggaagaggactgaaaggaaatggattgcctgaaaccaagctaagaaagtaattcaacaaggagagagtgaaccacatacacttattcctaatggataaatgtttcttatcattgtctctgtgcctctttcaaattctaccctgtatagggcttattcattttttctgaatatcttgttaggtcaaacagtactttgaagcttttggtttactt

SEQ ID NO: 219698 - DNA, 607 bp, Homo sapiens
agtcaatgatatctgagaaccaaattgcctttcagttttcggcttatttcttgaataacactgaaaaagcaactagggctcatgataataaatagcaatagcagcagcagcagctaacacaaagtatgagctgagcactgttttaaattatactacctgtaaacaaagaacatgagtctatgatactaaagtttagaaagagtatttggtgttctacaatattcatgaaaaagtcaagagtcttagattaatccttaccttaatctatgaagcaggtactattattatctccatttagcataactgatgaaagccctgagatttttttaatttttaaaattatactttaagttctagggtacatgtgcacaatgtgcaggtttgttacatatgtatgcatgtgccatgttggtttgctgcacccattaacttgtcatttacattaggtatatctcctaatgctatccctccccccaccccctaccccacgacaggscccggtgtgtgatgtttcccaccctgtgtgccagagaagcccttgaatttgaacccaagtattctagctcagtcagtacttatgagtggtggagacgggggctgaatcaat

SEQ ID NO: 219699 - DNA, 603 bp, Homo sapiens
agtcaatgatatctgagaaccaaattgcctttcagttttcggcttatttcttgaataacactgaaaaagcaactagggctcatgataataaatagcaatagcagcagcagcagctaacacaaagtatgagctgagcactgttttaaattatactacctgtaaacaaagaacatgagtctatgatactaaagtttagaaagagtatttggtgttctacaatattcatgaaaaagtcaagagtcttagattaatccttaccttaatctatgaagcaggtactattattatctccatttagcataactgatgaaagccctgagatttttttaatttttaaaattatactttaagttctagggtacatgtgcacaatgtgcaggtttgttacatatgtatgcatgtgccatgttggtttgctgcacccattaacttgtcatttacattaggtatatctcctaatgctatccctccccccaccccctaccccacgacagggcccggtgtgtgatgttycccaccctgtgtgccagagaagcccttgaatttgaacccaagtattctagctcagtcagtacttatgagtggtggagacgggggctgaat

SEQ ID NO: 219700 - DNA, 538 bp, Homo sapiens
ccctcaacaacctaataaccatctttgaaagagacaacaagtttccaccatcacaatattacttctgatgtttcctcaatgtataatgcaaaacactaattttcagagtgaaaattcgtagtgaatgttgacagtagtaccacagaaagactatrtttttattgtatcactgtatgaatcaatgtttgtgtactgaaaagtactgttccagtcagatgtttcaaatttgtgagatacatttatgcatctgtatcaatatccttaagtgaaataatgaatgaatgacaagtgcaaaatgaaagcattgttggcttacaggatctacccacctgccaaattagttgagaagtaaaaataccccaataatttgaatcattttgttttcctcgctacactattactggtgtgaatatcacaacattcacagtaattttattttttaaattcaaaagcagcatgtgttttttgaaaaacatttcaacaaggtaaagatatgttatataaaaagtgaaagttcccatcccactcccccttctct

SEQ ID NO: 219701 - DNA, 502 bp, Homo sapiens
tttgtgtcttctcttttttyttagcatgtctagaggcttacaaactttatcgatcttttcaaagaaccagttatagattttgttgattttctttattaatttcttgttttcaatttcattgatttctgctctaatttttatcagttttcctactttgaatttaatttgcccttctttttctagtttccttagactattgactctgtatctttcttttctaatacatgtcattcaacgctacatatttccctcaaagccctgcttttgctgtatcccacaaattttgataagttgtcaaatacttcaaaatatttttaaatttctcttagtatttcttcttcgacccatgagttattaagaagtacgttattgtttaatctccaagtatttggggattttcccgctatgtttctgttattggtttagtttactaccattgtggtgtgacagcagagattgtatgatttctattattttcaatttgttaaggtgtgtgttatgt

SEQ ID NO: 219702 - DNA, 589 bp, Homo sapiens
acacattttcgcttactaaaatctatttatttattaggtggcctggaattgaaatatgtggaaaatcagagtcctcataaatgcttaagaacaatgacttttctaacctatcaccctcaattatataactttattctttttcaatcattgtactattttatttttctaaaataacttctaaggtcayttcaaatgaccttagaacagacttggcagattcactagatttacaaacacagaagacatgagacagtacatcaagctttacaaaggttactttcagatctgactttctgaaagcaataagagaaaagaaggataagaagtatttaaaaagcatgatcctttttctcagatatgtattatgctagcaatatttgaagactcatgaaacattccaaatataaatgaaatgctggcaatgttaaaatatgtaaattaagaataagaaaacccaggggtaattcataatccaccccaaaataatgttttcaaaggttccatatgctacctcctatgctaaatgtcttccttcacatgtgctaacattctgtattcattgcaggatatcaaatgcaggaagtgaatt

SEQ ID NO: 219703 - DNA, 577 bp, Homo sapiens
gaaatgcttgtcgtggtatgtggaacatgtaaggatattactattatccttattgtaattgcctttgcaaaaaattatatcattgagaaaattatggctctggaggagatctgatctggccaatccccctttygcctttagtcttcaactgcccttaattattcctgggcttaggctaagctaactttgggagatgtttagtttatagtttaaatgataatagcctttcccccaaattgaacctcctttgtaaagctaatgagagaccaccaggctaggaggatagaggaacctgaatttggctaaggtggagacataaacaattgccagccattactccggaggtcacaagatatgcaacttccacagttattcctgcagataacatcactactgtagaacgttaagattggccttttgagatgtcttttcaggttttctgcatgtctcacactgataatggctccacctggatcccccaagtgttcctgtggccctacccagaagcgactcagctcaggaggaccatttcccacaccccttgaattgcacccccaaccaattggcagcaagcacc

SEQ ID NO: 219704 - DNA, 406 bp, Homo sapiens
aactgccattattaaaacaaggatcagtgtagaggtggccctgatgcccagaatccaaaggtcagctccctgaaagcctccccaaatcacagacgtttactatggcctggcccttttccatctgttacaactttactctgctcactggatttctcctacaactaacaactcaaaaatctcagtttagaattccatagagcaaaaacatattaaaaatacaaattttaggctggtggtggaggttcatgcctataatcccagcactttgggaggccgaggagggcgaatcacaaggtcaggagttcgagatcagcctggccaacatggtgaaaccccgtctccactaaaaatacaaamaactacctgggtgtagtggcaggtgcctgtaatcccagctacttgggaa

SEQ ID NO: 219705 - DNA, 429 bp, Homo sapiens
agaatattaattaactgtttatggaagggcagagtagtgagggatataaaaaatagaacataaaagaaaaacaagtttgaatattaaaaactacagtaagctagcaatttagaaactcagcttgcagtatgagcctgaggaggtcatccagtggaccaccacatgacagaacaaagaaacagggagaaaaaaaatgasgctggctccagcttacatagtgttttcctcttctctcatcaaaaaagaggaaagagatgatagaatattgaataccctaaaaaggacaccacaaagtagaaaagtcacaatctcagtgtgtttagtgcctgatacagtttagatattttcccccacccaaatctcctgttgaaaggaatccccagtgttggcagggcctggtgggaggtgtttggatcacaggggcagatc

SEQ ID NO: 219706 - DNA, 591 bp, Homo sapiens
cttaatgagccatgtatacatcaaaagccttttaaaacatgttgttgatcagccatggagcttcaaaagcagtcttctgtacccaaaataagaagtaaaaatcagacttttaatgatccccaaactcataattaccgtagagagaaaactcaatagaaatacaaaagggggaggttcccttgccacaatctaggcagtgagaaatcrtcagtggttcacagaatgtggaaaatgggctatgtctactcataattcaaataccgtcttttacaagaacctgagaggaatttatttcatagcaatcctgcataaaacctctggccatgtacctttatgtctaaaaataagtccccacacttgtttgtttaaatcactgctactagaagaagcttaacattagttttgatgttctttggacaaaaaatcagttccagatcatcgaatagaaatcacatgcatgtcttctgatcttctgcttctaatttgtttcttttttttccccctttccaatgtgtgctttgtctataggatcaggatgcatggaaataaatgtcttggttttcaacataattcccctcataattccaaaca

SEQ ID NO: 219707 - DNA, 504 bp, Homo sapiens
acactatttctcttaatggagtaatgattcatggaaaaacttctatcaaaactttttcatctttattatggaaaagcataatttatgtttatagaccaatgttgcacttaaaaattacaccctaaactgcatttttgaaagtattattatagaatgaaccaaaatattatctgggtctagaacataaatattagtgtagctatctgggttagagaagttaatagaatgtaggctgaaggtagagcaccctcttccaggacagctcacattgctggttccatttccatttgcttccatgtctcaacatrtctaattgaggattctgatgaatttatgttggtcatttgatgtctcaaaagatattttttcaagatatgataatagattgtcttcttctacatgatcttgcagcaaatcttgaacaactctatggaattaacagaacatctatgttcactccaccatgcataacacactcaggttatcttttatgtcaaatatata

SEQ ID NO: 219708 - DNA, 628 bp, Homo sapiens
gttgcccattttactaccaaatgtatatacaaatttctccccattcataaaaaaatactgtcagtatcacccaagggaaataactaaaaactcccccagtttactttatcctgctgaaattttatattatctgaattattgtctcaggcttggacaaaatactaaaaaagaattcaatagaaaccttcattcagaaaattgaagtatagaacaaacagcagaccagtgaaacatttcaaatcctgaagggcaggaattgtatagaatccttggcctggaagttacaactcagtcccttgctggcataacaggtagccttgggtaaaggttctgaacagcaataatcatatgccattgtttggtaagagaaatcattggcttttacaagactatgggacttccaatttttatatgccctctcttctgttggatctctacttgcaaatcagctaatcactgcctgagttcatcatttttataatttcttcacataatcagcaaggaaytgagatacactaataatatgatgtaaaatgttttctttagagcccattgtacttagctttcaagttattgttttatgaaatattttgccacagcacaagaagaatcactggctttgttgtct

SEQ ID NO: 219709 - DNA, 621 bp, Homo sapiens
attttgctgtaagatatcctaggccaaaggccaggggagccaactgggcaggaaagagttacgtccacttacctggtttcctcaaacacaagacattccaaagaaagtactgttttcagaactagtccttaacacactcctgggagataaccgctgtacattggaatattctccctcaaaaaggtttcgttttgtttaggtttttgtttaggtttttgtttagttttttttttttttttttttttttttttcggwattcctgaaaccttgggccctgctgcaccagttagacaagatactttttatcatgcatggtgaatgcctgtttttggttctaagagtggaccgggggctgtggtctaaattggtgaggtcatacaagccttgcatctctatgtgacagatcaccccaaaaactctggatgtcaactctcagaggagcttcctaagttggtaacacatcacctgtgttgccacacactgttgcttggggatttaagtgtgtccctgggaaagttcactgggcggggacccctagaagctagagcctggttcctcctagacttcacctgacttaacttttcccattgcatattcaaagctattttactgaaatttcac

SEQ ID NO: 219710 - DNA, 621 bp, Homo sapiens
attttgctgtaagatatcctaggccaaaggccaggggagccaactgggcaggaaagagttacgtccacttacctggtttcctcaaacacaagacattccaaagaaagtactgttttcagaactagtccttaacacactcctgggagataaccgctgtacattggaatattctccctcaaaaaggtttcgttttgtttaggtttttgtttaggtttttgtttagttttttttttttttttttttttttttttcggtattcctgaaaccttgggccctgctgcaccagttagacaagatactttttatcatgcatggtgaatgcctgtttttggttctaaragtggaccgggggctgtggtctaaattggtgaggtcatacaagccttgcatctctatgtgacagatcaccccaaaaactctggatgtcaactctcagaggagcttcctaagttggtaacacatcacctgtgttgccacacactgttgcttggggatttaagtgtgtccctgggaaagttcactgggcggggacccctagaagctagagcctggttcctcctagacttcacctgacttaacttttcccattgcatattcaaagctattttactgaaatttcac

SEQ ID NO: 219711 - DNA, 371 bp, Homo sapiens
ttaagggggataagtgtttttcatactcttttatttaaacatagaactatttattcctaataaaatctcatgggaaaactcaacaggtaaaggtaaaacattctgctagtagcaggaacttagtaggctcaagctctcatccactagaatttgcctctctcagtgattcctggggtgcctcaaagtatgcctacagtctaataacatcattttgaaaactgctgagctagtccacacayattattttgaaaggagagaaggagagacttatcagagctcatatatcaagtcacagtggaactgggatttgaacccttgattcctgactctcctcccagtactccaccagctagatgactctgctatgtgtt

SEQ ID NO: 219712 - DNA, 590 bp, Homo sapiens
actgttactagcagccaaaggccacctgactccttgtggctcctacatgcaggctgcttagtgacccaagaagttttcatttatgttgttaatgatctactgagcagacatcagaagtgattagtcacaaataataaagatgaaacatttaagaatgtttggctttttttgataatttagaccaataccccttaaactttatcatgcatcagaatcacctgggatgtcttgctaaaacagactatgggaacacaccactagagttactaattcattagacctatggtgggggttaagaatttaattttctaataagttcccaggtaatgctgttggtgctggtttgaggaccacatttgagaagaactgatttagacaactgtataataatttcccttattttattaawatataaatacgatttcttgaacaggagaataggaaatacaactacatctagaagtcacacacctggaaacttccaggggaatgtgacttgcattgacttatcctgtgtattgcagaaataaaggttgagacttaaggctccaaatatctactgtttcagactcagagagctcaggatatag

SEQ ID NO: 219713 - DNA, 577 bp, Homo sapiens
atttgagggaataatcaaggaaaacttccccagccttgctagaggtctacacatccaaatacaagaaactcaaagagcacctgggaaattcattgcaaaaagatcatcgcctaggcacacagtcatcaggttatctaaaatcaggacaaaggaaagaatcttcagagctgtgaggcaaaaacatcaggtaacctayaaaagaaaacctatcagattaagagcatatttctcaacagaaatcctacaagctagaagggattggggtcttatttttagcctgcttaaacaaaagaattaccagccaggaattgtgtatccagaaacactaagcttcataaatgaaggaaagatacagtcttttctagacaaacaaatgctgacagaattcaccattaccaagccagcactacaagaactgctaaaaggagctctaaaccttgaaacaaatcctcaaaatacaccaaaatagaacctccttaaagcataaatctcacaggacctatataacaataacacaattaaaaaaagaaaaccccaagatattcaggcaacaaatagcacaataaatagaatagta

SEQ ID NO: 219714 - DNA, 558 bp, Homo sapiens
atggccataataaaaaaaacaaaaagtaatagatgttggtrtggatgcagtgaaaatgaaacacttttacattgttggtgggaatgtaaactagtacaaccactatcgaaaacaatttggagattccttaaagaactaaaggtagatctactgtttgatccagtaatcccactactaggtatatatctagagtaaaataagtcattattcaaaaaagatacttgcacatacatgtttatagcagcacaattcacaattgccaaaaatatggaaccagcccaaatacccatcaatcaataagtggataaagaaaatgtagcatatatataccatggaatactgctcagctataaaaaggtatgaaataatggcattcacagtgacttggatggaattggagactattattctaggtgaagtaactcaggaatagaaaaccagacatcgtatgctctcactcatacgtgggagctaagctatgaggttgcaaaggcataagaatgatacattggactttggggacttgggggaaagggtgaggggtggcgagggataaaa

SEQ ID NO: 219715 - DNA, 558 bp, Homo sapiens
atggccataataaaaaaaacaaaaagtaatagatgttggtatggatgcagtgaaaatgaaacacttttacattgttggtgggaatgtaaactagtacaaccactatcgaaaacaatttggagattccttaaagaactaaaggtagatctactgtttgatccagtaatcccactactaggtatatatctagagtaaaataagtcattattcaaaaaagatacttgcacatacatgtttatagcagcacaattcacaattgccaaaaatatggaaccagcccaaatacccatcaatcaataagtggataaagaaaatgtagcatatatataccatggaatactgctcagctayaaaaaggtatgaaataatggcattcacagtgacttggatggaattggagactattattctaggtgaagtaactcaggaatagaaaaccagacatcgtatgctctcactcatacgtgggagctaagctatgaggttgcaaaggcataagaatgatacattggactttggggacttgggggaaagggtgaggggtggcgagggataaaa

SEQ ID NO: 219716 - DNA, 558 bp, Homo sapiens
atggccataataaaaaaaacaaaaagtaatagatgttggtatggatgcagtgaaaatgaaacacttttacattgttggtgggaatgtaaactagtacaaccactatcgaaaacaatttggagattccttaaagaactaaaggtagatctactgtttgatccagtaatcccactactaggtatatatctagagtaaaataagtcattattcaaaaaagatacttgcacatacatgtttatagcagcacaattcacaattgccaaaaatatggaaccagcccaaatacccatcaatcaataagtggataaagaaaatgtagcatatatataccatggaatactgctcagctataaaaaggtatgaaataatggcattcacagtgacttggatggaattggagactattattctaggtgaagtaactcaggaatagaaaaccagacatcgtatgctctcactcataygtgggagctaagctatgaggttgcaaaggcataagaatgatacattggactttggggacttgggggaaagggtgaggggtggcgagggataaaa

SEQ ID NO: 219717 - DNA, 474 bp, Homo sapiens
tgtggtcatgttcctggaggtggcaagaaagatgacaaggacaagaaaaagaaatatgaacctcctrtaccaactacagtggggaaaaagaagagaacaaaggaaccagatgctgccagcaaactgccactgttgacacctaacactcagtgcccattaaaattactgaagttaaagagaatgaaagactatcttctcgtggagggataattaattagaaatcagaaactaatgaaaccattagaagaaaagcaagaggaggaaagatcaaaagtggatgatctgagtgggaccccaatgtcagtaggaactttggaagagatcatcagtgaccattatgtgtacatctgtgggctgagaacactacgtcagcatttttttcatttgtagacaaggatctgctgaaacctggatgcttggtcctgctcagccacaaggtgcatgctgtgatggggtgctgatggatgacatgga

SEQ ID NO: 219718 - DNA, 474 bp, Homo sapiens
tgtggtcatgttcctggaggtggcaagaaagatgacaaggacaagaaaaagaaatatgaacctcctataccaactacagtggggaaaaagaagagaacaaaggaaccagatgctgccagcaaactgccactgttgacacctaacactcagtgcccattaaaattactgaagttaaagagaatgaaagactatcttctcgtggagggataattaattagaaatcagaaactaatgaaaccattagaagaaaagcaagaggaggaaagatcaaaagtggatgatctgagtgggaccccaatgtcagtaggaactttggaagagatcatcagtgaccattatgtgtrcatctgtgggctgagaacactacgtcagcatttttttcatttgtagacaaggatctgctgaaacctggatgcttggtcctgctcagccacaaggtgcatgctgtgatggggtgctgatggatgacatgga

SEQ ID NO: 219719 - DNA, 589 bp, Homo sapiens
atattttttgaaaagataaaccaagttgacaaatcactagtgagactaaaaaaagagagcaaaataaataaatcagagacaaaaacaaaacactacaccaaaagtacagaaaccaaaaccaaggaaaggatcattaagactatatgaacttctaagcaccaacaaattggaaaacctataggaaatggatgaatttttggacatggataacataccaagatagaatcatgaagaaatagaaaacttgagcagattattagtgagtaacaagatcaaagcagtaataaaaagtctcccatcaaaataaaaagctcagacctgatggtttccctgctgaattctatcaagcatttaaagaagatctaatatcacttcttcctaaattattagaaaaaaaaagaggagagaatacttccaaactcattctaggaaggcaagcattaccctgacaccaaaactagataagcagacaacaataaaagagaactacagattaatatccctgataggccaggcatggtggcttacrcctgtaatcccagcactttgggaggctgaggtgggcgaatcatgaggtcaggagtttgag

SEQ ID NO: 219720 - DNA, 577 bp, Homo sapiens
aattggtgttcctgaggaagaagagaaatctaaaagtttggaaaacatatttgagggaataactgtggaaaacttctctggccttgtccaagatctagacatccaaacaaacacagaaaacctggcaaattcttcacaaaaagataatcatgttggcacatagtcatcaggttatctcaagtcaagatgaaggaaagaatcttaagagctgtgaggaaaaagcatcaggtaacctataaagaaaaacttatcagattaacagcagatttctcagcagaaaccctacaagctagaaggaattggggtcctatctgtagcttccttaaacaaaacaattatcagccaatatttttgtatccaatgaaactaagcttcataaatgaaggagaaataaagttattttcagacgaacaaatgctgagagaattcaccactaccaagtcagcactayaagaactgctaaaaggagctctaaatcttgaaacaaaatctcaaaatacacccatatagaacctccttaaagcataactctcacaaggcctataaacagtaatgaaatgggaaagtaaataaggta

SEQ ID NO: 219721 - DNA, 424 bp, Homo sapiens
gcttggacagagaaagagtaaatcaggtgttagcttgtactttagggattgtcttaggcagaatattgactccttctgcttccctaacacttattaaygagtcaatttagctattcctaatgtgtgcatgcgtgtgtgtatttcagaacaatgtattatatatacaatttatatttgtcaattaaaaaatgagaatattaaaaatagtgaattagagaaaatattgtgcaaattccagcaaaattcctacagataagtttttaaatgaacatttaatttgattacctgtataatgactccattacactattaaaaaatagctttatgtgtaaaatttctatgtattttttaaacagctatattgagatataattcacgaactatacactttaccatttaaagtttgcaattcagtgattttagt

SEQ ID NO: 219722 - DNA, 424 bp, Homo sapiens
gcttggacagagaaagagtaaatcaggtgttagcttgtactttagggattgtcttaggcagaatattgactccttctgcttccctaacacttattaacgagtcaatttagctattcctaatgtgtgcatgcgtgtgtgtatttcagaacaatgtattatatatacaatttatatttgtcaattaaaaaatgagaatattaaaaatagtgaattagagaaaatattgtgcaaattccagcaaaattcctacagataagtttttaaatgaacatttaatttgattacctgtataatgactccattacactattaaaaaatagctttatgtgtaaaatttctatgtattttttaaacagctatattgagatataattcacgaactatacactttaccatttaaagtwtgcaattcagtgattttagt

SEQ ID NO: 219723 - DNA, 409 bp, Homo sapiens
caaaacttcctgaaaccctttatatcatgttttgtgaagaagagcctcacatgaaaattgtcctagaaaaccagtttttctactatcttttacttcttacagtaattgcaaaattctgttctcttttcattccgtttacattgttcattcattaatcatttaatgacccgtaactatgttccagtagttgttaaattccaaaacaaaagaactaaccaggaagatccgaaccctgaattgtgttctttgaaagtagttttgaaaacaaatgtgtaagcaaataaattataaaacacttttaaaatkgttattacacaagtaccaaaaaagctaggaaagtgaaggaaatttttacctctgttttaaggtggaaggtaaaactttatagagggcaaggacatttgaattc

SEQ ID NO: 219724 - DNA, 437 bp, Homo sapiens
ggaattggaatgtacctaacacaaagaaatgataaatgttttagacaacagatactccctttactctgttgtgactattgcaaattgtatacctatgtcaaaacattacgtgtaccctgtaaatatatacatctaatatatacccataaaaatttaaataaagttttaaataacttttargttaaaaatgcgaagatattaacatggatatcattttccagttagtgacagaaaaaaaattgttggaatttaaaagtggggggaaaaatccactgacaatagacaaagcaagggaagaagagttgaattagaggagaaagcagcactttccattcaaagtaatttgatccaaaatttccacaatttccctgtgatataggtaatcttctgagaaaatctgcattgtatattgtgggatacaggattcctgtgaagtt

SEQ ID NO: 219725 - DNA, 445 bp, Homo sapiens
cagcatgaaaatctttggtctcctacatagaactgaccttatttgtaatatctccatccaccaaatagggataacaaaacgtatgagaaacaaatataagaattactaatgaatatatttaatacaaataaaacattcagaaacctagaaatatccaacaaatgatagtttcactggtatcaaaaaagttactcactgtatttattctctccattacataaaaaatgttaaagtattytaaatacatgaataaaaatacaaagaaatgccaaatatatgtaactcttatgaaataaaacaaactatatttctttgccttacatttttatagaatatcatatttttttcttattaaaactcataagtagatttgaaaaaaaaaaaagcagcagcagcagcagcagaatctttagttccagaaggacttgaactgaaatcctggcat

SEQ ID NO: 219726 - DNA, 531 bp, Homo sapiens
gaggatcagaaaaagtaactattgggtactaggctcagtacctgggtgacaatctgtaaaacaaacctctatgacatgagtttacctatataacaaacctgtatgtgtgcccctgaatctaaaataaaaagagagggaaagatcaatttatcattaaaactgagatacattttaggaatggcaaattacattgtggggccagagtrccccatacatatcataatattttgggtcagggattatataagaataatggacaagatcttgggatactcttgcaactgtccagacctagaaaaaatgggaagttgttgagaaaatctgtgatcatatgagtgagtgataggagatttgtaagtttggaaactgatatatatatattttttcagattagagatgatttaggttggaactcttgcagtggctatagaggttgaatggtgagtgatgacacacttcagtaatttagactcataatgtctattgatgtcttattttggaaaattgatttgattcctagggaaataatag

SEQ ID NO: 219727 - DNA, 478 bp, Homo sapiens
tacgatcataaataaagcagcataatttttcttggctgtttccagcgtgtaacctaccttactttaatttcaaagaagccatgaagactatgacatgagtgctaggctctgttatatttctaagctatgtgttcgttctttttgttttttcttaggagaatggcactgtattttgggcacagttcatcaaggaaaaacagttgtcttaagcaatggattttagtgacggctagttgattgttacctggctactatttatagtatgttcttggttttattatrtgattttatttaaaagttacatagaaaataagaatttaaagtagaagtcccagttttactatgtccatgatatacactcagaacattgatattctctttagaaatgaatatttaatctccacatccacttttgtcagaagtaagttatttaattgccaagcactttacaaattacttctcttcacgtattagttcc

SEQ ID NO: 219728 - DNA, 621 bp, Homo sapiens
aatttgatgcaaatgtgaattttagaaacccgagctcttactatttttagagtccttaataaatatctaacagtctactatggtttgaatgtagtttgtccccactaaaactaatgttgaaattaattgccattatattggtgttaagagatagggcctttatgagatgactaggtcattaaaatctcaagagagactgggttagctcttscaataatgaatttgttctcataagagtgatttttggcttattgatccataatatttatatatatttggggtacataaaatattttctcacatgcttaggaagtgtaatgatcaagtgaaggtacttaggatgtccatcaccttatgtatcatttctgtgggttgggaacatgttaactccactcttcaagctattttaatatataaaatgcattgttaactatagtcaccccactatgctattgaatattagataaaaatcctttcatttgcaacaacatggatagaactggaggtcattaagtgaagttagtgaggtgcagaaagacaaacatttacgttctcactcatctgtgggagctaaggaattgatctcatgggggtaggaagtagaataaatccttaacaggt

SEQ ID NO: 219729 - DNA, 383 bp, Homo sapiens
agcaaatatgattctttataaattataagtttaagcttgytttaaaactaattaactaaacagaaagttattgttgcatattataaaagaaaaagtacttttatgggagataagaagttttgaagcttaccaaaaaagaacctgtgtgatcagttccattctgtccttagacaacatattattctttaacatatatactttttccagctatatcgttctgtgtacacttcgtgcttcctgagatcctgctatcaacccaggttctaagcaggaattacagatattcttcacaatagaataagacaattaacaattgttcttaatgaatggtaaaaagaacaatattcattacttgctaattattactcatctttttttgaaaa

SEQ ID NO: 219730 - DNA, 383 bp, Homo sapiens
agcaaatatgattctttataaattataagtttaagcttgctttaaaactaattaactaaacagaaagttattgttgcatattataaaagaaaaagtacttttatgggagataagaagttttgaagcttaccaaaaaagaacctgtgtgatcagttccattctgtccttagacaacatattattctttaacatatatactttttccagctatatcgttctgtgtacacttcgtgcttcctgakatcctgctatcaacccaggttctaagcaggaattacagatattcttcacaatagaataagacaattaacaattgttcttaatgaatggtaaaaagaacaatattcattacttgctaattattactcatctttttttgaaaa

SEQ ID NO: 219731 - DNA, 614 bp, Homo sapiens
ctatttcacctgctaaacaccttttaaaataacctgttggctgggcgcrgtggctcatgcctgtaatcccagcactttggggggccgaggcaggtggatcacctgaggtcaggagtttgagaccagcctggccaacatggtgaaaccccatctctactaaaaagtacaaaaattagttgggtgtggtggcagatgcatgtaatcccagctactcaggtggctgagacaggagaattgcttgaacctgggaggcggaggttgcagtgagatcgcgtcactgcactccagcctgggcgacaagagtgagacaattcttaaaaaaaaagaaaaaaaaaagaacctgttgaagtctgaaaaactcagccaattagttattaataactgaagtaaatgatttgtctgacattaaacaagtgtaactgttgttttcgctaaggtttgttgaattttgaagtatatctccataaatacccaaattgtttctcctttatgcaatgtgtgagtacactaataaatatactttttttacatgaatacaaaaactagataataacttcaaactggattcattcaagaaatggcagaagagcattacttttgcctgggagtaagga

SEQ ID NO: 219732 - DNA, 592 bp, Homo sapiens
aaatgcatttgtgaatggtagttcgttcttttaaacgtttggactgctttggctttttctgtggtggggcctagaagaagacaggtcacagcaggtctcacttgaagaaatctttaacacagaacataaaagtgactgtaactaaagtttggaacatgtcattttactgagtactgacactagaggagtttgtttaaggatattcacatcagttaacaaatcaacgaaacgtttattaaacttctgttactcattcaacaaataygtaatgaatacctactataagtccaagtattccacatcatctcttttcatccttgcaaacattagcaggaactataatcccacaattttatgagatgtagagaggtcaggcttagcttgctcaaggttctagtggaggcagaatttgaactgcttccaaactgtccaacattaaaatctatattacttcctcttagctggatcttatcaggaaatcaaagctgtataagctatggccccttctgtgtggggttgacaatgacatctaaaacatcagacttaagtctataaatctagaaaacataaggcataagtctacaccacccag

SEQ ID NO: 219733 - DNA, 424 bp, Homo sapiens
ccgtgttctttctttctggcataactacttgctcgctgttgtaccttcttgatatatcctttatgtctcttattatttctttacaactttctgtcttgttttcttgttgttctacattttaagaatttcttcactttttgtctcttttacttaaaatgattctttcatacactttattccattttatagcatcctgttcttgccttatggatacaatagctctgtaaattggtatttccacgttctcttctgtgccctgaattctctctctctctctctcacacacacacacacacacacacacacacacacacagagagagagagagagagagagagagagagagagagagagagagagagmgggagattatattatcctaaaacaggagactaggagttggaactgtagttagaaaatgaga

SEQ ID NO: 219734 - DNA, 497 bp, Homo sapiens
tttttctatctatgtatctgtaaatacatatatcagatatgatttttatataattttatatgatatatgttatgtgtgcatataacttagttttgcttggttttgaacttatataaatagaattatgctataagtattcttctaagacttgcttctgcattcaacattgtgtttttgaggttcatccatgttgaggcatttagctgttatgtatttattcatttttcactgctgaattttatttcattaygtgactatattactatttattgattcagtttactttaatcaaaattacgtggttctcaacttggggctagtctgaatcatgatgttatgaacattcttatgcacatattctattacatgagtactgtacacaattctctcttgaaatagattcttgtattacagaaatgcataggttctgtaccatactagatgctaaactggtttccaaagttcttgtgctgtttattacatcccaaccaacagtg

SEQ ID NO: 219735 - DNA, 565 bp, Homo sapiens
tatattgttttgttttgtttgtaactgtttatttttctactacaaacagttttatgacaccttgctaaacttgatacacatatctttgagtcctgccactgttactaacatgggatcgatttccaaaagcaaaatggttgggtaaaagggcacatgcattcttagtttaccaattattgattgtttgttttctaaatgctgtagcaatttatacactcaccatcttctctttatgagagaaacactcaaattattctcttctagctattttgaaacatacaatagattattgttaaaatattctatattttaaatagaaaagcttgtacatgctattgcaaagattttttwaaaactaaaagtcaaccgacagctatccaaatgacaaaaatgttaaagtacagtaacattcaaaattgagcttgagtcattgcttatttttcccaccagattttaattacactaacaattttgtaatagaacagatgtagaaaggaaccagcatcccttcctaaatattttcctgatcttgctcatatgcatttgagtcttacagatatggttc

SEQ ID NO: 219736 - DNA, 579 bp, Homo sapiens
aagtaaaaccacagcctacasaatgtgaaataaatatttgcaaatcatgtatctcataagggaactgtatataaaatctagaatgtgttctagtacctagaactcctacaacttaataataaaaaggcaaattaccaaagttaaaaatgggcaaaagatctaaataaacatgtctccaaataagatatgcaaatggctaataagcacatgaaaagattctcaacagcattagccaccagggaaatgcaaaccaaaatcataatgagataccacttaacacccattagaatggctttaagcaaaaaagacagataataaattttaatgaagatgtggagaaaatggaactctcatactttgcaggtgggaatatgaaacagtgcagccactttggagaacagtctggcatttcctaaaaatgttcaacataaagttaccacatgaccaaaaatgctatttctagttatatacccaagaaaataaaaacatattttcacatgaaaacctgtcaatattcctactagccaaaggcggaaacaatccagatattcatcagttgataaatggatagacaaaatg

SEQ ID NO: 219737 - DNA, 546 bp, Homo sapiens
atgtttgaatgataaggatatgccatctattttttaaaaatatatataattaaaaggagaaaaggttaaatcaataactgctgggaaacaattattaaagtaaataatttaaataaatgtcataccgttttctgctccaaatttcttagcatggatttgaaaaggacattaacaaccacaaaaataaaacataccatgtgcaacaagacaaccatcccaacagtgaaagagcatcrcaatggcgaaggagtggtgcatatgttttcttaaataacacattaggatgcaattttcactgaatctgaaaaagtttttaaactcagagagaaaaactaactaaaagtaagaaaaagttctactgcttaagagtggcagaaacctaaacatcacacagatatttccccctgttggaggttaggaagctgcaattcacattcttcctcctagctctttacagcctagttggagagacaggcaactaacaggtaagtaaaatgcagcgggatatacatgaaaaacaattcctgatagattgttgatatatgt

SEQ ID NO: 219738 - DNA, 590 bp, Homo sapiens
ttttcatgacaattaaatgagttaacatatgtaaagtggctggcacatagtatgtgagcctaagggctagctcttattattacattatcattatgccaaaatattgactatgtagagtcttggcataatgaaggatgcagagctgtggacagagaggatgtctttgctctcaggctttagatcttccccttagtcaatgagacttttcaagccaaatggcctcaattgtctatcagccacacggtggatccaggaaccyccctgcaaggctgtccaggacctctccaaactgtgcagcatggccactttctcttcaaggctttgccagttttcagaagcatttctgggagggcagctacagaccctcctcactatttttccctgttctcattcatgaaaaaaggaaaatgcttttctagtctaaagatggaagaaagatctggtcatctgtatttttcttaactgtgaatgtttaatttttcctagaagtctagggtttaggacacaaaagcctgggagatctgcaggctatttctggtttccaggccctgccttaggcatccctcctctgaagcaactgccacccgcat

SEQ ID NO: 219739 - DNA, 584 bp, Homo sapiens
aaatgaggaggtaaaagacagtgatattggtgattctgatcctgtgtacgcctaggttaatgtacagatgtgtgtcgttttaacaaagagtctaataaataaataattaattaatcaattaaagctcactttgggaggccgagatgggtggatcacttgaggtcaggagttcaagaccagcctcgtcaacatggtgaaagtctgtctccactaaaaatacaaaattagctgggcgtggtggtgcacgcctgtagtcccagttactcagaagsctgaagcatgagaatcatttgaacccaggaggcagaagttacagtgagccaagattgcaccactgcactccagcctgggtgacagagcaagactctgtctcagaaaaaataaataaataagtaaataaataaagtttattgaataaggatataaagaagatatttgtgtatagttgtacaatatctttgtgttttaagctaatgttacaaaatactcaaaaagttaaaaaaattaaaagtttgaaaagtaaaaagttacagtaagttaaagttaatttattattgaataaaaatttaacatatttaatgtgt

SEQ ID NO: 219740 - DNA, 484 bp, Homo sapiens
ataatgtctcccatttatgtggttatacatagtttataaactgtagtgttttgtagtttataagatgcttttgaacacttrccttattttaacttcacatgacccctgtgggatatgttttaccatcttcatttggaggcctagagcagttcaattacttgcgacccacatacagctataatgtgagaacaaaaaaacagtgtattcaaaacatgtcttgcttgtggttctaaaggtagaaatgaaatgggtatttggggcaaactgtcttgtttttccaaagagatatttttgtcacgttgtttcagttgttcaggtgataacaagcacaagcccactccatgtgccctagaaacactcaacaggggaagtaagctacatgccaactgtgcatgcctgaaagaaatgccctacttaggaaaacgtaaaaggccaccatcttcccaacttctcagtagagtgctccccttgaaactattgtgat

SEQ ID NO: 219741 - DNA, 484 bp, Homo sapiens
ataatgtctcccatttatgtggttatacatagtttataaactgtagtgttttgtagtttataagatgcttttgaacacttgccttattttaacttcacatgacccctgtgggatatgttttaccatcttcatttggaggcctagagcagttcaattacttgcgacccacatacagctataatgtgagaacaaaaaaacagtgtattcaaaacatgtcttgcttgtggttctaaaggtagaaatgaaatgggtatttggggcaaactgtcttgtttttccaaagagatatttttgtcacgttgtttcagttgttcaggtgataacaagcacaagcccactccatgtgccctakaaacactcaacaggggaagtaagctacatgccaactgtgcatgcctgaaagaaatgccctacttaggaaaacgtaaaaggccaccatcttcccaacttctcagtagagtgctccccttgaaactattgtgat

SEQ ID NO: 219742 - DNA, 610 bp, Homo sapiens
gggcctggtgggaggcaattggaacatgggggcagaattctcatggatacattgacattatcccctcagtgctgttctcatgagagtgggtgagttttcatgagatctggttgtttaaaagtttatggcacctccccctctctctcttggtcctgctccttccatgtaagacacttcctcccactttgcctttaaccatgagtaaaagctccctgaggcctcctagaataagctgctgtgcttctggtacagtctgtggaactgtgagccaattaaacctctttccttcataaattacccagtctygggtatttctgtatagcaatgcaagaactgactcatacaagggggctcctttaatgcagggaacctgggttataactacaaataacagaaaggattccggtgtctgagtctgtgtctctatctacccttcttacctgtgtgccaaagaggcaggagggtgattctgaaagtaaaaagctcaccgccaatattttattttagtacaagaaaagagattaatactatggatgtagagaaagcaagagcttggaatctagaaacgacttagatcccaccatgcccttaccagctatgcaatctcaga

SEQ ID NO: 219743 - DNA, 399 bp, Homo sapiens
tctcggccaggtgcagtcaagtattttgggaggtcgaggtgggaggatygcttgagtccgggagttcgagaccagcctgagcaacatggcaaaaccccatttcaaaaaaaaatacaaaaactagccaggtgtggtggcgcacacctgtagtcccagctacctgagaggctgaggcgggaggatcacttgagcccagaaagttgaggttgcagtgagccgagatcgtgccactgcactgcagcctaagtgacagaggaagactgtctcaaaaacaaccctgtcctccatgggtggccctcgaagccccaggaacccagtcctccccagtggaccgctccaccctcagtctccctgtccctttctgtccctccctgtgctccaggactctggctccccttt

SEQ ID NO: 219744 - DNA, 399 bp, Homo sapiens
tctcggccaggtgcagtcaagtattttgggaggtcgaggtgggaggatcgcttgagtccgggagttcgagaccagcctgagcaacatggcaaaaccccatttcaaaaaaaaatacaaaaaytagccaggtgtggtggcgcacacctgtagtcccagctacctgagaggctgaggcgggaggatcacttgagcccagaaagttgaggttgcagtgagccgagatcgtgccactgcactgcagcctaagtgacagaggaagactgtctcaaaaacaaccctgtcctccatgggtggccctcgaagccccaggaacccagtcctccccagtggaccgctccaccctcagtctccctgtccctttctgtccctccctgtgctccaggactctggctccccttt

SEQ ID NO: 219745 - DNA, 403 bp, Homo sapiens
aggtgcagtcaagtattttgggaggtcgaggtgggaggatcgcttgagtccgggagttcgagaccagcctgagcaacatggcaaaaccccatttcaaaaaaaaatacaaaaactagccaggtgtggtggcgcacacctgtagtcccagctacctgagaggctgaggcgggaggatcacttgagcccagaaagttgaggttgcagtgagccgagatcgtgccactgcactgcagcctaagtgacagaggaagactgtctcaraaacaaccctgtcctccatgggtggccctcgaagccccaggaacccagtcctccccagtggaccgctccaccctcagtctccctgtccctttctgtccctccctgtgctccaggactctggctcccctttggttcctcaagc

SEQ ID NO: 219746 - DNA, 569 bp, Homo sapiens
agagactcttattaccttcccttactttctcccaaacaaatgtagtctctctgttctgagcaacccaaagctggatgtggaatgacaaaagcacccctgtggccaccaccactaggactatgctgtgtcagacctgaagccagcacagcactgggtctcatccaaggcctattgtaaccattccttggctactgcctatgtttgctcaaggctatggggctctataatcagctctacaatcagcaagtgatgaaactagtcaggcttatgtccttcccttcaagtcagtaagctcctccaggccccaggtgggtccagagttgccattacatgagccaggaactagaattaaaccttagaagtctacctggtgttctattttcctgtggctgagtacaaaatactgtactcaaaccagattatacagccggtcccactcttccttccccttttccaaggcagragtcacctcatgaccgccaccaacacaggtcacagggagtactgcctgactaccgctaatgttcccttaaggcccaagggctacttagtcagcttataatgaattc

SEQ ID NO: 219747 - DNA, 302 bp, Homo sapiens
aagtcctggaatcagggaccacatgagcccctttgatcatatatccccctgtggtcaagctggtacctaaggcataagacaaagttctttttacttttccctgtactttactcaaacagaaggattcttgccctgtagccactacagctgggaatgcactgagtctcaactgaagccagcaagtttcagagtcacatccaagacccatgatatagtacctgggtatcactgtgggttattcartgcccaagggctcttcagttagcaggtgatgaatcctgccaaggctgggttattcctgt

SEQ ID NO: 219748 - DNA, 535 bp, Homo sapiens
gtaaggtggtatctggtctagcamaaaatcggatatgtggttattacaaattaataggttaatattttactacattctgtgtgttccgttacataaacaagttttgaattattgatacaatcctctctcctcaaattgcaggcccaaagaaattaaataatttgtctatggccactcagatagttagccaagaatcctaatattgaatctcattctaatacttcaccaacccccatgcttcatattacaatattgcctattttatcctgcattgttggagaattttattgttaaaggaaaagacagtgaataagcagggaaagaaagacaagaaggtagttgctgatgcttcatattggattttactggaatgcagcttgtgtttgtggggcttcccataaaatcactaactttacatggtgttcggtgataaaatcttaaaataagacttagttctttgttctaatattttatatgacatataaacataaagtcattttgctttagtgtttttacttcttttatcttttagacc

SEQ ID NO: 219749 - DNA, 390 bp, Homo sapiens
taaaattctttttgttgcattttcctttgactgtttttcatttcaaatcctgaacttaaaacaaaacaaaaacctctaatgtgtaaggtttagtagactaaggatcatagcttgtaaccctacagcatacattacctgtcatagagtggtggtttaatgagggtaaaataataattttggaaataatttttatcatatttatattaatacataactatccacagcaaacaactatattagatatcaacacttgattagatatcaacatttgaaagttacttmatcaaatgatgaaattaaaacttatgaaaaaatttgaccttatgacatatgaaaaacatttcttttgtaagtccctttttttcacttttaccttctaaacttgccttc

SEQ ID NO: 219750 - DNA, 528 bp, Homo sapiens
gtcctgttgttagaggatagaatttgagttaaattcactatttgggtcttcaaccatgctccatgccaggagcactattaaccacaaagacacattgacacaaatggtagagagcctgctgagaggccagaaagtgaaacaggtcaaacaaaataatttttggatactttcctcttccaaaaatctgttatgaaatctagaattgacctctaatgtattttatttgtcagttgacccagaaaatcaggacttcatcatcataacatccatagcacaaattattttaatcccagagtctcctcaagtcttgttctgtttttcaaagatttggcagaaattactaaacatgaaagtatgcacaaaaagttgaagttacgccaaggaatcagacatatttttcagttggtttaacaaatacagtaagcaatcaagaaaataaaattaagtatggtgctcaaaagagtgaaaaaaattcacaaatactctccaggtatccwaatgcttcgttctgatatgtgcacttaaatt

SEQ ID NO: 219751 - DNA, 569 bp, Homo sapiens
acttataatctagttggaggcaggtgatgtgtatggggtggggtaggtgtgtgcctatacacacacacacacacacgaataatttatattgataaagagtagatagacatatagatagataaacacataccacacacacacacacacacacacacacacacacacacacacacaaactaaaagacactagataaacaagaaagactgtaaaggtaccaatctgtatgttatagaatttaacattaggggaatcaaactaaaaatgaggtgacatcaactagagaaggtctcatgggttgaattgtatccccaaaagatatgttgaagttataacccccagtacctcatgtggaaatagaatatttgcagatataatcaatttaagatgaggttataccaaattaaggtgagctcccatccaatackactggtgtcctttgaagaagaggaaaacagacagagacacagctagatacacacaaagggaacatactatctgtcaatagaggcagagattgaagtgctgcagcttgtaagtcaataaacaccaagagttggcaggaaaccac

SEQ ID NO: 219752 - DNA, 403 bp, Homo sapiens
aaggtaaagctaagattctaaacctaaatgactgggagaattttatattttttmttctaccataatcaagtggtataagataattttaaaagacaataatctcagagagctctttattggatcatgaaggttattttatgtggttgatttttatttagaattatacagttttgaaactggagttgtataattgcattattgttagttagagcgaatatttattgggtgcttactacgctccagacaaagtattgtcaattacatggattatctgattacattctcactgccatcttatgagatagatattattctcttcaatttaaagatgaggaaactgaggaatggagcggttaagcaacatttccagttatacactgctagtaagtggcagagcaggaag

SEQ ID NO: 219753 - DNA, 483 bp, Homo sapiens
atcctcctcctctaagaccgtattgtggagtcatagcagccctgataattgcttaaatgagaagaggagactaaatattataataaagattgcaaacagtgttgaagacaattatactgaattctttcctggatatttttggtattcatttgatatagggmattgtgacgcttgaatgaatggatttataatttaacctaaaagttagaattaagcaattcaatgtttgtctgaaggaagattcattactcttaaccagatgattttttagatgccctaatatgcttcttcctgcagtaatcccttggtgtttcccttgcaactgacaatggacccgactgctcctccacagccagcacagatggttcctcttacctgaagccactggctttgaccgaccttttctttctggttggtgactaaaggagatagttgacttcattcttaaaggggagaacgagtcaagtcacaagtctcagttct

SEQ ID NO: 219754 - DNA, 586 bp, Homo sapiens
aagtttcccaatttgagctgtccgatccagttgccactgagttttcttttatgttacttaagagccttactaattttcagcaccaatacaattcagtttttagaattaggmaattagaatcatggcattttgctgattgggaatacccaactaagcctggtgaccttgcatgggacccctttgtctctgtctttttatttattattatggtatatggttaaggtgtacactctgatgttttgataaatgtatacctagtattacagtctatttctggagtcacactcactcccagctatgctgcctctctcctccttaaggcaggctctcatagccttctctcctgtctgctcttgaggtcttgggttctcattacagctgaacacctgctgtttcaagccagcctcctcatggttaccagggatgtcccttagccctcccttggcaaacccgtttgtcagttgcctcactctctggcagcacctatttttatgccagcaatattacagctttctcacatcagcttttcctcgtaactctcacttaaatgtgactgtatgataccaggaagcttcccaccccaaaa

SEQ ID NO: 219755 - DNA, 586 bp, Homo sapiens
aagtttcccaatttgagctgtccgatccagttgccactgagttttcttttatgttacttaagagccttactaattttcagcaccaatacaattcagtttttagaattaggcaattagaatcatrgcattttgctgattgggaatacccaactaagcctggtgaccttgcatgggacccctttgtctctgtctttttatttattattatggtatatggttaaggtgtacactctgatgttttgataaatgtatacctagtattacagtctatttctggagtcacactcactcccagctatgctgcctctctcctccttaaggcaggctctcatagccttctctcctgtctgctcttgaggtcttgggttctcattacagctgaacacctgctgtttcaagccagcctcctcatggttaccagggatgtcccttagccctcccttggcaaacccgtttgtcagttgcctcactctctggcagcacctatttttatgccagcaatattacagctttctcacatcagcttttcctcgtaactctcacttaaatgtgactgtatgataccaggaagcttcccaccccaaaa

SEQ ID NO: 219756 - DNA, 397 bp, Homo sapiens
gaaagtcatttttatagttatcccaataagttggttccttattgggaaccagatttaaaaagggggaagagatttaaagaaccggctacactgtaactgatcagccacatcacaggcaagtggaggctgctgtactggtgtgggggtggctacaggccctgttaggtgaatccagaccatgtcctggggagtgtccacttggakttgggtcctgatggctacttacctagatgttttctgggaaatgagaccctcacacagccatggggaggaagccgccatgttggtaaaatgcccagtttctttctctgagtacatggcaagtgggaaacaaggtcataccatggaatctgggcttgagcctttggtagggagtggggaggttgaaggtttttga

SEQ ID NO: 219757 - DNA, 526 bp, Homo sapiens
gttacagtgtgttcactttctgccgtaatgccatggttagtccagtgcattagccaaaattgtaatggacacaagggtgcaggcttgctgttctttctgcctgaaggttgatgacctgtttgtggctgactaacctgtgctcttcttctgaatgtcatggacttgtaatgctgaactgcacagcgctcagcagaatgccagcgctccttttaaataaaattttggaatgctgtttatgtgttcactgtcattcttggcctgcactggggtttccaagagcctttcactagggggaaaagcaaccaacttattgggataactataaaaatgactttctgtcttargcatagagaaggagacgtgccaaaaggtggaagaagacgtgtccaccatgcttgtaagttcctgaatgtggagggccaggtggggctcgggtttctttcagtatttgttttgaagcccatgtgaatttgttaaactctggtcagtgttaggtgatgaggataaaatacaaataagacacagt

SEQ ID NO: 219758 - DNA, 568 bp, Homo sapiens
tatatatatatgggtgtgtgtgtgtgtatatatgtgtgtgtatatatatatatcttggtttaaaaaaataacccagaagacaagatataatctttaaaaattattttatttttattaatgattacgggtacwtcatagtggtacatacttatggggtacatatgatgttttttgttttagaggtgaggtcttgctgtgttgcccaggctggtcttgaacccatggcctcacgtgatccgctcccctcagcctctcaagtaaatgggactgcaagtgagaggcactgtgtttggcatcttgctttttttggctaaaccttatcttgtaagcagtttcttccatacagcctcagctttttgatgactgtatgatattcttttcccaattattgaacatttaggccatttctaatttttctctattttaaatatatataatgatttaaaaaatcattgtctattagtttgctagggctgccataacaaaatacaacagatctaggttgcttaggcaacagaaatttattttctcactgtctggaggctggaagtgaaagatcagggtgtga

SEQ ID NO: 219759 - DNA, 571 bp, Homo sapiens
gaagagcttccagctccccacctggtgtccctaagtggcagcagaggctgctgctgtattcctgagtcctagttttatgcatccatttgtctcagatctcatcagtccttcctcttcaattgattcaaggcctcaaccccaaatgcttcctgcattgctctgcagcaccctccagccctactgatgcccatcaagtcataggaatcacacttgtcctctatggagacccaaacattaaataattaaaacaatgagagaagatttgggaagcaaagtcgatgcacttttctgcatagccacagagctgagtcatytaagctctgtacagattcatcaattgaaattgtctgtgatggttaattttctgtgttaacttggcttggcaatggtgcccagttgttgtcaaatatcagtctacatgttgctgtgaagttattttttaaacgtgattaacatttaaattggcagactttgagtaaagctgattaccttctatagtgtgagtggccctcacccaatcgttgaagatgttaagagagaaaactgagatccctcaaagaggaaggaattc

SEQ ID NO: 219760 - DNA, 492 bp, Homo sapiens
caaacttcatagagcaaaagttaaatttagcttgttttacctgtaagtttgttttacctatatgactctaatagcattctctgccaacattttttttgagcagaaaaaacatggatagactttttttytttgtgaagtaataagcttgctatcaaaattgattttatataaatgtgggttcaagacatatttctttcctgagttacattacattaatattcacattcgctcataaaaaatctataatactgggcaagtgcttaaagaaatttcatgctgtcaccatatcaaaggttagcagattttaaagggctatggagtaaaatatgtttggctttgtgagccatctattttctgttagagtgacttaactctgctatggtagcacaaaagcagccacagttagatgtaaaacgaataggagtgactgtgttccaataaaactttattcataaaacctgaaggtgagccagattccaatccctaactagg

SEQ ID NO: 219761 - DNA, 569 bp, Homo sapiens
tcaggggtgagataataaagatctggatttagactggtggaagtgagaaagaatagaatttgagtctagcgcccactgctttagggaaatctgcatcagcaaaccactgaaataaaatgcttgttgggacatgagtttaattccgggaagagaggaagtgtcaaaacccagatttgctagggtaatcctgaattgattaagatgattataaaattgactgaaattattttttcagtatttttttaacataagggctgtttaggatacaaattaatttcagttataaaaattcagccatattgctgcatacatgagtttgaagtgagactaagattaatgccctctaaaattatgttagaaatcattctctatagatctgaaaataacattctatcttctcctttcctttcagtagatacacacaaaatctgccaaaaaaaaaaaaaaggagagacataatattcctggagtttctcaggtttaatatggtatattgagctcatgaacatgtctccctttccttgccraagaaatattgtcccatgccatcaaaacaagaaaaagggagc

SEQ ID NO: 219762 - DNA, 583 bp, Homo sapiens
ggaaattgtggcacatgctacaacatgaatgaaccttaaggaggttatgtgaaatacaccatagtcaaactcattgaaacagaaagtagaatgatgtttgctaggggcttggaggagaaaaaagtggaaagttgttgtttaatgagtaatagaggttcagttttgtgagatgaatagttctagagactggttgcacgacaatgcgaaggtatttaatatattactgaacggtacaacaaaaaacatatcaaacttctcattgggtctgtcggagaaagtcacattaaaaacagcaagctgaagtcaagccagaaaaggtcataggttttcagaaagcttatcacaagcaaaactttgctataaaagtgaaaatcagataatctcatctcaaatatttcaattacaaaggattaaattattgagctccctgttttttcctttcttgaaataggaaatgttctaagaaatraaacccttaaaacataacaatgatcctggctgagttgtggcaatttcaccaggatttctgtgaaggacttgaattaacttattacttcccattgcatgtcaaagttcaggttta

SEQ ID NO: 219763 - DNA, 574 bp, Homo sapiens
ggggaggcctcacagtcatggaggaagatgaaggaagggtaaagggacgtcttacgtggctgctggcaaagacagaatttgcacagggaaactccccttatgaaaccaacagatcttgtgagacttattcactatcatgagaccagcatgggaaagactcacccccatgattcaattacctcctaccaggtacctcccatgacatgtgggaattgtgggasctacaattcaggatgagatttgggtggggacacagccaaactgtatcaccagtagtactgttctgctacatgggcttatgacttgtgctcccttgattcccagtgtcttagagatacttaaatagaatcacactttgtatttttacttaaattttttgtctagaggactgagaaaatattcatgggagctggaccttgaaaaagcaagaattaggcaaaaatttatttccctgactgaaccctggttatggtgattaaaactgctctttgtgagctaaacatgtttcctttgattctactgagaggttttgaaatgactgcagaagccaacacctgctcacctaaataatgca

SEQ ID NO: 219764 - DNA, 574 bp, Homo sapiens
ggggaggcctcacagtcatggaggaagatgaaggaagggtaaagggacgtcttacgtggctgctggcaaagacagaatttgcacagggaaactccccttatgaaaccaacagatcttgtgagacttattcactatcatgagaccagcatgggaaagactcacccccatgattcaattacctcctaccaggtacctcccatgacatgtgggaattgtgggagcyacaattcaggatgagatttgggtggggacacagccaaactgtatcaccagtagtactgttctgctacatgggcttatgacttgtgctcccttgattcccagtgtcttagagatacttaaatagaatcacactttgtatttttacttaaattttttgtctagaggactgagaaaatattcatgggagctggaccttgaaaaagcaagaattaggcaaaaatttatttccctgactgaaccctggttatggtgattaaaactgctctttgtgagctaaacatgtttcctttgattctactgagaggttttgaaatgactgcagaagccaacacctgctcacctaaataatgca

SEQ ID NO: 219765 - DNA, 574 bp, Homo sapiens
ggggaggcctcacagtcatggaggaagatgaaggaagggtaaagggacgtcttacgtggctgctggcaaagacagaatttgcacagggaaactccccttatgaaaccaacagatcttgtgagacttattcactatcatgagaccagcatgggaaagactcacccccatgattcaattacctcctaccaggtacctcccatgacatgtgggaattgtgggagctacaattcaggatgagatttgggtggggacacagcyaaactgtatcaccagtagtactgttctgctacatgggcttatgacttgtgctcccttgattcccagtgtcttagagatacttaaatagaatcacactttgtatttttacttaaattttttgtctagaggactgagaaaatattcatgggagctggaccttgaaaaagcaagaattaggcaaaaatttatttccctgactgaaccctggttatggtgattaaaactgctctttgtgagctaaacatgtttcctttgattctactgagaggttttgaaatgactgcagaagccaacacctgctcacctaaataatgca

SEQ ID NO: 219766 - DNA, 574 bp, Homo sapiens
ggggaggcctcacagtcatggaggaagatgaaggaagggtaaagggacgtcttacgtggctgctggcaaagacagaatttgcacagggaaactccccttatgaaaccaacagatcttgtgagacttattcactatcatgagaccagcatgggaaagactcacccccatgattcaattacctcctaccaggtacctcccatgacatgtgggaattgtgggagctacaattcaggatgagatttgggtggggacacagccaaactgtatcaccagtagtactgttctgctacatgggcttatgacttgtgctyccttgattcccagtgtcttagagatacttaaatagaatcacactttgtatttttacttaaattttttgtctagaggactgagaaaatattcatgggagctggaccttgaaaaagcaagaattaggcaaaaatttatttccctgactgaaccctggttatggtgattaaaactgctctttgtgagctaaacatgtttcctttgattctactgagaggttttgaaatgactgcagaagccaacacctgctcacctaaataatgca

SEQ ID NO: 219767 - DNA, 588 bp, Homo sapiens
cgatgatgcaaataaagaaataaagggatggataattgggggcaggtcaggcttatgaattggtgtagagctccattccccaaatatccccttaattagagtgttttcattagagtcattttggaaattgttacaatgctcactgtaatgatgttacaattctgtgtcatgaatgctccatstaaaagcaaaaatgccttcatttaattatttagtaaaaatgtcaaagagggatgtgatcactgaaaactggaagtattaagtaaaataataaaatcattcaaggaacacaaactcttgcttaagtaagcttacctaccttcctttctcccttcctggcaaaatttctgtgaatagtcatctttaccttctctcctcttaagtgcatttatccttcagctcggttaaatactcatcttgcccttttgtaccatctaaaacattctttggttaccagaggctgggaagggaaatgggagtgaggttggagggagatgaggatggttaatcaatacaaaaaataattagaaagaatgaataagacctactttttgatagaccagcagggtgactacagtcaataacaat

SEQ ID NO: 219768 - DNA, 535 bp, Homo sapiens
tgtttggttgagtttacttttattcagaggtaataaaattgaattatttctttttattttatcttattattattataatagaagcaattgtcttttgtattgggaaaagctactatagttactctttgtaaatgctaagtgcttgcctaggccaaataatgatcagctttacatcttttatgtttaaaatttttcttcttatcattcagcagtcatttktctgtgaccctcaattaagttgctttgctgtttctgctcttaaataaaattggttcactaagaattgggtgatgaagagctaaggataaaaaaattccatatgagaactgtttcaacctctagtttgtaataatcaggtaaaaaagatttcctggaattaagccacaggaactctggcttaagtcagagctgtcaactgggaaacaaatttccagacattttgaaacttaattcatttaatttttctggtaactggattagaaaatatgattaagcatagcaggatattcttttactggatcagtctgactttgaa

SEQ ID NO: 219769 - DNA, 604 bp, Homo sapiens
gatccaggcttgcaagcctgtttccttcaagagcaatagggaaccacagaaagattataaacaagggaatgatatgatcaaagacattttgggggaagatcactttagcagcattatggaaaagagcttggaagaaaaaaggttgtaactagtggaaccctatttgagtctatagaagttgcacaggagagggagaatggaggccgggccttctttagtggatcctcagttttgtcatccaaagaacttggaatcccacattgatttcccccatcacacataatgtatgattgtatatgtgtaagtatgattgtcagaggcagaggtcattgatacctgtttatacacataagtatgattgtcagaggcagaggtcattgatatctgtttctagaaactctgatgactgcaaaagtgtttctcatttccttagtaagaaaaatgccaagaatagtccttgtgaatgtagagaagaaagaagcaccctgtgccttctctatctratacttaggctcagcactgttttgacagaaaaagcggctttctctctttccctccatggcatttcgattattttgtagttgttgttgttgttgttgttttg

SEQ ID NO: 219770 - DNA, 541 bp, Homo sapiens
ttgtgatgtgtctgttcaagtcatttctctcttttttatttagattgtttggatacaaatcctttgtaatttataatttttcctatagctagtgtttacacttcattaatggcatcttttgctgagtagaaatttttgtgaagttcagtgtatcatttaaaaaaatagtttgtgtttatgactccaccataaaagatcttcattactcctctaggtcataaaaatgtttttctatattatcttatctatattctaagttttcccttgtcatcttagcttttatgtagatctatgtctcgaacaaaattaatttttgtgtgttatatgaggtaggtcttggggttcattatattctacatggatatccaattgttctggtactgtttgttcaaaaaatttccttttcccattaaattgctttggtagctttgcaaaatcagttgactgtatgtgtggatctgtttctggatttctccrttgtttctgtgatctatctttccttatgtcgatgccataatctttactactatagctttgtgtt

SEQ ID NO: 219771 - DNA, 582 bp, Homo sapiens
ttaaatttttttgtttttaacatttgcaactctacattgattctgacaattttcacatttcccccttttgatcaagatctttctcataaagcatcactggtcaatcttgctgttgttagtttctgatgttccacagtgctaagatggacctgtccaaattgttggtcttgtcccacattatggggagtgattgacagctaggagtcagtgtcaaaaccctttaagccacatttgaattacaagacagatttgaagggagtggttctcaggctacccggagtccattattaatttcagtattgtgtgttccatagtcttctcccatcatcaaaagtactgagctagcattagtctgwtaaaatctgtgcttctgcaaaaatctaacaagtaaaagatgcagagtttaaaaagggaaaatacaaagtaatattagcaggcaatcccagtttgtctaacagttttgagctatgaacctaggctgaaagacaaccaattgaacaaatcaaatgaccatagggaattagatgaaatctgttataaccatgtggcctattttcttattcaccaatggatatcaaagta

SEQ ID NO: 219772 - DNA, 581 bp, Homo sapiens
ccctatctcccaaatgcatatttcgggacatggcaatatttttctagtgttaatatgaattgatgtcttccttagaaataattagagccctacatgtcagaaaattatgagacagagtgtctttcagctcaagtaatgttccaacacaggaggcaaagaaaacgcattatctgaaaattactccstataaagtgaatagtcatgttctcacttgagttctttggaaacagatggccattctcttagtaataaaaataattctccttacttaccaagcttttatttcaaaatatattcctttgaattatgtcatgttatcctcataccatgtctatgagggagatagagaccaagacatgatagttcatagagctctcagcagaaaagtataaacccagtctccaaacttgtcatcacctcccagggatctcatgacatatctcattccatactaggattgagactgatccatttatgtatattgcttttctgcttttctaggaggaaacttgctactgccttttaaaccaatgtaaaagtgtatgtcaacagagtaaaatcagagtttggttatgttatag

SEQ ID NO: 219773 - DNA, 626 bp, Homo sapiens
agatgttaataaaaacctaagtagcgttttgtaccttccttgatgatccttagctgttgtcaatcaaactgcatctctagtctatttttagtctggaaagaaactgcttatctttaacttgcccaaagactcttctggggcttttccactatgctgaaattttaataacatctctagatagttcttcatttctgttacaagatttaacttccttattgaggcaatcttttgactgtcttcagcttcctcagttatcagtacttagttctcttgttaacctaagttccatgtacctagtctcttactttctcctaaatggggtaaaaattcatttttattcacaaagctactgctgatggagagaaattacaggtgtgatgtacttctcctcagtagtagcataccaacttagcaatcacattttcccccctcaactatgcataaacttactagcttcatttgcccyttctttaaaaaacaaacagacaaaaaaacaaaacaaaacaaaacaattttgagctacttttctttttccttggcaaactgctcagctgggtgcctgtaaaatgaaatgtacatcaaatacattccatagcgaccctcacattcatgatctaatatggttt

SEQ ID NO: 219774 - DNA, 626 bp, Homo sapiens
agatgttaataaaaacctaagtagcgttttgtaccttccttgatgatccttagctgttgtcaatcaaactgcatctctagtctatttttagtctggaaagaaactgcttatctttaacttgcccaaagactcttctggggcttttccactatgctgaaattttaataacatctctagatagttcttcatttctgttacaagatttaacttccttattgaggcaatcttttgactgtcttcagcttcctcagttatcagtacttagttctcttgttaacctaagttccatgtacctagtctcttactttctcctaaatggggtaaaaattcatttttattcacaaagctactgctgatggagagaaattacaggtgtgatgtacttctcctcagtagtagcataccaacttagcaatcacattttcccccctcaactatgcataaacttactagcttcatttgccccttctttaaaaaasaaacagacaaaaaaacaaaacaaaacaaaacaattttgagctacttttctttttccttggcaaactgctcagctgggtgcctgtaaaatgaaatgtacatcaaatacattccatagcgaccctcacattcatgatctaatatggttt

SEQ ID NO: 219775 - DNA, 626 bp, Homo sapiens
agatgttaataaaaacctaagtagcgttttgtaccttccttgatgatccttagctgttgtcaatcaaactgcatctctagtctatttttagtctggaaagaaactgcttatctttaacttgcccaaagactcttctggggcttttccactatgctgaaattttaataacatctctagatagttcttcatttctgttacaagatttaacttccttattgaggcaatcttttgactgtcttcagcttcctcagttatcagtacttagttctcttgttaacctaagttccatgtacctagtctcttactttctcctaaatggggtaaaaattcatttttattcacaaagctactgctgatggagagaaattacaggtgtgatgtacttctcctcagtagtagcataccaacttagcaatcacattttcccccctcaactatgcataaacttactagcttcatttgccccttctttaaaaaacaaacagacaaaaaaacaaaacaaaacaaaacaattttgagctacttttctttttccttggcaaactgctcagctgggtgcctgtaaaatgaaatgtacatcaaatacattccatagcgacyctcacattcatgatctaatatggttt

SEQ ID NO: 219776 - DNA, 576 bp, Homo sapiens
atgacaatgcttttactgggattctcttataatttaatttaaattcactcacctcaaagctttctccaggactgccatttatttcctatgatctctgcctcaaatagccataagcctggtaaccaactaaaaaaagccagctgtggatgccccagagttgcttgagccagtttcttcagaytctctctccttgttcccagcatgctctgactgactggcctcaagtgctgtctttatagctgtaacatcaacttcagggctgccactggccctttgaattgaatgttcataattacttttcgtggcttcttactcttggcttaccctaagtgatatttaccttgtttttactttttaccattcacattatgagttggcttgagcaaagcttctccctcaatgtcctggttatggaagagacacaacagccattctgggaagctggggatagtagctgaaagtatggggaatgtttgctattttgtcacagtctcactttttcctttgagagaagaagacacagctttcatcagaaggggggcagtgaaatattttagataggggagtgagctgata

SEQ ID NO: 219777 - DNA, 576 bp, Homo sapiens
atgacaatgcttttactgggattctcttataatttaatttaaattcactcacctcaaagctttctccaggactgccatttatttcctatgatctctgcctcaaatagccataagcctggtaaccaactaaaaaaagccagctgtggatgccccagagttgcttgagccagtttcttcagattctctctccttgttcccagcatgctctgactgactggcctcaagtgctgtctttatagctgtarcatcaacttcagggctgccactggccctttgaattgaatgttcataattacttttcgtggcttcttactcttggcttaccctaagtgatatttaccttgtttttactttttaccattcacattatgagttggcttgagcaaagcttctccctcaatgtcctggttatggaagagacacaacagccattctgggaagctggggatagtagctgaaagtatggggaatgtttgctattttgtcacagtctcactttttcctttgagagaagaagacacagctttcatcagaaggggggcagtgaaatattttagataggggagtgagctgata

SEQ ID NO: 219778 - DNA, 351 bp, Homo sapiens
ttactgaacattagagaaatgcaaatcaaaaccacaatgagatactatctcctgagtcagaatggctattattaaaaagtcaaaaacaacagatgctggcgagttcgcagagaaaagggaactcttatacactgctggtgggaatgtaaatyagttcaaccatcgtggaaagcagtatgattcctcaaagagctaaaagcagaactagcatatgatctggcaacctcattactgagtatatacccagaagaatataaatcattctaccataaaggcgcatgcacgcaaatgttcattgcagcactattcatagcaaagtcatagaatcaacttaaatgctcatcaatgaca

SEQ ID NO: 219779 - DNA, 351 bp, Homo sapiens
ttactgaacattagagaaatgcaaatcaaaaccacaatgagatactatctcctgagtcagaatggctattattaaaaagtcaaaaacaacagatgctggcgagttcgcagagaaaagggaactcttatacactgctggtgggaatgtaaattagttcaaccatcgtggaaagcagtatgattcctcaaagagctaaaagcagaactagcatatratctggcaacctcattactgagtatatacccagaagaatataaatcattctaccataaaggcgcatgcacgcaaatgttcattgcagcactattcatagcaaagtcatagaatcaacttaaatgctcatcaatgaca

SEQ ID NO: 219780 - DNA, 463 bp, Homo sapiens
ccaaattagccagtgatgtttgcaatcctttgtatgtcctttatacagttgtaggataycagagccatctcaaaatctaagtcaagcccagacacttcagcccctacttacaatagaaatcaggacatattttatcactcagttacacataaggcatgagacttaatatatagcccaggctgtaggagttattaaagaatgaagttattttgccaaccttacttatacaacacaacatataatattttggcatagatactctttaactcactacatattggcttatctgcaaagtccagtgtcaatgtggaaattataaatagtagatctgtttggcaaagtctctgagattaatgagtgttattgtcccacagaagaagaaatacctcaaaattatattacaatattcccacagctcgtcagtctgttccaatgccacattctgttcatggttgcttttggc

SEQ ID NO: 219781 - DNA, 587 bp, Homo sapiens
gaaaaactacctattgggtattatgctcactgcctggttgcaatatacccttgtaataaaactgcagatgtacccccatatctaaaataaaatttgacattacaaaaaaagaaatgtaggttaaaaaatagtatctgcttcgtagaatagttgtgattaatacatgaattaataactgtaatgagtttagtatattgtctggtatataatacatcattattttcccatttatttaatttttattgttttagccctttgcatatatcagtttgataaaattttaatttaaaaggtgagaaattagacctattaaatgtatattgctttttccagactctagctggaatagggtatgggttataagagctgtagtttatttgtttttttgtttgttttcatttcagtgggtttttggagaacaggtggtatttggttacawgaataagttctttagcagtgatttctgagattttgttgcacccactgcccgagcagtgtaaactgtacccaatgtgtagtcttttatcctgcagccctgcccccacccttttcccccaagtccccaaagtccattttatcattcttat

SEQ ID NO: 219782 - DNA, 572 bp, Homo sapiens
aaacagcctgatcccttgggagtggccacagttttggggacttgtgtatcaccttcaaaagagatgaaccatgagaatcctctcaccacaggaacaaatcgaaagggaggagtagtgaccttctgaactgttgtggggaagaagtccatgttcgtgagcacatccttccctctgtctcctgggctcaagcaatcctcctgcctcagtctcctgagtaggtgggactacaggtgtatgccactatgcctagcttctgtttttactgagattgctttcaataatgaagagtctaattagaatatatatggctgggatttattctcattcttggctgatcttctatagagggaaggcatcgtgtaaaaccaattaaaaatgacagcatacttcctgtagcaacctcccataactcctcattcgcagggatggcaaacttgaggaaagaggtgaaatttgtctttagtgtctcgttctctctttacctattctattttgcacccctccctcttctgccacatasgcctactaaggaagggttggatcataatccccaaaaacacaattccaaacag

SEQ ID NO: 219783 - DNA, 560 bp, Homo sapiens
ctaattcccaaagtcagtgttttgtccccataacaacctgcaggtgtctgaggaccatagaaatcagcttaatgtaatttttccatttttctctgctcaggttctgagatggcaactgctggtttcatttgtctggagatttcatctttcagagctgtcaaggattttagtggctataaggagagaactctgatgataaagtttattgattcatgactgcattcatataaaacactaaatggaattttgaatggcaagaaacatgttttgtacattcaataaatgagaatctgtgtatcatgaaaatggtaacacttagtatgataattttcagtttataaagtgttttatttaattctgacaataatcctgtaaggtarctgagttgttgagttatagtagcactcaatgtatacccttcaacccctgccacaaacacacaaatgcatgttcagttttctttcatatacaaaatatcccatctccccaaaccgttaccccatctcatactttgttcacttctaaaattcctggaaaggtgaaatgttcccataactgtc

SEQ ID NO: 219784 - DNA, 560 bp, Homo sapiens
ctaattcccaaagtcagtgttttgtccccataacaacctgcaggtgtctgaggaccatagaaatcagcttaatgtaatttttccatttttctctgctcaggttctgagatggcaactgctggtttcatttgtctggagatttcatctttcagagctgtcaaggattttagtggctataaggagagaactctgatgataaagtttattgattcatgactgcattcatataaaacactaaatggaattttgaatggcaagaaacatgttttgtacattcaataaatgagaatctgtgtatcatgaaaatggtaacacttagtatgataattttcagtttataaagtgttttatttaattctgacaataatcctgtaaggtagctgagttgttgagttatagtagcactcartgtatacccttcaacccctgccacaaacacacaaatgcatgttcagttttctttcatatacaaaatatcccatctccccaaaccgttaccccatctcatactttgttcacttctaaaattcctggaaaggtgaaatgttcccataactgtc

SEQ ID NO: 219785 - DNA, 546 bp, Homo sapiens
gctactgtaagggtcttctcattccgttccctctgctgcagggaccacctgctccaggacttacagagccaatagagaaagtcagcactttccttcagggaagtagattattttcatcgtatgcaagggataaagtaaacattggggtttaacaatgaacttttgtttcttattttcatttttgaaaagtactgagtatttaatcttatgagtatataggaaaattgggtggtattacatgacactccaaaatgctttccctaaaagttaccctcccatggatgagagtggtctgatggatagtggtggtctgtgattttaccctactctttctcyatgagaagagaggctcaagtttccttctggatctaaatgggtagaatatgtgtccagcccctacggggtatattgcctctctccatcctctggcaggagaggtgctactctgcaccgtggtatatttacttagtgtactatatacgttaacaaatttaaaaatgtataaagtggagatttatgaatacagagaaaataggggtagggaaa

SEQ ID NO: 219786 - DNA, 609 bp, Homo sapiens
aagtcagcactttccttcagggaagtagattattttcatcgtatgcaagggataaagtaaacattggggtttaacaatgaacttttgtttcttattttcatttttgaaaagtactgagtatttaatcttatgagtatataggaaaattgggtggtattacatgacactccaaaatgctttccctaaaagttaccctcccatggatgagagtggtctgatggatagtggtggtctgtgattttaccctactctttctctatgagaagagaggctcaagtttccttctggatctaaatgggtagaatatgtgtccagcccctacggggtatattgcctctctccatcctctggcaggagaggtgctactctgcaccrtggtatatttacttagtgtactatatacgttaacaaatttaaaaatgtataaagtggagatttatgaatacagagaaaataggggtagggaaagaatggtaaatctagaagtgaatccacaaaatgcatgctgagaggttctgtatggtggatgggcaagggcccccagttggctttgtgcctagagaaaaacatggtccaataagtgaatcagtgtccataagatacaacaag

SEQ ID NO: 219787 - DNA, 609 bp, Homo sapiens
aagtcagcactttccttcagggaagtagattattttcatcgtatgcaagggataaagtaaacattggggtttaacaatgaacttttgtttcttattttcatttttgaaaagtactgagtatttaatcttatgagtatataggaaaattgggtggtattacatgacactccaaaatgctttccctaaaagttaccctcccatggatgagagtggtctgatggatagtggtggtctgtgattttaccctactctttctctatgagaagagaggctcaagtttccttctggatctaaatgggtagaatatgtgtccagcccctacggggtatattgcctctctccatcctctggcaggagaggtgctactctgcaccgtggtatatttacttagtgtactatatacgttaacaaatttaaaaatgtataaagtggagatttatgaatacagagaaaataggggtagggaaagaatggtaaatctagaagtgaatccacaaaatgcatgctgagaggttctgtatggtggatgggcaagggccccmagttggctttgtgcctagagaaaaacatggtccaataagtgaatcagtgtccataagatacaacaag

SEQ ID NO: 219788 - DNA, 495 bp, Homo sapiens
aacccataatatgtcactcagaaataacactatcttttgatttatatctatctagtatttttgtatacacacatataaaactgagatcatactataaatgcaactttgtatcctttgactaatatcacgtgcatttcctatatgcttagaaaacatcatttgaaaggattcagcagcctcttgactgataacagactgtccttctgggctgctgcaggcccttgctacaggaaggagggtatgaagaggaccccttcatggtggccrttcctttcattccttttctcctggcccacatcctgggaaaagacttggagaaatgttcaatcccacagtcattccttcagcagaactgcatgagggaaggaaggtgtggcactacctgggtggataccaccttgctctgcctggccctccagcagcctttcaacacatgcactgcacacatgcccccatgtggtctctctttccttcccacaacaacccaaaccttcc

SEQ ID NO: 219789 - DNA, 426 bp, Homo sapiens
gctcacacctgtaattccaacatttttgaaggataaggagggaggattgcttgagtccaggagttccagaccagcctgggcaatatagcaagaccttgcctctactaaaaattttgaaaaattagccaggcatagtcccagctacacaggaggctgaggcagaaggatcacttgagcccaggagatagaggctgcagtgagctataatcacaccactgcattcyggcctgggagacagagtgagaccctgtctcaaaacaaaaaatacaaaaaaacaaaaaccagaaaagtgacttcaattttctaatctcatactccagtcctctaagagtctaatcaggaacaaatataaaaattttaaatggaatctgggaaaacaaaatttacatggccagttgtacagtttcctcctacctctgccaaaaa

SEQ ID NO: 219790 - DNA, 457 bp, Homo sapiens
tgcaaaggcagtttcataattaaactaaagagattctgcacagcaaaaacaaaacaaaacaaaacaacaacagaaaaacaactatcatcagagtgaacagggaacatacagagcggagaaaatttttgcaatctatccatttgacaaaggtctagtatccagaatctacaaggaacttaaayaaatttttttaaaaaagcaaccccattaaaagtaggcaaaggacctgaacagacatttctcaaaagaagacattcatgtggccaacaaacatatgaaaaaaagctcaacatcactgatcattagagaaatgcaaatcaaaaccacaatgagataccatcccatgccactcagaatggtgatcattaaaaagtcaagaaacaacagatgctggtgaggttgcagagaaataagaacacttttatgccatttgtgggaatgtaaattaattcaacca

SEQ ID NO: 219791 - DNA, 406 bp, Homo sapiens
cctgtgtgacttatcacagatcatttttggcctcggttttctgacttgttttcaaaaagaaagattgttttagatgactacttaggtccctcacagtactaaaagcctatagtctgtacttttaatcacaatctatgagatgattcgattgtcttaatttgttcatrctctcttcctttaatcccactgagtgtccttaacatacaggtaatggaacacattgacctttatttttgaagttagtcccagatcaggaaatttctcataatgccaatgatttcttagaatacaggactcttctgcatcccattaccagtaaaggtacacatacacaggcaaggaaaataagtatattcttcaggctatgggggcaagtgtctgaaattattctgatctacctagaaac

SEQ ID NO: 219792 - DNA, 579 bp, Homo sapiens
gatctgggattgaaatggaggttgtctcattctctcatttgtagggggcattttgtcagcctggctgaagttgagcctggaaytggaatcagtgcagagagttgggggttacctcaggaagtcagaagtacgaagaggcagagatgaatgtcttagggcacaatttgggaagcaccattctatcttttgagggcaagtggaggttcataaatgaaaagcatttagaaagttagaagctggctgatactggaaagcagctaaaagcaagaccccaaaatgaaacatgaaaccagaggggattccacatttctgagagtagggctgaagaggttaagggtaattcttactgacactggcatttttagtgggctgctcttttccaaaccccacgatcagggtgaacagaaacagacattgagtttcttaaagtatggggctggctgcagcagtggtcatctttgcttatagtctgatattgattattgtcaggcagtaaaggaaataaatccacatacaaagttccttgaataagcaggcaatggtcatttgaagataccctttcctatgaaattgagaatt

SEQ ID NO: 219793 - DNA, 648 bp, Homo sapiens
cctggctcattactgacagttccagttcggcaaacatcccagaggctagattcatgaaatagtcttcagtttggattttcaatctcctagtctgcctacttgaggccctaacaatactaatgtcccacttcatccacatgggtggtcactacccctgaatcagggtttcaccacaccatgcaatcctcgcctgagtgagtaacttcctcargcttctggctttgcactttgccatttattattccatgaccctctgctcagccgctcagtcctcaagctggtctaccattaatgtgcagtggtaagtctctacctatgacagcagcacttgaatcagttctgcatctttacctgagatctgagcttatctcagcagctcaaattgacgttagaatatatatatgtatatgtggatgcacaataatgccaataacaagaataatagaattgtaaaaatcacagattatctgacttggaagtgacaattaggatcatcaggtcctaccatctttaatttacaggtagagaaattgaggtccaaataaacaatgttttttgaaggacacaaaactaggtcttctaattcccaggttgccacctgacttttgtagggcacctctttcacatacagcacctctttaaaataaa

SEQ ID NO: 219794 - DNA, 503 bp, Homo sapiens
gtttgctaatcttggctgcgtgtatcatgacacttttgtttgtgattatgcttcagtccacaatgaatttagtctttccattcccagccttattaatacacccttagtacttacartcctaaagcttcctggtaaagctttttcatcatattaaaatcagataagaatagcatctgcttgtgctatagtgttcatcttcagatgtatccgaccacaagaagacctaatattcaacaatcagaatgagagggcctcagcctttgctacagcctagcatcggctgcagacctcagactgcagcaggactgggcatcctctcagaggcctcaaaacagtgctgggtcttgggtagtagttggacatccagattaagaaataaaactcctaaaaaagatgttgatatcaaaggcccagaatcactgatttcaaaaccaataaactatgagagttaattttgacagaaaggtgcatataattttctgctggagattttttgtttgttt

SEQ ID NO: 219795 - DNA, 503 bp, Homo sapiens
gtttgctaatcttggctgcgtgtatcatgacacttttgtttgtgattatgcttcagtccacaatgaatttagtctttccattcccagccttattaatacacccttagtacttacagtcctaaagcttcctggtaaagctttttcatcatattaaaatcagataagaatagcatctgcttgtgctatagtgttcatcttcagatgtatccgaccacaagaagacytaatattcaacaatcagaatgagagggcctcagcctttgctacagcctagcatcggctgcagacctcagactgcagcaggactgggcatcctctcagaggcctcaaaacagtgctgggtcttgggtagtagttggacatccagattaagaaataaaactcctaaaaaagatgttgatatcaaaggcccagaatcactgatttcaaaaccaataaactatgagagttaattttgacagaaaggtgcatataattttctgctggagattttttgtttgttt

SEQ ID NO: 219796 - DNA, 531 bp, Homo sapiens
actattttttagcttcattctctttatctgcaaagtcagttggtatactctgcagtgtygtgaagactaaacgtgctatagctatgtgaacatgcttcagactgcctggctcacagatgaacaacaaatgttaaattccatctttgttttctccctaaattccttagattaataatttctatataggtgaattagaaacatgaaaagggtatgttattattttccatcttatgtttgtacagggtcttaaggaaaagaaaagagccatcagacactaatacaaataaaacaagaattgtgtatgcatcaagtcctcattaggtgtcagtcttaaaaattctagttggaaattgtatttgtaatttgaaggtcaagacctcctaatcaaactctcattgtgtttagccattgtttttgttcattatctcacataacaagaagcacagaggttggggcagcttgaggctcagtaccatcaacagctcaatgatgtcattaggaaatgggtactttccatctagttgtcatact

SEQ ID NO: 219797 - DNA, 531 bp, Homo sapiens
actattttttagcttcattctctttatctgcaaagtcagttggtatactctgcagtgttgtgaagactaaacgtgctatagctatgtgaacatgcttcagactgcctggctcacagatgaacaacaaatgttaaattccatctttgttttctccctaaattccttagattaataatttctatataggtgaattagaaacatgaaaagggtatgttattattttccatcttatgtttgtacagggtcttaaggaaaagaaaagagccatcagacactaatacaaataaaacaagaattgtgtatgcatcaagtcctcattaggtgtcagtcttaaaaattctagttggaaattgtatttgtaatttgaaggtcaagasctcctaatcaaactctcattgtgtttagccattgtttttgttcattatctcacataacaagaagcacagaggttggggcagcttgaggctcagtaccatcaacagctcaatgatgtcattaggaaatgggtactttccatctagttgtcatact

SEQ ID NO: 219798 - DNA, 195 bp, Homo sapiens
cctagaagatcatatgatacgtagtagatgctcagaaaatatttattgaatggctagagtaaatgtactaacgactgaataaaatacaatttctttgagtaraacattctgatacgatatttctctcaggccactctaggatgagagagaagttcgaagagacagtacagccacaggcctaagggtgtagactct

SEQ ID NO: 219799 - DNA, 398 bp, Homo sapiens
aaaaacagaaaagaacaacagttggatgatatatagtgtttatttaagatatcctgtaaaacaacaatgattatwatgttcatgaatgtgagaaaaggtggaaaattgaaccccagagtggtaatcaataagaaataccaaatagaaattgtaaaaataaagatataataactgatattaagaacttaggtttacaggaaattgaacccatatgaatagaagttaaatggaagaaaggacagcaggaaatacgccatctagagcataaaagaaagaaatagaatatagagaaaaaacagtaagagacaaatggaaaatgataaaaaggtctaacacagatgcaattgtagcctcagaaggagaggagagagataaggaacctgaatcatttttgaaaa

SEQ ID NO: 219800 - DNA, 576 bp, Homo sapiens
gctgcccacactccttggacacactgtcctgtcacctgcttcagtcggctttctctgtcacgtctccttctctctctggccttcctgccttcctctcacaaggaccctgtaattacatgggccccacccagataatccaagatcaccccccacctcagtacatttaactaaatcacatctgcaaagtctcctttgcctcgtaaagggacatagccacagattccagggagtaggatgcgggcaccccgggggccattccacagcccaccacrtagcccaaagggatgcaccaagcaggaactaaagcagacgctgtccaggcggcttaaagcagggagggctttaaggagcggaccttcccactgctggggggctgcctttctacagcaccatgagcaccatgaggctgttggttttatccactgagaatgaaataaactactgagagaaagcttttatctcactaatagatctgaagtcatgccctttaaaaaatgagaataagagataaatgtataataataaactatgttgcaatttccaataattaaatgcattccttttttatattcatat

SEQ ID NO: 219801 - DNA, 234 bp, Homo sapiens
atggaaaaaaaaaaagaacaagttccagctgaacatcttgctttattttctcctgccatgtagacacaggcttaggcaacatatatagccaactattatttacgtgtattgaaaacatggatacattgcatttagaaagttacttgttacaaacaaaacctaacaaattgtttagactttaataatgtgagaagmaacagaataaattaaaagctaaccacatttttctcagct

SEQ ID NO: 219802 - DNA, 624 bp, Homo sapiens
attcatgtacaagtttttacgtggacatatgctttcaattttcttgggtatacccaggagtggaattgctgaatcatataataactctatgttaagtttaatgaactatgttaagtttaaggagtttaaggaactgcctgtgttcgaaagtcactacactattttacaatcctaycagtagtgtattaggattccaatttctccatatcctttccaacatctgttattgtcattttgactttagtcatcctagtggatatgaagtggcatctcattgtggttttgatttacatttccctgataactaatgagctctttttcatatgtttattagctatttgtatatcttcttaggacaaatgtctattcagatcctttgcctatttttcaattaggtaatttgtctttttattatagagttgtaagagttctttatatattctagattcacatctcttatcagatatacgatttgcaagtactttcttctattttgtgagttgtctcttcactttcttgatagtgtcctttgacatgcaaacgtttttaagttttattaagtccagttgtatttcttttgttgcttgtggtttgagtgtcatatctaagaatctattgcctaac

SEQ ID NO: 219803 - DNA, 547 bp, Homo sapiens
cccctctttacaaaagacatataacttcttttcacaaccagaacctgaacagaattctgcacccctcaggggactgcagaattcacatccaagtaaggctaggctcacttcccaagaaaactgagccaaggagccaggtaggaaagaggttaaagtcttctgtgtgtcttcttgagaaggaggaaaaggctatcacacagctggaaagagaactgaataaaagggtcaaggctttcacygagattctgctcatgaggtggaatcttgtgtgaaagcattttcatcagaactctgcagcagattgcacatctgctcatctctccccaggaagcttaaccccaactctcagccaatctctttctcagcagtcacggaacagtagcctgttcctcatctgattcacctgccttgcaagcctcttccttctcagatggactgataggaccccaaatcctccccatcaccgctgtgcttggccctgataacatagacttgaccagcttcaggtcagcaacgatagagtcgtttaaggccatgtcctcaaaga

SEQ ID NO: 219804 - DNA, 547 bp, Homo sapiens
cccctctttacaaaagacatataacttcttttcacaaccagaacctgaacagaattctgcacccctcaggggactgcagaattcacatccaagtaaggctaggctcacttcccaagaaaactgagccaaggagccaggtaggaaagaggttaaagtcttctgtgtgtcttcttgagaaggaggaaaaggctatcacacagctggaaagagaactgaataaaagggtcaaggctttcactgagattctgctcatgaggtggaatcttgtgtgaaagcattttcatcagaactctgcarcagattgcacatctgctcatctctccccaggaagcttaaccccaactctcagccaatctctttctcagcagtcacggaacagtagcctgttcctcatctgattcacctgccttgcaagcctcttccttctcagatggactgataggaccccaaatcctccccatcaccgctgtgcttggccctgataacatagacttgaccagcttcaggtcagcaacgatagagtcgtttaaggccatgtcctcaaaga

SEQ ID NO: 219805 - DNA, 535 bp, Homo sapiens
cacattactttagcgacctaggttaaaatctttccctctgtgtataaatatttcaaacacaacatatctggacactgtctatgatcccccacagaaggtcttgtactaacacgtattataatggtggtaaatgcatatttatttgtagtttattttggcatcatttgcaattctgtgtctgatgatcacatctgaaaatcggagatagaggtgcagaaagctggaaagagcctatgaccttcacagatgtatggaaccaccctacagccctcaattgcctctctctgaacttctttcttgtgagaaataaacttctaaattattcaaacgactgttattttgagatttattcattgtatgcagtgagatttgagccctggtcaatagtaatcttaataatcattaaaatacattactggatggatgatcagataaagaaaatgtgatatatacatgtgatacacacacacacacacacacacacatatatatatayacacacacacaccatgggatactactcaaccatgaaaaa

SEQ ID NO: 219806 - DNA, 542 bp, Homo sapiens
aggaggaaggcagaacattggtggatggctgcaagagaaagagagggtagcaacagaaaaaacaaagtggggccagggaagtgtgtttgtctcctttgactgattctctctccctttctcgtgtgcgtgtgtgtgtaacttataaatatcaatgaatggatatacacacatattaaatattgtattcaatggaatatatatttgaagacagtttatgtattgaatagacacaattsaatatatgtatccatttgaataggtatacatatatgtacatatatacctatatgcgtaaataagtgtgtgtatatgtatatatattcaattgctctctttaaacctttgggttttactccatccctcagaatttttttttcaacagtatttcctttcttctttctacttgtcgccaaatctcccttttaaacacagccacaatatgaaacaataatttttaaattgttttcttctaatttgttttcctgttaacagttttacatatgcaaagtggctgagacttatatttgatatatatatgtttt

SEQ ID NO: 219807 - DNA, 542 bp, Homo sapiens
aggaggaaggcagaacattggtggatggctgcaagagaaagagagggtagcaacagaaaaaacaaagtggggccagggaagtgtgtttgtctcctttgactgattctctctccctttctcgtgtgcgtgtgtgtgtaacttataaatatcaatgaatggatatacacacatattaaatattgtattcaatggaatatatatttgaagacagtttatgtattgaatagacacaattcaatatatgtatccatttgaataggtatacatatatgtacatatatacctatatgcgtaaataagtgtgtgtatatgtatatatattcaattgctctctttaaacctttgggttttactccatccctcagaatttttttttcaacagtatttcctttcttctttctacttgtcgccaaatctcccttttaaacacagccacaatatgaaacaataatttttaaattgttttcttctaatttgttttcctgttaacagttttwcatatgcaaagtggctgagacttatatttgatatatatatgtttt

SEQ ID NO: 219808 - DNA, 504 bp, Homo sapiens
gagtgtaggagcattaggatcacacagccacgtgctcctctgtcctctgggcaatcttagttctctgtccaaaatttttttcagacttcatgttgtcattttgagactctcttttcccatctcttccttcacgtgggacctggaaattcctgccaatatattttcccagatttggtacccctttattttatttatttttacatttctcttttgtttttattattaatttttgtgggtacatagtagctgtatatatttgtgggttattttgagatattatgagatatttgagagattaatatatgagttattttgatacaggyatgcgatgtataataatcacatcagggtaaatggggtgtccatccctttaagcatttaatcctttttatttcaaacaatctgatatactctgttatttttaaatgtgcaattaaatgatttttttactatagtcattctgttgtgctagcaaataataggtcttattcattctttctaaca

SEQ ID NO: 219809 - DNA, 520 bp, Homo sapiens
gaattctttgcagtttcaaagacagtcacaatcagtagtttctggggatgataactggcaacgatggaccagatggccggccaggggcactcactttcactaaggtgcacttgaggagtctgctstcagcccctggggtgcatgctggatgcccgggggtcatttctaagcctttcctgcatatggtacctaacaggtacttaatggaaatctctttacaacaggtttaccctcatgttcgctgatttgatttgatgcaaaaaaaatccagagcctcaggcctctggtttgggatggcatgggaaacagaagagaggtacagatatcttaagggtggtctctgatgctgaggagacccctctcacctggagctgctgaccagccccaagcactggggtcctggtaggccttatgataaatgatggctgaaaagactgggggaagcatagagctgatggaggtgaaggtgctttcccatgtcctccctcccccaaagacacaggacaagtgaagaacctct

SEQ ID NO: 219810 - DNA, 579 bp, Homo sapiens
aagcttattctgataatcaagtatggtccatgttatggactgaatgtttgtgtctcctcamaattcatatattgaaaccgtaaccccaatgtaatggtatttggtggggcgaggactatggaaggtaatttggtcaggagaaggagccctcatggatgggattagtgtccttataagaagatgccagagttcttttcccaccatgtgaggacacagcacacagcaagacaatggctgtctataaaccaggaacagggccctcagcaagaactcgaccctgctggcaccctatttcagactccaacctccagaactgtgagacataaatttctgttatgtacaaggcacccaatgccatttttgttatagctgcccaaactgacttagacagaccaatagcatcagcatcacctggaaacttgtttaaaattaaaattgtctatttccaccccacacctactgaatcagaaactttgggtggtgtccagcaacctaagttttaacaattcatccagataatcctcacacacaccaaaatttgagagctacttggctaaaggatagataaaatacctgtca

SEQ ID NO: 219811 - DNA, 568 bp, Homo sapiens
ttttcggcaaatcttcagagggaaggcattgagagtgaatgggggaggatgcagacactgaggtgaagtggaaggaagcatggaaccctggttttgctgagaaccaggacttgattcttgactcccagacactagtggagaaggggtgagttgaacaggtaaggactggccygctcttgccacagacctgcagaattgtagtagcaggagattccacaactgccatggacacttgagtgggcaaggagagctgcttagaaaagtggaagtggaaggactccagcctgcgcagatcatagagggtttggtgcaggaatgtctatagtggagtacagctagcaacattcatagcccaaggcttgtcatattcttccaggggactttagctttagggcaacttttggacctggacagagtagggcggtcttgcctgatggatggggccagactgctgtgagtgcccctctatctgctggtctcttatggaaccccagcatgaccacaccctcctgtagtgcagcctcagatacacgagagtggtttctgtgggctgtcattacagctactt

SEQ ID NO: 219812 - DNA, 600 bp, Homo sapiens
agcctatgaatttaatacagttttccagtctctacttttgacttcrtggtgaagatacagcccaaaggactttggaattaagacaacaataaaaattgagattacattacaagcagtaataaaaacaagaagttataggtaccacaataacaggaaatctgtttttggaacatcaaggatttttaagaatatcattattcccattctgttttctgtcaggattctggaacttttatttttcttgcagcacagggaaaattagttagaatgaagctaaaatctatttgttatttataatgtactttgttttcatattgaaaacatcagtgatctcatcatgctagttttgcttttcccttataatgtatatactttttttaaaaacagcttattttccacttgcatacaacaatgggttgcacattcctgaggtccttaggaattattctaaaattgactgcagtggggatttcctttgacacttaaccatgtcacttcaaagactatttttaagtacgtgcccaagagaaaacacagtttctggttttaatttatttataatcatgaagcctagcaacatcttaaaaaataaaaataaaa

SEQ ID NO: 219813 - DNA, 472 bp, Homo sapiens
atatgaaatgtcatttaaagcccacattttgctttttaaatattacccagtggttttagttatacaaagatcaaatttcagcccaactccttggactttcaggcatggaaacctagcaaactctgtttctgtttctttctcctgaaacagttgtctctgcagacagaggtttggcatctgtctaccccctcacatataatatattactatggagttcctggaaacctgaaatggctccttgatggaaaacatgagacagatgggaacctctgaatgtctgcatctkgatgtttaatatttctgtattcataaagttaaaatttagaagtgaaaacttgaagtcagatattttagaaagaacacaatgtacttaagtggctagtgaattcattttgaaatttcagctaatatagaaacctgttctatggtgtattttaaaacatgtttctgaacgatcaggtttttttttctg

SEQ ID NO: 219814 - DNA, 465 bp, Homo sapiens
tgaaatgtcatttaaagcccacattttgctttttaaatattacccagtggttttagttatacaaagatcaaatttcagcccaactccttggactttcaggcatggaaacctagcaaactctgtttctgtttctttctcctgaaacagttgtctctgcagacagaggtttggcatctgtctaccccctcacatataatatattactatggagttcctggaaacctgaaatggctccttgatggaaaacatgagacagatgggaacctctgaatgtctgcatctggatgtttaatatttctgtattcataaagttaaaatttagaagtgaaaacttgaagtcagatattttagaaagaacacaatgtacttaagtggctagtgaaktcattttgaaatttcagctaatatagaaacctgttctatggtgtattttaaaacatgtttctgaacgatcaggtttttttt

SEQ ID NO: 219815 - DNA, 474 bp, Homo sapiens
gaaactttgttctcctttttcatgatttggctatttgtggtcctttgtatttccataagaattgtaggattgttttctctatttatttaaaaatgtctttaacaactataaaattgcaaaaaaaaaaagtttttacagttccattaaaataagctcaaataagtttgattgtcctccacttgatagttctaatttgtgctgaggtctctcttgtctaattgtgtgtgagaaacccatgaaatatgcagagttcttaaagactacctgtgtctaccatctttcacttctcagcattttctgatgtgagtaactaacacctcactttccaggacagtttgcaaggtactgactgataaaatgctagtgcactgggcagaagtggctgagaactgctcatacctttgcatctcaggtaatgwtggaaaaagaattcaacttggtatgccagtcgggtgtgccaagatttgtactata

SEQ ID NO: 219816 - DNA, 560 bp, Homo sapiens
gcgaggggggtttatgaagagaatcttgccaattcccctcatgttacagggatattaaaaatggaagacaaaaatgtacttgaatacttgtcattatttaaggaactagaaaagtcaagaggttccataattcaagatcctaatgatgaactttagagaaygtttagatttaggttaaattaatggagttatttaaagaggtgctaatgctatggtaactaagataagatttttcatttaaaaatgttgatattgtggtggccaggcatggtggctcacacctgtaatcccggcactttcggaggctgagatgggtggatcatttgagtccaggagtttgagaccagcctggacaacatggtgaaaccccatctccacaaaaaattagccaggcatgtagcatgcacctgtagttccagctacctgggagactcaggtgagaggatcacctgagcctgagaggccaacgctgcagtaagctgcagtgagttgtgattgtgccactgcactccagcctgggtaacagagtgagactctgtctcaaaaaaaagatgttgata

SEQ ID NO: 219817 - DNA, 560 bp, Homo sapiens
gcgaggggggtttatgaagagaatcttgccaattcccctcatgttacagggatattaaaaatggaagacaaaaatgtacttgaatacttgtcattatttaaggaactagaaaagtcaagaggttccataattcaagatcctaatgatgaactttagagaacgtttagatttaggttaaattaatggagttatttaaagaggtgctaatgctatggtaactaagataagatttttcatttaaaaatgttgatattgtggtggccaggcatggtggctcacacctgtaatcccggcactttcggaggctgagatgggtggatcayttgagtccaggagtttgagaccagcctggacaacatggtgaaaccccatctccacaaaaaattagccaggcatgtagcatgcacctgtagttccagctacctgggagactcaggtgagaggatcacctgagcctgagaggccaacgctgcagtaagctgcagtgagttgtgattgtgccactgcactccagcctgggtaacagagtgagactctgtctcaaaaaaaagatgttgata

SEQ ID NO: 219818 - DNA, 560 bp, Homo sapiens
gcgaggggggtttatgaagagaatcttgccaattcccctcatgttacagggatattaaaaatggaagacaaaaatgtacttgaatacttgtcattatttaaggaactagaaaagtcaagaggttccataattcaagatcctaatgatgaactttagagaacgtttagatttaggttaaattaatggagttatttaaagaggtgctaatgctatggtaactaagataagatttttcatttaaaaatgttgatattgtggtggccaggcatggtggctcacacctgtaatcccggcactttcggaggctgagatgggtggatcatttgagtccaggagtttgagaccagcctggacaacatggtgaaaccccatctccacaaaaaattagccaggcatgtagcatgcacctgtagttccagctacytgggagactcaggtgagaggatcacctgagcctgagaggccaacgctgcagtaagctgcagtgagttgtgattgtgccactgcactccagcctgggtaacagagtgagactctgtctcaaaaaaaagatgttgata

SEQ ID NO: 219819 - DNA, 577 bp, Homo sapiens
cagtaatcaatatagtgtggttattggtagaggaataaacacataggtcaatggaatggaagagtccagaaatagattcacacatatatggataaactgattttcaacaaagctgtaaggtctttattcttttcgaaagtgctttttggaacatctatatatccacgtcttggaaaaaaatatgtttgagagtaacattctggaaaaaaaagatgamaaaaaaaaagaacatcaatccatacttgactcttctataaaaattacctcaaatggacaataaacctaaatgtataacttaaaagtataaaacttctagcagaatacatacgagaaaaatctttgtgactttgggttaggaaaatatttcttagatacaacaacaaaagcatgagccatgaaagaaaaatcaactgaacttcatcaatactaagaactgctctttgaggacactgttaagagatgaaaagacaacgatagctgggagaaaataactgcaaatcacaaatctgataaaggacttatatccagaagatataaaaaatgttcaaaactcagtaagaaaacaaaaaacccaatt

SEQ ID NO: 219820 - DNA, 380 bp, Homo sapiens
ttgcccacctacgcctggttatgcattaaagtttacaactggtcttccttggtatatccagctactcttgatacctgggtctcaagtcatgtcttcctaattagtagccaggtatctgaggccaccatgggwgttatatcattttggtcttcacccaagttctgttctcttcactaatcaagaagattgactgccctctccagggtagtcatttgtagctccacttatccctctttttaagcattttccctgtccctggtggctgggtgcctgtgtcctgcttatgataccaggaacagatgactcttctgttcttcctgcttccttgggtggaaactgcaaaggatgccttccaaaatcagcttattatttttgtggac

SEQ ID NO: 219821 - DNA, 333 bp, Homo sapiens
tggtcttccttggtatatccagctactcttgatacctgggtctcaagtcatgtcttcctaattagtagccaggtatctgaggccaccatgggtgttatatcattttggtcttcacccaagttctgttctcttcactaatcaagaagattgactgccctctccagggtagtcatttgtagctccacttatccctctttttaagcattttccctgtccctggtggctgggtgcctgtgtcctgcttatgayaccaggaacagatgactcttctgttcttcctgcttccttgggtggaaactgcaaaggatgccttccaaaatcagcttattattt

SEQ ID NO: 219822 - DNA, 581 bp, Homo sapiens
actatgtcctgaggcattgtcggaagtggcagtgtcatatcacatcccagctcaaaggagtgcattttgatgaagattaatatagtttaaaacccctccattcccattgcagaatygccacaatctctttcctgtgttttcctcactcctccataatcagaaaagttcattataagcaagcgtccagaaactataaggaaaggtagagaagtgagcctgctaatgttacttaacccccaagtagactttttacccctgaagtgtcacatctgggaatcttttcaactcatctctaggctcttggcaccatgtgacatgcatgtgagcactgcaaaaactcttagatggtttcagactgctcaggccttgtcagcaaggatatcacagaaagcaagacaggccttcctggcatcctgcattactaggtcagacatatgtctaaattagaaaaatcatagttctcatctgggagaaagcaggggcaaatgtgctgaaactgaggggcctgggtcctcctggagattcatccagagatgaggaagaagagtctgcaaccatgctgcagagagagatcttggccc

SEQ ID NO: 219823 - DNA, 581 bp, Homo sapiens
actatgtcctgaggcattgtcggaagtggcagtgtcatatcacatcccagctcaaaggagtgcattttgatgaagattaatatagtttaaaacccctccattcccattgcagaattgccacaatctctttcctgtgttttcctcactcctccataatcagaaaagttcattataagcaagcgtccagaaactataaggaaaggtagagaagtgagcctgctaatgttacttaacccccaagtagactttttacccctgaagtgtcacatctgggaatcttttcaactcatctctaggctcttggcaccatgtgacatgcatgtgagcactgcaaaaactcttagatggtttcagactgctcaggccttgtcagcaaggatatcacagaaagcaagacaggccttcctggcatcctgcattactaggtcagacatatgtctaaattagaaaaatcatagttctcatctgggagaaagcaggggcaaatgtgctgaaactgaggggcctgggtcctcctggagattcatccagagatgaggaagaagagkctgcaaccatgctgcagagagagatcttggccc

SEQ ID NO: 219824 - DNA, 544 bp, Homo sapiens
attccagcagtgcgagcgctggaatcagacacattcctgggcttggatccaccctctgccaccctttttgaaagctgcttcacctctgcaaatctcagttttctcatgtgtaattgaaaagtaatgatacctaccttcaaaggttgttagtaatattaagtgatgtaggctaagccctgaggtgcctagaagaggtcggtatccttctaatataaacagcaacactrctgtgctgacatttgtgatatgagcatgagggacacttttctccagagcactaaaatgagccagccataaaggaagagcagacaggggactggatggtgaggggggctgtctttgtggggcttctgctcacgttgccaagtgcttcatttagacctccaaatgcatgcagctcttgctctctgtggcatgctcctggactcctacgagaatttttttctgaccatttcatgctgttgttcctgtctatatggtttgtttatattttctgctcctttgtgtgagaattgtttagctgaccgtgggacttctcactcag

SEQ ID NO: 219825 - DNA, 583 bp, Homo sapiens
ttgttagtaatattaagtgatgtaggctaagccctgaggtgcctagaagaggtcggtatccttctaatataaacagcaacactactgtgctgacatttgtgatatgagcatgagggacacttttctccagagcactaaaatgagccagccataaaggaagagcagacaggggactggatggtgaggggggctgtctttgtggggcttctgctcacgttgccaagtgcttcatttagacctccaaatgcatgcagctcttgctctctgtggcatgctcctggactcctacgagaatttttttctgaccatttcatgctgttgttcctgtctatatggtttgtttatattttctgctcctttgtgtgagaattgtttagctgaccgtgggacttctcactcagtattgtgttctgaaaggaaccaaggttccccagtaggctcaattccaagtagctttccccccaccactctgtggctctttattatttaggactgtgctttttaasctcctgttttcttaggggcattatcacaccagagtttcactgctgtccagagtttacctctgcatgaatgtctctag

SEQ ID NO: 219826 - DNA, 560 bp, Homo sapiens
ctgtgatcacctagcctctcagtttggggggatcattacagcgggtttttaactcccaatgttctggtccagtttgctttacatgttcttatttatacattgtcaaggatgacctcaggacagtacagcaaggacacagtggcacttcacattttgttcccacgaaatgactggggcataatctcagatcatcttcctttagaatgtggaaacatcagcagaagaatattagtctttatacaagtcaaatccaaaatgacacaygtgaaaaataatagagctgactttcagccatgatagctttggcacacctcacatccctttgttcaacctctcttccctcaacggagagctgcattcctgggaatttctgttgtgcacttttcccacttgccctgctgtcatttaaaggtgaacattctagttttgctaagaaaaccctttccttcatttggaatgaacagcaattttattacttttgaccttaaaatgagtttgctgccttcaaatcttttcattactaccattagtaaattcaaagaaatattttcagctggacc

SEQ ID NO: 219827 - DNA, 584 bp, Homo sapiens
acgttcctgtacctaaatatttatcttccccaaatttggaaagtgttatgctgtttatttcttaaataagctttctacccctttctgtctcttctccttcttgaactcttataactcaaacatgtgctcttttgatgctgtctcacaaattccatatgcattcttcattacttttcatccttccccccaaccccatgactacatatttwcaaatcacatatttgaattcaaattcttttgctgcatcaattctgttgttgttgtctatcgcatttttcatttcatttatttttcagctccagaatgttggggttttaaaatataatttccatctgttaaatttctcattttgattgtttactgtttccatgactttattgaatcatttctctgaacacttttgaagtttgctgagctttcttaaaacaattcttttgaattctttatcaggcagtttgtatatttctttggggttagctactagattattgtgctcttttggtggtgttgtgtctgtttttttttttttctttttatgtttcttgttgcttatgttgatacctgtgcatttggtggaacagtca

SEQ ID NO: 219828 - DNA, 584 bp, Homo sapiens
acgttcctgtacctaaatatttatcttccccaaatttggaaagtgttatgctgtttatttcttaaataagctttctacccctttctgtctcttctccttcttgaactcttataactcaaacatgtgctcttttgatgctgtctcacaaattccatatgcattcttcattacttttcatccttccccccaaccccatgactacatattttcaaatcacatatttgaattcaaattcttttgctgcatcaattctgttgttgttgtctatcgcatttttcatttcatttatttttcagctccagaatgttggggttttaaaatataatttcmatctgttaaatttctcattttgattgtttactgtttccatgactttattgaatcatttctctgaacacttttgaagtttgctgagctttcttaaaacaattcttttgaattctttatcaggcagtttgtatatttctttggggttagctactagattattgtgctcttttggtggtgttgtgtctgtttttttttttttctttttatgtttcttgttgcttatgttgatacctgtgcatttggtggaacagtca

SEQ ID NO: 219829 - DNA, 572 bp, Homo sapiens
aagaaagtcaatggtagcttgatggggatagcatctcgtttctatgagttactctatggtaaaattggtttcactacatagtactgcagtttccacaaacctatcaatgacattgtgtgaggactttatttaacattgtaacacaattaaaaggaattccaattctaagcccttggttcacactggaacactcccaaaggtgtactgcctgttgcaagaaaaagaaataagcagtagaacacttctaggagaccttttcaatctgatgagcttcagattccrtaactggtggagtatactcgcactactctaggtgctagggatggataatttaaacgatttttctttaaagtataataaggacatgtggcaatagctatgagacacactcctggatgagacgtgagtaggcaagacatttattcactcatgatatatcagtgcaaagtgtgcctacagtatacaaggtaaactcacaactcatcaaaactaaaactttttacaatgtgcaatacatgtagggatattaattcaatatataaatgtcacatgtctcccaaatgtcacccagg

SEQ ID NO: 219830 - DNA, 572 bp, Homo sapiens
aagaaagtcaatggtagcttgatggggatagcatctcgtttctatgagttactctatggtaaaattggtttcactacatagtactgcagtttccacaaacctatcaatgacattgtgtgaggactttatttaacattgtaacacaattaaaaggaattccaattctaagcccttggttcacactggaacactcccaaaggtgtactgcctgttgcaagaaaaagaaataagcagtagaacacttctaggagaccttttcaatctgatgagcttcagattccgtaactggtggagtatactcgcactactctaggtgctagggatggataatttaaacgatttttctttaaagtataataaggacatgtggcartagctatgagacacactcctggatgagacgtgagtaggcaagacatttattcactcatgatatatcagtgcaaagtgtgcctacagtatacaaggtaaactcacaactcatcaaaactaaaactttttacaatgtgcaatacatgtagggatattaattcaatatataaatgtcacatgtctcccaaatgtcacccagg

SEQ ID NO: 219831 - DNA, 548 bp, Homo sapiens
gctttaaagttcaatgatgctaagagcttacagtctatcagrtattttgttttgtttgtcttgttttaacgagttaatgaagaaaacctaatgatacccaatagaagaagagagagagggagggaggaagacaggaaaagacagaggaaaaattaaatttagggctcaggtcaaaataaactattaaagactatggtcaaatctatttcttttccttatttaaataaaattaaactcgatatatttttattagcaatagcacatagaacatgatctcgtcctcttaaaagtatccctctcttctcatttatcttttcttctatctctatatatgtacagatacagagatgtctagaatggtgagaaacttttggttttgtcttgttttaaaagttttctcttggtattttatgtatagcttgaatttaggaagttacatttcgccaaaacacaagtaattacaaaaatggggcattcactaagagtgtgacctgaaaaccatgattttctatatttggcagactcttcattccttgaacatttcaaaa

SEQ ID NO: 219832 - DNA, 548 bp, Homo sapiens
gctttaaagttcaatgatgctaagagcttacagtctatcagatattttgttttgtttgtcttgttttaaygagttaatgaagaaaacctaatgatacccaatagaagaagagagagagggagggaggaagacaggaaaagacagaggaaaaattaaatttagggctcaggtcaaaataaactattaaagactatggtcaaatctatttcttttccttatttaaataaaattaaactcgatatatttttattagcaatagcacatagaacatgatctcgtcctcttaaaagtatccctctcttctcatttatcttttcttctatctctatatatgtacagatacagagatgtctagaatggtgagaaacttttggttttgtcttgttttaaaagttttctcttggtattttatgtatagcttgaatttaggaagttacatttcgccaaaacacaagtaattacaaaaatggggcattcactaagagtgtgacctgaaaaccatgattttctatatttggcagactcttcattccttgaacatttcaaaa

SEQ ID NO: 219833 - DNA, 296 bp, Homo sapiens
ttaaggggtttgtactcgtcccagtaggcgaakagtagacataggctgtttcattccatacaccattgtttttccacatgaaagttactgcttataaacaaattagaacctttgagaaatatctcaaggtacatcctttctattttaaatttcttcttttcattatgttgactcccccttgttactctttaggggactgtggcaatttatgagaattaggtattggatttagaaccttccaaatctgattgttatgttctatgtctagcagacggtacagtatccaaaaatcacaa

SEQ ID NO: 219834 - DNA, 296 bp, Homo sapiens
ttaaggggtttgtactcgtcccagtaggcgaagagtagacataggctgtttcattccatacaccattgtttttccacatgaaagttactgcttataaacaawttagaacctttgagaaatatctcaaggtacatcctttctattttaaatttcttcttttcattatgttgactcccccttgttactctttaggggactgtggcaatttatgagaattaggtattggatttagaaccttccaaatctgattgttatgttctatgtctagcagacggtacagtatccaaaaatcacaa

SEQ ID NO: 219835 - DNA, 296 bp, Homo sapiens
ttaaggggtttgtactcgtcccagtaggcgaagagtagacataggctgtttcattccatacaccattgtttttccacatgaaagttactgcttataaacaaattagaacctttgagaartatctcaaggtacatcctttctattttaaatttcttcttttcattatgttgactcccccttgttactctttaggggactgtggcaatttatgagaattaggtattggatttagaaccttccaaatctgattgttatgttctatgtctagcagacggtacagtatccaaaaatcacaa

SEQ ID NO: 219836 - DNA, 547 bp, Homo sapiens
tgggagaggggaatagaaatagatagggataacagttgcaggagatactgatacacctgtagtgggttattacataagtcaacaacaaatgctgaaagcaaatawgacaaaatgttaacagttgttaattctggatgggaggaatgtgattgttcgttgtgttactgttagcatgattctgcaccttggaaatttcacagaattaaccattatatatggaagaattcctaaacactgacaaaacaattcagactttcataagtcactgatgcaataaaagagtggccaaagaaacactgagccagcttccacacctgttcctgaggaagtggagaaccagctgcaaagacagcctcagactctgggaggtggcaagggaccacataatctcccatccaggcctgaccctgcttagcttccaggatcaatgagatccagtgtgttcagggtggtaaggccatagaccacatgatcctgacttcagtggtagttgtgtgtggccaagaaatagtttacctttccaagggttccaaatgcacacagttct

SEQ ID NO: 219837 - DNA, 478 bp, Homo sapiens
gttttccaaagtgactgtatcaatctgtacactggtgttaaagcctagtatctgtttttgtaaatactataataaaagatgctgattaaattgattaaattccctaatggctatttacattttatggctgccagtcaatgtgacagcaaagagacagcagtgacttasgactggagaagcttctacacattgatgttgtgtgccgtgtctttcactacaaactaaaaactagacccagtgactcttctgtgtattcaccacatggtttgttttggacgtatgtccatgggtagcaaacattcccagaagcttaaaagtagggtaatttttcttgtctgcatatcatttcctttcttccaagaacattcaagatgcaagaaattattttaatcacgtgaatgttctaccaaataaaacagatttgggctctttcctataaccaaaagtaataataagaaggaggattctgaggtggttc

SEQ ID NO: 219838 - DNA, 526 bp, Homo sapiens
tacagactttttttcttctcattattctctaaacaatacaggatagcaactatttacagagcatttacaatgtatcagaaattacaagtaatcttagcctagtatctttcctagaatatatgccagagagctgttaggtattcttgtctaaacaggtgattaagtaacttgcggatttaaaattccttgctgtagctacgtacaccagccaagttaacgtggacttacctccattttagttcttccactcaagccacaaatctacacacaaacactcagattaatttgaattttgaaatactaatttatagcaggaaaaatgcccacagccctgaatgtgaaaagacattcatgttaattatatagcatagcctgggcttcttattaagtgagtaatcctcaaaatagggattctccaaataattctctacaataatgaayaggaagtcacaacggcaatgctaaccttcttgtgaaatataatcactaccagatatgttgtgcctgacacaactccaagtattgt

SEQ ID NO: 219839 - DNA, 583 bp, Homo sapiens
ggaattctttctgaaatgagtattcttaacaaagcagaggatgtaaaagattctctggagaggagtgtaagttcatcataaaatgaaatcattttgtataatgaatgatatgatcagaggaacatccatatctcgagaatctttagaaacaaagcagcgtaatataattttaacatatttaaagttaacttgctctactgtttgtacacaggaagggcctatatrggcatacatgaatatacaggtatcctccattccacgccagacactggtgaaactgtgcatatagcaatgccacgaacaggtaattggtggctagatttgttgtacttgattaacttgtttaacattgggtatatttcatcagaaaaagcagaaatagaaaaattggcagcaagatatacaaatctggtataaatcaagttcacacataatgactgaatttgagccatacccccccccccaccccacacacacacaaattttctcttggtgagataacctggacccaatcaaatgtagaaagaacctcttttgttctaatgagaagcacatatgaaaagaggtatacagcaagatttag

SEQ ID NO: 219840 - DNA, 539 bp, Homo sapiens
aatagatatcaaagccttttaaagcctagttctttccagcaattgataagctatagagtacttggcctaagaaaactgaagaaaaaccagaataaattcagcaggattataataccacgaaaagtaggcactatgaagtaagaaacagaaatattctcactttggcaggtcatgtgggtgggtgcagctcttaaattacccattaacaacttcatcaaaaaattcatgagcaatatatgctattactacagcattttctatataatatatactggtagattctctgtaaacaccaattttytaaaatatgaagaagcttcctctttctcctcctcttctgttttcagaaacaaatcttaccatttacttcaaagtaaatctccgaagacagtctgaccctgtacagtgtgtacccaacgattgcttagtattgtgaggaacatcagagagaacaggtgctaaaaacctttcaactttctgcttctatgtgctgtttcttttttttttttttttgtgacgccctaacttcttcaaagttg

SEQ ID NO: 219841 - DNA, 508 bp, Homo sapiens
tccagttggtgttgtttgttctacatttatttttatctttttttcacccattccatcagatcactaattagtttttccttttaaatcaggcgttggcaaactctttctataaaagatcatatagtaaatatttttagactttttggtccagacagcctctgttgcaactactcaactcagctgttaaagtcatgggcaatatgcaactgagctgcagacaatatgtaaatgaaggggggcagctggccatgttccaaaaaacctttatttacaaaagcaggtggtaggcaggatttggtccacggactgcagtttgtcaactcytaatcaaaatgataaaatagaccagatattatttttttgtaatgctttactttcccaaagccctgtcctagagcccccttgcctgcgttgctatctgtactgctggttctctttgtgtcctaccctgctggcatcctggaacttccccccactgttttcctgttttagaccccttgttttttgg

SEQ ID NO: 219842 - DNA, 508 bp, Homo sapiens
tccagttggtgttgtttgttctacatttatttttatctttttttcacccattccatcagatcactaattagtttttccttttaaatcaggcgttggcaaactctttctataaaagatcatatagtaaatatttttagactttttggtccagacagcctctgttgcaactactcaactcagctgttaaagtcatgggcaatatgcaactgagctgcagacaatatgtaaatgaaggggggcagctggccatgttccaaaaaacctttatttacaaaagcaggtggtaggcaggatttggtccacggactgcagtttgtcaactcctaatcaaaatgataaaatagaccagatattatttttttgtaatgctttactttcccaaagccctgtcctagagcccccttgcytgcgttgctatctgtactgctggttctctttgtgtcctaccctgctggcatcctggaacttccccccactgttttcctgttttagaccccttgttttttgg

SEQ ID NO: 219843 - DNA, 515 bp, Homo sapiens
gaactcttaattgtagacttttctttttatttcactgaaactcacatgtctttagttttacactacctgcatcttgctttctgcttggtgatagccatcttacatgaaagtaggactgtaacactttagcaagaaataatgggcttactttacatccctagtgcaacatttgktttttaattgagctttaatccaatgaagcaaaactagtggtaagactttgagggacttagctaggtttagaaagacttttggagagcagctaggcccttttgggaaactcccccattcttggaagccatctagtctaccattgtagggttacacactggggttatttcccatcatgtgatttggagggaagagcctgggctttggacatgggttcagattccagctccatcatctcacagctatgtgaatttaccacaagggtaacaccacgtttttgaatggtcactgtgggctggttaaattatgtattactttaatatactttacaaggactgtgagaa

SEQ ID NO: 219844 - DNA, 447 bp, Homo sapiens
agcaaactgggtaagaatcatgtgttctgctgtcagcagaccttgtctgggcctggcaaactctgcctctggggttagcaaaactcccttacgctcccctctttcaaacaagagtgattatcagttgtcaaagttgttacttctgyagagaaggaaaagtggttctggacactgtccacagattgtttcctcctctggggcaagaggattgggagaggggtatgcacatgcttttctcaatttgtggtttttgcttgggtttgtggtttaaatccctaattttggcaatcatctctgccacagaccatccaatccatgcaggtgggttcattccatactctgtgaaatatattttgatgttagaggggtgggaatgtctgatttattgtttcatcctcgtctctggggaggggaagcaaagctagtagtagtttttttttcaagggc

SEQ ID NO: 219845 - DNA, 436 bp, Homo sapiens
ttgacacatatctatgttgtataatgatccaaatagagtagttagtgtatccatctcctcatgcatttatcatttgtggtgaggatattcaaaagcttttcttttagctatttcatattatacaatattttactgttaaccatagtctcccatagctgtgcaatagaacaccagaatttatccctcctatctaattgtaactttgtacccattgacaaacttctcccccgtctcatcctccttttcatccccattctctggtaaccatygttctactgtatgattctatgataccaatatatatatttttagattccacatatcagtgcaatcacatggcatttatctttctgtgtctggcttatttcacttaacatgatgttctccaggttcatccatgttgttgcaaatgatagcatttcattcttttttttat

SEQ ID NO: 219846 - DNA, 563 bp, Homo sapiens
attttcatgtcccatggctactcattcttggtttaacaaatctattaaaaaatgtctttgagactaacctaaatctctgctattgtaacttaacctttcttttctatgctcctgttccttaattgtgtgtagaaaccatttttgtatccgcctgcctccaagattgggtaagatgatcatattctatgttcctatagcttccctttcttccctatcattgaatacctcctactagactatgtttgaccattccttctgtctccccaattagaccatcaggtctgggagagcaggtactaagtcataacccttccccatgactattgctcctaactgktattcaatagactcattaccatctactaaaataagcatctaacgtattttcaaagaattctagcaaaggatgattttgatgtcccatggttactcattctggattgaacaaatctattaagaaacatctttgagattaacctaaatctttgctattgtaacttaacctttcttttgatgactgagtagcattctatggtacggatatacaacagtttgtttaatca

SEQ ID NO: 219847 - DNA, 554 bp, Homo sapiens
ttgaaggaaaggacacagtcctggcagaattcatcatctgctaactgaagagctcttgagtcctgaataaacatcrgtgatgtccaggtactactttgagggcctagggtaagcctctgggacttgctgggttcaggtgagactcagcacattaccagctgaggtggatatggggcaaaactccttctgcttgagaaaagcagagggaaaagtaaaggggacttgtcttgcaccttagatactagcagttgggtagagcaccaagtgggatcctggggtccccgattccaggacttgattcttggatggtgtttatggacctgccctgggtcagaggagagcccactgccctgatgagtgagtcccaggccaggcagcatgcaccacaagctgacttaagaaaactttggcagtagtctggcagtactcctcgtggcctggggtggtggtggctactgggtggggctcccctatctttggaaaggagagggaagcatggaaagtactgtgtcttgtggtttgagtgtcagctcagctacagtacaatagaacac

SEQ ID NO: 219848 - DNA, 264 bp, Homo sapiens
aacctgtcaaattcattctccatccaactccttgctggcaaggagttgtgatcctttggaggagaagaggcattctggtttttggaattttcaaactttttgtgctggtttttcctcatctttgtgcattatttacctttggtctttgctgttggtgacttttggatggagwttttgtgtggtcatcctttttgttaatgttgacactattgctttctgtttgttggttttccttctaacagtcatgtccttcttctgcaggtc

SEQ ID NO: 219849 - DNA, 570 bp, Homo sapiens
ttgaaacagataagaatttggtgggataataattacaaccagcgtgatttaataaactgttttaagaccagaagacaaaagaaatgagtgtcatggggatttagggtacagattattttgtcacccaggtaaatgtgttgaaaagaacaaaaaacagaaagagcaggaaatttcaaacttggcacattggctcatggatatgaaaagatgttttcttgcattgaagctccaggagctaaagttgtttcaattattctattcaaaacaagtcaccacwcctgaagtccagttacagaagtagggaaaaaaggaaagaacaagagtacataaaaaagaacatctattattgccaatgttttagtccattctcttgctcctataaagaaataactaagactggataatttataaagaaaacaggtttagttggctcacaattctgcaggctgtacaggaagcaaagcagcttctgctactgggaatgtctcaggagacttacactcatggtggaagatgaagggaaagcaggcatcttacatggctggagaagaaggaagagagagggaggag

SEQ ID NO: 219850 - DNA, 570 bp, Homo sapiens
ttgaaacagataagaatttggtgggataataattacaaccagcgtgatttaataaactgttttaagaccagaagacaaaagaaatgagtgtcatggggatttagggtacagattattttgtcacccaggtaaatgtgttgaaaagaacaaaaaacagaaagagcaggaaatttcaaacttggcacattggctcatggatatgaaaagatgttttcttgcattgaagctccaggagctaaagttgtttcaattattctattcaaaacaagtcaccacacctgaagkccagttacagaagtagggaaaaaaggaaagaacaagagtacataaaaaagaacatctattattgccaatgttttagtccattctcttgctcctataaagaaataactaagactggataatttataaagaaaacaggtttagttggctcacaattctgcaggctgtacaggaagcaaagcagcttctgctactgggaatgtctcaggagacttacactcatggtggaagatgaagggaaagcaggcatcttacatggctggagaagaaggaagagagagggaggag

SEQ ID NO: 219851 - DNA, 630 bp, Homo sapiens
ggatgggtatctgaaatattttttctacttaatrtgtatcactttgacatcattgtaaggtagaaaaattgtaagtagacacactacccctccccccccacataagttgaggactgtctccactttattcaggaggtagaagcattggataacatgggtaggagagaaaaggaagtgaagcaaggaaaatggggtgtagaatattatgccatgtgctatgatgcattatcacacatgcttttccttcacaaaaagacacagcagatcattcagcaggcatgtccactcatcaggcaggattgaaaagaggaggtgaatcttggagtaacctccaggagtaagaaagttggggaattttgcctagcttctttctgtctcacatttcacattgatcttaccatggagagcttcctctcctgtactttcaggcttcattatccagtcccctgagatatctcagcacaccagaatccctcccccgtagtgtggtgctttatcgaagccctgaaatgcggggacaatctagtgtaactggagcactgatcaagacggaaaggaagaaagcagcagagtgaggaggaacacgatgttatgatcataatacagactctcctagaaacatatcatgat

SEQ ID NO: 219852 - DNA, 533 bp, Homo sapiens
ttaatagaattttactgtaagtttgagggaaattaaagggaaggacaacacagagagtaacttattaccattattagatatatctcttcatggagcagatgcatcctttggtttggacagttccctgctcaaaaatgtctggctcagaccatcttggacagtgtccatgatacagaaaggtaagatgawcttgattctgtcccactcttatccacttctcatttcctatcccaggatgagagtcttccaaggatgattggcaatgcatcccttgtcaactgaagaatcatgtggttcataaatttggaaatgagagctttgtttcttataaaaggtggtagctgcaagctggccatcctgcaggttgggaagcatagcctccagtatgcaccaagtggacacttcaaggtgagacaggaattgatggtgaaagagtcagctaagtatacctacacaacaggttaaaggaggagctatgaatattcaccaaagaacatgcaaacatgcataataagcaagtatgcatattacat

SEQ ID NO: 219853 - DNA, 482 bp, Homo sapiens
gaattccaatcatgatttttctatttctctataattacttctttgatcctttatcttatccattaggcaatgagcctaaaacctcttccctatttggctttctgtgagcatgagatcatatagaaaatgtgaaagcccgctgaatcctccagcacagatcctggaatacacaaagtgctctgttcatcacaaaaaaaacatgccctctcacccaaatcccccacctcacccctacttccaatcatctgtggagattcagatagrccatggggaggtaaattctaatactccttggagtgagtccagatcttggaatcagagatcagcgtcagcactagctcctgctcccctttcctactaattcacaggaggacaggtggtattgaagcaatagatggccgagggtgtggtccttcccccagcctctggggtagaacagcagcctaacatgtgtctcctgagatcacaaagagtagcacgtt

SEQ ID NO: 219854 - DNA, 482 bp, Homo sapiens
gaattccaatcatgatttttctatttctctataattacttctttgatcctttatcttatccattaggcaatgagcctaaaacctcttccctatttggctttctgtgagcatgagatcatatagaaaatgtgaaagcccgctgaatcctccagcacagatcctggaatacacaaagtgctctgttcatcacaaaaaaaacatgccctctcacccaaatcccccacctcacccctacttccaatcatctgtggagattcagataggccatggggaggtaaattctaatactccttggagtgagtccagatcttggaatcagagatcagcgtcagcactagctcctgctcccctttcctactaattcacaggaggacaggtggtattgaagcaatagatggccgagggkgtggtccttcccccagcctctggggtagaacagcagcctaacatgtgtctcctgagatcacaaagagtagcacgtt

SEQ ID NO: 219855 - DNA, 482 bp, Homo sapiens
gaattccaatcatgatttttctatttctctataattacttctttgatcctttatcttatccattaggcaatgagcctaaaacctcttccctatttggctttctgtgagcatgagatcatatagaaaatgtgaaagcccgctgaatcctccagcacagatcctggaatacacaaagtgctctgttcatcacaaaaaaaacatgccctctcacccaaatcccccacctcacccctacttccaatcatctgtggagattcagataggccatggggaggtaaattctaatactccttggagtgagtccagatcttggaatcagagatcagcgtcagcactagctcctgctcccctttcctactaattcacaggaggacaggtggtattgaagcaatagatggccgagggtgtggtccttcccccagcctctggggtagaacagcagcctaacatgtgtctcckgagatcacaaagagtagcacgtt

SEQ ID NO: 219856 - DNA, 409 bp, Homo sapiens
agatctgggcctggagtggagatatgggcctggaggttgagatatgggcctgcagtagagatatgggcttgtagtggagacatgggcctggagatggagatatgggcctggagatggagatatgggcctgcagtagagataggggcctggagtggagatatgggcctggagtggagatatgggcctgaagtggagatatgggcctggaggtggagatatgggcctggaggtggagatatgggcctggagtggagatatgggtctggaggtggagatacgggcctgcagtagagatatgggcctggagtggagatatgggccaggagtggagttatgggcctagagrtggatatctgggcctggagtggagatatgggcctaggaaggagatatgggcctgggtgtggag

SEQ ID NO: 219857 - DNA, 504 bp, Homo sapiens
gaattccaatcatgatttttctatttctctataattacttctttgatcctttatcttatccattaggcaatgagcctaaaacctcttccctatttggctttctgtgagcatgagatcayatagaaaatgtgaaagtccgctgaatcctccagcacagatcctggaatagagaaagtgctctggtcatcacaaaaaaaacttgcccactcacccaaatcccccacctcacccctacttccaatcacctgtggagattcaggtagaccatggggaggtaaacattaacactccttggagtgagtccagatcttggaatcagagatcagcgacagcactagctcctgctcccctttcctactaattcacaggaggacaggtggtattgaagcaatagatggccgagggggtggtccttcccccagcctctcgggtagaacagcagcctaatatgtgtctcccgagatcacaaagagcagcaggtttcacacgggcttcaacactatt

SEQ ID NO: 219858 - DNA, 483 bp, Homo sapiens
ctttatcttatccattaggcaatgagcctaaaacctcttccctatttggctttctgtgagcatgagatcatatagaaaatgtgaaagyccgctgaatcctccagcacagatcctggaatagagaaagtgctctggtcatcacaaaaaaaacttgcccactcacccaaatcccccacctcacccctacttccaatcacctgtggagattcaggtagaccatggggaggtaaacattaacactccttggagtgagtccagatcttggaatcagagatcagcgacagcactagctcctgctcccctttcctactaattcacaggaggacaggtggtattgaagcaatagatggccgagggggtggtccttcccccagcctctcgggtagaacagcagcctaatatgtgtctcccgagatcacaaagagcagcaggtttcacacgggcttcaacactatttcctggccgtttgacataagagaattc

SEQ ID NO: 219859 - DNA, 483 bp, Homo sapiens
ctttatcttatccattaggcaatgagcctaaaacctcttccctatttggctttctgtgagcatgagatcatatagaaaatgtgaaagtccgctgaatcctccagcacagatcctggaatagagaaagtgctctggtcatcacaaaaaaaacttgcccactcacccaaatcccccacctcacccctacttccaatcacctgtggagattcagrtagaccatggggaggtaaacattaacactccttggagtgagtccagatcttggaatcagagatcagcgacagcactagctcctgctcccctttcctactaattcacaggaggacaggtggtattgaagcaatagatggccgagggggtggtccttcccccagcctctcgggtagaacagcagcctaatatgtgtctcccgagatcacaaagagcagcaggtttcacacgggcttcaacactatttcctggccgtttgacataagagaattc

SEQ ID NO: 219860 - DNA, 470 bp, Homo sapiens
ctctttgcaaataaggtcatttgagggataaaatgagataacatatataaagtcctagcctagtgagcacataacagatgatcaataaatattagttattttcccttccttcactttttttctttgctttaatatgtccagtgacaataagctcattacttgcatattgagccaattagaacaaagtaacattcatttgcaccaatgtrtagtccacagtagtttccagcaaaggtgctgaagcatatttcccagatgtgcaaccaaagtagaatcaatgtgtgtaatttatttttgcaacaactgcacacattattaggatgactgttagatgcactgtgcaatcatgaaaacttagcagtgtacagcctgccatgagtagaaagtaaaacattatctcaaccatcacactgaagccaaataaatttaaaaattggatcttggaagaatgtttccctttgataatatac

SEQ ID NO: 219861 - DNA, 575 bp, Homo sapiens
accagcatcgtttaggaactgcagaatcctcacttgtttattaaccgagtaattactgtgtgcaagactttttattaaaaagtaacaacggggggaagggtggcccacacatctcctaggactcttgtgagaaacagtaagttaatgtctttcaaaactcaccagaaacttgaaagtgctgcacatatgcaatggaagagatattattaatctcttcttcctaaacagtgagaagacatctaaggggctgggaaaactaagttaaaaataactcttgtgctaaaaatcactgcgcacaatggggaatacacagtgagggcactctccaccaacatgacgccacaggcttggggctcttccacccgtgacacagggtgaagatactggcaaagactggcagagaatgcagtgcaggtctgagcccggctggactcttccaytcagggacatagtactctagggatgccccacccctttctgggcaagcttgggagagatggaagatccgcagggtttacctagacttctccatcagcaaaggcaaggaaagagttcctccaaagggaggtggaatt

SEQ ID NO: 219862 - DNA, 642 bp, Homo sapiens
gtatgaagtctcccaatttctaggctgatagaaccttattccaattttgtgcccattcttggctggagactgaatggcagaggttccacatgcctatgcagctgacccccaataaaaactctggacwccaacgctcgagtgagatttcctgattggcaaaactttgcacaagttgtcacatatcgttgctgggaaaattaaaggctgtccagcaactccactgggagagaacaactcttctctcatggcctcagtcttattcactttttgcctttgctgattttaaattgtatgtttttgctgtaataaactgcaacatgagtgtaacaacttgcctaggttctttgagtcttctagtgagtcatcaaatctgagagtaaccctggggacaaccaataaaaagacagtgacatagagagaaattgtcatgaacctccaaccatgtatttctaattttaaactccagtcctacaatttttagaagtacaaccatagaaaagtgactgaatgccattgaattccagtttcctcatgtgcgaccaaggtgataatacctgtatcatagagttgcatgaagtaaataagtttgcaactaaagcacctagcacaatgcctggtacatcataggtacacaatatgtgt

SEQ ID NO: 219863 - DNA, 642 bp, Homo sapiens
gtatgaagtctcccaatttctaggctgatagaaccttattccaattttgtgcccattcttggctggagactgaatggcagaggttccacatgcctatgcagctgacccccaataaaaactctggacaccaacgctcgagtgagatttcctgattggcaaaactttgcacaagttgtcacatatcgttgctgrgaaaattaaaggctgtccagcaactccactgggagagaacaactcttctctcatggcctcagtcttattcactttttgcctttgctgattttaaattgtatgtttttgctgtaataaactgcaacatgagtgtaacaacttgcctaggttctttgagtcttctagtgagtcatcaaatctgagagtaaccctggggacaaccaataaaaagacagtgacatagagagaaattgtcatgaacctccaaccatgtatttctaattttaaactccagtcctacaatttttagaagtacaaccatagaaaagtgactgaatgccattgaattccagtttcctcatgtgcgaccaaggtgataatacctgtatcatagagttgcatgaagtaaataagtttgcaactaaagcacctagcacaatgcctggtacatcataggtacacaatatgtgt

SEQ ID NO: 219864 - DNA, 325 bp, Homo sapiens
aatggagtactattcagtcataaaaaaaatgagatcctgcttttytctgaacagccaatatgcactcccctttagaatcacagaatctccgaaatataagagaatgtatggttctgctaatcgaattgtttttacccactggtttgtagtagccttatttgggaaaaggccttctttcaaaatacaaatatgggggctatacccatgatatattaatgacaccctctgtagttgaggcctaggtaatttttttaatgccaagtgatttcagtgcacacactgtattttgaaccattcattaagtccaatctttattaataacttt

SEQ ID NO: 219865 - DNA, 459 bp, Homo sapiens
ttttccccttgtttcttggtagtgtctcctgtcatcggcctcccacctgtgtccatgggtgtggggggcaggatggagattaaggccatccatgcctgagtgaccatcctgcccagcagtaacagaggyggctcaggggtggcatagccaagtggcttccccttctggctcctccatgagccaaacccctttctctggcctcccatgcctcatgtctccctgtaccctgtggaaggggcaggcaccaccacacagcaaccctgctcttccccagccttcctaataagggggatttcagaggccgacctgctatgtgaagtatgagactatggcagaatcattgtgtataaatacaattcatgagaagtagattttgtttcaaagcatccctctctcttgccattcattacacctctccttactcttttaaagcatggcagcagcttcccctttctgact

SEQ ID NO: 219866 - DNA, 459 bp, Homo sapiens
ttttccccttgtttcttggtagtgtctcctgtcatcggcctcccacctgtgtccatgggtgtggggggcaggatggagattaaggccatccatgcctgagtgaccatcctgcccagcagtaacagaggcggctcaggggtggcatagccaagtggcttccccttctggctcctccatgagccaaacccctttctctggcctcccatgcctcatgtctccctgtaccctgtggaaggggcaggcaccaccacacagcaaccctgctcttccccagccttcctaataagggggatttcagaggccracctgctatgtgaagtatgagactatggcagaatcattgtgtataaatacaattcatgagaagtagattttgtttcaaagcatccctctctcttgccattcattacacctctccttactcttttaaagcatggcagcagcttcccctttctgact

SEQ ID NO: 219867 - DNA, 459 bp, Homo sapiens
ttttccccttgtttcttggtagtgtctcctgtcatcggcctcccacctgtgtccatgggtgtggggggcaggatggagattaaggccatccatgcctgagtgaccatcctgcccagcagtaacagaggcggctcaggggtggcatagccaagtggcttccccttctggctcctccatgagccaaacccctttctctggcctcccatgcctcatgtctccctgtaccctgtggaaggggcaggcaccaccacacagcaaccctgctcttccccagccttcctaataagggggatttcagaggccgacctgctatgtgaagtatgagactayggcagaatcattgtgtataaatacaattcatgagaagtagattttgtttcaaagcatccctctctcttgccattcattacacctctccttactcttttaaagcatggcagcagcttcccctttctgact

SEQ ID NO: 219868 - DNA, 489 bp, Homo sapiens
gagtagatgagcagttctgggaatcattattaaaaacattaaaaaaagataagcctgyatgtaaagaaatcctttgctgttgtatttgatgagatgacatgttttattcaaataccccattacctagtagaatctttggcacatagtaggtgctcaataaacagtgattagttgattgactgaatgtattaattgccttttaatggtatttatctttctcctctcataagaggacacagctgtacctcccaacattcttatgtggcttgtcaaaacaaaaacagactaggcttgaattggccaccctgattaatctggtcttgatattttttcagaagccatttttgtcatcagtgtagctggtgaaagactttatctgcaggtacgggggatacaggccaaacttgcccaaaggtagcaaggtggatgcccaggcagtgccaattcttggtcaaaagtaagaaatgtggcagagggggaggagccaag

SEQ ID NO: 219869 - DNA, 489 bp, Homo sapiens
gagtagatgagcagttctgggaatcattattaaaaacattaaaaaaagataagcctgcatgtaaagaaatcctttgctgttgtatttgatgagatgacatgttttattcaaataccccattacctagtagaatctttggcacatagtaggtgctcaataaacagtgattagttgattgactgaatgtattaattgccttttaatggtatttatctttctcctctcataagaggacacmgctgtacctcccaacattcttatgtggcttgtcaaaacaaaaacagactaggcttgaattggccaccctgattaatctggtcttgatattttttcagaagccatttttgtcatcagtgtagctggtgaaagactttatctgcaggtacgggggatacaggccaaacttgcccaaaggtagcaaggtggatgcccaggcagtgccaattcttggtcaaaagtaagaaatgtggcagagggggaggagccaag

SEQ ID NO: 219870 - DNA, 643 bp, Homo sapiens
gaaataagttgagggcttagaagacttggaaaaaaatatgggtttttagaggaaaatagtgtttaaatgagcaactttacaagaacaacgatttggttgatttctcgaggtgaagtgaagatggagacggaaagtggcagagcccaacagaatgtgaaagacagaatccagggccaggaggagaaagttcaacaaggagaggaggagctggagacaggggaggaggaagggcaggagaggacacgctggacacggtgggggtgagcccactgcgagtcagtgctcccaaggggaaagaaagcgaacagtaatggatttctgcgctcattgcaataattggggttttttggctgctcttatcagaaggggctrtcgaccgatattgctgccatggcattcatgtgtcaccaccacgcacaatacccttatcacttctatcagtgattgactttactgtatttattagtcacagaagcctcctgggaggaaatattctcaactgcactggtgtggaaaaaataatctcttcttgtaaggtgcttgcttcaggactgaataaaatcctgtagactttccacatcctagttctgagaatactgtaatacatatggaatacagttattcctgagtacccatggggctt

SEQ ID NO: 219871 - DNA, 583 bp, Homo sapiens
ttgctgcaattgcttttgaggacttggtcataaattctttccaaaggtcattgtccagaatggtgagtcctgggttttcttccaggattcttatagtatgaggtcttttaaatccttaaaccatcttgagttaacttttggtgaaagataggagtctagtttcattcttctgcatatggttagccagctatcccagcactatttttcgaatagggagtccttttcctattkcttatttttgtcaactttgtggaagatcagatgactgtaagtatgtggtatgctgcttcatttctgggttctctactctgttccattggtctgtgtgtctatttttgtaccagtaccatgctgttttgtttactgtagtcttttttttttcttttgagatgaaatcttactctgtggcccaggctggagtgcagtggtgcaatcttggttcactgcaacctccgcctcctgcctcagcctcctgaagctgaggattctcctgcctcagcctcctgagtaactgggactacaggtgcgtgccaccacacctggctgattttttatatttttggtagagacggagtttcaccat

SEQ ID NO: 219872 - DNA, 514 bp, Homo sapiens
catgccataaataagatctatgattcaagagaagcaaaaaagaacaaaataaataaacaaaaaactagcatttccccattagaaatctgcaagcttttgcttttcccaaaccttcattttttataaccttttctccctgtttatttcatttatgtattttatctttacaaatttatgggatacacatgcaattttcttgaatgcatagtttgtgtagtggtcaagtcagggcttttaggatatccatcacccaaatagaataatgtacattataaccattaactaatttttcatcatccactccttccctcccgaaaattttggaactggagggtagacgttatcaataaatctccagggagatagagaagaaaccttttatgatttgactttgtccccctcactctgaaaacttttgcatgacagaaagagaaatgaattgtgtctagggaatggaaacatgataytgagcacctataatgatgcttctatgccaaattaagaattttggaca

SEQ ID NO: 219873 - DNA, 581 bp, Homo sapiens
gctttctagagaaggtgcttgcacttaagctgagcattaatgattaagtaaaatttaagaaaatgtgcattggatttgtatctgcttccatatatctctacttaaactgataatttatagraattatatttgataaagaaagaacactgatgaatagctcatttgtcttattcaattttgttgcatttcagccaaagcagactgaaggtgccgctgctccctatcttctattgatgatggtaattataatgacattggtgatgatgatgatagcaaacaaaaacttcctgagtgtttatatattccaggaggtttgttacaatggctttatagccttatggtctttgtcccatttcattctcataatagggataatattaagacagccctcaatatttctggccatttctggacgtaaaacttctcttagttattcaatcaaatactaatcttgctactgctgtgaaaggattttacagatgtaattaagacctcaattcagttgaccttaagatagaggattatctaggtaggtctgaactgatcatatgaatcctttaaatctgggtcagagacactgg

SEQ ID NO: 219874 - DNA, 458 bp, Homo sapiens
gagccagaccatatcatttgtgccccttgcccctcccaaatctcatcttcctcacatttccaaatacaattatgccttcccaatagccccccaaagtcataattcatttcaagattaacccaaaagtccaagtccatagtctcatttcagacaaggcaagtccctgccacctacgagtctacaaaatcaaaagcaagttagttacttcctagggaatgggggaaattggccaaaacgaagggactaccggccccktgcaagtctgaaatccaacaaggcagtaattaaatcttaaagctccaaaataatctcttttgacttcatgtctcacatccagatcacgatgatgcaagaggtaggttcccatggccttggacagccccatccctgtggctttgcagggtacaacccccctcccagctgtgttcatgggctggcattgaatgtctgtggatttt

SEQ ID NO: 219875 - DNA, 629 bp, Homo sapiens
tgcactgcatcattagtggacacaggatatgagtgaggactcagctggatctatgtggaaacattttaatgctaatgcacaggtatcaatgacttaaaatgctgagagcrtataaaaggtaagatgacacttctaagatcaactatctgaattgaagatgaaagttctgttggcaagcagactctttctatctttccttggctatgttcccactacgcatctgcaggttgctagagtgatgagtgttggagactcattttactgctgcaataaagtttttttttccacttataagccttggaaactatgaatttattttagctaggttttagatgtcctatggattgcttccatttttagtgggtgtcacattgttaagatttttttttccattagagaccaatgactggtatttctgttagagtaagaattcaacatagtacagattatataggtgtctgaagttgtttaaggcttgaacctactagtatgcacactccagataaaaatgtcttcatttatgtagtcagaagacatagttgacccattgtgtcaaattttctaaagaattttcatgaattcccttgaatgtgtttatttgagattcttccattttctcttttcttaaa

SEQ ID NO: 219876 - DNA, 627 bp, Homo sapiens
agtacctatggatttttaagacatagttccttggacaataaaagtaacttggacagctctctggggtatatatttgtccactcgggttgccttaacaaaacaccatagactgggtggattaaacaacagaaattaattttctcacagttctggaggctggtagtccgagatcagagtaccagtgtggtccgactctggtgaggactctctttctggcctgcagataataccctcttgccatgttctcacatggctaacagaaagagacagcaggctctctagtgtctcttcttataaaggcactaatcccatcatgaagacctcaccctcacaacctcatttaaacccagttatcttccaaaggccttattctcaaataccatcacattggaggataggagttcagcatatgaatttgtggattgtgggaagggcatgattaggtccacagtaggtataaagtggagattctgcacaatttaaatcccccctgttctgtgaggtaaccctgtggacctcacctacagacatcactgatcattctggcactgacatgcatgtctgatgtgagaaagaaggakctgggagacatctatgatgttcagacctctctatcctttgcccaag

SEQ ID NO: 219877 - DNA, 483 bp, Homo sapiens
caaactaattttctaatatctattaatataacacagatgtacgttttagtgtgtatatagctgacattgtgtgcatgtgtgtgtgtagttgggattgagaattttgttgtagttgttgttgttgagacgcagtctcgctctgtcgcccaggttggagtgcagtggtgcaatctcggatcactgcaacctctgcctcccgggttaaagcaattctcctgcctcagcttcccgagtagctgggactacaggcgcccaccgccacgctcagctaaatttttttgtattttaatagagacggggtttcaccgtgttgcccaggcttgtgactaactcctgaactcagggaatcygcctgccttggcctcccaaagtgctgggattacaagcatgagccactgcgccctattggattgagaattttaaggagattgctttgttattggcttagaaaaataaactgaattgagcaaaagattagcccaa

SEQ ID NO: 219878 - DNA, 371 bp, Homo sapiens
aacatattttctaaatttgaggaaaatatgtctaatcatttttacataatgcaattacacaaaggcagaaatttcatttgatttacattctagtatcccttgcattttatckccaaatgccacaattatattaatcattttaagacagatgtgattataatttagcatcccagtaactctcaactccatatttatatgtaatggttttccaaaataactgataaagttaaaactggtaaaatgtgaataatattcataatataaatgaaatttcctcttaaaaaatcaactttaagaaatctaatcttaaaaacccaggctaacccttttctagaaatttgtttttgaaaatcacattgtgtagacaactc

SEQ ID NO: 219879 - DNA, 653 bp, Homo sapiens
atttctcatgtatggtttagtaccatccccttggtgctgttctcatgatagcgagtggattctcatgagatctagttgtttaaaagtgtgtagcacttcctgccacactctctcctgctcttgtatttgccatgtgaagtgtctgcttcccctttgccttctgcccttagtggaagctccctgaggtcttcccagaagcaaatgctaccatayttcctgatatggtttggctctgtgtccctactcaaatctgaaactgaattacaattctcagtgttgaaggaggagcctggtggaatgtgattgaaacacagggggacagacttgctccttgcttttctcatgatagagttttcaagagatccggttgtttaaagtgtgcagcacctcctcctctctctccccctctctcctgccatgatgtgaagacatgcttgcttccccttcagccttcggccatgattataagtttcctgaggcctcccagccatgcttcctgtacagaccatggaactgtgagtcatttaaacctcttttcttcataaactatccagtgatatggtttggctctgtgaccccacccaaatctcatgttgaattgtaattcccagtgttgggggagggacctggtgggaggtgattggatcatgcag

SEQ ID NO: 219880 - DNA, 597 bp, Homo sapiens
aatgtcatcttttctgaataggtcagtgtgcagctgcaaagatctcgagagctattgcatcctggagtggcatgacattttgtggatcaatgcagttaaatagaattctcagctgatgatcagaaactcagttattgaccaatcctggctttacacaaatattagcaatttacactaaaaaggctaatattactactgaggatttagtgtatctgagttgattctcagcactgtggcaattttggaaaataattcatggagagatacacttacaaatataataaacataacttttaatcatctttgtaaatataaaagcatattataatatatatgtattattataattagagtagygtaaacctaacaagaaattatcttgagaggtcaatgctttctctttcatttgcaattctatgcttatttccttgcttaatatacttttctttttggattttccttttggtaaatactttttatatctattttctagctgtatttataacaattttactgttatagctcagcaaaaagttaaattacattgttcgcccatattcttttacttagccattcatttgttctcttattcaacaa

SEQ ID NO: 219881 - DNA, 597 bp, Homo sapiens
ttgcaaaattgatttcatctctccagtattaccttggattataaagccaggtgagagtctctcctacagaaggaggcagaaaaggtcccagaggctttggcaagccaggaggaacagtccaagtatggttggagattacggmcataggacaggggtatatataactatgatggagtgaacgcagaaggtaatcagctatgagcagtgtggaggttaaaagatgatacagcaggggtattatagcaaacgcaatgaccaagacagatgagagtgaaggagggggtgcgagttgagctgtttagaaacttggctgcaaaagaaaaatatgtaccggtggcaatttaagggatgcctggattaggttccaaatgcccatctgtaaactaaggaatctggccagctgaacagctgcactagcagactgaaactagaccaatctcttaggtaggcaggaggaagggcagacaggataggaaataagccatctatcttttcatatttacagttgcactttccacccaatattgaagcaatacaaaaattagcatttttgtagccaattacaagttttctgaaatggtaaaactcaatcataac

SEQ ID NO: 219882 - DNA, 597 bp, Homo sapiens
ttgcaaaattgatttcatctctccagtattaccttggattataaagccaggtgagagtctctcctacagaaggaggcagaaaaggtcccagaggctttggcaagccaggaggaacagtccaagtatggttggagattacggccataggacaggggtatatataactatgatggagtgaacgcagaaggtaatcagctatgagcagtgtggaggttaaaagatgatacagcaggggtattatagcaaacgcaatgaccawgacagatgagagtgaaggagggggtgcgagttgagctgtttagaaacttggctgcaaaagaaaaatatgtaccggtggcaatttaagggatgcctggattaggttccaaatgcccatctgtaaactaaggaatctggccagctgaacagctgcactagcagactgaaactagaccaatctcttaggtaggcaggaggaagggcagacaggataggaaataagccatctatcttttcatatttacagttgcactttccacccaatattgaagcaatacaaaaattagcatttttgtagccaattacaagttttctgaaatggtaaaactcaatcataac

SEQ ID NO: 219883 - DNA, 595 bp, Homo sapiens
atattgtcagtaaaaagggaaagtttgacttattttctaaatacaacgcctttttttttttcttttgcctcattgctttggctaggacttccagtactttgttgaattaaagtactgaaagtggatatcctgtcttgttccattctcaggataaagactttcggctcttcctcatttggtgtcatgttaacagtggatttgtcccatataggcttcattatgttragctatgttgcttctgtgcctagtttgttgagagttttgtaatgaagggatgttaaattttatcaagtgctttttatatgtctactgagatgctcgtgttttttcttcttcattctgttgatgttatgtatcacatttattgattaaagtatgaaacttgaataaatcccacttgatcatggggtattatgtttgagtgtgctcttggattcatttttctagtattttgttgagaattttgcatctatattcatcaaggatattggcttgcagtgtttgttttcattatgtctttatttggttttggtgttaaggtaattctggcatcataaattgagttagggataattctctcctcttcattttttgg

SEQ ID NO: 219884 - DNA, 595 bp, Homo sapiens
atattgtcagtaaaaagggaaagtttgacttattttctaaatacaacgcctttttttttttcttttgcctcattgctttggctaggacttccagtactttgttgaattaaagtactgaaagtggatatcctgtcttgttccattctcaggataaagactttcggctcttcctcatttggtgtcatgttaacagtggatttgtcccatataggcttcattatgttaagctatgttgcttctgtgcctagtttgttgagagttttgtaatgaagggatgttaaattttatcaagtgctttttatatgtctactgagatgctcgtgttttttcttcttcattctgttgatgttatgtatcacatttattgattaaagtatgaaacttgaataaatcccacttgatcatggggtattatgtttgagtgtgctcttggattcatttttctagtattttgttgagaattttgcatctatattcatcaaggatattggcttgcagtgtttgttttcattatgtctttatttggttttggtgttwaggtaattctggcatcataaattgagttagggataattctctcctcttcattttttgg

SEQ ID NO: 219885 - DNA, 578 bp, Homo sapiens
gttctctcacaatctgatgaaaaagccacttttcaaagttccactgaattgctttttcatcttgctatgcctgcattgggcaatttttggcttcttctttcaaaagtcttggtgttcaagctctgagattctttacgctgtttgatctagtctattgttgaagtttataaatatattttgtatttcactcaatgaattcctaagtgtcagtatttgaaactgtttcattratctattatatctaaatttccaccaataccatacaatattgactactgtagttatataatacatttttaaaaactggagaatcatttctcccactgcattcttcattttcaaaattgtttcactattctaggagtttctcttgttatctttttcatatgaattttagaataatcttatttatacctaaaaataatgctgtcattttgacagagatttttcttggattttttaaaataggtataccagctaggggagaatttaagtctttattatgttgggttttccaaaatataaatagtgtgattttctttgatttatttcaccagctttttgtagtatttttcttt

SEQ ID NO: 219886 - DNA, 578 bp, Homo sapiens
gttctctcacaatctgatgaaaaagccacttttcaaagttccactgaattgctttttcatcttgctatgcctgcattgggcaatttttggcttcttctttcaaaagtcttggtgttcaagctctgagattctttacgctgtttgatctagtctattgttgaagtttataaatatattttgtatttcactcaatgaattcctaagtgtcagtatttgaaactgtttcattaatctattatatctaaatttccaccaataccatacaatattgactactgtagttatataatacatttttaaaaactggagaatcatttctcccactgcattcttcattttcaaaattgtttsactattctaggagtttctcttgttatctttttcatatgaattttagaataatcttatttatacctaaaaataatgctgtcattttgacagagatttttcttggattttttaaaataggtataccagctaggggagaatttaagtctttattatgttgggttttccaaaatataaatagtgtgattttctttgatttatttcaccagctttttgtagtatttttcttt

SEQ ID NO: 219887 - DNA, 535 bp, Homo sapiens
atctattttaaggctttttgtctaagatgaaaggtataggctaagattctcttcattggcattgagattatgaattattcattttttcttcattgaattgccttttcatgcttgttcatgtgagcttgctgtatttgtacagggcaggtttttgtttctgtattcagttccactgactgatgtgtctattctttttagtttttatttactattttttaatatgggatagtgctatgttgtccaggccagtcttaaactcctgggctcaagtgattctctcacctcagcatcctgagtagytgggattatatgttcaagccaccatgtttagctcagtgcatacatgcttcagccaatacctactgccatgattactatatttttatgataagtcatgaaattgggtaatgtgagtcctccaattttgtgggttttttctcaaaattattttgtctactctcattccttgtcatttttctaatccccttgctttttctatatatacatatgtattataaatagttaaacatctacc

SEQ ID NO: 219888 - DNA, 603 bp, Homo sapiens
ataatctattttaaggctttttgtctaagatgaaaggtataggctaagattctcttcattggcattgagattatgaattattcattttttcttcattgaattgccttttcatgcttgttcatgtgagcttgctgtatttgtacagggcaggtttttgtttctgtattcagttccactgactgatgtgtctattctttttagtttttatttactattttttaatatgggatagtgctatgttgtccaggccagtcttaaactcctgggctcaagtgattctctcacctcagcatcctgagtagctgggattatatgttcaagccaccatgtttagctcagtgcrtacatgcttcagccaatacctactgccatgattactatatttttatgataagtcatgaaattgggtaatgtgagtcctccaattttgtgggttttttctcaaaattattttgtctactctcattccttgtcatttttctaatccccttgctttttctatatatacatatgtattataaatagttaaacatctaccaaaataattctagaaatttgattgtgattgcgttaaatctatgaattcttttgaggaggactgac

SEQ ID NO: 219889 - DNA, 456 bp, Homo sapiens
cccttacttatcattaataacactgaatgtaaatggattcaattcttcaattaaaaggcatagagtggctgaatgaataaagaaacaagactcaacaacatgatccatattccaaaaaaaaagaaagaaagaaagaaagcaacacttcacatataaagacacatttagactgaaattgaaggggtggaaaaaatattccatgcatccagaaaccaaaaaatagcaggagtagctattcttatatcacacaatatagaatacaaatcaataactttaaaagcacacaaaaagatcactataaaatgataaagggctcagtttatgaagaggacataacaattttaagtatccatatgcctaacaycagagtgcctaagtatataaagcaaatattaatagatctaaaagaagagatatattacaataccttaattataggaaacttcaacactccac

SEQ ID NO: 219890 - DNA, 514 bp, Homo sapiens
aagaattcttttgtaaatggaaagttgttagacttggaaaatctcacatccaaccagtttgagactgtggtaatttgtgacaagtcttcagactttgtaatggtggatctagttctagactcaacctgtttctattgaaaacctatggtgtttataagattctttttackacgattggctcaattctgaaaattcaactccaaattcctataaaatggctcacctctcagcctcctgacctctgattgctgtatggctctgctgccacttaaatcctctgctactagatttattcaacagttcacttttagcctttaggttgcagttgtttaaaatttggcaaacatctcaagagaaataatggctctgaatctcagtatcactcttaaactttgctttgtaatcttgacccctcaaaatcttgaggtcttggtgatgctcaaatagaatttaatttgcaatagttttatatatattttcttgttattcacagaaaggtctgatacgagctaga

SEQ ID NO: 219891 - DNA, 470 bp, Homo sapiens
tctctattgggtgagtagggcctggaaagcatatggagggcttctggggcattggtcacatcttgtttctttatctgtgtgctggttgcaagaatgtgttcagtttgtggaaacccatggagctgtatacttaartgtatttttccagaaggattttttatactttgacagaatgttcaaaggatgtcctcttactgtgaacaacacaaatgattggagttataatgacacccttgctgtttgagggtgcatttttcaaaggattttagtcacagattcccatgttcactgaagctcaatagactatcccctacctgatgacaagtaatttgcttctttctttagtcctgcttttacctctggccatgaagaatcctgctttccactggtgagttcagaaatttctagcagcgatatttcttcagcccaaagtaaatatcctaggacatggaagaagcagtatagcccct

SEQ ID NO: 219892 - DNA, 455 bp, Homo sapiens
tacagtatttctggaacaaccaccctaggcctgggtgattcatttcagctttcttcctccctttccaggagaggggaatagagtgcctgggggagagaatgggaagtcaagggtcttcagaggaaataagtggtttcctgatctgcttcttttccttctcattccttcctcttagcagaccctcagaaaacctrgatttgactcaatagaaatacctgtattagccaagccatttatacaaatgatttttccccatgcttttctctggaccctggcagcaaaattaaactttaaaagtaaaaagttttaaatttcatcattaaatctgtatcacattaactttttcctgttgtgagcttttatgtgatttcagcgctaagctggtcaaatatgttacaatttcctagtccattactgttatctttcaccactatttagtcacattttgaaaaagt

SEQ ID NO: 219893 - DNA, 469 bp, Homo sapiens
cagtatttctggaacaaccaccctaggcctgggtgattcatttcagctttcttcctccctttccaggagaggggaatagagtgcctgggggagagaatgggaagtcaagggtcttcagaggaaataagtggtttcctgatctgcttcttttccttctcattccttcctcttagcagaccctcagaaaacctggatttgactcaatagaaatacctgtattasccaagccatttatacaaatgatttttccccatgcttttctctggaccctggcagcaaaattaaactttaaaagtaaaaagttttaaatttcatcattaaatctgtatcacattaactttttcctgttgtgagcttttatgtgatttcagcgctaagctggtcaaatatgttacaatttcctagtccattactgttatctttcaccactatttagtcacattttgaaaaagttgacttagtcagatct

SEQ ID NO: 219894 - DNA, 469 bp, Homo sapiens
cagtatttctggaacaaccaccctaggcctgggtgattcatttcagctttcttcctccctttccaggagaggggaatagagtgcctgggggagagaatgggaagtcaagggtcttcagaggaaataagtggtttcctgatctgcttcttttccttctcattccttcctcttagcagaccctcagaaaacctggatttgactcaatagaaatacctgtattagcyaagccatttatacaaatgatttttccccatgcttttctctggaccctggcagcaaaattaaactttaaaagtaaaaagttttaaatttcatcattaaatctgtatcacattaactttttcctgttgtgagcttttatgtgatttcagcgctaagctggtcaaatatgttacaatttcctagtccattactgttatctttcaccactatttagtcacattttgaaaaagttgacttagtcagatct

SEQ ID NO: 219895 - DNA, 463 bp, Homo sapiens
tatacagtatttctggaacaaccaccctaggcctgggtgattcatttcagctttcttcctccctttccaggagaggggaatagagtgcctgggggagagaatgggaagtcaagggtcttcagaggaaataagtggtttcctgatctgcttcttttccttctcattccttcctcttagcagaccctcagaaaacctggatttgactcaatagaaatacctgtattagccaagccatttatacaaatgatttttccccatgcttttctctggaccctggcagcaaaattaaactttaaaagtaaamagttttaaatttcatcattaaatctgtatcacattaactttttcctgttgtgagcttttatgtgatttcagcgctaagctggtcaaatatgttacaatttcctagtccattactgttatctttcaccactatttagtcacattttgaaaaagttgactt

SEQ ID NO: 219896 - DNA, 463 bp, Homo sapiens
tatacagtatttctggaacaaccaccctaggcctgggtgattcatttcagctttcttcctccctttccaggagaggggaatagagtgcctgggggagagaatgggaagtcaagggtcttcagaggaaataagtggtttcctgatctgcttcttttccttctcattccttcctcttagcagaccctcagaaaacctggatttgactcaatagaaatacctgtattagccaagccatttatacaaatgatttttccccatgcttttctctggaccctggcagcaaaattaaactttaaaagtaaaaakttttaaatttcatcattaaatctgtatcacattaactttttcctgttgtgagcttttatgtgatttcagcgctaagctggtcaaatatgttacaatttcctagtccattactgttatctttcaccactatttagtcacattttgaaaaagttgactt

SEQ ID NO: 219897 - DNA, 492 bp, Homo sapiens
aagaaatggtgaactatcatagcgatttgatatgagggcaaaggagctgtagacaacaattccaaagtttyaactaaaaacattgtagaaaccactctattgcaatttcggcaacttttcaagtttgatttatttggagagtatagtagagaacacacattttctgaagaagtactagtcatatttgtcctttgaccctactttttataagacctcctttagtgtcacacctatgaatcatttatttattcaaaaaattaatgacctcctattctatggcaggcataaacaggagaaaaatagacacgatcccatttaccttcacccttccacccatatcctctccccactatctgcccccagtgcttttcagtttggataaggagaaaatatcagtagaaaaactgacttaacccattatatcccttgatctaatagtattttttaaatatgtatttgaaattgggtccatttttttctggatacataaat

SEQ ID NO: 219898 - DNA, 492 bp, Homo sapiens
aagaaatggtgaactatcatagcgatttgatatgagggcaaaggagctgtagacaacaattccaaagtttcaactaaaaacattgtagaaaccactctattgcaatttcggcaacttttcaagtttgatttatttggagagtatagtagagaacacacattttctgaagaagtactagtcatatttgtcctttgaccctactttttataagacctcctttagtgtcacacctatgaatcatttatttattcaaaaaattaatgacctcctattctatggcaggcataaacaggagaaaaatagacaygatcccatttaccttcacccttccacccatatcctctccccactatctgcccccagtgcttttcagtttggataaggagaaaatatcagtagaaaaactgacttaacccattatatcccttgatctaatagtattttttaaatatgtatttgaaattgggtccatttttttctggatacataaat

SEQ ID NO: 219899 - DNA, 575 bp, Homo sapiens
atttttaggctccataaaacatgtttgtggttggctgctttrtagtaacatatttttgtatgcatttggcttcatttcttctattattgtgattctcattccacttgttacctagcagttgccttttctactgtttaaaaaattttttaagggggaaatgtgttttgtaactcagaaaaacataatgtaagatttctcaaaatctatgattttaaaacaaggacaataaatgatttcctcttaaaactgacattacttaaattactaacacaataatatctttaaatgtctacatacatgttaaatggattgtaatgtcttttgaaaaatatttacatattttggttcagagactaagtatactcaatttatctacaatgattcctttgttgacaaatagttacaggcgtgactgatttgatagttcattggaagaagatcttcggtatctttcataaagcttagaattggcctggtatttaaaaaataattcatgttggagtaatttttgtatggttaatccatttaaagacagacaggataattcatttttcactgaatcatctagatagtag

SEQ ID NO: 219900 - DNA, 612 bp, Homo sapiens
gactttctctccttcacttctcttctggtctacccatcctcactcactccctgcacagtcatactctttttgatcttgccattgsaataattgcaccagctccataatgttagttttgagcatcccgttctttgactactacttcttatctttgcagctccttccctgaatccaagaagccattaatcccacacacatctccacacttgagcctactatattccaccattcatcctccccttaacattcacacctccctggcatggagttcacaagccactgtgatgatctctccagaacacacaccctcaactcccttgactccctcaaagtcacctagaaaaaactcaccaccagttaagtcctcctttctgcctgctctccacctatttccaggcagttgaacatgactggggaaaagctcacaaccacactctggtctcaagtgggtcctcagcctcctagaaagtctcttcacattccctcagttaagccagtccctcatcactaagaaaaccacttcctcagtcattaacatcattagcatcaactccaatctacttgttttcaactttccccagagaaaatagaagctatcaccagagaactttg

SEQ ID NO: 219901 - DNA, 536 bp, Homo sapiens
taaataggaactataatcagtttattttccctccacatcaacaataattttttttttttacttaattttcttagaaaattctaggctggcatgtaaaatgtaatggttggtattagagcaaagcatgtagcacaatgaaacgccatctttaataaaggcatatgtgcctttattaaaggtttctccaaggtttctgttacaggaaatcatacatcatgggtggctagaggagaggcatcactgtctatgggagtcaytggagcagaaacagatttatttcatattcttcctttgactattcaaacatagaccaccagatttatgaaatcctatgttctgtatctctgtatcttcctttcccctgatgtcatttatttgaaccacagcacaaaatgagattgagtaggcaaaggccattaaattcaatgtcattatagggggtgcaaggggaagcttggattcttatgagcacattctccacaagtagaaaccttaagaagcaacactaggtttttttttttttgtttttgtttttt

SEQ ID NO: 219902 - DNA, 536 bp, Homo sapiens
taaataggaactataatcagtttattttccctccacatcaacaataattttttttttttacttaattttcttagaaaattctaggctggcatgtaaaatgtaatggttggtattagagcaaagcatgtagcacaatgaaacgccatctttaataaaggcatatgtgcctttattaaaggtttctccaaggtttctgttacaggaaatcatacatcatgggtggctagaggagaggcatcactgtctatgggagtcactggagcagaaacagatttatttcatattcttcctttgactattcaaacatagaccaccagatttatgaaatcctatgttctgtatctctgtatcttcctttcccctgatgtcatttatttgaaccacagcacaaaatgagattgagtaggcaaaggccattaaattcaatgtcattataggrggtgcaaggggaagcttggattcttatgagcacattctccacaagtagaaaccttaagaagcaacactaggtttttttttttttgtttttgtttttt

SEQ ID NO: 219903 - DNA, 549 bp, Homo sapiens
taagtatatacaaggggaaactgacatgtctttaggaagttagatatctattaaaaggactagcataatacttgtatatcccttgtttggaaatgtgatattcttattgattcctttggtctacactgatcaccacttttcaatatattagaatattgcaaaaatcacaccactaacatgattcaaaacaaactcctatgtattgagtcgataatayattcaaagcattatattggaccttgcagaatttaaagaccttgcagacattaagatgaatacacacaccacacacacacacacacacacacacacacagattttttcttgaagtaatgtttagttcacagaatccattcctcaggccacccatatcaacactgcttgaaacttaacaagtacattctcaggacccaccccacccaccaaccagatctactgaattagaacctcgctctggtgaggtggggttgagggagtcccagcaatacacgtcccacatcttgttaagtcctccaggtgattctgatgcatgttaacatctgagaacca

SEQ ID NO: 219904 - DNA, 554 bp, Homo sapiens
actgtttgcaagtttgtaaaccacgaagtgggcccacatcagacactaaatcagctagggtcttgatcttgaactcttcggcttttagaactgtaagaaataaatgtcagtagttgaagccacccagtttgtggtattccttcatagaagctcaagtagaacatgacagagtctgagggaggccatctctggggaggcgacatttgaacagacacttgattttgagaagggacatactagaagagatttccgggcaaaagatccaccacttaaaacagtcctggaggtgggaaagggcttggcatctccaaggcatagaaatggggcttgtatggctacagtgagaggggagtggaggaagaagtgcttggagaggtgggcatgggtcagatccctatggagaggcatggatttattctgagaattacggaaaaacagcaaaaggtcccaagcagaggagcaatttgacctgatttatggttccagagctcagtagcagacctttccagaaaatgcagaagccaaggcagccycttttggtaagaggcaacata

SEQ ID NO: 219905 - DNA, 575 bp, Homo sapiens
acttaattctctgcaagttgtggcatgaagagaaataggcagtggctataaaaaatgtatgctaaatcactgctaattaaaaatgcagctattgaccatgttaaccaaactaattaattgcttttccgaattgtcatttaattaattaatttatccattaatttatttatccataaaggcacattttattaaaatagaccataatttcaagtgcactgtgactgttgaaactataaaatctttcagtagtttaaaatctgaacaagatcctaaagtttgatccatgaactaaattgagtgtttgcatgtgaaatagatacctatgtacatgtctctttatgagactgctgaaagcagagattttacttcattttaatttatttatcctgacattagagagttcaagtagtggcattatcgagcttataatcttctctgtgctgcaatttccctcataacaygggaataataatactagctccttataaagctgttgcatgcattaattcacttattaaagaatctagaatagtgactggcacacagtaacatttaatacatgttacttattttcc

SEQ ID NO: 219906 - DNA, 506 bp, Homo sapiens
ggcaactctttgcatttgggtagggagctggctttgaggtggaggggccacccrtccctgtgtatctctcctcattgaaggttcttggggccagctgacaaaatggagatcaacacttcactggtgtgtcttgaatacttctgtaaactgctttgatcttgaaaatgtgcagattattggtgaattttttcaagttgtgctttctccattgctggcaaagaaaacagagtggtagcttttccaggaccgatttcttttatgtcctgttaggctaaagaatgaactgaaatgaaggataaattattctttcaagtgtaagaaaacatgtaagaagcagagtacacgagtggaaagtgagttaggccaaaaaaaaaaagaaaaagaaaaacaaacccttcacacatcacctaaaacatccctgcaaatgtagagagatggagaaatcatactttccagaaccactttgataaagcccttgtggtgtgaggccagccatcctcagcatc

SEQ ID NO: 219907 - DNA, 506 bp, Homo sapiens
ggcaactctttgcatttgggtagggagctggctttgaggtggaggggccacccgtccctgtgtatctctcctcattgaaggttcttggggccrgctgacaaaatggagatcaacacttcactggtgtgtcttgaatacttctgtaaactgctttgatcttgaaaatgtgcagattattggtgaattttttcaagttgtgctttctccattgctggcaaagaaaacagagtggtagcttttccaggaccgatttcttttatgtcctgttaggctaaagaatgaactgaaatgaaggataaattattctttcaagtgtaagaaaacatgtaagaagcagagtacacgagtggaaagtgagttaggccaaaaaaaaaaagaaaaagaaaaacaaacccttcacacatcacctaaaacatccctgcaaatgtagagagatggagaaatcatactttccagaaccactttgataaagcccttgtggtgtgaggccagccatcctcagcatc

SEQ ID NO: 219908 - DNA, 608 bp, Homo sapiens
gcgatctcggctcactgcaacctctgccttctgggttcaagcgattctcctgcctcagcctccagagtagctgggattacaggtgcccaccaccaccacacctggctaattttttatatttttagtagagacggggttttactatgttggccaggctggtcttgaattcctgacctcaggtgatccacccaactcagcctctsaaagtgctgggattacgggcatgagccactgtgcctggccttctttgagcttcttactgcggccaaagggacaacagttaacagagacttgaaaagcacttgtgccttaggattgcctatttttttttgctctttggaatgctgagaacactcggtgaagaaggccaagctagcctgttgaatggtgagagacgtgtgcagcagagataatttataccagattcaccagcctgccaatggccagtcactcagatggagactgtcctagaccatccagccctggctgagcctccccaggctatgagagccaccctgctgacccagagagtcatgagaaataataaatccttgcgggtttaagctagtgaacccagtgtggtttgttacacaacaaaagctgactga

SEQ ID NO: 219909 - DNA, 550 bp, Homo sapiens
tccattctacacatctctgaacacttaattggactcagcctgtcctccttcaccttcccaaaccttttactggaccttctcgggtttttcctccatgataatcaatctctcattttccacttctctgaacatcccctcaaccttctcctggatcttcttggtyccatggctaactcctgactttttcttccccttcctcctgaaaaataaaaacaaaaactgaacaaacaaatcctgctcctttcaagatgctggatgttccaactgctctgtggagtttctggtcattctccgttcatctaaaagcccagcttctggcttagtcttctttaccattgacctcctgttgtcctttttggtgacttcaacatccatgtagatgacctccccagttcttggacctcctcacctcccataccctttccctctactgcatctcaaccaccctcttccctagaccttttgtcagtaaaccttctacataaagacactttccattcttttaactcatttttccagttttaaaactcattgagatctgcaagccact

SEQ ID NO: 219910 - DNA, 550 bp, Homo sapiens
tccattctacacatctctgaacacttaattggactcagcctgtcctccttcaccttcccaaaccttttactggaccttctcgggtttttcctccatgataatcaatctctcattttccacttctctgaacatcccctcaaccttctcctggatcttcttggttccatrgctaactcctgactttttcttccccttcctcctgaaaaataaaaacaaaaactgaacaaacaaatcctgctcctttcaagatgctggatgttccaactgctctgtggagtttctggtcattctccgttcatctaaaagcccagcttctggcttagtcttctttaccattgacctcctgttgtcctttttggtgacttcaacatccatgtagatgacctccccagttcttggacctcctcacctcccataccctttccctctactgcatctcaaccaccctcttccctagaccttttgtcagtaaaccttctacataaagacactttccattcttttaactcatttttccagttttaaaactcattgagatctgcaagccact

SEQ ID NO: 219911 - DNA, 550 bp, Homo sapiens
tccattctacacatctctgaacacttaattggactcagcctgtcctccttcaccttcccaaaccttttactggaccttctcgggtttttcctccatgataatcaatctctcattttccacttctctgaacatcccctcaaccttctcctggatcttcttggttccatggctaactcctgactttttcttccccttcctcctgaaaaataaaaacaaaaactgaacaaacaaatcctgctcctttcaagatgctggatgttccaactgctctgtggagtttctggtcattctccgttcatctaaaagcccagcttctggcttagtcttctttaccattgacctcctgttgtcctttttggtgacttcaacatccakgtagatgacctccccagttcttggacctcctcacctcccataccctttccctctactgcatctcaaccaccctcttccctagaccttttgtcagtaaaccttctacataaagacactttccattcttttaactcatttttccagttttaaaactcattgagatctgcaagccact

SEQ ID NO: 219912 - DNA, 530 bp, Homo sapiens
atggagtgcaggtgggttggagcacagatgaagccccggtccaacctgggcattcctgcagccatgtgcagtgacccttgtgtatgtgagtacctgtcatgtgcccacgtatcctggtggcacaaaaggtacttcatgtagattgtcaggaccaagacacagaacgttcttggggcacaccacaataattcccccactagcattcaccttaagatgaaagaagtaagtaaaacccttctcagatctcagggaggaccctgcagatggatccctgaaaacttaaggccaaggccattcatgcccattattgggttmgtccagaccttagcattaatcctggccttggtgaataagaagtgaaagaaccattgtggggcatgagagaaccacaccagacagagtttcagggcaatgagtccctggggagaacctggaacagaacttcgaatacctagtctgccacagattttttcctgagaacttgcctttcattatttctatttaatacctgctgttcaatgtttagattc

SEQ ID NO: 219913 - DNA, 598 bp, Homo sapiens
cattcttttctttacaaatcataaaatttgtaaagggtaaaatttgtaaaccctaagccaagggttgcaaaagaaagatgctctcagaagatgagagagaaataatagaaccacagaaagcactaaaatgttttacaataagactaatgaagacaagttaaagaaactgagataatggaatttggagacgacaaaggaactattacataataatcttcaagttctacaggagaagtttcttgaaaagagagcagccacctgttcatgaactctgggaagaaaaaaaagtgaacaaagtgaacatgaaattaacatgtagcrtaaaagatttaatgggcatatcagaggaaaaatgttctgatattaagagttgttaaaaaacacttgtatgacatatggaaaatgttattgagattatttgctttggaggcattaaaaccaaaacagattcttcttgaccaaatgaatagacatctgaggatgcccccaaacctcaaagattaatgccttttaaactatgagtagaagtgaataaatgaaggaacagcacaaatgatagaactttattttggtttatataaaggaaaatataattaag

SEQ ID NO: 219914 - DNA, 598 bp, Homo sapiens
cattcttttctttacaaatcataaaatttgtaaagggtaaaatttgtaaaccctaagccaagggttgcaaaagaaagatgctctcagaagatgagagagaaataatagaaccacagaaagcactaaaatgttttacaataagactaatgaagacaagttaaagaaactgagataatggaatttggagacgacaaaggaactattacataataatcttcaagttctacaggagaagtttcttgaaaagagagcagccacctgttcatgaactctgggaagaaaaaaaagtgaacaaagtgaacatgaaattaacatgtagcgtaaaagatttaatgggyatatcagaggaaaaatgttctgatattaagagttgttaaaaaacacttgtatgacatatggaaaatgttattgagattatttgctttggaggcattaaaaccaaaacagattcttcttgaccaaatgaatagacatctgaggatgcccccaaacctcaaagattaatgccttttaaactatgagtagaagtgaataaatgaaggaacagcacaaatgatagaactttattttggtttatataaaggaaaatataattaag

SEQ ID NO: 219915 - DNA, 449 bp, Homo sapiens
ctggtcacatggccccaccttggtgcaagggaggctgggaaatgtattctctgtgtgtccaagaaaaagaggaacccaatttggcaagcatctggccagattttgtggggaatcaggcagtttgttataaggatatttaatgtcttacaaatgcacccatcgtcatgattttcttgtggcttcaccatcagtggactttggaatgagcagtatatgaaggggatgacttgtcttayaccatttgcatgctaaccttaatccccatttttcaacagatagaccaattgtatattagacagtcatttcttctcattaatagagaattctaagcaacttgcaaaagaacaagacaaaaatatttttttgccacatcatcagttgttcaaccaacatttattaagagcaaatgctgtgtccagcactatgctgggtacaaaaatgagcaaggc

SEQ ID NO: 219916 - DNA, 355 bp, Homo sapiens
ctgtcacagagcagaggtactgcagaaagaatcacgctttagagagaaagggcktggtaccagagccctgctttcctttctgttaacccagtgaccttgaaccaggcatcctaccactccaagactttacttttgataagaggaactcagtttgataggtgtattagtctattctcatactgctcatgaagacatacccgagactgggtaatttataaaggaaagagatttaatggactcacagttccacatggctggggaggcctcacaatcatggtggaaggcaaaggaagagcaaagggacatcttacatggtgtcaggccagggagagtttgtgcaggggaactcccattt

SEQ ID NO: 219917 - DNA, 439 bp, Homo sapiens
gcagtgggctgtgaccatattagaggagggctgtcctcagggtgaactctatgaatcagtaattttgtctgctgcaatcaaaagtcattatcaatccattcttaaaagcttagccttaaattcttttttttgttcactttgttttggggagcaagtcaggcttggtgtaagacaaaggagaaataaatttgttgttaatgaaaattgtttttagtgatttaaaaataataaataccttagctttatgwtgcattttttaaaaagcacaaggaatataattataccctagggaagtcaaaagagctcagtgaaataaagaaaaaatccaacaggctagaagttttaactctttttttttaataactaaagagtagttgaaataatctttcaacaacttcagttcagattatatctgaaagaaagctaaaactgattaatt

SEQ ID NO: 219918 - DNA, 594 bp, Homo sapiens
atattagcttggtttttgctgtgataatgctacttaacaaaaacaccaaaatctcagtggattataacaaaaaacattttaattcacacttacaaatctgcaggtcagctgtggtttgatcgatcttgggtggtctaggatggagtacaggtttcaggtcaatttcaagttttcatgtttgcatttcagaactcaagctgaaagaacaacaacttcatggggcttcatagacagtggacactccaagaggcctagcccacccacacaagcacatataaggtttacgttcacattgcagccttttacatgccattggccaaagcaccatggccatacccaacatcattggtgaggtagaagactgggctgagtacactccacgtgtgtcagtaactaccgatgcataacaaccccaaaacttagtgtcttaaaagagcaaaaaccaatttattatttctcacaagtctatgagttygttgggtggttttgccaatctgggctaatcccagttgtgcatctgtgtgaggaggcctgtggcccaggacctggttcatcaaggataatctcagctgggacaaaacagctctgttccat

SEQ ID NO: 219919 - DNA, 428 bp, Homo sapiens
gtgggattgaatttcttgactagctttcttcttgaggtcaggctaacccatcatttttaacagattgttttgctcttcataacttatcagtaaatcaggcctttataaactgatgtgtgtgtgtgtgtrtatatatatatgtgtgtgtgtgtgtgtatgtgtatatatatatgtataggtatatatatacatatatacatacatatatacgtgtatatatatatacatatatacacatatgtatacatacatatacatatatacctatacatatatacatatatatacatatatatacacatatatacacatatatatacttaatagtaaaaattccatgtatttctacagatttaaagttaaaacagtatatccaagtgttcatgttgtaatatacagtaaattcttaccttttaaagtgttaccta

SEQ ID NO: 219920 - DNA, 528 bp, Homo sapiens
gtgatggtagaagttaaagacttaaaacaaactttggcaattgagacaggatactaaggatgtaaatgcctggttgaaatggatcaactattctgtcygcacgttaaacaaaaacaattgttaggcttgtgtgcacggcaggccagaggcccagactgtcccctttccactagggtggtcctccagtcaaccaggcatgggctgcatggtagctcttttccaagattctacagcctggggtaacaagtcatgccaagctctcactctgctatatcccgaactctggcaccctgcgggtcagcccccaagggccatccagtttccatctcctaacactaagttcccttcgtgtctctcatgacagggaggaaacttagtgttccttggagacctgaagggaagcagtgagcttaagaattttcaagagcttatcaatcagtcagcccttgttcatccccaagtggatgtgtggtggacctttactggacactctgccaaataactggagtggcacttgtgctttagtcc

SEQ ID NO: 219921 - DNA, 525 bp, Homo sapiens
ctactttactgtgcgtatgtggccttttatttacagctttgggcattctgattggatagcagcttcctagtctgtgtgcttcagtccactgcctgtggggtgggggagcagagtacactttgatttttgcttcctgaagcccaggagctaaaaggaatagccagagggctgcccacacagccaaaggactgaccacactgagcagtcaaagagcagcataggggccttttttgttccagctaactttctcctgcaaatacacacttgagggccatcctccaagcaaagcagtctgtgctggggctttcagcatccacccctcgtacactgtctctggtcttggtggcttcctgctcccttgctgctcacctacacctagcattgagagactttagcctgtgggccttactcactgctgctctctccatcacctcatctgaagaactcggtctgtcaaggtaggaaccaaatctttccttattccctatastcttcctctctccccctaatacatcctcaaaagaa

SEQ ID NO: 219922 - DNA, 577 bp, Homo sapiens
gatgatgggactcttttgggccatctgggatcctcacaggcctgaaagcctggacctcatgaaacatcagcacaggagacatgagggactacccacttacagcctcaaagagaacagctacctgtactgggagaacaggtatctaatgagtgcccactaaatgcctaataccttaattcagagaagaaataaaagctacaggcatgcatagggcaaattataattcattgagaaagctaaatgttgttttaaaagattcaaattatattcaaagttctaaaatgccttatattagcttgagaaaattatgaaaataaaaacaaaaaattagatgaaaatattcttgaaacttgtgcttgcccctttcatgagaaacttgtaaaagargagttatacctgaagagattttcctattttttttttctttttttgagatggaagtctcgttctgtcgcccaggctggagtgcagtggcgcgatcttggctcactgcaacctccgcctcccgggttcatgccattctcctgcctcatcctcccgagtagctgggactacaggcgccagccaccacgcccag

SEQ ID NO: 219923 - DNA, 630 bp, Homo sapiens
gaacaagccctggagaggagggactggctttggtccactgccccatccccagagggcaccaatgtaaataacaactatagcagtcaaaggagccattttctgcccctcaccctctttgcctttcgagccctaatactggagaagccagcgcaacaaagcagaagagaaagagtggaagactgagaaaatagtgagtgatccaaccccgacccccttccccactgctagtctcccgcctgatatgggtccaagctgcaggaggggatgaaagattgaagtttgctattcaaccagtctgggcttaatgcctggaaatttagacaatgtattaacctgagcatgacagaaaaagctcagggagctttccaaagtttcatccagggtcaggaaaggatgagtcaacagagaagttcaaagggacaatagtgagaaaaagttgagcttgtttaataagctgatcatatgacaccctttgraatagaaatgcatccgaaaggtgtatcaggatagcccacaaaacgtatcctcaaatataggcaatattattcagctgcctcaatatcttagaacaaaggcagagtttgagcaaataaaaatattgcttatatgtgacttcatattccattgtta

SEQ ID NO: 219924 - DNA, 499 bp, Homo sapiens
acgtttatctgatatggacaaaagattcttgaattaataacacttgactcaggcctatgattcaacaagaggtattcaaaccgtttaagtgaaggcaatgttttctctgaagccaattaatacagcaacaaacctttggctgaagtgatccaaagtgcagcaagtgttaccatgttctgtaaaccatcaagctaaccctgcagtgagtgattgaagagggaaaaaagaaataaatgcacattcagttggcataaacctcagatcatagcccaggcaatttcacgttttaagaggggacttgcagaggtggcttttgttcattctgacaacacttttttacctcagctattaaagtgtacccctgaacacagaaatgactgtgaattcaccttccaaccttctttgccgccttgacaattgaaggctrtagctggcccagtcctccttcaacctgtccctgagctgtagcccctacaggggtccggtggcttgatttgat

SEQ ID NO: 219925 - DNA, 447 bp, Homo sapiens
attcttttcaaatgagagaagtgtctactagttcatgttgttcaattccagtaggtgaagtttgtagaatggtcagggtaggataatatatttggtggcagcatttccttgaaattattgtcattctgctccagacattttgttccaggtaggtactttcaractgttttggtgaacactgtatgtagaaacatttttaccattgaatgtaccaccaatgataaaatgagacctgtcttctttcttaagatatttaaagcacttatttccagtgttcagataaccagaaatggatggcctgctgtagaaacaaactactttttccctttgaaaggaaaaatgggtctctatagttaactgcagattttttttttaaggaacactgtatctgctttgatttttaactccaactcaaaaccaattaatttgcatttcaaattagaattc

SEQ ID NO: 219926 - DNA, 452 bp, Homo sapiens
  misc_feature (1)...(452): n = A,T,C or G
nnnnnntttctttgtcacctttattcttttcaaatgagagaagtgtctactagttcatgttgttcaattccagtaggtgaagtttgtagaatggtcagggtaggataatatatttggtggcagcatttccttgaaattattgtcattctgctccagacattttgttccaggtaggtactttcaaactgttttggtgaacactgtatgtagaaacatttttaccattgaatgtaccaccaatgataaaatgagacctgtcttctttcttaagatatttaaagcacttatttccagtgttcagataaccagaaatggatggcctgctgtagaaacaaactactttttccctttgaaaggaaaaatgggtctytatagttaactgcagattttttttttaaggaacactgtatctgctttgatttttaactccaactcaaaaccaattaatttgc

SEQ ID NO: 219927 - DNA, 447 bp, Homo sapiens
attcttttcaaatgagagaagtgtctactagttcatgttgttcaattccagtaggtgaagtttgtagaatggtcagggtaggataatatatttggtggcagcatttccttgaaattattgtcattctgctccagacattttgttccaggtaggtactttcaaactgttttggtgaacactgtatgtagaaacatttttaccattgaatgtaccaccaatgataaaatgagacctgtcttctttcttaagatatttaaagcacttatttccagtgttcagataaccagaaatggatggcctgctgtagaaacaaactactttttccctttgaaaggaaaaatgggtctctatagttaactgcagattttttttttaaggaacastgtatctgctttgatttttaactccaactcaaaaccaattaatttgcatttcaaattagaattc

SEQ ID NO: 219928 - DNA, 374 bp, Homo sapiens
cactgttttaattgctgaagattagaaacaacctaaatatccattggtagaagactggttcaaaaagttaggggacacttgcaatraagtattctgaagccaccaaagagagcaaggcagatctgtatatacaggtatggaattatgtcctacagaaaaaacaaggcaaaaagcaccatgcatcacaagctgccatttgtttataaaagggagatatacatagagtatctctagataaataagcaaaaatactagtaacagttgttgcctcagaggaaggagacccggctctggggagcagtgctgtaatggaggcttcttttcactgggtacttcctgtgttgtttgaatattttttccaaatggaaatgctc

SEQ ID NO: 219929 - DNA, 557 bp, Homo sapiens
tgctgagtcatcttagagattgcctgccacagctatcacttacacactcgtacgaactccagatatgtggttagtcgggaagtatttgttttaattgggacatatcagtctctgtccactcartgagaaaattcaagcctatttgatgaaaggcagaagttagctagtaaggtagaaacaaaggtggaatgggaagagaaaggatatggctcacattagaagggaaactgtggccatatatattgagtcccatcacatgttaatcatggtgatgggcaccctgatggctttggctgacccagctctccccatgtctcacatataaccttgagaatcactgtagaacgtgctaagagtgcaacatgctgagctaaggagaaactgcctggaacagctttgttcccacccctcctagaacatgatgtcctacaacactttggcccagtgatcctagtgtccccccagagtataaaaacccaacacagaatgctttggagatacctcagctgcagcatgatgtggatcacatacagatgagaccccatctgccctgggca

SEQ ID NO: 219930 - DNA, 450 bp, Homo sapiens
aatctgtttttaaaatgatgaaaaattactaatatttatacttactatgttgcaggcactattattagtcttacttatgttaattatacgagctttcactgcaaccctagaaactatttggtgaaattatgcccatttcatagattcagaaactgagaaccaaatactttaaactactcacgtaactttacatagtagttggtggaaccaaaaagaatacccaggcaagtatatctctagagtccagttcttttccattgtgctatactcatgaaagttaaatggkgaaaacattttgcatcaaatgattaataaatcacaagctgtcattacaaatttaaaaagttaattgacagctgtcctgttacaattatttttaaatttatattaaaataatacatcttgcacctgcctaagagacataaaatatcctaaaacttcataggagca

SEQ ID NO: 219931 - DNA, 507 bp, Homo sapiens
tcatatttcatgcaagaatagtcttacatagaggtatttactacagttgtttgttctgttcatctgttgcttttttaggaaaatacaataaccataaatctgtgtaaaagagaaaataaatagaaattggccactgtttctaaaacaaaaacaaataaaacaatactttgggtcaactttacctcagttrtctaaacacccttaatagcatcctatgtctttattgtcagttctcatttttaattccaacaaagctggctgtcaagccatattatgcagtgacttaatatgagtggacatttgaaaacatcttacaatgtagaatatatttttcctactcactattacgtatcatccttaccaatattgtataaatatccttaacttgttctggagtagcccaaggaacagaaatcgtaaatgctcatagaggtaaaccatcagtggctcatcgaggtaaatacagacatgagtttaaaaagccatggtcaaatgactatgcaattc

SEQ ID NO: 219932 - DNA, 576 bp, Homo sapiens
cgtatcatccttaccaatattgtataaatatccttaacttgttctggagtagcccaaggaacagaaatcgtaaatgctcatagaggtaaaccatcagtggctcatcgaggtaaatacagacatgagtttaaaaagccatggtcaaatgactatgcaattcctaatgggtattgttcttcagtatatgaaaataggtagtaattttgtgatctgaaatgacaataaaacaatttcagaaagaaagaaaaggaaggaaacttactccatcccactagattcttattaaccaaagctctggaaaatctcaaagaaagataaaaatktgttgtgtttctctatttgtgtttggtggagggcagtggtagtggggtcagaagaggtgttgaggttctataccaagccagagggaaagaagtgaaagacagagaatgaagagtaaaaattagcaacaattttagaaaataaagaggcttattttcttaatattgttcatcctctcttttcattgtttctgctctattcaattactttgtttctttttgttttgttccttcttttcctcatgcattttcctaa

SEQ ID NO: 219933 - DNA, 496 bp, Homo sapiens
atccattgtccagtggtcagccgccccaatgcatgatggatggatgatccccccaaaattgtacctcctgttgggatgcacttagtacctggataagggtgggtaagaggcttctgccaactcacctactgaatgtacagtgtggctaccagccaatggattagatggccacagctttgctctgttccaaaacactgtggagctcatgtccatgcctccttgccctgtgaccatgagagtggagaacagcaatggaatatagtcctccctccagtttcctctccaggtggagggtgacaacagccacagaaaggtacagagaaaaasaggctgagtatgagggaggcagctgagaaactctcctagatccagagacagagaggctgcatgaggtgaagcagtgcaggaatgaggctccaagcactcaaaatatactccatttccccaaaagctcaacttgctaaacaagaatttaaagataaaaccaatatggatt

SEQ ID NO: 219934 - DNA, 540 bp, Homo sapiens
tggattagatggccacagctttgctctgttccaaaacactgtggagctcatgtccatgcctccttgccctgtgaccatgagagtggagaacagcaatggaatatagtcctccctccagtttcctctccaggtggagggtgacaacagccacagaaaggtacagagaaaaagaggctgagtatgagggaggcagctgagaaactctcctagatccagagacagagaggctgcatgaggtgaagcagtgcaggaatgaggctccaagcactcaaaatatactccatttccccaaaagctcaacttgctaaacaagaatttaaagataaaaycaatatggatttcaagatgcgaaccaaaccgcattaaatctcaagtactaagctctggatcctatgtaaccatactgttcacttgcccatgaagctagcccttttcccattttacaaatgataacattgcccaaagtctgtttgtcagcatgagataaaatctgtgtgtatgtgttgtagggactcatcagggaacagggatagatcaata

SEQ ID NO: 219935 - DNA, 541 bp, Homo sapiens
aagctttggaaatgtatttaagtttttaaagtatgagtctctgtattcataaagtgaaacattagtaccaactcgattggctakttttgttttgttttgttttgagatggagtttcgctcttgttgccccggctggagtgcaatagctcggtcttggctcactgcaacctccacctctcagattcaagtaattctcctgcctcagcctcccaagtaggtgggattacaggtgcccaccatcatgcccagataatttttgtatttgtagtagagatgggttttcaccatgttggccagtctgctctccaactcttgacctcaggtgatccatcccccttggggtaccaaagtcctgggggtgcggtgtgagccaccgcacctggccaagatacatgttttaaaatagttctaattcctgcagagttcaaataaacaactacttagggcaggaagattgttagatgatgatgcctatgacgacagtgatgaagaaagaaaaggaaacctaagtacactttttgaggttttagtttgtgcctgg

SEQ ID NO: 219936 - DNA, 541 bp, Homo sapiens
aagctttggaaatgtatttaagtttttaaagtatgagtctctgtattcataaagtgaaacattagtaccaactcgattggctatttttgttttgttttgttttgagatggagtttcgctcttgttgccccggctggagtgcaatagctcggtcttggctcactgcaacctccayctctcagattcaagtaattctcctgcctcagcctcccaagtaggtgggattacaggtgcccaccatcatgcccagataatttttgtatttgtagtagagatgggttttcaccatgttggccagtctgctctccaactcttgacctcaggtgatccatcccccttggggtaccaaagtcctgggggtgcggtgtgagccaccgcacctggccaagatacatgttttaaaatagttctaattcctgcagagttcaaataaacaactacttagggcaggaagattgttagatgatgatgcctatgacgacagtgatgaagaaagaaaaggaaacctaagtacactttttgaggttttagtttgtgcctgg

SEQ ID NO: 219937 - DNA, 541 bp, Homo sapiens
aagctttggaaatgtatttaagtttttaaagtatgagtctctgtattcataaagtgaaacattagtaccaactcgattggctatttttgttttgttttgttttgagatggagtttcgctcttgttgccccggctggagtgcaatagctcggtcttggctcactgcaacctccacctctcagattcaagtaattctcctgcctcagcctcccaagtaggtgggattacaggtgcccaccatcatgcccagataatttttgtatttgtagtagagatgggktttcaccatgttggccagtctgctctccaactcttgacctcaggtgatccatcccccttggggtaccaaagtcctgggggtgcggtgtgagccaccgcacctggccaagatacatgttttaaaatagttctaattcctgcagagttcaaataaacaactacttagggcaggaagattgttagatgatgatgcctatgacgacagtgatgaagaaagaaaaggaaacctaagtacactttttgaggttttagtttgtgcctgg

SEQ ID NO: 219938 - DNA, 541 bp, Homo sapiens
aagctttggaaatgtatttaagtttttaaagtatgagtctctgtattcataaagtgaaacattagtaccaactcgattggctatttttgttttgttttgttttgagatggagtttcgctcttgttgccccggctggagtgcaatagctcggtcttggctcactgcaacctccacctctcagattcaagtaattctcctgcctcagcctcccaagtaggtgggattacaggtgcccaccatcatgcccagataatttttgtatttgtagtagagatgggttttcaccatgttggccagtctgctctccaactcttgacctcaggtgatccatcccccttggggtaccaaagtcctgggggtgckgtgtgagccaccgcacctggccaagatacatgttttaaaatagttctaattcctgcagagttcaaataaacaactacttagggcaggaagattgttagatgatgatgcctatgacgacagtgatgaagaaagaaaaggaaacctaagtacactttttgaggttttagtttgtgcctgg

SEQ ID NO: 219939 - DNA, 444 bp, Homo sapiens
cagtccatacaagttttcccaatctcattagagatgccaatatgcaaattcaaaaaatacacagaacccccatgagacactatataagatggccaaacccaagatacatagtcatcggattygccaaggtcaatgtgatagaaaaaaatattaaagacagctaaaaagaagtgtcagatcacttacaaagaaaactccttcaggctaacagtggacctctcagcaggaacattacaagccaggaaagatgggggtctatatttagcatccttaaagaagcaaaatttcaaccaagaatttcatgttcaaccagactaagttccacaagtgaagaagaaataaaattcttttcagacaaccaaacaacacataaatttgttaccactagactagtattacaagaggtccttaagggaatactaataatagaaatgaaagaacagt

SEQ ID NO: 219940 - DNA, 617 bp, Homo sapiens
ttgaaccaatcttgcatcccagagataaagcctacttggttgtggtggataagcttttttaatgtgctgctggacttagtttgcaagtatatccttgaggatttttgtatcaatgttcatcaaggatggtggccttaagttktctttttgtgttgtgtctctggcatgtttggatatcaggatgatgctggcttcatagaatgagttagggaagagtcatttctcctcaattttttttggaatagtttcagtaggaaactcttctattatgtttttccaaaaaacaactcatggattttttgctcttttgaatgtttgtgtgtgtgtgtgtgtgtgtgtgtgtgtgtgtgtgtgtgtgtgtgcctgtctcctttggttcagctctaattttggttatttcttgtcttctgccagctttggcattggtttactcttggttctctagctcttttagttgtgatgttaggttgttaatttgagattgttctaactttttaatgtgaggatttagtgctctaaatttccttcttaacactgccctagctatgtgccagagattctggtgtgttgtatcttttctctcatgagtttcaaagaacttcttgatttctccctta

SEQ ID NO: 219941 - DNA, 532 bp, Homo sapiens
tgtaaacatataaagctatatattaaaatacaaaagtatttatatataatacatatcatatatattatgcattatatatacatgtatgcatatttaaataatgcataatatataaatacataaacctgtgtattaaaatatatgtacatatatacatacataaacctatgttttaaaatacgtatccataatatacatctctaatagagaagatactgtttaaatttttaattttgattgttagagatacctagtaataaagggactgaaaaattgaaaaaaaaaaaaaacaaaacactcacactgtgagaaaaaaaaattgtttgaaagcctgcatctgtctaacatcctatcagcaggcatattaactgaacaaagcacttgcttttttytgatgccaatgctgatttttttttgtttgtttacttaaaacatcattttcatagatattcaaaaagaagctttggtgtctgtctagttcattaatagttttattaattcagctagtcatcaggtgcaattcatcaaccgc

SEQ ID NO: 219942 - DNA, 488 bp, Homo sapiens
gggtaggaagtgaaaggaggcaattcacgtgtttttccttgaagctatatwttaagactgtgtagaacatcttgaagtttggaaacatatttgcttttgcaggtgatggcattttctaaaatattattacaaaatatatgaaaattgcattgtagttgtcacaataaatcaaacatcttacataataatgtaataaaatctagtttaacattataattttattcaattatttcatccacattgagatatttactaagtcatgaagtttatatagatcatgagatgtaaaagatctgctattactaatttgatttaaaaatcccatgttcattataataggtagtgctgcttaaaatgtctgtgtaatgatctacactattatctgcagcacaatgatgttttcacagctgctgtttgcctggaatcagccatgtcctttgtgaaaccttgcctcggcatgggctcttattcctaacatttgcctttta

SEQ ID NO: 219943 - DNA, 488 bp, Homo sapiens
gggtaggaagtgaaaggaggcaattcacgtgtttttccttgaagctatattttaagactgtgtagaacatcttgaagtttggaaacatatttgcttttgcaggtgatggcattttctaaaatattattacaaaatatatgaaaattgcattgtagttgtcacaataaatcaaacatcttacataataatgtaataaaatctagtttaacattataattttattcaattatttcatccacattgagatatttaytaagtcatgaagtttatatagatcatgagatgtaaaagatctgctattactaatttgatttaaaaatcccatgttcattataataggtagtgctgcttaaaatgtctgtgtaatgatctacactattatctgcagcacaatgatgttttcacagctgctgtttgcctggaatcagccatgtcctttgtgaaaccttgcctcggcatgggctcttattcctaacatttgcctttta

SEQ ID NO: 219944 - DNA, 488 bp, Homo sapiens
gggtaggaagtgaaaggaggcaattcacgtgtttttccttgaagctatattttaagactgtgtagaacatcttgaagtttggaaacatatttgcttttgcaggtgatggcattttctaaaatattattacaaaatatatgaaaattgcattgtagttgtcacaataaatcaaacatcttacataataatgtaataaaatctagtttaacattataattttattcaattatttcatccacattgagatatttactaagtcatgaagtttatatagatcatgagatgtaaaagatctgctattamtaatttgatttaaaaatcccatgttcattataataggtagtgctgcttaaaatgtctgtgtaatgatctacactattatctgcagcacaatgatgttttcacagctgctgtttgcctggaatcagccatgtcctttgtgaaaccttgcctcggcatgggctcttattcctaacatttgcctttta

SEQ ID NO: 219945 - DNA, 488 bp, Homo sapiens
gggtaggaagtgaaaggaggcaattcacgtgtttttccttgaagctatattttaagactgtgtagaacatcttgaagtttggaaacatatttgcttttgcaggtgatggcattttctaaaatattattacaaaatatatgaaaattgcattgtagttgtcacaataaatcaaacatcttacataataatgtaataaaatctagtttaacattataattttattcaattatttcatccacattgagatatttactaagtcatgaagtttatatagatcatgagatgtaaaagatctgctattactaatttgatttaaaaatcccatgttcattataataggtagtgctgcttaaaatgtctgtgtaatgatctacactattatctgcagcacaatgatgttttcacagctgctgtttgcctggaatcagccatgtccttygtgaaaccttgcctcggcatgggctcttattcctaacatttgcctttta

SEQ ID NO: 219946 - DNA, 658 bp, Homo sapiens
ttattattatttaatttaaaatgaagtactgaagcggagactaacttgcccagggttagtattcaacctagccagtctggctaaacagcctaccctcttcagcagtaagcctacagttgactagaagatgatactattatttaggtttagacaataactgcaaaactaagcatactattttatttagctagcaaaattaaatttgataatctagaatatttcattgaaaggaagtcttaaaaagggaaaataygtcataaataaaaagttgaaataagatatgacaacatatgatagcaattagaataaatattagtaggctaatcagaagatagagacttacaatttttaacttattaaaacagaatcacaggttaaccttacatcatctataatacacacatacagttccaaaagatatacaatatttgaaaatttaaaacatatgtttaaaaaatatcagaaaatatttcaatcaaattatatataggatagacattttatttcacataaagggaaattcaaggcaacaggaagacctaaagcacaaagatgtttcttatacactggtaaaagaaacaatatgtccacaggataaaagccaaagttctaaaagtaaaaacagcccacatgatctgcaacttcctccctttcatca

SEQ ID NO: 219947 - DNA, 572 bp, Homo sapiens
aaaaattggcagttttcagttttctctttgtttatggaatccatattaaattatttagtttgacattgagaagtctctacaattgaggtccaatgcatctttctggcaacactttaatacaccatttcttctcatgttttaatatctctgctaacattatttaacattatttcgaaaacccatggtatttcatgctaaagtcatttcatttatgcggtttgtcccaatgagtaatgctattcacccttttcctgccaattctacttattttcattcattttatggatatgcattcagtaagtcaaatatcctagatgacaytgtaattgattaattggaaattagtattaaagtataactcatgaaagcatggtaatggcatgccttaatactctgtttaatcttaaataatatataaattattaggagtgagaaattacttgtaaagtaatctgaatgaaaattccttcatcagtttttgaattccacttgaatcctttatagttgtctttcctagacttaatttataacatcttagaaacttgttaactttttttgactttccaaatcat

SEQ ID NO: 219948 - DNA, 523 bp, Homo sapiens
gatgggtctgtaaggcagttatagaggagaaagagaacagagaagtaagtagagcaagaacaagcactcagatctgtaagcaaagacccaaaaatagctttcagataaggttgatggcatctcagaatgttaatgaaatataacttaatacttctatgaagtataagccatgcttcctacttgaaaatttttttaaacattgaaattattttcaacctagagataatttaatcttttaaaattgtttcttctattcatatagttttyaaaagcttctctattaaatagaagaataaatctttcttctaatacatatctaacactaaaattagtactttcatattgtatatataatgatacccattgttttccttaaaaagagaaatagttggaaggatgaacctcatgcaaattaaagctataagaagaactaacaacaagaatgaatctcacagaaatgcatcactatatagttgaggggaaagaataggtacagtatgataatttctagtgtagcaacact

SEQ ID NO: 219949 - DNA, 621 bp, Homo sapiens
atttttgttttccaatctaccagcttgtgccattgctgctaaatctctggctttctaggtgctctcctggtaacctctccatgctttaattttgaaggcattgacctctatgasatttgaatgttcttccttgcctttcccaattactccatttttcagtgtgtacagcaagctgtcagatttcctcctccacgtgaaaatctctttgggtttgcttgcttctatgtgttctgaaaaaaaacaactcagttttggtcaactctgtctcagagtatctgttccacaccatgacagtttataatactagagaatagctttactgattttgaaaaatcctctaaatacataaaaggccagatgtttccacactaagttttatcactcccatctgatggggaaggacctcattcatggctgtttccagtgaatggaatttccgtcatctagttggctagcattaaatatttgttgaacaagcagataaattgagatgatagtttgggtacaataaatacaaagaacatatcatttgttctgatttataaatttagactcaattttttcaagcttagtaatgtgtataactatgacaaaggcagtattgatgttgatataaaaaat

SEQ ID NO: 219950 - DNA, 621 bp, Homo sapiens
atttttgttttccaatctaccagcttgtgccattgctgctaaatctctggctttctaggtgctctcctggtaacctctccatgctttaattttgaaggcattgacctctatgagatttgaatgttcttccttgcctttcccaattactccatttttcagtgtgtacagcaagctgtcagatttcctcctccacgtgaaaatctytttgggtttgcttgcttctatgtgttctgaaaaaaaacaactcagttttggtcaactctgtctcagagtatctgttccacaccatgacagtttataatactagagaatagctttactgattttgaaaaatcctctaaatacataaaaggccagatgtttccacactaagttttatcactcccatctgatggggaaggacctcattcatggctgtttccagtgaatggaatttccgtcatctagttggctagcattaaatatttgttgaacaagcagataaattgagatgatagtttgggtacaataaatacaaagaacatatcatttgttctgatttataaatttagactcaattttttcaagcttagtaatgtgtataactatgacaaaggcagtattgatgttgatataaaaaat

SEQ ID NO: 219951 - DNA, 569 bp, Homo sapiens
ttttgccaaccctggctctcacaagctatgtacaggttgttccagaaacatatgcacatttgccagttacaaggctgggactggggatgtgtagatggtactgtgttcagagtactgaaattaactacaatttattgttcaagccttcccctggaagttkcaagccttcagtacattctagtgttccaaaattgttacatcacattgattcaccagctcaattgttatctaagtagagagacagatttcttgtgcctcccactctatcatctttatgaaatcctctctccacagttgtttcagtagagtgatgctcatcctttttccttacattacagtccgcaggcaagaaagtgaaattctgtgcccagatgcaaatccttagcggaatcaacctgtgccatcattgtccccttgataggtggagccatcaagcacattgcctggcactatcaggaaacctgcacagttctgggtcagtggttgctaatcacctctctttagtccacacaagccttgagagtagagcatgtaataaaagtacgttctttcaaatctgaaacttggca

SEQ ID NO: 219952 - DNA, 636 bp, Homo sapiens
tgctgctctattcattaattactgaagtaggctcagctatgagagaaaggtagtcctctcaggcattagcctgctaccattgcagaaacaactgaccacaccctccacgtggcctttgtgttctcattttaccagggtgtaagtcagcttcaaaaggaagatggagtasgtatgcaagttagagactgacaaactgatctcaaagtcagtcttgaaattgcctttaaaaatcttttcatgtatactcccactctagacttgccaaaatgcagagattcaattcagcaaattattcctcttttatagccagttgttgacgctgtactctttatccctaaatgcttgtgaattatttttaaagtggaaggaaaaagaaggaacataataaaccatgttaacatttcttgagtttaagaaacaatttattttgaattttcctgttagatgaaatggcagacactgttcatgaactatataacagttgggatagtcataacatccttcctccttgttcatgaacagggaggcttatacctgtcaataaacatttgagttggtttccatttcttgctattacaaactgcactgctatgaacattcctgcacttccttcacatgtctctcagtgcaaatgtg

SEQ ID NO: 219953 - DNA, 636 bp, Homo sapiens
tgctgctctattcattaattactgaagtaggctcagctatgagagaaaggtagtcctctcaggcattagcctgctaccattgcagaaacaactgaccacaccctccacgtggcctttgtgttctcattttaccagggtgtaagtcagcttcaaaaggaagatggagtacgtatgcaagttagagactgacaaactgatctcaaagtcagtcttgaaattgcctttaaaaatcttttcatgtatactcccactctagacttgccaaaatgcagagattcaattcagcaaattattcctcttttatagccagttgttgacgctgtactctttatccctaaakgcttgtgaattatttttaaagtggaaggaaaaagaaggaacataataaaccatgttaacatttcttgagtttaagaaacaatttattttgaattttcctgttagatgaaatggcagacactgttcatgaactatataacagttgggatagtcataacatccttcctccttgttcatgaacagggaggcttatacctgtcaataaacatttgagttggtttccatttcttgctattacaaactgcactgctatgaacattcctgcacttccttcacatgtctctcagtgcaaatgtg

SEQ ID NO: 219954 - DNA, 634 bp, Homo sapiens
tctctggcttgaatttgaattaacctctttgcgagcagcctaaatctctgtttaacacattcatatgtatcatgtattctatcaattacatcttcttaaagaagccttttccagagtcttctgaaatgctccaatctgaactagttgccttcgatgccttagtgcattaccctcatcctagagtctacatcattaatcctgggaattcctttggtcccatctgtatcacccatttcatgtaccctaagtcttcctcttccttgttttggtggagcatatcctccagtaactttctgagtatgaaaaggtctacatggtaggtaaactatgaaattttgcatgtcttaagatgtctttattctgccttcacwtttgattgataatttggctgggtacaaaattctaggttaaattttaaaggcattgctccattgcctcctagattctactactgcttttgaaaaatctgaggccattctgattcctagcctgttgtatttgacctttttaaaaaagaaaacctctctttttctctaggaatttatagaatcttctctttgtctcctgagttctgaaatttcacagtgatgtaccttacaaacttaggttgaaatggattcttttagttccaggg

SEQ ID NO: 219955 - DNA, 602 bp, Homo sapiens
ggcaaatttctcataaaaataaaatccagaaggcacacatttcacttctgctaacatctcattggccaaaacttagaacctggctatagttacctgcaaaggaggctggaaatgcagtctctagctaagcaatcatatgtcagaaattggcatttccaaatacccagtggatattcatcaggatatacaaatgagaagttggaattcctgggaattcttagaaatttctgaaataataagttatccttttaaaaaaaaaacttttattttaggttcagggatacatgtataggtttgttataaagataaactcgtgttattctgaaaagacttccatttgcagacattgctgttgtccagaactccctgccaccagccatggccaaccccactgtgttcttcaacattgcaattgatagtgagtccttgggctgcatctccttcaagctatttgcagacaaagttctaaagatggaagaaaatttttgtgctctgaacactggagagaaagtatttggtgataaakgtccctgcttttacagaattattccggggtgtgtgtcagggtggtgacttcacacaccataatggcactggtggca

SEQ ID NO: 219956 - DNA, 572 bp, Homo sapiens
ccactcttcaaaactcctagccccacagttgcctgcattgcctcctcttttctttgtctgcttgctttgttagccagaaggcagagagcacgaaggcatgttagtacctgcagtgatggctctgcactccaagaaggaaatgagttctcatcggcttggccagctgggaatgctggaactggtattctcagcctgtggactcaagagagcactgggccaggagggtttcagtgtttccaagtcaatgccraaggcacgtacaccggtggatgggaaagacattgatttttcttgagataatacctcaagtgtatttgttcagtgtctttcagaaacaaagccttgtctgatttatttttattgtttttttgtttgttccgagaagacaaagcttgtctgactaaagcaaacctcagtgttttactgttcagtagctcctgggagtcaggttgttcacatccctctgttaagtgcattgatgcttcaacagatacttagtgagcacctactgtgtgtcattgtgggctatagatagctttgggagagtcaaaagacccggtggtttctgagat

SEQ ID NO: 219957 - DNA, 613 bp, Homo sapiens
acacttttacagctgcagatacataaaagttcttacttttacagtaagaactagtagatagtaagataggggagaatttggaggtttttggagaaaactaatatttagagcaatgttaactgaatgttccaaatagcacccagtcatgtaatagaacagttttgtgaaataacttaactgtcccctacctgcccaccatttggggaggttactctttccttcccactgtcttctctgcccttgtggtctgacttccatccccatccatctgctgaaagtgtttcgttgaaggcagctaatgactgtcctgagtcytcatcctcctttccaaaagccttgatcatgttgacgatgcttttttccctactgggctattttttagcgcttctaaaaaatcctctccttagtttctacaacactgcctgctcactcttggttcctttcctgtcttgaagactgctgctgtatttggggatattttctgaaatacaacaaaagattcagaagggttggcctgtggcatgagacctgcacactgggctgagacaggacacaggcagggagctgggcatagggaggaggtcacacccagttgcaggagtaaagagagaac

SEQ ID NO: 219958 - DNA, 414 bp, Homo sapiens
ggcagctaatgctgagaacctcggttcaagcccaggaattgttttcccagggactgtaacacgattctctgtgaagtagccaggagcgccagtcttcctcccctttgtccaggttaggactacccccaaraggcaataaaacatttccccagagctgccaggaaacctggaggcggggtgggggcggggggtgagggtggaaggagaggagaggaagagagcaaggggaggaatttactaagtcagaagcagcagaaaagttagaataaggaacagcgctggtcctctgccaccctggcccccacccactacaaattttattgactggcatgagaatttccttagaatgcttcctggaggtggctcaaccttggatttggttccaataaattgtgaaaattcttgtccaatcag

SEQ ID NO: 219959 - DNA, 491 bp, Homo sapiens
gacttgctatgtacaaagtagcctcatcggtttgaatgcttaggaatttttctagggaacaaaacattatcaaagacagcaaaattaagggaaactgagtragattattaaaatagatcatattaatgccaaaatctcttgtacaaagagaccacttatatatttattcactgagcaaatattcattgttacctattctgcacagctagagaatgttagctcaaagttttcaaaccatttttttaaaacaaagatgtttatatatcctctacagattcctaaagttggatcttattttcttggttaattgtatgtattgatggggaaaattttttaaagtcatattcaaatagatttctttgattcgctggagaataagaattggacatttgctccaggccaattgttcatcttatcgataaatacaaaatgatgtcactcaagttgtgggataaccccccaacccaccctcaaagtttaagaaaacagct

SEQ ID NO: 219960 - DNA, 247 bp, Homo sapiens
ggttgctatggggttgagccccagttcgggcaaatgtatgttcccggagaaaagcattttcagtcggcaattyctgacccaccctttgaaatgacttgattcagatactgtttatgaagcactttccgttctgaaatggggcctaagttcagggtagtgttcttttctgctgtttcatttgactgtaacgggagttacacaagtaacacagggtataatttgacctaattgattccaggcctcttca

SEQ ID NO: 219961 - DNA, 571 bp, Homo sapiens
tttctctgaggacctgtagcattttggttatcacctggatcttattaaaatgyagattctcaggctgcatattggaattcctgaattggaatccgcattttaacaagatttccaagtgattcatgtttaaagtttgagaagcactagtctacaacaatgacttttaacctttcaacctactctaacacacttgaaggccataacaaaattcacatcaataacagttgctcggttggacagtgactctcaacacaaatgagtgaggaaaggtggggactcaagactcaggtagcaggaaaagccccttaggtgatcctgatgaaatgttttctccatcctggctgaaaaacccagaacagtcaattaaggctcaaaacaaaagtaatgtttataatactggagatctttaaaaggcagataatatatactataacagagcaaaggtaattattacaatgtataaatcttataagaaccaaaatcagaattaaaatcactaagcacataatgaaaatcctttaaaaagtataaaaatgaatgtagtctaagtaaatactaataatggcagtta

SEQ ID NO: 219962 - DNA, 489 bp, Homo sapiens
gcgcccactacactggttttatgacccgtggagggcatggatctgaggtgggacacccagttaggtggtctttaaagygatttcctgccactggagggaccttgaacaagattcctgtgtgagcatccagagccagggccggctgggctgaggtctacagatcatgggcatgtgcagaagtcattatgctctttctgtgactcgactaagcagggagttttctccttttatttcttagaataaaaatgtcaaaaccctgagatattcacatgagggcatcactgcttatcctccccatcgtggtcaggggtggcccaggcctgtgagtcaggagcaactctccacgtgggattcccagggtatgcctgcgccccatggcggagattgctcagtctggggtgacttgagggcatggtcctggctttgctgctcccctgcctctgctccagggcaccctcatcctcgcttgctgctgcaaaccgcctcagc

SEQ ID NO: 219963 - DNA, 377 bp, Homo sapiens
ctagatcttaggaggacagctgcagaaggcaaggaaccaggagtcctgataggtagcagagcatcagctgacagggcctcaccgtggcctcagcactgccgacctgcggttgttatccaggcacatggtgaaccctatttggcatttccatgagaagatgggttggaaacaacccttggtggcctctgaagccatctgttctcattatctccagaaagtgtgttttctagcacagctgccacactgacccaactgattaaatttcaatcccagctactcgggaggccgaggcaggagaattgcttgaacctgggaggtggaggttgcagtgagccgagacrgggcctttgcactttagcctggacggcaaaagggaa

SEQ ID NO: 219964 - DNA, 387 bp, Homo sapiens
ctccacctccccctgaggtccctggcggagtttgggtcctcaatgccttagaggctgtttctgttaccctcatcgcctcttcctcccccttctcgagcactgacgatccccggtggtgcagaagcctgcctggcactgtgccacagcaaaaaccctggagccatcacggtgctttcaggcgttactgggagacaggacattcacatgaagacagaaactacagtaggtggtctagaaaaaggatgaaatgtgtgagggaaatgttctgggttagtggtgatgtctgcacaaccttgcgactatactaaaaacamggaattgtacatttttaaagggctaatctcatggtatgtgaattatatctcaattttgaagaaatatgtgacg

SEQ ID NO: 219965 - DNA, 585 bp, Homo sapiens
ttatttatttcttttgctccaattctgtcaaaagcattagagttacgcatcatgtatttctgcttggctgtgaagctctgttctggggtcttatgaatgcttattaacagttacagaaacaccacagtcttctaaagtccacctaaaatgcaggtgcaggttggaaggagagcttttttgtattcttttatttaacattatcatttacgtttgcctaagttattttttttcctactacatttgatttttcagattacatggagagttcttctgcaatactagcttaataaatcatgcaactgctggtttaatcttgttttgatactggattggggtatttaaaatgttaggttaagtaaatacagtaaatgattttctaaaaacaaaattgtagcaattatgtaccatgttactatctttgcatttagcatgcgatcccaaaggacctttgtagcaacaagtgccagatataagcataaatgatgacaccaatgctatacaaaagttaaattatttgacaatcaaatgaagtgtgtacactaaaaagtggatcrtaactggatgtcgtgagtatgtcatgcatat

SEQ ID NO: 219966 - DNA, 494 bp, Homo sapiens
gaagagaacaccaaaaaatggaaagatattccatgttgatggactggaagaattaatactgttaaaatgttcatactatcctaagcacttcatatattcagtgtaatccccatcaaaacaccaatgacatttttcacagtttatagaaaaacaaatcttataattcatagggaatgaaaaaaaacccagaatagaaaaagctatccaaagccaaaagaacaaaactgaaggaatcatattacctgacttcaaattatagtacagagctatagtaatcagaacagcatggtactggcattaaaacagatacatagccaatggaacagaatagagaacccagaaataaatccactcacctaaaatgaactcatttttcacaaaattgccaagaacrtacactggcgaaaggatagtttcttcaataaatggtgcagagaaaactggacttctatatgcagaaaaatgaagctggacccgtatcgctcatcatatac

SEQ ID NO: 219967 - DNA, 494 bp, Homo sapiens
gaagagaacaccaaaaaatggaaagatattccatgttgatggactggaagaattaatactgttaaaatgttcatactatcctaagcacttcatatattcagtgtaatccccatcaaaacaccaatgacatttttcacagtttatagaaaaacaaatcttataattcatagggaatgaaaaaaaacccagaatagaaaaagctatccaaagccaaaagaacaaaactgaaggaatcatattacctgacttcaaattatagtacagagctatagtaatcagaacagcatggtactggcattaaaacagatacatagccaatggaacagaatagagaacccagaaataaatccactcacctaaaatgaactcatttttcacaaaattgccaagaacatacactggygaaaggatagtttcttcaataaatggtgcagagaaaactggacttctatatgcagaaaaatgaagctggacccgtatcgctcatcatatac

SEQ ID NO: 219968 - DNA, 558 bp, Homo sapiens
ttcacacagttttctaagcttgccatgttgaaaattactcttaagtaagaagaacagtgcagtcacaaaccagtattaacatttccatctcttgacttgagcttggttacttagcattaataaggtagtatatcctatcttattaatgatagtagccatattctacttgctgggctcaaatctaaagagcaccccttctacatcagaggcaggccayggcattttcctgcacctcaccctcagaaacagattcacagccacaactcagtctgtgggcttcagctgctaaggtgtgctagagtcatagaccttggttctgtgggtaatctacattcaacactgccacagagagtgaacctgcaccgcaagacccaggtgtcacaatacatgattaaaagaccctgagtctagaatgatgcttctatgacaacttcaaggatctgtacttgtaacccagcaccaatgccgctgagttaatgccatgtcagagatgacaccaaaaggaatcccttaggctaagtcaccccaattttaggaaaataaaaataggaggacgcc

SEQ ID NO: 219969 - DNA, 538 bp, Homo sapiens
gcaatgcttgtacaaaggcatattctgtaaagatatcattgtggtattctaaatgattagcacagttttttgtttactttatttctattgtatatatttaaggtaaacaacattggtagacatacmtagagtggaattattactacagttaaacaagtttacatattcatcaattctataactaccttcttttttcgtggtataagcacctaaaatctactcttttagcaggttttcagggtagtgtattaactatattactcttgctgtttattagatttttagacttattcatcctatctaacagcaaatttgtgccccctctcacttttggtaaccaccattctactctctgtttctatgtatttgactttttaaagattcttcatataaatgaaatcatgcaatcttttttcatctgcatctggcttatatcacttagcataatatcctccaggttcattccatgttgatgcaaaaggcaatatctcctttttaagtttaaaaatattccaatgagtatataaatatacaccac

SEQ ID NO: 219970 - DNA, 487 bp, Homo sapiens
attactttttttctcatatcttcacttttgcttgcatgtctgataactctcctttggataaaaaccattgtgattttatgttaaggctgcagaaaattcatatgatcttataaatatttttctgtattcttctgaaatgtatttaagtcattagaaaccagttttatccttatgagagctgtatttaaactttattagaacacacaagagcagctgttagcctatggattttcccccctttactgaggcaatatgctttgagcactctacctgatatccaatgaattagaggtytttctctctggaggatggtcagaggaattattactagcactgtgtaagcccttgtgttgtttcctgtgctcttttaattggggggggcattagttttatttatttattttttaaatgttacaaatttatttattctttttttatttttccataagttgtcagggtacaggtagtatactgctgaggggaattc

SEQ ID NO: 219971 - DNA, 357 bp, Homo sapiens
aagccatgaaagaataagagaggagatggggaaacagagtcagcttcccttgagatgtaaatttcctcatgtaggaaatattgctgtgatattaatctcagaggtctgcttgtaagtgccatgcttyctccagagcccagcatcttaaccacagcacccaactgtctgtcccgccccactcagccactggcaggatctccaggctctcagctgagcatgtgctactctgtaagtgctggtatactttccagtccccagtgagaaaatcacggcatatgcactgaaacctgaaaccctgactattccaagagcctcatcatatctttcaagtgctcacattccacagccccagctcac

SEQ ID NO: 219972 - DNA, 547 bp, Homo sapiens
tttgcccttctgattttattcaatatttactatgtatcctaagttgtccattaatctaaagatagtttaaacaactgccaactcaaatcccttttttagcccaattctcacaccattaccaactgtccaacaaaacaaaacaaaaagactcaaattcacaggtaggtcctatctaaagagaaagattcagagacatggtagaaaagcttaaaatcaccrtcaccaaatcgaagatttaaaaaaaaaagcttaaaatcatgaattggtatgggtaattgtccaataggtaaaaacacccaaatacagattttgcccttctgaaggtctatctgggatgtaaatgcctacattccctgaaataatgttgaaggaatgcagtatcacctaacacagtacctttctgctgtatctctaagaaaaacccaattctcattctttaagcacagagcaacttctcttaggaacaactgtccccaaacagaatatttgataatgctccagtttcctaagaaatatcaacaataaagatcaaatcaatttgcctgcc

SEQ ID NO: 219973 - DNA, 516 bp, Homo sapiens
ccaagggccactacaatgtctgacacatactaggcactgagtgaatatttctcagacaaataagaaaaattcaaacaaaccagaagggtatatggcagagtaagtgtatgtgttgtttgcatgtctccctgctcaccatcactttttattttccatgtggctacctgccatgccttttttttttttttaagtgactacaaattccataatttatttaattggtccttttttatatgtatttatttaattttaacaaatagagacagggttttgttctcttactcggggtagagtgcagtggtgtgattatagctcaccgcatccttgaactcctggggtcaagcgatctttccaccttagcctcttgagtagctgggactataggcatgcaccaccacatctggctatacatagttatttaatttattttcagtcttatgtaactatagtctagtagctgactcattatatatctttgtgtayatgtgcagtagggtgttaatagaagtggaattc

SEQ ID NO: 219974 - DNA, 500 bp, Homo sapiens
tgaggagtcaaatcgagaaatggaaagaaacaagccaggagaagtcttacgattctgcttctacagcctgcaaagagccaaagccgaggtgctgcacggccctgagctacacctctgctctcactttcatcaccctaccaggctcctcgggtggcttcttcccacaygccccccccccccgcctcccaagacggagtttcgctcttataaccgggctggagtgaagtaacgtgatctcagctcgctgcaacctcctcccccgcaggttcaagcgattctcctgcctcagcctccaaagtagctggaattacaggcacccaccaccatgcccggctaatttttgtattttttagtagagatgggatttcaccatgttgatcaggctggtctcgaactcctgacctcagacgatccacccacctcagcctcccaaagtgctaggattacaggtgtgagccactgcgctcagcccgggccgcttctttaagtttggcccttct

SEQ ID NO: 219975 - DNA, 500 bp, Homo sapiens
tgaggagtcaaatcgagaaatggaaagaaacaagccaggagaagtcttacgattctgcttctacagcctgcaaagagccaaagccgaggtgctgcacggccctgagctacacctctgctctcactttcatcaccctaccaggctcctcgggtggcttcttcccacatgccccccccccccgcctcccaagacggagtttcgctcttataaccgggctggagtgaagtaacgtgatctcagctcgctgcaacctcctcccccgcaggttcaagcgattctcctgcctcagcctccaaagtagctggaattacaggcacccaccaccaygcccggctaatttttgtattttttagtagagatgggatttcaccatgttgatcaggctggtctcgaactcctgacctcagacgatccacccacctcagcctcccaaagtgctaggattacaggtgtgagccactgcgctcagcccgggccgcttctttaagtttggcccttct

SEQ ID NO: 219976 - DNA, 575 bp, Homo sapiens
ctcccataattgtagccggtgtccaagatggccccagtgattctcctctcctggtatctatgcctttgggtagtcccctttcacactgaccaggactgacctgtgtaagcaacaggatatggctgagtacagtggctcacgcctgtaatccctgcactttgggaggctgaggcaggaggattgcttgaggccaggagttcaagacccacctgtgcaacatagcaagacccccatctctaccaacaataraaaagaaagaaagaaaaaattatccaggcatggtggtgtgcacctgtagtcccagctactcaggaggctgaggcaggaggatcacttgaggccaggagcttgaggttacaataagctatgatggagccactgctgtccagtaggggcaacacagcaatatcctgccgcttaagaagaaaaaaaaagcttatgagacattgtagaaataatgagatgtgactcccaaagctatctcataaatgatattgcagtttctaccttgctctctcttggatcgcttgctttgggggaagccagtcaccatgttgtgaggacactcaggtgcc

SEQ ID NO: 219977 - DNA, 440 bp, Homo sapiens
gagttgacagggtcaaaaaaaactacgaagccagggtgctggatggttgtccaaagcaacatcaaagtcatccataatggtgccaaaatacaagctaaataaataatcctttgcattctttctgcatcagcaacaaatgaggaagcagagtgagrtttgcagatatacgtaaaagatcagaaaaaaaggcaagaacaagaaccagttgagagacagacatgagagaaagaaaacaggagggtatgagaggtgagcccatgagaaatcacagcctaagcatagaagaggaggggaacggggggatgatcttgccacctggggagtcaggcagagcagacctccaagctgagacccagcagtgctccacactgtactcagtgggcctggttagtggggggtaaatctcagatctcccaccgcccagccctcacatatattta

SEQ ID NO: 219978 - DNA, 419 bp, Homo sapiens
agctttgtcttgttcagtattcttggttgacagttttgtattgctttttttccttcagtccgttgagtatatcttcccactctctcctggcttataaagtctctgttgatgaattctctgctggccttattagaactctattatatgstatttgcttcttttcttttgctgcttttaggaacctctctttgtttttgatttctgacagattgattacaacatattttggtgtaagtcttacttggactgaatctgattagagacctttgacattcttgtatctgaatatttgtatctccaaatttggggagttttctgctattatttctttagtaagctttcctttgtttttctcttctctttcaaaaacttctataactccaatatttgctcttttgatgctgtcccatgcatcccat

SEQ ID NO: 219979 - DNA, 555 bp, Homo sapiens
aatgctcctattaaaaccttaaagaattatatactctgataattccatggacctttttttctaatattatgtgtaaagggatttgtacattttgttaaatataaaagttaatagttcatttataaatagttattggttttcacttttactgaaaaatcatgaaaaacatgcacagcatatgctgtttatttttaaaagtcatttcaatataaacatcttatatcaagatggctttgttcctctatgcctattttaaattcttctcccacaagtatttgaagccctgaatgaaatcatgtactttttccttttggatttttatttaaaatcagaattctgttttttagtcagcggggcttggaaaacrccatttatgctaaattgctacactagaacctcaggacaaaagatcatgggtggatttaaagtgttccaggaatcacttgaaattgtaggtaaacactttgtgggtatgccttgtatacttacgtgggcagagagctgtcatcagatgatcaaagcagcccataatccaccaaaagttaagaactactt

SEQ ID NO: 219980 - DNA, 582 bp, Homo sapiens
taaataaagtaggatgttcacacctggcctgacacacacwtttttctatttcctttttaaggacaacttatgggttaatatagcataaccattttacttttgagaataaaaatagtctcttccaattctcaattgcttttgcttattaaattattacttctgaaaatcaaatggcctgtaactctctcatgcctcatcatttattgtataaagcattagatgggttaagatccagtccttcttgttttgatgtaactttattatcacttcaaattgtagtccaaaaaggctccaaaatgttttaataaataaattttattttgtttcatttgtgtgtttcttttacttgaaaaatagtggatagaaataaaaatttttatgaaaacttctggcttaaaacagaagcttatgaacacctacaagatatctctagaacaattggtaagatcataaacactatttcaaaggttattaatgtcttagtttaaataagggatagtttggttactactgtgagcacatcaaaatgttggctgagcctgaaaccttgctataagtaaaaaattgtacataatcaaatat

SEQ ID NO: 219981 - DNA, 582 bp, Homo sapiens
taaataaagtaggatgttcacacctggcctgacacacacttttttctatttcctttttaaggacaacttatgggttaatatagcataaccattttacttttgagaatwaaaatagtctcttccaattctcaattgcttttgcttattaaattattacttctgaaaatcaaatggcctgtaactctctcatgcctcatcatttattgtataaagcattagatgggttaagatccagtccttcttgttttgatgtaactttattatcacttcaaattgtagtccaaaaaggctccaaaatgttttaataaataaattttattttgtttcatttgtgtgtttcttttacttgaaaaatagtggatagaaataaaaatttttatgaaaacttctggcttaaaacagaagcttatgaacacctacaagatatctctagaacaattggtaagatcataaacactatttcaaaggttattaatgtcttagtttaaataagggatagtttggttactactgtgagcacatcaaaatgttggctgagcctgaaaccttgctataagtaaaaaattgtacataatcaaatat

SEQ ID NO: 219982 - DNA, 582 bp, Homo sapiens
taaataaagtaggatgttcacacctggcctgacacacacttttttctatttcctttttaaggacaacttatgggttaatatagcataaccattttacttttgagaataaaaatagtctcttccaattctcaattgcttttgcttattaaattattacttctgaaaatcaaatggcctgtaactctctcatgcctcatcatttattgtataaagcattagatgggttaagatccagtccttcttrttttgatgtaactttattatcacttcaaattgtagtccaaaaaggctccaaaatgttttaataaataaattttattttgtttcatttgtgtgtttcttttacttgaaaaatagtggatagaaataaaaatttttatgaaaacttctggcttaaaacagaagcttatgaacacctacaagatatctctagaacaattggtaagatcataaacactatttcaaaggttattaatgtcttagtttaaataagggatagtttggttactactgtgagcacatcaaaatgttggctgagcctgaaaccttgctataagtaaaaaattgtacataatcaaatat

SEQ ID NO: 219983 - DNA, 537 bp, Homo sapiens
ttaaacagttcacagttaagaaagaataaaatcaatgactctaataatgcatatatggtgcttcaactaaggtaaatcctggaatccagaaaaacattagaagaaaacaactaagaattagttgtttcagtgatgtgggaatgtttcaaaaggaagtgctacttaatgtaaataaatcctaaggaataagaaaaggtcagcaagacaaaaacaaacataaatgagggggcaatggcattaaagacagaagggaccacattttaagaggcttgagagagtctgcctctttctatctaaacagtagaatttaagactaaatttaactaaagatgactgtttaaaaatcactacttcagagaagcttttcttgacaacccccagatttggtaaattgcctgtttcagattcccatagcacgctgcactaaagattatatctrtcttgttcacactgctcccccagcatttaagaaataatagatgttcacaaagtacctgttcagcaaatgaataagtggtgaataaacatgtgacgaaa

SEQ ID NO: 219984 - DNA, 519 bp, Homo sapiens
tgtatgtctagaaaaatttggctgtgattctgtctagtgggtttttttgttgctggaagattttttacaatggctttaatttctttacttgttattggtctattagagggtttgtttgtttttgtttgtttgtttgtttgttttcctggttcagtcttgggaggttgtatgtttccaggagtttatccatgtcctctaggtttcccagtgtgtgcacatgaggatgtttgtagcatattctgatgatcttttatatttctgtggtatcaggtgttatgccccctttattatttctaattgtgcttatttgaatcttctctctttttttcttggttaatctagctrttgggatatcaattttgtttatcttttcaaagaaccaatattttatttcattgatcctttgtcccttattttttggtctctatctattttagttctgctctaatgtttccagctttgagtttggtttgttcttgtttttctagttgtggaaatgtgatgttaggtagttaatct

SEQ ID NO: 219985 - DNA, 478 bp, Homo sapiens
cttactggtacctctgaagaatctgcctcacaattgattattagatagtatgtatgtgaaatacctgcatgagatttaattgtataggtacataaaattataggtgatgatataaactttgtggtattatgaaaagaccacaaatattgtcaaaaatattctttgtgatttgttttctgtatttttttctattttgrtactagtaacctaaaaatagatctgtacttccgagattgcattcaatgagaaggggttgggaaatggacaaggagggaggagaagacagtaaaacccaggcctgacccctgatgccccctggaccacccagagtgggtgagccagatgctaagaagatacttgatagggagatgcagagtgagaaaagggtgttaagaaagctattgagtgtccaggataatacgttcttttatttacgtaagagtttccctaaacatatgaacaatataaatataagtgt

SEQ ID NO: 219986 - DNA, 361 bp, Homo sapiens
atagtttttctttatgtatatctcagttaacttttcttctgtatgcatttaaactgaaatataatgccataggacttagaatgagtgttaaaataggactctttctgtttggtttttatgaagccctcaaaatgaaatagcaatataagaactgccaggtatccctcaggtcccaagtaaagatgatgaactatctattcaagaaattctgagagcctgggtgctgatgttgccaggattagcctattattcacctccaggctatgtaaagtgtcccgtcaatgaactggcaatgagcatctccttgagagaaaygtcagcatatcatttattccccacattttccttgcaggaagggagt

SEQ ID NO: 219987 - DNA, 579 bp, Homo sapiens
agcttgctgagtcatattaaaacatagtacaaagagccaaaagacacatcagatgacaaaataatgttaggaaaaaggcaactctctctctctttctctgaaccgatacagtgaaaggcgtaaaaacacctattcatatttattaccaggcactattcctcagtctctatagtcttattttttttttatccctggggccacatgatctaatatttatgagatgagtctcacaccatttccatgattaattgtagccatatgtggaagacatttgttatatctcgctgaaaagcataggatttgatttaagtggagctgagtctatttatccaactctcagatttgcttttctgcctacttgtcctgagctaaaatgttttctggtctccaagcctttctacaatgtggatgtgcctcacactaaataaatgcttcccctgsaatccagactgaattctgggcctgaaccttaaccctgtgtggagccctgaggctggtcttccttcatgccattggtgaaatcacctgctgctcatctaacttcacacaaaacagtaaactgggttggaatctctgata

SEQ ID NO: 219988 - DNA, 578 bp, Homo sapiens
gagggtaggaaattagaaatttttattaaaatatctaatttatttttaaaataaactttatttttagaatttagattagagaaacattggraacatagtacagagaatcccatatatgtcacagccagtttcccttgttgttaacatcttgcattagtgtggcacattcattacaattaacaaaccaacactgatacattattattaactaaagatccatactcttttcagatatccttagttttacctaatgtctttttctgtcttggtacaatacattgcatttagtcatcatgtttctacttaactttttgaacacaaagaatgcatttataggcatttgttttaacatatttgccaattctatcttatgtgtcagttcttggtagattttattaatttatctaatccttacaataatgtatgatgtaggctgctaatatcattctcatttcacagatagagaaactgagtatataaagatcaagcaacctacccaaagtcatacaacaataagtgatggagtcagggcatgaacccaggcagccttgctccatcaaagcgaatgtagaggaaat

SEQ ID NO: 219989 - DNA, 578 bp, Homo sapiens
gagggtaggaaattagaaatttttattaaaatatctaatttatttttaaaataaactttatttttagaatttagattagagaaacattggaaacatagtacagagaatcccatatatgtcacagccagtttcccttgttgttarcatcttgcattagtgtggcacattcattacaattaacaaaccaacactgatacattattattaactaaagatccatactcttttcagatatccttagttttacctaatgtctttttctgtcttggtacaatacattgcatttagtcatcatgtttctacttaactttttgaacacaaagaatgcatttataggcatttgttttaacatatttgccaattctatcttatgtgtcagttcttggtagattttattaatttatctaatccttacaataatgtatgatgtaggctgctaatatcattctcatttcacagatagagaaactgagtatataaagatcaagcaacctacccaaagtcatacaacaataagtgatggagtcagggcatgaacccaggcagccttgctccatcaaagcgaatgtagaggaaat

SEQ ID NO: 219990 - DNA, 554 bp, Homo sapiens
atcaattgcaatctgtggtttgaaactttctaaccaaaaatacactctgaatattgtggcagctgttccaaaacatctttcaagtagttattattcattttatattgtcttaagatataaatttgatatagatgaactctccttagtattattattattttgtataggaaagaagagacacatacttccccaaacactgaagacggatttttaaatcattgatctgatagcaaaaaatgagtaaggtactcttctcgcaaagcattaaatcagaatttccaagctcatcagagagcagtaagtcaatgtcagaatctgataaactcactcactagtcatcacaatagtcgcatttcaacagtacaattataagtacaaacaggttcgggaagcactatgtgaagagttaagctttggggacrtggccattttccatgcaacccaagatgacctcctcatggattctggtgagtagagaggggctaactcatacagtcttgagcacttgtcccaagaaatgacatcaaattctgttcaatggtgaatccagtgaa

SEQ ID NO: 219991 - DNA, 579 bp, Homo sapiens
gttttgttttcaaaaggtcagagcctggaaattttgactgtgacattttgtgatgtataatccttcaacacacatttaaataatgtgtatcaaatcttgaaacccccttgatcttcccactgacccaaaatgccataaccacatacactggacaatacactgtggacacttcatgttcttttgctacaaggaaattcctaggtaaattagttatgagttccaggacatttgctgtcactactcagcaggcttgcatttgcaaascttgccctcttgaggccaaacagttccaatttataaattgttatgcctggataatagagattagtctacatatctctttaaagctactgactgatgagggccagaatctgtggcattgcagactggtgaagagcaaggactctaaaataggatgtctgggtttgtgtctgggagttactacctcttgtcagtatcatcatgaacttcctttcctttatccataaaatatggattataaaagtacccatgttacagtgatgttcaattaagtgtattaatacatgtacagggtttaaaataatatttaccacacaa

SEQ ID NO: 219992 - DNA, 582 bp, Homo sapiens
ttgtcccaaacccaccatgctgtacctttgcacatgctgttcactcttctttgaatgtcttcccaacttttgtatgccttgaaaatgtttattcattcttcaatatctaccttagactttagctttctccatgaagtcttcctgggggaagtcttccrtcctcaaacccctactcatttttttgtgtgcctttttcagactctattttcattcttgcatatcagtctcccttactacactgtgagttccttcaatacaaaatctccatattctttatgtttgtatttccaacactatgactatcccttttatgtgtgggtgtgatgaatgtttctgcaattttatattaaaagaaaaaaattcatgaagggaatttccgaacttattgtacgccaacaggttggcaatctacttgtagaattatccccatcttagttatttgttagaatgaaaattacacccttatgtggacactcccagaaaagcttgtaaattttctcaattctttgtttgtctataagatggcatgaagccataaaataaattatacctgtgaagtatataatatgctgtgtaattaca

SEQ ID NO: 219993 - DNA, 606 bp, Homo sapiens
gtagcagtgtccatatgacacagctcttgccaacataccatgagcacaagtgaggtttctggaaaagcctttgcttttctcttctaggcattaagccctcttgtttccccctttctttcctgcctgaaatgcagaccgagaaaggaagaggaagcagccatcttgggacccaccatgtggtagggagcataaggaggaaggcctctatgctaggcacaggtgactggaaagttgggaggagcctgctggtagcattcagaggctaaacaggggcagatacttacttactccatgggcctcttagaagctacttttgtagggtattctgttatttacagagaacacagtcttaactgatacatagtatcaatagagtaaatgttttatttgagacataagttaaacttacaagtttttcatgacagttttaggtggactttagtagcacttgaaatatacattttaaaggttgaagtaattatttacatttttgtagtagacagttaaccayaaattatctttgaaccactcaaaaagcggacataccatcagaagcagtaaatatggcttctaattcagtgactctgcctccatggaatttgtgaa

SEQ ID NO: 219994 - DNA, 436 bp, Homo sapiens
agaatgaccattataaaaaagacaaaaaagtaaaaaatgtggacaaggatccagagaaacggaaatgcttgcacactgttggtgggwatataagttagtacagcagttatggaaaacagtatggaggttcctcaaaaatctaaaaagagaactaccatatgatccaacaatcccactggtaggtttatacctaaaaatataggtatatcaaagagatatctctactcccgtatttattgcagcagtattcacaatagccaaggtatgggaccaacctatgtgcccagcaacagaatggatggaaaaaaagtggcattatatgccacggaatgtcactcagccataaaaaagaaaaaaatactctcattcgcagcaacatggatagaataggaggtcattatgttaagtgaaataagccaagcacagaaagaacaat

SEQ ID NO: 219995 - DNA, 527 bp, Homo sapiens
tttattttgcatatataaatgcacagtgactatgactctaaatgaggacaaaaacaaagaacaaggcaataatgtttgcttcaaccacttgtattttgcatagtagtggaagacttagccagacaaatcaggtgaggaaaaaaggcatgaaaattgaaaaggaagaaatacgtattctctctttgcagatgatataattacatatgttgaaaaactgaaagatctaaaaacagctaatagaactaatgaacaatttccattaaatgacaggatacaaattcaacatgcaaacattggtttccaatgaacataaaaaatgaaattatggaaaaaactccatcttcaatagcatcaaaaacaataaagtattttgtcatatatttagaaaaatattgctgaatgatattaaagaaaacataaatgttgggaataggcctcccaaaatctggccataagctggycccaaaactggccataaacaaaatatttgcagcactgtgacatgttcatgatggccataatgccca

SEQ ID NO: 219996 - DNA, 625 bp, Homo sapiens
ggtgggttcccctgatatcatggaatacagaactattaataacaaaagctttaaggactcaagaagtacagggtggctatcctggttctccatgagagcatgctgaattaacattagacttatatcctcttgaatacyagttgtttctttaaattaggtacatagcattcataacagttgggttatcataggtaatttgacttagaccatggagttcattcaaattgtatatctaaacaatttcagtatcagctgatttagcacataaatatggcaacgtattttctagatatttaattaatttttgttcctacttgggttagcagttttataacacagtcagtcttttcattaaaattccaggaattcttacccatttcaaatgatatgattctgaagttattagaaacctgtattcaagagtgctttttagggtactttccatcctttcataaacctcctaaaagacatcatattctaggattttggatgttcgtgaagtttttagaaactgcatcagcagtaagcaaataacagtggaaatgactttaagtagttatagttaaaaacacaaggaaatttggttatttctgtggtctacaataactcaataaccataattatg

SEQ ID NO: 219997 - DNA, 315 bp, Homo sapiens
tagctttgatcaaagtcaggacaataatcattgagaaggtgcatgtctaataaaataggtaaatttaataattgtgagacttccagtttttatctccaaggttgtatttagagtggagaaacccaacaactcattacagtttcgctaagatttgaaaggttaaaaaaatttatttccttrtgatagatgccatacttttccatatggagtagtcaggaaccatgaaattttttgcattcagtttttttaataacatttgttttctcacagtatggatctagttcataatgattcagattcttttgctgaaacaca

SEQ ID NO: 219998 - DNA, 604 bp, Homo sapiens
aagcttgcattgttaacatggtttaataattatgtacacaaattatgtacatattagcataatctcttgcaattctgtcatttactctgaactgataaatgtacagctcawtttttcctcagagaaaaatagatgaccttccaaaccctctagcactataataaaaatgctctgtattctctctccatactcaaaatgttatcaaaatagtgtcttatggttctgtccaatgaaaagcacctttcaaaagcaaatttgatgcatctgctgccaaatgggcatgcctccagtgtaaatcaaaaaaatcatttcttttgatatttcacagaagtgcatctaattaaaaaacttacacatgaaatcatacaccaagactaacaatcaacaataaaatattttaagctacaaaaaatgtaaattactttttaattataagaaaacaaaacattgacattaagtgttgtaaaaatccttcttgacacctgaaactaagggaaaaaattcattattaagaagcaaataatttgtttacgttaaaaaaaaagatctggcaaaatacatacacccattccatttcacaactccaaaaagttaatgttcagca

SEQ ID NO: 219999 - DNA, 604 bp, Homo sapiens
aagcttgcattgttaacatggtttaataattatgtacacaaattatgtacatattagcataatctcttgcaattctgtcatttactctgaactgataaatgtacagctcattttttcctcagagaaaaatagatgaccttccaaaccctctagcactataataaaaatgctctgtattctctctccrtactcaaaatgttatcaaaatagtgtcttatggttctgtccaatgaaaagcacctttcaaaagcaaatttgatgcatctgctgccaaatgggcatgcctccagtgtaaatcaaaaaaatcatttcttttgatatttcacagaagtgcatctaattaaaaaacttacacatgaaatcatacaccaagactaacaatcaacaataaaatattttaagctacaaaaaatgtaaattactttttaattataagaaaacaaaacattgacattaagtgttgtaaaaatccttcttgacacctgaaactaagggaaaaaattcattattaagaagcaaataatttgtttacgttaaaaaaaaagatctggcaaaatacatacacccattccatttcacaactccaaaaagttaatgttcagca

SEQ ID NO: 220000 - DNA, 607 bp, Homo sapiens
caaaacctcctaggatttcacattcagtctttaggtcctgagtatgcccatctggctctaactcaagagccatcaagaggtctgggggtaaatgggaccagcgtggccacatccagcaggtgaggacaagtcacactgcttctctgctccctgtccacagacttccctgtacctaagaaattagtgtcaaaataataaaaaagggagcactgaaaagacaaaagctcattttcaggcagggagggcagtggagacaaagtgaggaaagttcctctgtctattttgttgtggatggaaagggtagtgagawaatggactggacgatttaagtgttccaggtaggttttgcttaggtctatctctgggtgacaggtttcctttggagaacttacaaagcaacttataaaagcaagcccattctccaggtcctaaggacaaaggaatgtaattctgtagacattttatgcttctataaaaactcgaagacactttctagaaatctacttcaggttatggaaatttggtgcataaaaactaaaattaggcgctacaggagtttacagaagactgtggttcagcaccgtgtgaagaagcctggctggaattc

SEQ ID NO: 220001 - DNA, 554 bp, Homo sapiens
actgttgatctcaaaaacatcatttccccgagatgtttttcctcttgcatgaaaacaaaacattgcctttagtcttatctaacttacatgcttatttcaaggataaaataagttaaaggatgtgaaatcaacttatgratgactagaacgctattcaaatataagtgattgtgattataatacacagaataggagaagctgactttctcattctcatttatttatggtggcaagaatagcaattattatatgatgatggcagaggacctctcaattctgtggatctatttactaaaataataataataagaataagcacgggtttgaagttacacagacccgggttaccactatgtgatttcaattgtgatcatataattttttgtaaggttcaaagtttagcctaagagtcaaatgacataatgtatgtgaaatcttaagaaaactgccaatgtaactatactgttacctacattagtgttaataatatattcattatcataaatagtaggtctagtgaatgatatcttagagttgactactttaacgaattc

SEQ ID NO: 220002 - DNA, 554 bp, Homo sapiens
actgttgatctcaaaaacatcatttccccgagatgtttttcctcttgcatgaaaacaaaacattgcctttagtcttatctaacttacatgcttatttcaaggataaaataagttaaaggatgtgaaatcaacttatggatgactagaacgctattcaaatataagtgattgtgattataatacacagaataggagaagctgactttctcattctcatttatttatggtggcaagaatagcaattattatatgatgatggcagaggacctctcaattctgtggatctatttactaaaataataataataagaataagcacgggtttgaagttacacagacccgggttrccactatgtgatttcaattgtgatcatataattttttgtaaggttcaaagtttagcctaagagtcaaatgacataatgtatgtgaaatcttaagaaaactgccaatgtaactatactgttacctacattagtgttaataatatattcattatcataaatagtaggtctagtgaatgatatcttagagttgactactttaacgaattc

SEQ ID NO: 220003 - DNA, 554 bp, Homo sapiens
actgttgatctcaaaaacatcatttccccgagatgtttttcctcttgcatgaaaacaaaacattgcctttagtcttatctaacttacatgcttatttcaaggataaaataagttaaaggatgtgaaatcaacttatggatgactagaacgctattcaaatataagtgattgtgattataatacacagaataggagaagctgactttctcattctcatttatttatggtggcaagaatagcaattattatatgatgatggcagaggacctctcaattctgtggatctatttactaaaataataataataagaataagcacgggtttgaagttacacagacccgggttaccactatgtgatttcaattgtgatcatataattttttgtaaggttcaaagtttagcctaagagtcaaatgacataatgtatgtgaaatcttaagaaaactrccaatgtaactatactgttacctacattagtgttaataatatattcattatcataaatagtaggtctagtgaatgatatcttagagttgactactttaacgaattc

SEQ ID NO: 220004 - DNA, 536 bp, Homo sapiens
tagttaatccttataataaacattcctgtgttttcagataagaaaactgagattccaaggttaagtcatctgccaaatgtcatctttctctgaggtcacacaactagggaagactcaaactggggttttacaaaagtaagacccactattccatagtgctgcctatataattttttaaaataaaaaaaaattggaagagactttttctaaaacatatagaaatactggctcaggcagcatttacaagatacaaaaactttaattaaaatagccaatcccattagggcgatcacttagactggtaataaaaccaaatgataaaaatattyccaaagaaaaagagagagggagacttcctctaaatttatttatttatttattttacagaattaagaaataatctagaagggtttttttgaccaatattcctcatcttcaaacaaattctggtccattggccaatactcaggaaaaattgcacgattaataattatattgaattatgcaaatagagctatagttctcatctgactgca

SEQ ID NO: 220005 - DNA, 623 bp, Homo sapiens
gggttttatcagtgagatttctgctactgcacgtccacctcaacttaaggggtcaagaggtgctgaataaatgtatttaggttctcaaagcacattgtttcttagcctacagaaaaatgctacctactgggtcctcatgctcttacacaggggtaataaatggaaaaaagaatacaattctttatacacagaggttttaaaacagtatcagaatcttcataagtctcaaaattatagtttcaaagagaaaattagagaaaaaatctcttaatttcccatctccctctcctttccaatatagaatgcttttcctgggatattaccaaagtcaatatgggcaggattatatacaaggaagtatttacactaagtcatgaaaattaagtcatggatacacacacacacacatatatatatayacacacacacacatatatacacacacacacaaatatacatagttacatactttttctagaataataatgatggctaacaattaccatagtgctatgtgctagaaactgttctaaatgcttttctgctaactcatatagtcctcatcaggtaggtactaatacgatcctcgttttacaaataagaaaatggaggcaaagagactt

SEQ ID NO: 220006 - DNA, 458 bp, Homo sapiens
tgttttctatttctgtgaaaatgtcattggaatttggatagggattgcactgaatctgtggatttctttgggtggcatgtacattttaacaatattaatttttccaattcatgaacatgggatgtctttccatttgtctatgtcgtgtttaatttctttcctcaatgttttatagttttcagtatacaagtcttttacctccttagttaagtttattcccaggtgtgttattctttttggtgctattgtaaatgagatagttttcctaatgtctgtttcatgtagttcactgttattgtatagaaacacaattgatttttgtatgttggttttygtatcatgcaaatttactgaattggtttattacttctaacattttttaaatggagtctttagggttttcttatatataagatcatgttgtctgcaaacagggacaattttacttcttcctttcc

SEQ ID NO: 220007 - DNA, 643 bp, Homo sapiens
gcaacaccagcctagtcattggaaaaaggcagacgaagataaaccagacaaaaagggggactctgttacctactgtcagttgccaattaagggtagctcaaccatcaacccatttgttcccattaatatcataatttatttttattttctttctgagaccaggtcttgccctgtcacccaggttggagtacagtggcaccattgaggctcactgaggccttgacctcctgggctccagcgatcctcccacctcagcctcccaagtagctggaattataggcacaggccaccacacccagctattttttagattttttgtagagactgagtcttgctatgttgcttaggctggtcttgaacttctgggctcaagcgatcctcccacctctgcctccacctccaaaagtgctggaattacaagcgtgagccaccatgcccaacctcatgayttatcttttttatgaaaagggtaaataactgtttatctctgcttccagcccagaagaatttacagagactgaattatgctcccacttaaaacaactgaaaaaaataatcttaagaaatttgacatcagtcatcagagaacagtaatgtctgagacatggaaacaagtgaggtgatttccccagcttactacctt

SEQ ID NO: 220008 - DNA, 574 bp, Homo sapiens
cctgccagtgtgccggtgtctgtcttgtgctcttccaccagcgtgttccccttgacatcctcttaatgtccaaccacttgtgtcttcttctgccaatgacgtccagctgcttgtgtgtctgcctgctagggtctcggggattttataggctcgggatgggggcgtggcaggccagggtggtcttgggaaatgcaacatttgggcaggaaaacaaaaatgcctgtcctctcctaagtgcatgggcacaggcccagtggtggagccctagccagggaccacacactcctttrcccagcacttcccttcccccttctgtatcaatatcatctcatttgtttattttgcatttgttgcctgtggttttgaagtcttactcataaagtattttcccggaccaatgtcttggagcgcttcccctatgtttcttctagtagttttattgtctttgggtctttcatgtaggtgtttgatccatttggagttgatttttatatagggtgagaggtagaggtctagtttcattcttgtgcatatggacatacagttttcccagcaccatttattgaagagactg

SEQ ID NO: 220009 - DNA, 618 bp, Homo sapiens
aagcttgaatgaaccatatcccctcacctgaaggcaattattggaatgcttttagagtagttatttctattttttcttaattttggcattaaggcagcttttattgaatagaaagagaagaacaatgtgaataacccctgtaagagaagacstgactcagttgttccctgagaagagaaaagaggttcattagttacaaaatcatgtgagtttcagcttttacttatttttttgttgttcagtcattcatctatggcttgtgatttatatcacattcatactcagaggcacagcggcatgtttcgtaaatctagcaaatacataaacagcagctatatttccctgtttgtatggaagtgaaaccaaagtagattggggaaaagaagctggaaaattaagagaagtggaggttgggggggcattttggaaaaataatgtgattatgtataacttgccaatccacattcaaatccaagttgagaccccctgcaggggacagctacaaggacattatttccctgatcatcagcctggagctcttttccagagagctgatgtgtctgtatgagatttgtacatgatttctcataaggttcttttcttgatcttcaagcagga

SEQ ID NO: 220010 - DNA, 564 bp, Homo sapiens
taaccactccctatagttcacaaggtattcataaattctctaaacaaaagcaatttattgtgtgcaacatgggcaactgaacgtttggtgaaattgtttcatagtttaaaaaataatttaatgtgatttctaatttcacgtttttttctctttccacactaggtataaatcaatgcatcttggttccattcttcatcatttgctggtagctaaattatggtaaattmagctaaggacattttaaaatcctgtttaatttgtccacatgctaaatatcccagcacacaagagaaaaagcagcatgtacttggataagacaaacctagggcttccttcgagttaaggaacagtcttggaagtcttgttatagttaatggttttttgagtggatgagcaaatgaatgaatatacaaatggttatgcacacaattaagcaaactacttgatcacattcctccttttggttttgcttcctctacctgtcagttgtcctgaacacctgcggaggtattttgtgcaggatggtttaccacattggccttgggagttgaggaagcaccagct

SEQ ID NO: 220011 - DNA, 564 bp, Homo sapiens
taaccactccctatagttcacaaggtattcataaattctctaaacaaaagcaatttattgtgtgcaacatgggcaactgaacgtttggtgaaattgtttcatagtttaaaaaataatttaatgtgatttctaatttcacgtttttttctctttccacactaggtataaatcaatgcatcttggttccattcttcatcatttgctggtagctaaattatggtaaattcagctaaggacattttaaaatcctgtttaatttgtccacatgctaaatatcccagcacacaagagaaaaagcagcatgtacttggataagacaaacctagggcttccttcgagttaaggaacagtcttggaagtcttgttatagttaatgkttttttgagtggatgagcaaatgaatgaatatacaaatggttatgcacacaattaagcaaactacttgatcacattcctccttttggttttgcttcctctacctgtcagttgtcctgaacacctgcggaggtattttgtgcaggatggtttaccacattggccttgggagttgaggaagcaccagct

SEQ ID NO: 220012 - DNA, 564 bp, Homo sapiens
taaccactccctatagttcacaaggtattcataaattctctaaacaaaagcaatttattgtgtgcaacatgggcaactgaacgtttggtgaaattgtttcatagtttaaaaaataatttaatgtgatttctaatttcacgtttttttctctttccacactaggtataaatcaatgcatcttggttccattcttcatcatttgctggtagctaaattatggtaaattcagctaaggacattttaaaatcctgtttaatttgtccacatgctaaatatcccagcacacaagagaaaaagcagcatgtacttggataagacaaacctagggcttccttcgagttaaggaacagtcttggaagtcttgttatagttaatggttttttgagtggatgagcaaatgaatgaatatacaaatggttatgcacacaattaagcaaactacttgatcacattcctccttttggttttgcttcctctacctgtcagttgtcctgaacacctgcggaggtattttgtrcaggatggtttaccacattggccttgggagttgaggaagcaccagct

SEQ ID NO: 220013 - DNA, 515 bp, Homo sapiens
cctccccgctttctcttgtttttttttttgccatgtgatatgccttgtcccccataccagctgccatgactgtaagcttcctgaggccctcaccagaagcaaatgctggcaccacatttccaatatggcctgcagaaacttgagccaaaataaacctcttttctttataaattacccagtcttaggtattccttcttaacaatgcaaatggactgatataccctgacatgataaacmtttctgaagttccttaaacttgaaattatacataaaaaattaaatagttttggaattttctatcaatgattttaccttttttgtaatcctgagtttgaaatcatacattatattttccataatagatggattttttaagaaggtgacaaattataggacattcacttacctaaagtcttctttagttcctattaagcagactttcaaggagaaaagaatctaaacacatctttagattagaattttatcttagctgagttgaatgcctggagtcgctg

SEQ ID NO: 220014 - DNA, 621 bp, Homo sapiens
gaggagcaaattccccaggtgggagtgatggtaaatarggaaaccccgcttctgccctttggttcttggatctatgtattctttcagttgaaaatgcagcaccatatatatgtcacttgtttaaagtgtacactgcagccgagaggatgccactcagcctcatgagatattacctccaagctagcacgtcagttttgtcttccacatgccatagcattcctctcttaggtcagcagcttctcagagggacagttcaaactttggccagtggattccacagccatgtgctcactccacacacctttgctataaagtggatccctttttcttataagatccctttttcttatgtggactcctatgctgctggatgtaaccatctgttagctcttgggccgtggtgttgactgagtgcctccgagcagaaaagactgtcccatatccataatattttctgttcctgctaaaatgaatcattgtcccttcttgggcagaagggatccagtagtaaacacactgtgtagaggctggttagtcaccttgagggatagcaccacatcagggggctcagcattggtctctgtgctgctgctggcaggtctgccattcagtatggcaaaa

SEQ ID NO: 220015 - DNA, 621 bp, Homo sapiens
gaggagcaaattccccaggtgggagtgatggtaaataaggaaaccccgcttctgccctttggttcttggatctatgtattctttcagttgaaaatgcagcaccatatatatgtcacttgtttaaagtgtacactgcagccgagaggatgccactcagcctcatgagatattacctccaagctagcacgtcagttttgtcttccacatgccatagcattcctctcttaggtcagcagcttctcagagggacagttcaaactttggccagtggattccacagccatgtgctcactccacacacctttgctataaagtggatccctttttcttataagatccctttttcttatgtggactcctatgctgctggatgtaaccatctgttagctcttgggccgtggtgttgactgagtgcctcygagcagaaaagactgtcccatatccataatattttctgttcctgctaaaatgaatcattgtcccttcttgggcagaagggatccagtagtaaacacactgtgtagaggctggttagtcaccttgagggatagcaccacatcagggggctcagcattggtctctgtgctgctgctggcaggtctgccattcagtatggcaaaa

SEQ ID NO: 220016 - DNA, 420 bp, Homo sapiens
gaattctttctagcgtgacattcaagaacccyttcttggggtctgggtctggacccctttccagtaacacattcatcaccatttgctatttttacagcatgaccctgtggctgaaccaggtcaagagtaaggaagctgtcctatccccagccatccccaagttctgtctaactgaatggatatgcccccatccccctccgtctgttgtctgattgatctgtcatgtaacatcctctcctgcccttcctgggaaacgtttacagcaatttagtacagtctctgtgttctgcatttttcaagaccctctgcaaattgccaacacttaccatttccatcttcccttccctttttctccacacatgccctgtaattcagctcgagagtaacgcttgctctttcccgaacacacactgagcttcc

SEQ ID NO: 220017 - DNA, 435 bp, Homo sapiens
cccttcttggggtctgggtctggacccctttccagtaacacattcatcaccatttgctatttttacagcatgaccctgtggctgaaccaggtcaagagtaaggaagctgtcctatccccagccatccccaagttctgtctaactgaatggatrtgcccccatccccctccgtctgttgtctgattgatctgtcatgtaacatcctctcctgcccttcctgggaaacgtttacagcaatttagtacagtctctgtgttctgcatttttcaagaccctctgcaaattgccaacacttaccatttccatcttcccttccctttttctccacacatgccctgtaattcagctcgagagtaacgcttgctctttcccgaacacacactgagcttccctccgtggagaagttctgctcctgctctggccataggtgaattc

SEQ ID NO: 220018 - DNA, 530 bp, Homo sapiens
aaactgcctacacatgatgtcataaatagggtcatataaatagtagaaaagaaatggccacttttattcccaaggaggaatgactatttctgtcaataatagattctatattttctaactggctccaaacaaccattgtagctctaagtttgctcgtaggctatgtaaaccaaaaacgatttgagacaagtctcaattaatttagaagtttatttgccagggttaaggacatgtcagtgacacagtctcgggaggtactgagaatgtgtatctgaggtggttgggctacagtttgattttatatgttttagggagatgtaagacatcaatcaatacacgtaacatgtaccttagtttggtctcaaaagacaggacaaggcaaagcgtggggtggaaggtgtttccaagtcataggtggatttaaagatttkttttgatcagcaattcattgaaagagtttatctaaagacttggaattaatagaagggagtgtcttagttaagattagggtatgtggagaccaaggtttt

SEQ ID NO: 220019 - DNA, 503 bp, Homo sapiens
cttccatctaaaaacaatatatactacttataaataaaataaaccagcattttttactttcgtttgatgtaaatttgttaattgttatatgaggaaaacaggtattcaaaagccaatatcaccttaatttatgttccaggtgaagataagagttgtagttctaaaatttctttaaggttgtaatatctatatctgaaaggtgacatcaatttttttattttattttttccttcccaaaggcggtgtcaaggggacatcaattctattgtggaagcaacttctctgttgtaaaatccatgtaacgcactggaaagttcttttctctttggtcaacagacacttgtctcatgtttagtgtggattttttttttctaattaccacagttacagcaaagtcttacccaaaaatttaatttgtaattatcgcaggtatgtaaagcagtttgagagcatcaaattcaawctaaaattgctagaaaacttgttacagtttaataaacaat

SEQ ID NO: 220020 - DNA, 573 bp, Homo sapiens
aatccaaaatactctaatattattatggttctctgttaagtcatgtatatctttagcatgaaggttaaaaaccaaaasagtcaaaaataataactacaataagttgttaagaagcacataatttttgagtatatatttgtacatctgtacttattaagtatatacttatcattgacatatatatgtatatatgtgcaaataacatctttaggactttcttctgcttttttgttattacttttttattgttttcctttcactgatttctcttttttttattacactttaagttctgaatgtacaggtttgttacataggtatacacatgccatggtggtttgctgcaccatcaacccgatatctacattaggtatttcttcaaatgctatcctcccactagcccctcaccccctgaaaggccctgttgtgtgatgttcccctccttgtgtccatgtgttctcattgttcaattcccacttttatgagtgagaacatgcagtgtttggttttctgttcctgtgttagtttgctgagaatgatggtttccaacttcatccatatccctgcaaagga

SEQ ID NO: 220021 - DNA, 573 bp, Homo sapiens
aatccaaaatactctaatattattatggttctctgttaagtcatgtatatctttagcatgaaggttaaaaaccaaaagagtcaaaaataataactayaataagttgttaagaagcacataatttttgagtatatatttgtacatctgtacttattaagtatatacttatcattgacatatatatgtatatatgtgcaaataacatctttaggactttcttctgcttttttgttattacttttttattgttttcctttcactgatttctcttttttttattacactttaagttctgaatgtacaggtttgttacataggtatacacatgccatggtggtttgctgcaccatcaacccgatatctacattaggtatttcttcaaatgctatcctcccactagcccctcaccccctgaaaggccctgttgtgtgatgttcccctccttgtgtccatgtgttctcattgttcaattcccacttttatgagtgagaacatgcagtgtttggttttctgttcctgtgttagtttgctgagaatgatggtttccaacttcatccatatccctgcaaagga

SEQ ID NO: 220022 - DNA, 573 bp, Homo sapiens
aatccaaaatactctaatattattatggttctctgttaagtcatgtatatctttagcatgaaggttaaaaaccaaaagagtcaaaaataataactacaataagttgttaagaagcacataatttttgagtatatatttgtacatctgtacttattaagtatatacttatcattgacatatatatgtatatatgtgcaaataacatctttaggactttcttctgcttttttgttattacttttttattgttttcmtttcactgatttctcttttttttattacactttaagttctgaatgtacaggtttgttacataggtatacacatgccatggtggtttgctgcaccatcaacccgatatctacattaggtatttcttcaaatgctatcctcccactagcccctcaccccctgaaaggccctgttgtgtgatgttcccctccttgtgtccatgtgttctcattgttcaattcccacttttatgagtgagaacatgcagtgtttggttttctgttcctgtgttagtttgctgagaatgatggtttccaacttcatccatatccctgcaaagga

SEQ ID NO: 220023 - DNA, 419 bp, Homo sapiens
gaggaagccgcgcctggggggccccgcggtcgtggtcggkcccggtccctgggggtgcgcccactccagaaggcggccgtggtcagttcctcggagggcgcaagggatgccggcgacgcgcgggccgggagggtggacccagggctggggaggccaccgcagggcggcgaattggtgatggattggtaggatgagagcgagagggaggagagccaggatgctcgggtttctgtcgtcgtgacagggtggacggcgctgccacccgccgaggtagagaggagggggaacaggtttggggaaatgatgagttcggctgcggacctggggactccggggagtcatccgggaggtatttgtcctcatggcctgaagctcagcgcccagggctgaaagaggtcattcaagtgcattggggcgaa

SEQ ID NO: 220024 - DNA, 421 bp, Homo sapiens
tttacctactctgaatttaatgtttctttggtatataaaattatccaacaatatctgtactgtaatgataatgccatcagcctcataatgatattgtctgatgccttctcayaattcaattcttctagatcctatcagaaaataaagaaaatgtaaaaattcattaggttgaacagttattatgaaattatgttatcattatttcaagaatctatgacatataaataagttgaaaagaggcatgggtatgagcccccatttcatggaaaaattaaaatcatgcaggaagtagtaggagaaaagctatagtagacataaaacacctaatgacagcttcagcaaggaaggctcctgaatctcccgaggtcctagatatgaagaaagtagcctatggagtgcccctagtttggcacgccatagg

SEQ ID NO: 220025 - DNA, 476 bp, Homo sapiens
cctatttcatatcctcaaatgggagacagcctgattttattacctgagtactatcaataagagaaatcagcatgaaaaatcagtctcattttcttacaaatataaggtcttaatcttagataattacataataggatattatctggcaactttaaaatgggatttttttttcttaatgggcttcataaatgatttaacaacaacaaaaaagatggacacttaaatatcataaatttagctttcttttctaataaaatttcataaacattttcaaatctcmtaaaacataccacctactataattaaaattctctattgctgctatctagagcaatctagaagttaaaaagtacctatgtccagtttttatgggcttctatttgatttacatttttaaaattatttggatcccaatatttgaaaaaaaataatttctatgtaaaatgaggcaaaataaagagttttacacaattcaa

SEQ ID NO: 220026 - DNA, 473 bp, Homo sapiens
acctattggacttccttgactcttcccttcacaaactctacctcattggacttcarttatgcaactagtgagattcatcatattttttgggtttcttgggattctcaccttgtaccggctcaagtttgctggctgtgacctcaggctcttgctaattcttgtgtcctccctcacctctgcttagacgtggcagactgcttttgtttcagtccctgacttggctctggaagtgctgactggggcagggaccactctctttttcacaagggaatgaaaggcacagagcagaacatattctagaatgtttttgccttgtagcacagagagtcaaagcccagaactattctaaaaaggctagctagcatttaatttagatgggagagtcctgtgatttgtacagtgttaaatttgatctggtcaaccttgctcctttatactgtaatttaatattcattttaaaaagtgatattatt

SEQ ID NO: 220027 - DNA, 678 bp, Homo sapiens
agtctcaaactcctggactcaaacagtcctcctgattcagcctcccaaagtactgggattataggcatgagccactgtgcccagaaccataaattattgaattacaccctctgaccccccctccaccatacagcgctagatgaacaaatacctaacttcagttagagatgtttcttttctacacgtctctaacagtagcattatgtacatggtaatataaaaaggcaaaacagtgcatggtataaaaagtaaaaaagtacaggaagctccataggatataatacttcctactgtaggaatacaactgaaatccactaataccaagtagatgagaagactacttgtttttacattttgattatcaatctagtggtttgcttttggtttgttaatacattggaargctgcattgagcttgacagtgattgtgctcgttcttattcccatcatactcagatagacattttaaattatggtgatatgtccatccatccaacactgacaaggaacaacaatgccacctgaatatggaaatgaatacattttccaaacaactaaattttagcctagccaaattggaaacatgaagagcctactctgaatggaaaattgtgacagcctgtttagttaaacacgggtgctgaacattgttactgcttaatgttctcgggaactact

SEQ ID NO: 220028 - DNA, 579 bp, Homo sapiens
acccatgtatctgcatagtcatactctgctactttgtagctgatatggtctgartgtgtgtctcctccaaatctcatgttaacatgtgatccctagtgttggaggtggggcctagtgggaggtattggatcatggaggtggatccctcacgaatggcttagagccatttccttggtgatgagtgagttcttgctctgttagttcatgcgatatctggtggtttaagagtctgggaccgctactctctcttgttccctctctcttgctcccactcttgccatgtgatatactggctccccgtttgctttctaccacaagtgtaagcttcctaagacctcactaggagcagaggccagcatcatgcttcctgtacagtctgtagaactgtgacccaaaataagcctcttttattgataaattacccagtctcaggtattcctttatagcaatgtaaatggactaacaccgttagtgataacatatagttcacaaatagactaatggatgtagatagctatgctatatttaccagtagaatctatattattttaagtaaataaatagattacctgggctaac

SEQ ID NO: 220029 - DNA, 573 bp, Homo sapiens
cttataaattacctagtctccagtatttcttyatagcaatgcaaaaacagactaatacatatctcatacttgaaaagtcagttgttgtttagactgcttgccctacttttaatacttcaatttctctgtcaatcatgtttatttattaattcattcaactcataattattaagtacctggtatgtgccagacacttttatgggtatctgtggtacaaataggagtaagacattgtctttgccttcataggggtcacaatctaatgagaaacatagttggtcaggtaattataataaaacatggcaagtgtttattcaaaggaaaggtttgatggaatactatctgtcagaggcacatagccttggggcaggagcctaaatgaattttaggagtccagggattctaagatgaggtcaaaatccaagcctatttcatagcccttgaaattaatttagcataaaaaaatctttaatgtttggactagtcatcttacaactggttaagtcatttacttaaaaaattagcaacccaaatcctgtattaaaactagtttgaataaccgacttaaccttc

SEQ ID NO: 220030 - DNA, 569 bp, Homo sapiens
agcccaggtcatatgtctatgctcaagtggaaagggaggctggaataaaaagagtctggcttctatagagggaggcagactcataagccaaggagttcccctaagaaaaataaatgtctgttacacctgccttgtaggaaagaaggctaatgtgttaaaggtactagtcctcctgggtgatgggcagagctatagaattgaaaacatgggggcagattaaatgcaggcatatgaggcactacgtgctaccatggggaaattgaaatatgtcaaaaaattgtaagagggtatgttagcaaaagggagttttgtgagagaaaataaaatagctgccacgatgagagactgtgtgaagtgtgacattccattttgctactttttcatgtcactccaataaaaacttattactttttaagactttttttggagttacatgtgtgtgttgcataattggaattattgtacayattgtacatattcttgcttttttatgtactctttaatgcaacacggatatcttttcctttaaatatgcacacctctatgacatcatttttaatgcctgtata

SEQ ID NO: 220031 - DNA, 434 bp, Homo sapiens
ggcaattataatgcttgtgttcatcatggaaactgtcttcaaccagttttgcatgcatgtagtgctacaaacagaataaacatgcagtgtagatttcaaattgtggccacgttggagaaacagaatttataaactgtagctcctgctttttccctgctctttcttttccagaaggtatatcaacttcattctccctgcaaggcccatggagccaatggcagacaccattggctgcaatttcaagaggctccaaacatttctgagcttaagcaaagttgtagcagagttcaagtatccttattgctcctgcaacactaataccagttacccaaggtgaggagaggaggggacaggaaataaatatctgttgaggacagacrggaaaccaagcactgtactctgtcatccaatcctgagagccatccagtgaattc

SEQ ID NO: 220032 - DNA, 517 bp, Homo sapiens
tgtgcagtacacatttgttcaatgaataaatatatgaataaaacataagaagtatctgactccagttgttcaatgcaaggaagcttcttggactatttctgaaccagaaatttgatcccatcactaaagcaacattcatatgttagatgcacctttaaaccatcacccaaactactctcaggccaaaaattgcatgatgtgtaattgaacactttttagctttcagacgataaataactgatgatgacataaagtgccaaactaatmtcacctccatttcagtcatgtattgtgattttgactccccttaaataaattgtgaaataggcttatataacacaatattgatatttagtaatattaaatatagtttcccgtcagtggggagaattacacaaatagtgatgaatgggagaaggaagagcactaaaagtagtaataattattattaatactttaatttaatcttattttcataatattgaagtaataacttattttttgtgctcatccttct

SEQ ID NO: 220033 - DNA, 627 bp, Homo sapiens
catacagagacactagattaagcctttatagtcaaataattatgaaggtatattttgttctaaaataatgttttatggttataaacaataactaattgtaaaggcagtataaattaaaagaaacaaagaataagcacatatatttaaatgtagactacttattatggaatggcataatttaatgattatattaattattttgtaataagcagggaattaaataagttaacccatgcttccacattgagtgtaatgataaacatccctaagagctggtagaatgtgaaaaattagaacctagtagtaaagaatgggaagttaaagagaagaaatttactttgtcagggataatatgatttatatatgtgagaactggctaaattctaaggtactagcttcatagttgttaataatatctgcttttaatattagaatagcattttgttacactgyatgaacatgaaaaacgtgcaatacatgagacatgactggtagtaaaaaccaagtcttaggtagtatatgtaattttcccaagttaatcaaataaaacataaatatttataggtgttttttaaaggagctacttccaacagcctaaaaacatgtaactatctttgtgtgatggtt

SEQ ID NO: 220034 - DNA, 604 bp, Homo sapiens
ttattatatggatgagaaggatgaatgagttgtaagagaaatgcacaatacagacaatagtataatctatttaataatgttaataacacaccctttaattgttcataaggccaacatagtcattcctgtgtgtcaccatagctccctatgaagttaaaaaacataggcagaagaggggaacttggcaatagaaacagaaataggaagagaactgatgagtaatggaggaaaraaaagcctgccatggtgaggaccatatattctgacctattctgaccatattctgacctagcttcttcatctctgtattcagcagcatttgattcacaccaaagcattcttgaatatggcctgaaattcctttctcttaaaatagctatctatatctgtatctataataccatcagaatatctctcagaatgcactgatgtaatacttcaaaaagccagtatgaatgtgtcttagtgaatgtgtaatttgttttattaaatcctggcatgttttccaagtgggagaggtgtatgggaaaataggaagacttcaagcccctaaaaaaaataaaaataaaaaggaaggaatatcctcctgaggggcaggaaaatg

SEQ ID NO: 220035 - DNA, 491 bp, Homo sapiens
cctgtctttaaatcatatttcacactctagtttttatccatgcataaggctttacctattacttccataacattyccttatacatttcaggcaaatattttggtacttggcttgatcctccagggaacatttatttgaaattatatgtcatttagcatattttgctttttgctttgcgccttttaaaaagttattaacaactttactactcctactgtttaaattctggaagaataggttataagtggggttataatcacttttgcatttctctatcttaatactgtacacataatcactagatttacacacatatacaaacatatataatttatttgctttgcaaaaatttggtctttacattcccaccagattgcaagcttcctgaatgcaaagagttgaactgccttgttcacagttatatacctggccgctataagcatatccaggatatcctgtgttcaataaataattgataaatgaatacatga

SEQ ID NO: 220036 - DNA, 537 bp, Homo sapiens
catctataaacaggagaaaaaaattatgtaaagccagtgcctctcttttataataaggggtcaactatttggaacctccataagatttcccccttttttagtgaaggacaatatgtttttcaggtacttactcccgacctttggtttatatgtaatgatattgtggcaggaaaaaaatatagtggcctttatatataccacaggctttatgtacattttaaatatttaaaattgtaaaatgttaaaaatgtaagtaaaaggaaaacaagatgacaaccatatcattwtgagactattatttttagcattataaacttacagatgataagccaattatactatttctttttatggaacgatatgtaaagtaaataaaagtaacaagtatatacacatcttgtttttcatgtatcaatattatagcacacaagatgatttgacccagcaccgtaagttttaacctcatttttacagatgaaacaactaaatgcagtttgtgtgaagtgttcatttttatatggctaatgagtgattgag

SEQ ID NO: 220037 - DNA, 537 bp, Homo sapiens
catctataaacaggagaaaaaaattatgtaaagccagtgcctctcttttataataaggggtcaactatttggaacctccataagatttcccccttttttagtgaaggacaatatgtttttcaggtacttactcccgacctttggtttatatgtaatgatattgtggcaggaaaaaaatatagtggcctttatatataccacaggctttatgtacattttaaatatttaaaattgtaaaatgttaaaaatgtaagtaaaaggaaaacaagatgacaaccatatcattatgagactattatttttagcattataaacttacagatgataagccaattatactatttctttttatggaacgatatgtaaagtaaataaaagtaacaagtatatacacatcttgtttttcatgtatcaatattatagcacacaagatgatttgacccagcacygtaagttttaacctcatttttacagatgaaacaactaaatgcagtttgtgtgaagtgttcatttttatatggctaatgagtgattgag

SEQ ID NO: 220038 - DNA, 537 bp, Homo sapiens
catctataaacaggagaaaaaaattatgtaaagccagtgcctctcttttataataaggggtcaactatttggaacctccataagatttcccccttttttagtgaaggacaatatgtttttcaggtacttactcccgacctttggtttatatgtaatgatattgtggcaggaaaaaaatatagtggcctttatatataccacaggctttatgtacattttaaatatttaaaattgtaaaatgttaaaaatgtaagtaaaaggaaaacaagatgacaaccatatcattatgagactattatttttagcattataaacttacagatgataagccaattatactatttctttttatggaacgatatgtaaagtaaataaaagtaacaagtatatacacatcttgtttttcatgtatcaatattatagcacacaagatgatttgacccagcaccgtaagttttaacctcatttttacagatgaaacaactaaatgcagtktgtgtgaagtgttcatttttatatggctaatgagtgattgag

SEQ ID NO: 220039 - DNA, 631 bp, Homo sapiens
tctgcctgggatacttattcgcacatatccccctgtctttctgtatcacgtccttcaggccttgcacagcatccatttagcagtgaagtcttctctgaccaaactatttagattgtggccccttggcacatccttttcctctgctttattattctccattgccttattgctgtctgcatatattcttattaattatttgcttatgtctattcctcattagaacatgaactccaataaggcaatttttttttctgtttccttctctgatatgcttggcatatagcagattttcaacaggtattaattgaacagatcwtactgtgccaacatgggtctgtctttaaatgccacatacatggctaaagcacctcaaaagatcactcctggagagactgtaatttattcaagaaaacaaagattgacagggtgtaggttagagtctgaaatctgcagcactgctcagcaacggtcaattgaaagggagccaaaatgtctgcagaaatacattaataaagactttaaatgttaatattgttttctgagtaagagcataaacaaagattaagactttaaagtaattttagtgaaacaagaaccaagcaattcagtaaagattacatgaggcaagaga

SEQ ID NO: 220040 - DNA, 629 bp, Homo sapiens
ttattaaaggcttataaaaaacacaaagagagctgtaataataacaatcacaatatggctttaattttaagagcgatttaatatccattatgtcatttgacattctcaataatccagtagttaaagggccagttattatccctcttttatacagaagaaaaccgggactcgtaaagtttaagtgacaagtccaaggtcattttgctaatatgtggaaatgcagtcatgaaggtcagtgctttttctattccacaaaaaagcaacactgctttgatacaactttgaacgttgatgaaggaaaaaatattttcttattgctatatataagaagcaaaatgcagcatttttactgtagctctgaaacagagttaattggctttgtgcatttcgatggtgcttatagcgtatatcttatttatgaaggaaaaaaacacatttcgttcctaacagttctgaaaataaatacaaattgtattgaaagcaaatacataaaagaagtaatggcatgttaggggcttttgttgttgtttttaaatgaaattttakaagataaaaattatccagatggttttgttccatgaaaagtatcttgaaatgctgtccattataaatcctttatccttattgca

SEQ ID NO: 220041 - DNA, 532 bp, Homo sapiens
gtagcaagtaatatgtctgctacaaggatatacatgtcctccacgctgtgatttctcaatatgattaaggtagtctaattcaaattcattcagcttatctgaggtattgcaaaagtgctgttgcagtcactggtgacagtattcccaaagagaggcaattagacttcactagatttaaagtttaggtctcattatatatgatattttcagctggtacacatattgtagttttcatgaaagagctgcataaaacaagggttcctgtttgagctccactgatcctttaagaatgctgactgccaaactgccaattgtgttctcaaagaatagacatatcagccactgagtcaaacagctaygaagctctcacctgtcaacagtgggtaatcaagaaacaactgaaagatataccttcagaatgccagaataaagtgttaggaaacatcggattgctataaaactttccctcctgtagtcaccaggcataccatgggttaaagcaagcatgctccaaagccacatctttctccac

SEQ ID NO: 220042 - DNA, 565 bp, Homo sapiens
ggattttattctttggaatctaatcttatgttacggttattttactcctcttgttgtttcagcttcatccattaggtactctttcatgttggctcctgtgcccttttgattgatccatctatctatctatctatctatctatctatctaatgatcattatagctgacttacctataataaatatatttacatttaataaatattatatatatatatatatatatattttactcacttacttactttctggcatcacaagattctccaggtayatttggcgttttttaatgccctcactcaccttgcattgtctctactgcactcttacgattgactgtatgtccaaggagccctggttccatgatacagaggacagtatttcaaaaccaagatctggatgctactatgttccttgttattagaatgttacaatttctagcacctattaggatatggagctaagatatatatgcatgtataccaactcatatatatacaggtatatatttattcctctatttatctgtatataagttttaaaactataattccatttcagtacctc

SEQ ID NO: 220043 - DNA, 565 bp, Homo sapiens
ggattttattctttggaatctaatcttatgttacggttattttactcctcttgttgtttcagcttcatccattaggtactctttcatgttggctcctgtgcccttttgattgatccatctatctatctatctatctatctatctatctaatgatcattatagctgacttacctataataaatatatttacatttaataaatattatatatatatatatatatatattttactcacttacttactttctggcatcacaagattctccaggtacatttggcrttttttaatgccctcactcaccttgcattgtctctactgcactcttacgattgactgtatgtccaaggagccctggttccatgatacagaggacagtatttcaaaaccaagatctggatgctactatgttccttgttattagaatgttacaatttctagcacctattaggatatggagctaagatatatatgcatgtataccaactcatatatatacaggtatatatttattcctctatttatctgtatataagttttaaaactataattccatttcagtacctc

SEQ ID NO: 220044 - DNA, 488 bp, Homo sapiens
ttaatcataaaaggattatatgttccaaattcttaaggcaaatgcattttcaattgtctgttgattattaaagagtaaaaaatcataagtttatgcagtgagtgtattttccgattcttatctcyttatatatatttatataatacacaaataaaaataattgtgtcaataaagaaaaagttagttaccattattacatattaaataaatatatgtttgttattctttatatttattttttgtcttgacaactacaattttaaataaacatatcaccacaggtttttaaaaaggcactaacatgtttaatactttaatcagacaattctatggaaatttaacttctataaaaggtaatataaagatacatttataatatgtagcctattgcatgcaactgaagacccctccaaaatgggttaaatatatttaataacaaatgagatttttaccaataaaagtgtaagacagttgacaactttcatcaa

SEQ ID NO: 220045 - DNA, 531 bp, Homo sapiens
ccactatttcaacatttttcamaccactcctttaaggtactatatcatcatagtcttaataactttgaaaaacaaatagaactatagtttataaggaacaataattgtccttccctactttataagtaggctctttctacatatttatatacttccacatataaggtttctgagataaacatatctttatatatcataaatatatctttaaaattatgtatggtgtccctagaaataaagtgctaaggataaatctgtcacagggacaaagtttcataagatagtctaaaatatgttattttgaaagaggtttatataaatgagaagacaaaaatgtaccattttaacagaaacaaaagtgatacaacagcttatcggcatactactataatagaatgtcttttcattgttgcttttttcttaattcttttcattgttgcttttttctttaacagtgtacttaaaaacacattttaaatgataatgtgacttaaatgtctctcaataatgggataaagcaatttttcttca

SEQ ID NO: 220046 - DNA, 415 bp, Homo sapiens
actgcattccagcctaggtgacagagtgagattytgtctccaaaacaaaacaaaacgaattctgatgaaagctagacaaggacgtacagaccacacacagcagacaaagtttctgttggatacaccttcagaaggcctgtggatccctgctgtaggatcccctaattctaagactcccctacccctctctacagcacttccctgcatttgctgatggcaggacagaaggcagcagcagctagcacaggccagcctgctcagctgtggttgctctgctgcgaacccgctgtgcctgtgtcacataccaagggcatgactaagggctactgatgcagagtcagaagtggtccaaccctggtccccatctcctcccagtctcctctgagccttagcagagactgaccaagtagtgagg

SEQ ID NO: 220047 - DNA, 415 bp, Homo sapiens
actgcattccagcctaggtgacagagtgagattctgtctccaaaacaaaacaaaacgaattctgatgaaagctagacaaggacgtacagaccacacacagcagacaaagtttctgttggatacaccttcagaaggcctgtggatccctgctgtaggatcccctaattctaagactcccctacccctctctacagcacttccctgcatttgctgatggcaggacagraggcagcagcagctagcacaggccagcctgctcagctgtggttgctctgctgcgaacccgctgtgcctgtgtcacataccaagggcatgactaagggctactgatgcagagtcagaagtggtccaaccctggtccccatctcctcccagtctcctctgagccttagcagagactgaccaagtagtgagg

SEQ ID NO: 220048 - DNA, 255 bp, Homo sapiens
catgattttttatagctataaataatccctctctagaagctagtaaaattttatctgtggatttttaaaatttttacctgaatgtgtctaaatgtgcacatttctaaagatgtgtatttaatttccaagaatgttttgatgcttatttgtttttcagtaatagcctgctcttgttttatgtgatgatgatctactgaaaytttctgaggcaatgactaaaagtatttattttaaagttatgttctatttcctaac

SEQ ID NO: 220049 - DNA, 628 bp, Homo sapiens
atgcagcggcagagggctggccaggcactgcttcctgccagggcagagtgagttgggcaccaagcctgtccctggcattgccagttcccacaggctcccaatgcccacagtaggtcagaggctgctggggctgcctgggaggttcccgcatgcacacaggatgcatgccagcctgacttcagggagactggggcagggccacaggggaggcacagacctcgtggggtgaggtcctggaaagggcttcctcaccctggtgagccatcarggaaggcccacaaaggaccagtgctgacctgagtgggaccctgcacaggcagaactccctgctgacctgttcaggggagcaatggaggctggaggaagatgctggccctgctctagagcctctaagctgagcattgctgtggctgaggtccgggtacctggtgtcatccttgtgtagggcttggctggctgactgcatgtcttgtggctggtgggacagacatgagcagggacatggagcacctgtgtcttccaggcttttgcacgcaaaagcaaccaccctactctggcacacagttctgcctgggtgggttagtcacaggggtcaagaacttaccatcttgcccttctcctcttccct

SEQ ID NO: 220050 - DNA, 380 bp, Homo sapiens
ggctccgttggaatgactgatgttgcccggtctgtccaactccaggccctggcctttcccagcctccacttcccacgtagcgacttgaagcagcttgtagtttcaggcacgtcacaccattccactcctgctcttctcttkgggcctcccgccttctgtccagttcacccccttcctcctcatgtgcccttggggcctctgctaagacatacccttcttcatggggtctttgctcactggtctgggctgggccatgcggatgctgccttcttcacccaagtgcacatgcacacttctgttgctgttcccacggtgtgacacagaggctggccgagctccaccttcttcctagatggtctctatcctctgggattctacat

SEQ ID NO: 220051 - DNA, 601 bp, Homo sapiens
ggatgaaaaatcccttttgattgattggtaaatgggtgtgatctctgacgtcctcagcacagagcctgggaggctggacagggtagcctagactccaagccctgccttttcctagccacactcaagaagggagaaaagggctgtcagcccagcctgcacaatctaattgagctcagaccatcccttacttgaggcctgtacccctcaggactttcttaggaaacgggggcagagctgggccaggctgtcaccccacttcccgccaagaagtgccagataaaatacaggacasctgattaaatttgaatttcagacagacaataaatttttagtataagtatatcccatgcactatttgggatatacttatacttaagtatttgttgtttgtctgaaattcaaatttaattgggcatcctgtatttttatttgctaaatctggtaaccctaccctaccccccaccttgcccattgacctcaggttttgtattgattgaggaagggagtgcccttgagtggaaacagccagattccccagttaatagctgtgttgttctggactggtttttaacctcttagattctcaatctccttatctgag

SEQ ID NO: 220052 - DNA, 510 bp, Homo sapiens
ctctctctctctctctttctctctattgggatccaagggtccttgttcctggatctagaggggcctccctgcctccctgctagcctcacttgcctgaggctctgggtcagggggtyggggttatggcaggaaaaggctgaaatgggatcctgagggcaggaagtgagaggactgacccctcttggccccagagcttccaagccacccagattcagctccccaacgccctctcccaccggtccgcctctgctggtctctaggctctgactcctctgttgctaggcccagcagcacctcgtggctcccagggcagcgcagaagagtagagacaggtctgccctggagtgggtctgcagctctgagggaactgtgattcccattctcaccaatcctgcctctgagcatttgtcttccccccactcgcttactgccaccccgaaaatgcaggacaaagatgagttagagggtaggggttcttcccaacattcacagaactggggcaccaaacaa

SEQ ID NO: 220053 - DNA, 574 bp, Homo sapiens
ttcgccaggtcggggtaaaaaacgagccgtgaaatgctgggagaaaatgcctgtgtatgtgggggcacaccacagtacaacattaatttgtgttgaacaaagggtgggagggggtcttgccctgcatttcctgcatcccaccccagacccaagggcattctccctgcactccccgaaaacagggctgagccccgggagcgctgcaggtatcactcagtcagacgcggggtggagccttgggttcccaagtttcgattctagccccgagggcctcatccttggggagtcgggggccaaaggctaaaggcatcaaggccaggctgaatttcartgtgggcacctggaactgtaagcccaagcgtctgggagctggtgtgaatttctggcaacattaaccaattctgcctccacaccccggcacaccgctgggggcagaggtatggatcttgcaaggactctctcgggtctgcggcgccccaaggccggctggggcgggggctgaggccgctttcactttcctggacagagcgggtttctctccgggcttttgttgtcgctgggctggcgagtagcc

SEQ ID NO: 220054 - DNA, 351 bp, Homo sapiens
ggacaaaggggacattcttaagagaaacctggcaccataagtacagattarggcagagaaagacattcaaaagaggcagctgcagtagatacaaacgtgaccgctgtcagcctgcctggtatggcgggaaggaggctggtgccagagtggattcggattgatcaccacacatgtacctcaatcaagtgaggaggtcccacaaggctaagtggggcaagtcggggacctaaggcagtagcaggaaaaccaaagaaaacaggcggagacttgagacagaggtaggaatgtgaagaagtccaaaataaaaatccctgcacaggactcttaggctgttttcatgcagtatcagcc

SEQ ID NO: 220055 - DNA, 351 bp, Homo sapiens
ggacaaaggggacattcttaagagaaacctggcaccataagtacagattaaggcagagaaagacattcaaaagaggcagctgcagtagatacaaacgtgaccgctgtcagcctgcctggtatggcgggaaggaggctggtgccagagtggattcggattgatcaccacacatgtacctcaatcaagtgaggaggtcccacaaggctaagtggggcaagtcggggacctaaggcagtagcaggaaaaccaaagaaaacaggcggagacttgagacagaggyaggaatgtgaagaagtccaaaataaaaatccctgcacaggactcttaggctgttttcatgcagtatcagcc

SEQ ID NO: 220056 - DNA, 660 bp, Homo sapiens
aaacaacaacaacaataagtatgtgttgagcccctaagcgtctgataggcactgtgttaagcacattaaatgcattatcccatttaactctccaaggtaaatactatttgtgtgcccattttatagatgaggaaattgaggcttagaaaagataaataccttgctcaaagtcatacaatcagtaaatggcagcccttgggctcaatccaaacctgcctgacactaaatctcctgctcttttaaaccagaagatctgcaaactyttctgtaaaactagatgataaatatcttagtctttacagatcaaaaagcaaatttgaggacattgtgtaggtacttatataatataagagagagagcaaatgtctacaagtttgaaatttgaatttcatgtattaaacaaaattatgagaggtcattgttttggactgagctcctgcactaatcccaagcagaccagaccaaaccaaaatggagtcactcatgctaagcaccacaaaatcaaactaaaactttaaaaaacaggtcccaaaatagatgagttttttttttcttctcctgaagacagaagattccagtataataaggaagtcccctctgctctatcctttacagaaaagtaacccgaagtaacaacagattacttacaagaaagcaatc

SEQ ID NO: 220057 - DNA, 660 bp, Homo sapiens
aaacaacaacaacaataagtatgtgttgagcccctaagcgtctgataggcactgtgttaagcacattaaatgcattatcccatttaactctccaaggtaaatactatttgtgtgcccattttatagatgaggaaattgaggcttagaaaagataaataccttgctcaaagtcatacaatcagtaaatggcagcccttgggctcaatccaaacctgcctgacactaaatctcctgctcttttaaaccagaagatctgcaaacttttctgtaaaactagatgataaatatcttagtctttacagatcaaaaagcaaatttgaggacattgtgtaggtacttatataatataagagagagagcaaatgtctacaagtttgaaatttgaatttcatgtattaaacaaaattatgagaggycattgttttggactgagctcctgcactaatcccaagcagaccagaccaaaccaaaatggagtcactcatgctaagcaccacaaaatcaaactaaaactttaaaaaacaggtcccaaaatagatgagttttttttttcttctcctgaagacagaagattccagtataataaggaagtcccctctgctctatcctttacagaaaagtaacccgaagtaacaacagattacttacaagaaagcaatc

SEQ ID NO: 220058 - DNA, 660 bp, Homo sapiens
aaacaacaacaacaataagtatgtgttgagcccctaagcgtctgataggcactgtgttaagcacattaaatgcattatcccatttaactctccaaggtaaatactatttgtgtgcccattttatagatgaggaaattgaggcttagaaaagataaataccttgctcaaagtcatacaatcagtaaatggcagcccttgggctcaatccaaacctgcctgacactaaatctcctgctcttttaaaccagaagatctgcaaacttttctgtaaaactagatgataaatatcttagtctttacagatcaaaaagcaaatttgaggacattgtgtaggtacttatataatataagagagagagcaaatgtctacaagtttgaaatttgaatttcatgtattaaacaaaattatgagaggtcattgttttggactgagctcctgcactaatcccaagcagaccagaccaaaccaaaatggagtcrctcatgctaagcaccacaaaatcaaactaaaactttaaaaaacaggtcccaaaatagatgagttttttttttcttctcctgaagacagaagattccagtataataaggaagtcccctctgctctatcctttacagaaaagtaacccgaagtaacaacagattacttacaagaaagcaatc

SEQ ID NO: 220059 - DNA, 567 bp, Homo sapiens
tattttaagtttaccctaaaggtttcccagtacataaaaaactatatttcaacttgatatgtaaaacttgatatgtaacctactcttgtaacaagtagtgagtctcagccaatcacagcagctgaacttcagccaaccacaggcagccaactcttcaaaccaggttcaaataaggcaaatgctcagctgtaaccaaacctactctggttctgggggctgcctaattcacagatcattctttactcaattaaactctaaagttttcctttcaacatgtataattttcacatcacgaaataataatcttctttaatttttttccaatgtattaaaaatgtaaaaaccatttgcaggctacacaataaatggtagcaggctatggattcccaactcctgatctaagctaatataatatactgttttcttaagcagagttaatgaaattttgcaaaattggatcctccttgctcttttaaactcagtttktaaatcactcaccattaaaacaatcctggaccctcaaagggttaggtaccactgtgccaattaccacagtgctaatattca

SEQ ID NO: 220060 - DNA, 331 bp, Homo sapiens
tcatttagacaacgaccttcagggtatgttttaatgttaaaattcagagtccttccatatcagataagcatcaactattcaatagtttatgctgaagagtacaggggaccaagagaccacccaaatgggttcatgagcccatcatgccacttctttgttggatcactttgggcacctcactaaatttttctgagctaggtcctctgcaccttgcttgtctatcatcaaagggtcactgtgagactataataatataagaggaargaaatcgtgattattaaggcatatactgaaccacatacctccattggcaacattaaacttcactcca

SEQ ID NO: 220061 - DNA, 492 bp, Homo sapiens
gtcatttagacaacgaccttcagggtatgttttaatgttaaaattcagagtccttccatatcagataagcatcaactattcaatagtttatgctgaagagtacaggggaccaagagaccacccaaatgggttcatgagcccatcatgccacttctttgttggatcactttgggcacctcactaaatttttctgagctaggtcctctgcaccttgcttgtctatcatcaaagggtcactgtgagactataataatataagaggaaagaaatcgtgattattaaggcatatamtgaaccacatacctccattggcaacattaaacttcactccaaactctccccctggtcctccagggcagtggctggctgttagaatgattccaccagctgccttgatcttcctgataatgcaggagaccgcaggtgtcaacaagatgccattctgtccaataatcagtcgtccaatctaaaccatccaaaaaaaaaaaaatc

SEQ ID NO: 220062 - DNA, 535 bp, Homo sapiens
ttgttggatcactttgggcacctcactaaatttttctgagctaggtcctctgcaccttgcttgtctatcatcaaagggtcactgtgagactataataatataagaggaaagaaatcgtgattattaaggcatatactgaaccacatacctccattggcaacattaaacttcactccaaactctccccctggtcctccagggcagtggctggctgttagaatgattccaccagctgccttgatcttcctgataatgcaggagaccgcaggtgtcaacaagatgccattctgtccaataatcagtcgtccaatctaaaccayccaaaaaaaaaaaaatcaatccagttgcttgggattaaaggcatttcaacaggaaagtgccccaggctctgttaacatacagccaatcacttgataaaagaaacagagtaggctttagattaggggaggcagggtagggggagcactgacattgtctctcctatctaatgtctctaagaccatttggtgcacctgcatctagtagccaattatta

SEQ ID NO: 220063 - DNA, 535 bp, Homo sapiens
ttgttggatcactttgggcacctcactaaatttttctgagctaggtcctctgcaccttgcttgtctatcatcaaagggtcactgtgagactataataatataagaggaaagaaatcgtgattattaaggcatatactgaaccacatacctccattggcaacattaaacttcactccaaactctccccctggtcctccagggcagtggctggctgttagaatgattccaccagctgccttgatcttcctgataatgcaggagaccgcaggtgtcaacaagatgccattctgtccaataatcagtcgtccaatctaaaccatscaaaaaaaaaaaaatcaatccagttgcttgggattaaaggcatttcaacaggaaagtgccccaggctctgttaacatacagccaatcacttgataaaagaaacagagtaggctttagattaggggaggcagggtagggggagcactgacattgtctctcctatctaatgtctctaagaccatttggtgcacctgcatctagtagccaattatta

SEQ ID NO: 220064 - DNA, 549 bp, Homo sapiens
ttaatttattatttaggtaaaaatttttcctaagacccaggttttatacagtactaaataaatagtgtgaggaataattagtaatgccatagagtatataatgttacttctagttctacacagattacaagtaaattttttttgggcaagtgattttggaattatctatgttttggtttcctttacctttagagtgataattcactatttatgattgaatgattatcatattaaagaggtgagaaaataaaaatacgtctgatgtgcacaaagccatactgctcaaattgtttgctaatatctgataattaaattattatggcatcggtagaagaatgatgttttgtttatatgtggttagaattggtcttttttaaaggaaataacaagagagatggaaatggaatgggtataaatagtaaaaggttctatcactgtaaytcccttttgctataaatagtgaaagcttctatcactataatttccataagaagatatatgtgtttacctgttaattttatcagggcaaattaaaacatggatagaatc

SEQ ID NO: 220065 - DNA, 564 bp, Homo sapiens
tatatattttcaggtgcagtggcttctatgttttgggttgatgctgaattagggagtgatatttaccttgatggtaagttaaaaaacagttttcttttatctttcttgttttttgttttttttttatttttttctgagacggagtctcactttgttgcccagactggagtgcatggagtgcagtggcatgatctcggctcactgcaacctttacctcttgggttcaagtgattctcstgcctcagcctcccgagtagctgggactacaggcgtgcaccatcgtacctggctaatttttggatttttagtaaagacggggtttcgccatgttggcctgactggtcttgaacccctgacttcaaatgatccgccagcctcggcctcccaagtgctgggattacaggcgtgagccaccacaccctgcctcttttgttttttagtaaaatctttatggttaagcttattgttgttcattcatattataactttaattccttgcattgttgttcttttcacactttagtttaatgatgaaatctttgttcatatagattaaaaaacccc

SEQ ID NO: 220066 - DNA, 545 bp, Homo sapiens
tccagagaaaacggcacaccaatcaataaagaactgagcagaaaccaacagtgtgcttttaataaaggacctctagctgtgcaggatgcaaacgtctcggggtcagtgactgcctcctgcccctgttggtccctaggcagtgggggcagaagctcccagctgacctgtttctctgggatgagagggaggagagaagggcagtyagcaggggcagctgttgcagatgggaggaatagtctcccacaaaaaaggtttcagtgacagacacggggtctctaaaaatagtcatgctgagagcctaatggcccttggcacaattgctggtgttggggtagaagatgtcttggagtttgctcaagtggttgagagggagggaggtgccatcgacttggaggaactggcaccaagccagggagatagacatccaggcaaggctgtggggcaggttagggagcaaggctgcaggagtgactcagaagaaggtgggggaggtgacaagcccccaggcaggggccctgtggccatggggatctttttaaattgag

SEQ ID NO: 220067 - DNA, 545 bp, Homo sapiens
tccagagaaaacggcacaccaatcaataaagaactgagcagaaaccaacagtgtgcttttaataaaggacctctagctgtgcaggatgcaaacgtctcggggtcagtgactgcctcctgcccctgttggtccctaggcagtgggggcagaagctcccagctgacctgtttctctgggatgagagggaggagagaagggcagttagcaggggcagctgttgcagatgggaggaatagtytcccacaaaaaaggtttcagtgacagacacggggtctctaaaaatagtcatgctgagagcctaatggcccttggcacaattgctggtgttggggtagaagatgtcttggagtttgctcaagtggttgagagggagggaggtgccatcgacttggaggaactggcaccaagccagggagatagacatccaggcaaggctgtggggcaggttagggagcaaggctgcaggagtgactcagaagaaggtgggggaggtgacaagcccccaggcaggggccctgtggccatggggatctttttaaattgag

SEQ ID NO: 220068 - DNA, 545 bp, Homo sapiens
tccagagaaaacggcacaccaatcaataaagaactgagcagaaaccaacagtgtgcttttaataaaggacctctagctgtgcaggatgcaaacgtctcggggtcagtgactgcctcctgcccctgttggtccctaggcagtgggggcagaagctcccagctgacctgtttctctgggatgagagggaggagagaagggcagttagcaggggcagctgttgcagatgggaggaatagtctcccacaaaaaaggtttcagtgacagacacrgggtctctaaaaatagtcatgctgagagcctaatggcccttggcacaattgctggtgttggggtagaagatgtcttggagtttgctcaagtggttgagagggagggaggtgccatcgacttggaggaactggcaccaagccagggagatagacatccaggcaaggctgtggggcaggttagggagcaaggctgcaggagtgactcagaagaaggtgggggaggtgacaagcccccaggcaggggccctgtggccatggggatctttttaaattgag

SEQ ID NO: 220069 - DNA, 545 bp, Homo sapiens
tccagagaaaacggcacaccaatcaataaagaactgagcagaaaccaacagtgtgcttttaataaaggacctctagctgtgcaggatgcaaacgtctcggggtcagtgactgcctcctgcccctgttggtccctaggcagtgggggcagaagctcccagctgacctgtttctctgggatgagagggaggagagaagggcagttagcaggggcagctgttgcagatgggaggaatagtctcccacaaaaaaggtttcagtgacagacacggggtctctaaaaatagtcatgctgagagcctaatggcccttggcacaattgctggtgttggggtagaagatgtcttggagtttgctcaagtggttgagagggagggaggtgccatcgacttggaggaactggcaccaagccagggagatagamatccaggcaaggctgtggggcaggttagggagcaaggctgcaggagtgactcagaagaaggtgggggaggtgacaagcccccaggcaggggccctgtggccatggggatctttttaaattgag

SEQ ID NO: 220070 - DNA, 423 bp, Homo sapiens
caaagcagtgcattctgaagggaaaacttattatctatccctccttgtagacgttttacacgttatccaaacaagaaagtgtattcatgttgaatatttaaaaaacaatattgtaaccacaaagcagaaaactaaaccaccaaaccacaaaggtagacaacaatagaggaagaagagaacaaattatctacaaagtaaccagaaaacaattagcaaaatggcaggagtaagtcttttactatcaataataaccttgctggtacatgggttaaactgtccaatcaaaagatrtagaatggctgagtggatcaacaacaagatccaactagatgctgcctacaagagacccatttttaaactttaagaataggcatatactgaaagtaaagggatagaaggagatattccatgaaaacagacagt

SEQ ID NO: 220071 - DNA, 593 bp, Homo sapiens
ctgctctggaaaaaataccttgaagagtggcaggagcggaaagaggaggrtcagatgggaggctaacagccagcaccaccttgccagccaagtgactgagccatcttgcagtggatcctccagcccccatcaagccccaactaagccactaagtttcatggtaatttcttacactgcaataaataactaatacgggaccagtgagaaaaggagtcaagaataatctcagctttctacctttaataacttaatggatagtggtgctattaatcaagtcaggaaagagaaaggacaataattacacctatagtattacccaaagtcatgataaattatttttcatatgctcttgctaaaatttatgtagtcattcaactcattttattgagtatctaccatgaaaccggcaatatggaagaaccttctgatatagaactgaatataatttagtcactgccctcaagtaataagtctggagaatcaagaatctgaaaaatgtttgtagcttttgttcaaaattttctctcagccatttaaagggaaaattatgaagattgtatagtggtgagagactgggatagcagtccacaaaa

SEQ ID NO: 220072 - DNA, 593 bp, Homo sapiens
ctgctctggaaaaaataccttgaagagtggcaggagcggaaagaggagggtcagatgggaggctaacagccagcaccaccttgccagccaagtgactgagccatcttgcagtggatcctccagcccccatcaagccccaactaagccactaagtttcatggtaatttcttacactgcaataaataactaatackggaccagtgagaaaaggagtcaagaataatctcagctttctacctttaataacttaatggatagtggtgctattaatcaagtcaggaaagagaaaggacaataattacacctatagtattacccaaagtcatgataaattatttttcatatgctcttgctaaaatttatgtagtcattcaactcattttattgagtatctaccatgaaaccggcaatatggaagaaccttctgatatagaactgaatataatttagtcactgccctcaagtaataagtctggagaatcaagaatctgaaaaatgtttgtagcttttgttcaaaattttctctcagccatttaaagggaaaattatgaagattgtatagtggtgagagactgggatagcagtccacaaaa

SEQ ID NO: 220073 - DNA, 593 bp, Homo sapiens
ctgctctggaaaaaataccttgaagagtggcaggagcggaaagaggagggtcagatgggaggctaacagccagcaccaccttgccagccaagtgactgagccatcttgcagtggatcctccagcccccatcaagccccaactaagccactaagtttcatggtaatttcttacactgcaataaataactaatacgggaccagtgagaaaaggagtcaagaataatctcagctttctacctttaataacttaatggatagtggtgctattaatcaagtcaggaaagagaaaggacaataattacacctatagtattacccaaagtcatgataaattattttycatatgctcttgctaaaatttatgtagtcattcaactcattttattgagtatctaccatgaaaccggcaatatggaagaaccttctgatatagaactgaatataatttagtcactgccctcaagtaataagtctggagaatcaagaatctgaaaaatgtttgtagcttttgttcaaaattttctctcagccatttaaagggaaaattatgaagattgtatagtggtgagagactgggatagcagtccacaaaa

SEQ ID NO: 220074 - DNA, 475 bp, Homo sapiens
agaataagaacagaagtaatgtgtgtttcttctaggctgaggatatcagaaaacagacatatcatctctacactgctcatttctctttctacagattcaatacagggtaatcatgtggctctaggcaatgccagagtcacaagagggaaagaaactgagtccccatcccatttggcagacaagagtctttgcccaccagggacatcctcatgggactattgtgtgagtgagaaataacattctattgtttttaaggcaataaaaatcgcctacatttcaggtytatttattacaaccacccacattttcttaagcagtcgcgaaagaaacataaacaatagtttaatgccaaatcaaaaatgtcaaatgcaaaattattttatgctatcacagtataaaattatgtccactttggggcaaggacttagaaaaatgcagaaataaacatgtaaagttattaagtaggaacgattat

SEQ ID NO: 220075 - DNA, 574 bp, Homo sapiens
tatggaatgcctcaaacccccaccccatggagccaatggcttcccatctgtgtagtttgccttctccagtgtctcattaaatgaggtcacactgtgtgtatcctcctcagactgtcttcttccacttagcaatgtgcatgcaagattcactcatgtctttgtgtgtgttgatatcttgttcctttctatggctaaatagtattccattacatgaatgtagcasaatttggttatgcattttggggagcagaaccttcctcttctaactttgttccagggttggagaccttcaaattaactgacaatagatacattagtaggagagacaatacttggcttcttgttccccaagtatcattgtgggacaaaattcatcagatggcaggatccagtttacaaagaggtaaaaatagcccagaaacaagaaacaagactagaatctgataactcacaatggctatagttttcctttaaaaaaattttttttgagacagggtctggctctgtcgcccaggctggagtgcaaaggtgcaatctcagctcactgcaacctctacctcctgggtgcaaacga

SEQ ID NO: 220076 - DNA, 574 bp, Homo sapiens
tatggaatgcctcaaacccccaccccatggagccaatggcttcccatctgtgtagtttgccttctccagtgtctcattaaatgaggtcacactgtgtgtatcctcctcagactgtcttcttccacttagcaatgtgcatgcaagattcactcatgtctttgtgtgtgttgatatcttgttcctttctatggctaaatagtattccattacatgaatgtagcacaatttggttatgcattttggggagcagaaccttcctcttctaactttgttccagggttggagaccttcaarttaactgacaatagatacattagtaggagagacaatacttggcttcttgttccccaagtatcattgtgggacaaaattcatcagatggcaggatccagtttacaaagaggtaaaaatagcccagaaacaagaaacaagactagaatctgataactcacaatggctatagttttcctttaaaaaaattttttttgagacagggtctggctctgtcgcccaggctggagtgcaaaggtgcaatctcagctcactgcaacctctacctcctgggtgcaaacga

SEQ ID NO: 220077 - DNA, 574 bp, Homo sapiens
tatggaatgcctcaaacccccaccccatggagccaatggcttcccatctgtgtagtttgccttctccagtgtctcattaaatgaggtcacactgtgtgtatcctcctcagactgtcttcttccacttagcaatgtgcatgcaagattcactcatgtctttgtgtgtgttgatatcttgttcctttctatggctaaatagtattccattacatgaatgtagcacaatttggttatgcattttggggagcagaaccttcctcttctaactttgttccagggttggagaccttcaaattaactgacaatagatacattagtaggagagacaatacttggcttcttgttccccaagtatcattgtgggacaaaattcatcagatggcaggatccagtttacaaagaggtaaaaatagcccagaaacaagaaacaagactagaatctgataactcacaatggctatagttttcctttaaaaaaattttttttgagacagggtctggctctgycgcccaggctggagtgcaaaggtgcaatctcagctcactgcaacctctacctcctgggtgcaaacga

SEQ ID NO: 220078 - DNA, 339 bp, Homo sapiens
ttggtggcaggtgggtgcgaggaggagggggctgggcttttctccggacggtgtttgcccagaagaccatcatccctggactacgttaggaggaagtggcaccgctccgaggtaggggaagaagggttataaaggggggagtccaccacacatggtcttgaagaagcttttataaaaggcaaaggcatctttgccggacgttgttgcaaaggmgtagaaacaagcagaggaaaacatcccaaagggtaaccactagcgttcctgcttcttgcaacattcatcccgggcttccagctcagcccgccccgggccaggtgatcggccgccacatcccctgcg

SEQ ID NO: 220079 - DNA, 339 bp, Homo sapiens
ttggtggcaggtgggtgcgaggaggagggggctgggcttttctccggacggtgtttgcccagaagaccatcatccctggactacgttaggaggaagtggcaccgctccgaggtaggggaagaagggttataaaggggggagtccaccacacatggtcttgaagaagcttttataaaaggcaaaggcatctttgccggacgttgttgcaaaggcgtagaaacaagcagasgaaaacatcccaaagggtaaccactagcgttcctgcttcttgcaacattcatcccgggcttccagctcagcccgccccgggccaggtgatcggccgccacatcccctgcg

SEQ ID NO: 220080 - DNA, 339 bp, Homo sapiens
ttggtggcaggtgggtgcgaggaggagggggctgggcttttctccggacggtgtttgcccagaagaccatcatccctggactacgttaggaggaagtggcaccgctccgaggtaggggaagaagggttataaaggggggagtccaccacacatggtcttgaagaagcttttataaaaggcaaaggcatctttgccggacgttgttgcaaaggcgtagaaacaagcagaggaaaacatcccaaagggtaaccactagcgttcctgcttcttgcaacattcatcccrggcttccagctcagcccgccccgggccaggtgatcggccgccacatcccctgcg

SEQ ID NO: 220081 - DNA, 590 bp, Homo sapiens
tctaatcagttgtttttagtttgcagaaaaaacttcagcatgtgccaggaacacaacctcaccttgatcaggtaaagaaaaaaaatctaaatccaaaattcctaatcaatgtttttaaaggacctctttaactagataggctatgtttaggactattttattataaactttttctaaaatggtatttttgaactgtrttgataatttttggaatcttaaatgcttttgacatagtctaattctatttcttaacacataataggaattcatcaaaccagatttgttttagaatctgaggaaatcatgctttctagcctttccattctgtagattgcttagcatattggttagttctgatagggattactccttaaaagcagcctgggggttctataggcagtctgtttttaagtatgttgaattgtttaaggaaaggtctgatataagcatggcttatttaaataaaaattgacttggagtttcaccttcaggtagcactataaatttgaactccttaagatgtttttcatgctctaaaattctaatccctaaggtaaatatctaagatgctaggaacaatttaaatataa

SEQ ID NO: 220082 - DNA, 318 bp, Homo sapiens
gtactcttctttcacgcatatgtgtgagcaaacacacacacactaacaagaaattcatctgaagatgtgcacaggaaatatcttgcatctttaccccctttgtgatcttacatatgggagaactgaggcacagaaataagttaggacagccagcaaacttgcatcagtataaatacaaagaagggragggaggaacatgcttgaaaggggtgtgctggtctcagagggttaggtttctcagttggctgggcatcagctggccatgctttagttatttgatgggaggaaaaataagtgggaggtgaggagtaactcctg

SEQ ID NO: 220083 - DNA, 318 bp, Homo sapiens
gtactcttctttcacgcatatgtgtgagcaaacacacacacactaacaagaaattcatctgaagatgtgcacaggaaatatcttgcatctttaccccctttgtgatcttacatatgggagaactgaggcacagaaataagttaggacagccagcaaacttgcatcagtataaatacaaagaagggaagggaggaacatgcttgaaaggggtgtgctggtctcagagggttrggtttctcagttggctgggcatcagctggccatgctttagttatttgatgggaggaaaaataagtgggaggtgaggagtaactcctg

SEQ ID NO: 220084 - DNA, 580 bp, Homo sapiens
  misc_feature (1)...(580): n = A,T,C or G
nnnnnnnnnnnnnnnnnnnnnnnnnnnnnnnnnnntatatcggtgaagggaagtaaaattgaggttagtgaaagakactccacgttttaccctaatacttttctactgtttgaattttttatagttataatacattcaggtataatacataatttatatataaatactatatatacatacatacacacacatatatatatgtgtgtatatatatattttaataagaaacaaggtctttctctctcacccaggctggagtgcagtgcagtgatcatagctcactgtaacctcaaactcctaggcttgcgtgatcctcccacctcagcctcttgagtagctgggactactggtgcatgccaccatgcccagctaagtttaaaatttttgtagaaacagggtcttgctatgttgcccaggttgaccttgaactcctggcctcaagagatcctttcccctcagcctcccaaagtgcttgtattacaggcatgagccactgtgcacagcctacttatattatttaaaaaacaattaatcaaataagttggttaggattagtttcagtggcataaacagaaactta

SEQ ID NO: 220085 - DNA, 580 bp, Homo sapiens
  misc_feature (1)...(580): n = A,T,C or G
nnnnnnnnnnnnnnnnnnnnnnnnnnnnnnnnnnntatatcggtgaagggaagtaaaattgaggttagtgaaagagactccacgttttaccctaatacttttctactgtttgaattttttatagttataatacattcaggtataatacataatttatatataaatactatatatayatacatacacacacatatatatatgtgtgtatatatatattttaataagaaacaaggtctttctctctcacccaggctggagtgcagtgcagtgatcatagctcactgtaacctcaaactcctaggcttgcgtgatcctcccacctcagcctcttgagtagctgggactactggtgcatgccaccatgcccagctaagtttaaaatttttgtagaaacagggtcttgctatgttgcccaggttgaccttgaactcctggcctcaagagatcctttcccctcagcctcccaaagtgcttgtattacaggcatgagccactgtgcacagcctacttatattatttaaaaaacaattaatcaaataagttggttaggattagtttcagtggcataaacagaaactta

SEQ ID NO: 220086 - DNA, 596 bp, Homo sapiens
agtattacatatgtaaatatgtattttttatatgtactgatttgtagaataacaattataagtgatataaggtgaaagaagcaatttgttcataagtatgyagcatgattccatttcagtaaaaattaacaaaaacatgcttgtatgtgcatgggcatatattaatatgtgctcatatatatatatatgctatacatatatatatatatgtatgctgatatatgtatgtggaagcaatatgtttgggatgatacacacccttgcaataacatgaactaccttagggagtactatagatgacagagacaatgggggaagaggagcaatgttaccttaaaacaaaaactttgcatcctattactggttacaagaggcatataaaattatttttaaaattttaaataaatatgttagcaacctttgtatggatggaaaattttaaatatgtatgaaaatactgattgcgtataccttttgaaattctactgatagggatttatcctacatatttacatatacaaacatttatgacattcatagcactattgttttaaaggtgagatgttggaaacatcctagctatttaactatagggg

SEQ ID NO: 220087 - DNA, 596 bp, Homo sapiens
agtattacatatgtaaatatgtattttttatatgtactgatttgtagaataacaattataagtgatataaggtgaaagaagcaatttgttcataagtatgtagyatgattccatttcagtaaaaattaacaaaaacatgcttgtatgtgcatgggcatatattaatatgtgctcatatatatatatatgctatacatatatatatatatgtatgctgatatatgtatgtggaagcaatatgtttgggatgatacacacccttgcaataacatgaactaccttagggagtactatagatgacagagacaatgggggaagaggagcaatgttaccttaaaacaaaaactttgcatcctattactggttacaagaggcatataaaattatttttaaaattttaaataaatatgttagcaacctttgtatggatggaaaattttaaatatgtatgaaaatactgattgcgtataccttttgaaattctactgatagggatttatcctacatatttacatatacaaacatttatgacattcatagcactattgttttaaaggtgagatgttggaaacatcctagctatttaactatagggg

SEQ ID NO: 220088 - DNA, 596 bp, Homo sapiens
agtattacatatgtaaatatgtattttttatatgtactgatttgtagaataacaattataagtgatataaggtgaaagaagcaatttgttcataagtatgtagcatgattccatttcagtaaaaattaacaaaaacatgcttgtatgtgcatgggcatatattaatatgtgctcatatatatatatatgctatacatatatatatatatgtatgctgatatatgtatgtggaagcaatatgtttgkgatgatacacacccttgcaataacatgaactaccttagggagtactatagatgacagagacaatgggggaagaggagcaatgttaccttaaaacaaaaactttgcatcctattactggttacaagaggcatataaaattatttttaaaattttaaataaatatgttagcaacctttgtatggatggaaaattttaaatatgtatgaaaatactgattgcgtataccttttgaaattctactgatagggatttatcctacatatttacatatacaaacatttatgacattcatagcactattgttttaaaggtgagatgttggaaacatcctagctatttaactatagggg

SEQ ID NO: 220089 - DNA, 596 bp, Homo sapiens
agtattacatatgtaaatatgtattttttatatgtactgatttgtagaataacaattataagtgatataaggtgaaagaagcaatttgttcataagtatgtagcatgattccatttcagtaaaaattaacaaaaacatgcttgtatgtgcatgggcatatattaatatgtgctcatatatatatatatgctatacatatatatatatatgtatgctgatatatgtatgtggaagcaatatgtttgggatgatacacacccttgcaataacatgaactacctyagggagtactatagatgacagagacaatgggggaagaggagcaatgttaccttaaaacaaaaactttgcatcctattactggttacaagaggcatataaaattatttttaaaattttaaataaatatgttagcaacctttgtatggatggaaaattttaaatatgtatgaaaatactgattgcgtataccttttgaaattctactgatagggatttatcctacatatttacatatacaaacatttatgacattcatagcactattgttttaaaggtgagatgttggaaacatcctagctatttaactatagggg

SEQ ID NO: 220090 - DNA, 468 bp, Homo sapiens
cttgtaatccaatgagtagaaagtttggtaccccatttatggctgtcaacctgccagttctcaggagtttgtataagcctaaatcygaaaggatctcatcccattaggacccttgtctccttttctgttgcctttgcccactggctatggcaacaggggtctttctttctccttggctatctttggatatgggggctccgtcttctgtgccaccttagggaatgccttttgcaggcatggctaagtcattaaaaagcctacagtttcagtaacattttgagtgagcactctctgaagctgcgttggaatctcaggcttctttgtctggaagataactcttgggctacaagtttcttatcctagctttggttttgaggcctctctgttctcctcttgggttggaagttattcctggctttttgtttcaaggggtctctgtgatcttgatcttgctgctttcatgggaac

SEQ ID NO: 220091 - DNA, 468 bp, Homo sapiens
cttgtaatccaatgagtagaaagtttggtaccccatttatggctgtcaacctgccagttctcaggagtttgtataagcctaaatctgaaaggatctcatcccattaggacccttgtctccttttctgttgcctttgcccactggctmtggcaacaggggtctttctttctccttggctatctttggatatgggggctccgtcttctgtgccaccttagggaatgccttttgcaggcatggctaagtcattaaaaagcctacagtttcagtaacattttgagtgagcactctctgaagctgcgttggaatctcaggcttctttgtctggaagataactcttgggctacaagtttcttatcctagctttggttttgaggcctctctgttctcctcttgggttggaagttattcctggctttttgtttcaaggggtctctgtgatcttgatcttgctgctttcatgggaac

SEQ ID NO: 220092 - DNA, 565 bp, Homo sapiens
ggacccaatagtaagaattctactcaggacatctgatcttcattgaaaaggattctaatccaacttcagtcctcatagcaaggaagtactatttcagaaagtccctagattctcagatgcaytggcaagcaccatacactgaagaattcacagattttagtcacttgctcactcatccacttgaagtaagaaaaatcaatcactgcatgtttattgttctataataaagcaaatgttagaaataaaagttagaaatgtcgaacgcacttaaattgttacataataaactaatcaagacacaccttttattcaggacatggatatttctgaaatgaaaacaaaagaagagaattgacttaaaatgtttataaattcgaatattatgacagaaccaaagctatttatgagcattatttttaaaagcttgtttaagtattatgcacttgtctgtgtgacattttgtaaagcggagaaaaattaaggagaaaggaattgtagaacactaacaggaagaggacagatactgaggaatggctcatggtataagtgagattatcagagactt

SEQ ID NO: 220093 - DNA, 472 bp, Homo sapiens
gtagtctggcaagtattatatcaaagataaataccagttttagaataaagcattaatatactcttacatttcaacttaagaggcaaatattaacagtaggatttgtaaactatttattggaataaaaatcaatgaatttttaaaaattacaaaatgatttatgtatgttagatattttactgagtgaaaaaattcatgcttttttaaatgacttattgtttggagtagtgatacagtagatttaattttccccctcattaattaaaatcatgttttagccaagaaagtgaacaaaattcttattggcaattcagttgtttcccgttttggagactgacactctccagttctaagttaaataattgtcatggtaaagtaatttccctgaaaagaacggacattgattcagcccctgttactcacaaatsctatttgagtcaaattggaaaactattaagcttttgggaaaaaa

SEQ ID NO: 220094 - DNA, 312 bp, Homo sapiens
taagctttacatctgataaacagagcacagtagagactccacttgggataatttttcctgaaacctacttgtttttcatgctgtttctgcagttwaggtgcctggtcttaaaatgtgttgaagcaaaagaatgggaagagccaagggacacatcagggagtttccaaatgacagaactgcaaacctgcagggcagtcctctgctgcggaagagggagcttgcactctgaatgcatcttgaggagtcttctccatacccgaggaataaattaaggctaacaagagggcctaaatggtgattggctctgctctt

SEQ ID NO: 220095 - DNA, 369 bp, Homo sapiens
cacagagaaaccctatgagtagtaaaaacacaaaaatcagctgtgcrtagtggcgtgcacctatagccccagctactcaggaggctgaggtggaaagatcacctgaatctggggaggtcaaggctacagtgagccaagactgtgccattgcactccagcctgggcaacaaagtgagaccctgtctcaaaaaaaaaaatgaattttttaaaaagagaaattgctttgtaaatttaatttttcaatcaaaaccaagatttttcagatatagagaatgcagcccactggtcagatttgtcagttcaaagagaatagattctagtttcctatttttctagcctgcttatgattatccaataggatatcaaaaa

SEQ ID NO: 220096 - DNA, 369 bp, Homo sapiens
cacagagaaaccctatgagtagtaaaaacacaaaaatcagctgtgcgtagtggcrtgcacctatagccccagctactcaggaggctgaggtggaaagatcacctgaatctggggaggtcaaggctacagtgagccaagactgtgccattgcactccagcctgggcaacaaagtgagaccctgtctcaaaaaaaaaaatgaattttttaaaaagagaaattgctttgtaaatttaatttttcaatcaaaaccaagatttttcagatatagagaatgcagcccactggtcagatttgtcagttcaaagagaatagattctagtttcctatttttctagcctgcttatgattatccaataggatatcaaaaa

SEQ ID NO: 220097 - DNA, 369 bp, Homo sapiens
cacagagaaaccctatgagtagtaaaaacacaaaaatcagctgtgcgtagtggcgtgcacctatagccccagctactcaggaggctgaggtggaaagatcacctgaatctggggaggtcaaggctacagtgagccaagactgtgccattgcactccagcctgggcaacaaagtgagaccctgtctcaaaaaaaaaaatgaattttttaaaaagagaaattgctttgtaaatttaatttttcmatcaaaaccaagatttttcagatatagagaatgcagcccactggtcagatttgtcagttcaaagagaatagattctagtttcctatttttctagcctgcttatgattatccaataggatatcaaaaa

SEQ ID NO: 220098 - DNA, 369 bp, Homo sapiens
cacagagaaaccctatgagtagtaaaaacacaaaaatcagctgtgcgtagtggcgtgcacctatagccccagctactcaggaggctgaggtggaaagatcacctgaatctggggaggtcaaggctacagtgagccaagactgtgccattgcactccagcctgggcaacaaagtgagaccctgtctcaaaaaaaaaaatgaattttttaaaaagagaaattgctttgtaaatttaatttttcaatcaaaaccaagatttttcagatatagagaatgcagcccactggtcagatttgtcagttcaaagagaatagattctagtttyctatttttctagcctgcttatgattatccaataggatatcaaaaa

SEQ ID NO: 220099 - DNA, 461 bp, Homo sapiens
tccacactgtctgaactcttccctgaattaatcgttttcagtaggagggggctraatcccttattaatgccctaccaggagtgaatgaataaagccaagttaaaggagaactgggttccagatactgtgctaggtttctttgcatgtaccctttcattctgctggagctaaagattgttctgcctcctctccataaaacgcacccaaactccaaaaccaggaaattctccatagaaaataggagtgaagagagaaaagactaacaggataaaacccaaagcaggaagaaagttctatctcccatttctctcaaggaatttttggacccaccaaggctactgtcctgaaatatcctgctgcttctccttccccaaatattgtccacttcctgagagtaaggctgacttgccacaggcttataaagtgtttggtcacagtaagacaactgtgagtaataacac

SEQ ID NO: 220100 - DNA, 396 bp, Homo sapiens
ctaccaggagtgaatgaataaagccaagttaaaggagaactgggttccagatactgtgctaggtttctttgcatgtaycctttcattctgctggagctaaagattgttctgcctcctctccataaaacgcacccaaactccaaaaccaggaaattctccatagaaaataggagtgaagagagaaaagactaacaggataaaacccaaagcaggaagaaagttctatctcccatttctctcaaggaatttttggacccaccaaggctactgtcctgaaatatcctgctgcttctccttccccaaatattgtccacttcctgagagtaaggctgacttgccacaggcttataaagtgtttggtcacagtaagacaactgtgagtaataacacacattg

SEQ ID NO: 220101 - DNA, 461 bp, Homo sapiens
tccacactgtctgaactcttccctgaattaatcgttttcagtaggagggggctaaatcccttattaatgccctaccaggagtgaatgaataaagccaagttaaaggagaactgggttccagatactgtgctaggtttctttgcatgtaccctttcattctgctggagctaaagattgttctgcctcctctccataaaacgcacccaaactccaaaaccaggaaattctccatagaaaataggagtgaagagagaaaagactaacaggataaaacycaaagcaggaagaaagttctatctcccatttctctcaaggaatttttggacccaccaaggctactgtcctgaaatatcctgctgcttctccttccccaaatattgtccacttcctgagagtaaggctgacttgccacaggcttataaagtgtttggtcacagtaagacaactgtgagtaataacac

SEQ ID NO: 220102 - DNA, 396 bp, Homo sapiens
ctaccaggagtgaatgaataaagccaagttaaaggagaactgggttccagatactgtgctaggtttctttgcatgtaccctttcattctgctggagctaaagattgttctgcctcctctccataaaacgcacccaaactccaaaaccaggaaattctccatagaaaataggagtgaagagagaaaagactaacaggataaaacccaaagcaggaagaaagttctatctcccatttctctcaaggaatttttggacccaccaaggctactgtcctgaaatatcctgctgcttctccttccccaaatattgtccacttcctgagagtaaggctgacttgccrcaggcttataaagtgtttggtcacagtaagacaactgtgagtaataacacacattg

SEQ ID NO: 220103 - DNA, 467 bp, Homo sapiens
ttaagctttacatctgataaacagagcacagtagagactccacttgggataatttttcctgaaacctacttgtttttcatgctgtttctgcagttaaggtgcctggtcttaaaatgtgttgaagcaaaagaatgggaagagccaagggacacatcagggagtttccaaatgacagaactgcaaacctgcagggcagtcctctgctgmggaagagggagcttgcactctgaatgcatcttgaggagtcttctccatacccgaggaataaattaaggctaacaagagggcctaaatggtgattggctctgctcttgaccaattgaactccatgctcggactgaggcagcagagggcttcttacacccacctccaccaccatcaccctgcctaagtcatctcagagaatcctctttctatctcagtattgggcctacattcttatgcttcagcccttttccataatgacc

SEQ ID NO: 220104 - DNA, 467 bp, Homo sapiens
ttaagctttacatctgataaacagagcacagtagagactccacttgggataatttttcctgaaacctacttgtttttcatgctgtttctgcagttaaggtgcctggtcttaaaatgtgttgaagcaaaagaatgggaagagccaagggacacatcagggagtttccaaatgacagaactgcaaacctgcagggcagtcctctgctgcggaagagggagcttrcactctgaatgcatcttgaggagtcttctccatacccgaggaataaattaaggctaacaagagggcctaaatggtgattggctctgctcttgaccaattgaactccatgctcggactgaggcagcagagggcttcttacacccacctccaccaccatcaccctgcctaagtcatctcagagaatcctctttctatctcagtattgggcctacattcttatgcttcagcccttttccataatgacc

SEQ ID NO: 220105 - DNA, 389 bp, Homo sapiens
cccggtctatggacccaaaactggtgtgatatgaatacactctgtaaaaactcttacactgttttaagctttacatctgataaacagagcacagtagagactccacttgggataatttttcctgaaacctacttgtttttcatgctgtttctgcagttaaggtgcctggtcttaaaatgtgttgaagcaaaagaatgggaagagccaagggacacatcagggagtttccaaatgacagaactgcaaacctgcagggcagtcctctgctgcggaagagggagcttgcactctgaatgcatcttgaggagtmttctccatacccgaggaataaattaaggctaacaagagggcctaaatggtgattggctctgctcttgaccaattgaact

SEQ ID NO: 220106 - DNA, 501 bp, Homo sapiens
gtgatatgaatacactctgtaaaaactcttacactgttttaagctttacatctgataaacagagcacagtagagactccacttgggataatttttcctgaaacctacttgtttttcatgctgtttctgcagttaaggtgcctggtcttaaaatgtgttgaagcaaaagaatgggaagagccaagggacacatcagggagtttccaaatgacagaactgcaaacctgcagggcagtcctctgctgcggaagagggagcttgcactctgaatgcatcttgaggagtcttctccataccygaggaataaattaaggctaacaagagggcctaaatggtgattggctctgctcttgaccaattgaactccatgctcggactgaggcagcagagggcttcttacacccacctccaccaccatcaccctgcctaagtcatctcagagaatcctctttctatctcagtattgggcctacattcttatgcttcagcccttttccataat

SEQ ID NO: 220107 - DNA, 403 bp, Homo sapiens
acttagtatgaaaagggatttttttttgtcaggtacctcactagttatttttaaaataggattgcatgttgaaatgataatcttttggatatattgggttaartaaatgtattattaaagttaatttcacttaaaaatgtttaatgtagctactagaaattttaaaattaagcatgttgctcaccttatgtttctattggacggctctctctagatacaaaggctgccaagagggacctcactctagcttcagggagaagagaggaattagcaaggccaagcagaagctcctgagggcagggccaagggcggcttggtggggtggggatgggatgcacaaagataactccaacccttaagaaggtgtttcctagagcaggctgtgacctgtcagtttatatac

SEQ ID NO: 220108 - DNA, 425 bp, Homo sapiens
agatcttctggacttagtatgaaaagggatttttttttgtcaggtacctcactagttatttttaaaataggattgcatgttgaaatgataatcttttggatatattgggttaagtaaatgtattattaaagttaatttcacttaaaaatgtttaatgtagctactagaaatkttaaaattaagcatgttgctcaccttatgtttctattggacggctctctctagatacaaaggctgccaagagggacctcactctagcttcagggagaagagaggaattagcaaggccaagcagaagctcctgagggcagggccaagggcggcttggtggggtggggatgggatgcacaaagataactccaacccttaagaaggtgtttcctagagcaggctgtgacctgtcagtttatatactgaggcttagg

SEQ ID NO: 220109 - DNA, 395 bp, Homo sapiens
aaagggatttttttttgtcaggtacctcactagttatttttaaaataggattgcatgttgaaatgataatcttttggatatattgggttaagtaaatgtattattaaagttaatttcacttaaaaatgtttaatgtagctactagaaattttaaaattaagcatgttgctcaccttatgtttctattggacggctctctctagayacaaaggctgccaagagggacctcactctagcttcagggagaagagaggaattagcaaggccaagcagaagctcctgagggcagggccaagggcggcttggtggggtggggatgggatgcacaaagataactccaacccttaagaaggtgtttcctagagcaggctgtgacctgtcagtttatatactga

SEQ ID NO: 220110 - DNA, 425 bp, Homo sapiens
agatcttctggacttagtatgaaaagggatttttttttgtcaggtacctcactagttatttttaaaataggattgcatgttgaaatgataatcttttggatatattgggttaagtaaatgtattattaaagttaatttcacttaaaaatgtttaatgtagctactagaaattttaaaattaagcatgttgctcaccttatgtttctattggacggctctctctagatacaaaggctgccaagaggkacctcactctagcttcagggagaagagaggaattagcaaggccaagcagaagctcctgagggcagggccaagggcggcttggtggggtggggatgggatgcacaaagataactccaacccttaagaaggtgtttcctagagcaggctgtgacctgtcagtttatatactgaggcttagg

SEQ ID NO: 220111 - DNA, 409 bp, Homo sapiens
atgaaaagggatttttttttgtcaggtacctcactagttatttttaaaataggattgcatgttgaaatgataatcttttggatatattgggttaagtaaatgtattattaaagttaatttcacttaaaaatgtttaatgtagctactagaaattttaaaattaagcatgttgctcaccttatgtttctattggacggctctctctagatacaaaggctgccaagagggacctcactctrgcttcagggagaagagaggaattagcaaggccaagcagaagctcctgagggcagggccaagggcggcttggtggggtggggatgggatgcacaaagataactccaacccttaagaaggtgtttcctagagcaggctgtgacctgtcagtttatatactgaggcttaggag

SEQ ID NO: 220112 - DNA, 312 bp, Homo sapiens
taagctttacatctgataaacagagcacagtagagactccacttgggataatttttcctgaaacctacttgtttttcatgctgtttctgcagttaaggtgcctggtcttaaaatgtgttgaagcaaaagaatgggaagagccaagggacacatcagggagtttccaaatgacagaactgcaaacctgcagggcagtcctctgctgcggaagagggagcttgcactctgaatgcatcttgaggagtcttctccatacccgaggaataaattmaggctaacaagagggcctaaatggtgattggctctgctctt

SEQ ID NO: 220113 - DNA, 394 bp, Homo sapiens
aaagggatttttttttgtcaggtacctcactagttatttttaaaataggattgcatgttgaaatgataatcttttggatatattgggttaagtaaatgtattattaaagttaatttcacttaaaaatgtttaatgtagctactagaaattttaaaattaagcatgttgctcaccttatgtttctattggacggctctctctagatacaaaggctgccaagagggacctcactctagcttcagggagaagagaggaattagcaaggccaagcagargctcctgagggcagggccaagggcggcttggtggggtggggatgggatgcacaaagataactccaacccttaagaaggtgtttcctagagcaggctgtgacctgtcagtttatatactg

SEQ ID NO: 220114 - DNA, 425 bp, Homo sapiens
agatcttctggacttagtatgaaaagggatttttttttgtcaggtacctcactagttatttttaaaataggattgcatgttgaaatgataatcttttggatatattgggttaagtaaatgtattattaaagttaatttcacttaaaaatgtttaatgtagctactagaaattttaaaattaagcatgttgctcaccttatgtttctattggacggctctctctagatacaaaggctgccaagagggacctcactctagcttcagggagaagagaggaattagcaaggccaagcagaagctcctgagggcagggccaagggcggcttggtggggtggggatgggatgcacaaagataactccaacccttargaaggtgtttcctagagcaggctgtgacctgtcagtttatatactgaggcttagg

SEQ ID NO: 220115 - DNA, 604 bp, Homo sapiens
caagcttctccagcacagcaactgtgtcttatttctccttgtactcccagtgttcacaccatgctgcactcacagaagactcttcggtgatattttgtggacagagagaatgcctgtgagagtgggctgaagtgtgcgttgggctccagagaccttaaggaggggagaccaggtcctgagtaaagttgaaggggaggggctgagtcctgctagcsaggagtctcatcccctagggaagttccagggaccctcagaagtgcaaggggacggtgttagtgttagtccagtgacacagcccagagcctgccttccacgtgggtttgacaggagcctcctaactgctcttctgcttccatttttgccccttcagtctattctcaacagggaagcctgaggcatccttaaccatgtcagatcatgtggctcctcagctcaaagcctcatctcagaggaaagctctggtcccttagaaatggcccaggtggtgacagacagactctaaggtgagcagactgttgctagatatctgggctcggaggactcgccactgctcaaaggcagtgaggattttcgcactagaagctggaggacagggatccttgtt

SEQ ID NO: 220116 - DNA, 604 bp, Homo sapiens
caagcttctccagcacagcaactgtgtcttatttctccttgtactcccagtgttcacaccatgctgcactcacagaagactcttcggtgatattttgtggacagagagaatgcctgtgagagtgggctgaagtgtgcgttgggctccagagaccttaaggaggggagaccaggtcctgagtaaagttgaaggggaggggctgagtcctgctagcgaggagtctcatcccctrgggaagttccagggaccctcagaagtgcaaggggacggtgttagtgttagtccagtgacacagcccagagcctgccttccacgtgggtttgacaggagcctcctaactgctcttctgcttccatttttgccccttcagtctattctcaacagggaagcctgaggcatccttaaccatgtcagatcatgtggctcctcagctcaaagcctcatctcagaggaaagctctggtcccttagaaatggcccaggtggtgacagacagactctaaggtgagcagactgttgctagatatctgggctcggaggactcgccactgctcaaaggcagtgaggattttcgcactagaagctggaggacagggatccttgtt

SEQ ID NO: 220117 - DNA, 604 bp, Homo sapiens
caagcttctccagcacagcaactgtgtcttatttctccttgtactcccagtgttcacaccatgctgcactcacagaagactcttcggtgatattttgtggacagagagaatgcctgtgagagtgggctgaagtgtgcgttgggctccagagaccttaaggaggggagaccaggtcctgagtaaagttgaaggggaggggctgagtcctgctagcgaggagtctcatcccctagggaagttccagggaccctcagaagtgcaaggggacggtgttagtgttagtccagtracacagcccagagcctgccttccacgtgggtttgacaggagcctcctaactgctcttctgcttccatttttgccccttcagtctattctcaacagggaagcctgaggcatccttaaccatgtcagatcatgtggctcctcagctcaaagcctcatctcagaggaaagctctggtcccttagaaatggcccaggtggtgacagacagactctaaggtgagcagactgttgctagatatctgggctcggaggactcgccactgctcaaaggcagtgaggattttcgcactagaagctggaggacagggatccttgtt

SEQ ID NO: 220118 - DNA, 592 bp, Homo sapiens
tttctccttgtactcccagtgttcacaccatgctgcactcacagaagactcttcggtgatattttgtggacagagagaatgcctgtgagagtgggctgaagtgtgcgttgggctccagagaccttaaggaggggagaccaggtcctgagtaaagttgaaggggaggggctgagtcctgctagcgaggagtctcatcccctagggaagttccagggaccctcagaagtgcaaggggacggtgttagtgttagtccagtgacacagcccagagcctgccttccacgtgggtttgacaggarcctcctaactgctcttctgcttccatttttgccccttcagtctattctcaacagggaagcctgaggcatccttaaccatgtcagatcatgtggctcctcagctcaaagcctcatctcagaggaaagctctggtcccttagaaatggcccaggtggtgacagacagactctaaggtgagcagactgttgctagatatctgggctcggaggactcgccactgctcaaaggcagtgaggattttcgcactagaagctggaggacagggatccttgttaggtaggagcagaaagctt

SEQ ID NO: 220119 - DNA, 592 bp, Homo sapiens
tttctccttgtactcccagtgttcacaccatgctgcactcacagaagactcttcggtgatattttgtggacagagagaatgcctgtgagagtgggctgaagtgtgcgttgggctccagagaccttaaggaggggagaccaggtcctgagtaaagttgaaggggaggggctgagtcctgctagcgaggagtctcatcccctagggaagttccagggaccctcagaagtgcaaggggacggtgttagtgttagtccagtgacacagcccagagcctgccttccacgtgggtttgacaggagcctcctaactgctcttctgcttccatttttgccccttcagtctattctcaacagggaagcctgaggcatccttaaccatgtcagatcatgtggctcctcagctcaaagcctcatctcagaggaaagctctggtcccttagaaatggcccaggtggtgacagacagactctaaggtgagcagactgttgctagatatctgggctyggaggactcgccactgctcaaaggcagtgaggattttcgcactagaagctggaggacagggatccttgttaggtaggagcagaaagctt

SEQ ID NO: 220120 - DNA, 501 bp, Homo sapiens
gtgatatgaatacactctgtaaaaactcttacactgttttaagctttacatctgataaacagagcacagtagagactccacttgggataatttttcctgaaacctacttgtttttcatgctgtttctgcagttaaggtgcctggtcttaaaatgtgttgaagcaaaagaatgggaagagccaagggacacatcagggagtttccaaatgacagaactgcaaacctgcagggcagtcctctgctgcggaagagggagcttgcactctgaatgcatcttgaggagtcttctccatacccgaggaataaattaaggctaacaagrgggcctaaatggtgattggctctgctcttgaccaattgaactccatgctcggactgaggcagcagagggcttcttacacccacctccaccaccatcaccctgcctaagtcatctcagagaatcctctttctatctcagtattgggcctacattcttatgcttcagcccttttccataat

SEQ ID NO: 220121 - DNA, 572 bp, Homo sapiens
aatttttagattctttcatctgatttgactctcttagttaygaataagaggatatctagaatatatatgtgacttgttaaaatgaaaatccaccttctctgagtcttcaaatatctgtcatatcttacattcttagtaacatcaactgttgaagtcatgtccgtagttgcatgaaaagaaaaatttcaggaacattcaacctcaaaagttctttttcttagtctgaagtcgtagaagcatttgacttttactttctctttttaagtttgtactagtaggtattttatataaatataatatttaattattgcctttgtattctttttctctagtaaacatcctggtttttagctatcaatatgtagttttacatttagggatttctaacggaaagagaaaggaatctgaaatcagaggacaagagtttattctacttgaccaaacacatacaaaatactggaaggagagttttacaacaaatatttaatgtctatgacatgtaaaaaggttttccaaatcaagaaaattcaaacaattcaatacaaatatcatcaataataacacatgaacag

SEQ ID NO: 220122 - DNA, 572 bp, Homo sapiens
aatttttagattctttcatctgatttgactctcttagttatgaataagaggatatctagaatatatatgtgacttgttaaaatgaaaatccaccttctctgagtcttcaaatatctgtcatatcttacattcttagtaacatcaactgttgaagtcatgtccgtagttgcatgaaaagaaaaatttcaggaacattcaacctcaaaagttctttttcttagtctgaagtcgtagaagcatttgacttttactttctctttttaagtttgtactagtaggtattttrtataaatataatatttaattattgcctttgtattctttttctctagtaaacatcctggtttttagctatcaatatgtagttttacatttagggatttctaacggaaagagaaaggaatctgaaatcagaggacaagagtttattctacttgaccaaacacatacaaaatactggaaggagagttttacaacaaatatttaatgtctatgacatgtaaaaaggttttccaaatcaagaaaattcaaacaattcaatacaaatatcatcaataataacacatgaacag

SEQ ID NO: 220123 - DNA, 572 bp, Homo sapiens
aatttttagattctttcatctgatttgactctcttagttatgaataagaggatatctagaatatatatgtgacttgttaaaatgaaaatccaccttctctgagtcttcaaatatctgtcatatcttacattcttagtaacatcaactgttgaagtcatgtccgtagttgcatgaaaagaaaaatttcaggaacattcaacctcaaaagttctttttcttagtctgaagtcgtagaagcatttgacttttactttctctttttaagtttgtactagtaggtattttatataaatataatatttaattattgcctttgtattctttttctctagtaaacatcctggtttttagctatcaatatgtagttttacatttagggatttctaayggaaagagaaaggaatctgaaatcagaggacaagagtttattctacttgaccaaacacatacaaaatactggaaggagagttttacaacaaatatttaatgtctatgacatgtaaaaaggttttccaaatcaagaaaattcaaacaattcaatacaaatatcatcaataataacacatgaacag

SEQ ID NO: 220124 - DNA, 467 bp, Homo sapiens
ttaagctttacatctgataaacagagcacagtagagactccacttgggataatttttcctgaaacctacttgtttttcatgctgtttctgcagttaaggtgcctggtcttaaaatgtgttgaagcaaaagaatgggaagagccaagggacacatcagggagtttccaaatgacagaactgcaaacctgcagggcagtcctctgctgcggaagagggagcttgcactctgaatgcatcttgaggagtcttctccatacccgaggaataaattaaggctaacaagagggcctaaatggtgattggctctgctcttgaccaattgaaytccatgctcggactgaggcagcagagggcttcttacacccacctccaccaccatcaccctgcctaagtcatctcagagaatcctctttctatctcagtattgggcctacattcttatgcttcagcccttttccataatgacc

SEQ ID NO: 220125 - DNA, 607 bp, Homo sapiens
aacagtcattttgctgactgttctggagactcccattccttttgaaaacaaagatggacttttcaaatgargttatagttcaggggctttgttttgaattattttgtaagacctgaactaataaaagccctatacagagagacattcggtagctattattattggttatctttaatgtgtacaatgctttgagcatgatggctcaaaattactattcttagtatttataagttctactgacattagattttgaatctgtcatctcagttcatatagtatatattataaatttgaatcaaataaagctagggctcattaggaggttatttgccatgattaatgattgtggatgagaggaattcatattttttccacctatttcatcttattttaataataatgtccttaaactttactataaaaaaatataatgtctccatgtggaaggtaggtattgttgcgtagtgttaaagatctcagaccttggaatctgcttgggttctaatccttggtctgtttctcattgtcttcttagggagcttatttacccttttaaagcctcctctgtaaaaggcataatgcctatcataagtttgctttgagtatt

SEQ ID NO: 220126 - DNA, 607 bp, Homo sapiens
aacagtcattttgctgactgttctggagactcccattccttttgaaaacaaagatggacttttcaaatgaggttatagttcagggrctttgttttgaattattttgtaagacctgaactaataaaagccctatacagagagacattcggtagctattattattggttatctttaatgtgtacaatgctttgagcatgatggctcaaaattactattcttagtatttataagttctactgacattagattttgaatctgtcatctcagttcatatagtatatattataaatttgaatcaaataaagctagggctcattaggaggttatttgccatgattaatgattgtggatgagaggaattcatattttttccacctatttcatcttattttaataataatgtccttaaactttactataaaaaaatataatgtctccatgtggaaggtaggtattgttgcgtagtgttaaagatctcagaccttggaatctgcttgggttctaatccttggtctgtttctcattgtcttcttagggagcttatttacccttttaaagcctcctctgtaaaaggcataatgcctatcataagtttgctttgagtatt

SEQ ID NO: 220127 - DNA, 607 bp, Homo sapiens
aacagtcattttgctgactgttctggagactcccattccttttgaaaacaaagatggacttttcaaatgaggttatagttcaggggctttgttttgaattattttgtaagacctgaactaataaaagccctatacagagagacattcggtagctattattattggttatctttaatgtgtacaatgctttgagcrtgatggctcaaaattactattcttagtatttataagttctactgacattagattttgaatctgtcatctcagttcatatagtatatattataaatttgaatcaaataaagctagggctcattaggaggttatttgccatgattaatgattgtggatgagaggaattcatattttttccacctatttcatcttattttaataataatgtccttaaactttactataaaaaaatataatgtctccatgtggaaggtaggtattgttgcgtagtgttaaagatctcagaccttggaatctgcttgggttctaatccttggtctgtttctcattgtcttcttagggagcttatttacccttttaaagcctcctctgtaaaaggcataatgcctatcataagtttgctttgagtatt

SEQ ID NO: 220128 - DNA, 609 bp, Homo sapiens
aagtgacaaataatgtttagtttattattagaaccaactatgagttgtgacccttatcttctgcactgggaattacagatttttttcagggtttttctaacrtgaaaagagtttattggtgtaggaaaacatctggttccaaaatatagatcatccttattgagccccatgatgcgttatcttaatttttaaagccttttttgtctcatactggagtttattgtaccccttaaaaatattaagtcacatatttaacctgaaaaaagcaaaaatcattataaaaatctttaggctgggtgtggtggcttatgcttgtaatcctcgcgctttgacaggccaaggtgggtggattgcttaaaacccaggagttgtagaccagcctgggcaacatggtgaaaccccatttctgcaaaaaatacaaaaaattagccaggcatggtggcatgtacctgtaatcccagctactcgagaggctgaagtgggaggattgctttagcttgggagttcaaagctgcagtaagccatgattgtgccactctactccagcctgggcaacagagtgagaccccatctcaaaaaaatttattaagttaaaatctttaacaataa

SEQ ID NO: 220129 - DNA, 609 bp, Homo sapiens
aagtgacaaataatgtttagtttattattagaaccaactatgagttgtgacccttatcttctgcactgggaattacagatttttttcagggtttttctaacgtgaaaagagtttattggtgtaggaaaacatctggttccaaaatatagatcatccttmttgagccccatgatgcgttatcttaatttttaaagccttttttgtctcatactggagtttattgtaccccttaaaaatattaagtcacatatttaacctgaaaaaagcaaaaatcattataaaaatctttaggctgggtgtggtggcttatgcttgtaatcctcgcgctttgacaggccaaggtgggtggattgcttaaaacccaggagttgtagaccagcctgggcaacatggtgaaaccccatttctgcaaaaaatacaaaaaattagccaggcatggtggcatgtacctgtaatcccagctactcgagaggctgaagtgggaggattgctttagcttgggagttcaaagctgcagtaagccatgattgtgccactctactccagcctgggcaacagagtgagaccccatctcaaaaaaatttattaagttaaaatctttaacaataa

SEQ ID NO: 220130 - DNA, 609 bp, Homo sapiens
aagtgacaaataatgtttagtttattattagaaccaactatgagttgtgacccttatcttctgcactgggaattacagatttttttcagggtttttctaacgtgaaaagagtttattggtgtaggaaaacatctggttccaaaatatagatcatccttattgagccccatgatgcgttatcttaatttttaaagccttttttgtctcatactggagtttattgtaccccttaaaaatattaagtcacatatttaacctgaaaaaagcaaaaatcattataaaaatctttaggctgggtgtggtggcttatgcttgtaatcctmgcgctttgacaggccaaggtgggtggattgcttaaaacccaggagttgtagaccagcctgggcaacatggtgaaaccccatttctgcaaaaaatacaaaaaattagccaggcatggtggcatgtacctgtaatcccagctactcgagaggctgaagtgggaggattgctttagcttgggagttcaaagctgcagtaagccatgattgtgccactctactccagcctgggcaacagagtgagaccccatctcaaaaaaatttattaagttaaaatctttaacaataa

SEQ ID NO: 220131 - DNA, 609 bp, Homo sapiens
aagtgacaaataatgtttagtttattattagaaccaactatgagttgtgacccttatcttctgcactgggaattacagatttttttcagggtttttctaacgtgaaaagagtttattggtgtaggaaaacatctggttccaaaatatagatcatccttattgagccccatgatgcgttatcttaatttttaaagccttttttgtctcatactggagtttattgtaccccttaaaaatattaagtcacatatttaacctgaaaaaagcaaaaatcattataaaaatctttaggctgggtgtggtggcttatgcttgtaatcctcgcgctttgacaggccaaggtgggtggattgcttaaaacccaggagttgtagaccagcctgggcaacatggtgaaaccccatttctgcaaaaaatacaaaaaattagccaggcatggtggcatgtacctgtaatcccagctactcgagaggctgaagtgggaggattgctttagcttgggagttcaaagctrcagtaagccatgattgtgccactctactccagcctgggcaacagagtgagaccccatctcaaaaaaatttattaagttaaaatctttaacaataa

SEQ ID NO: 220132 - DNA, 405 bp, Homo sapiens
gattgttcatccttagcagatgccatgtaacctttttccaaagttgtttccatttrcattcctgtcacccatgtataagaatcctggctgttctacctctgcaccaacatttggtgttttctgtctttttcattttagccattctagtagatgtgtatcgtatgattattttatttattttttttgtataggtttagaaaagcttccaacaaagattttggattttctttgagaaatatggtgacaattatagaagacaagtactttagattgagctataggattcacatgaaaataattactgaagctgttaccattactcatttttgttttttttcctgacacggtagtttgggtagtttctggcaatatctttctgttgatatttaactacaattactttta

SEQ ID NO: 220133 - DNA, 392 bp, Homo sapiens
agcagatgccatgtaacctttttccaaagttgtttccatttacattccygtcacccatgtataagaatcctggctgttctacctctgcaccaacatttggtgttttctgtctttttcattttagccattctagtagatgtgtatcgtatgattattttatttattttttttgtataggtttagaaaagcttccaacaaagattttggattttctttgagaaatatggtgacaattatagaagacaagtactttagattgagctataggattcacatgaaaataattactgaagctgttaccattactcatttttgttttttttcctgacacggtagtttgggtagtttctggcaatatctttctgttgatatttaactacaattacttttag

SEQ ID NO: 220134 - DNA, 644 bp, Homo sapiens
ataattgcagtggatatttgttatagttttgcttttagggtctgaatactttccctaatttgtggaggaattatttattatcttggtgggaagcagaaaacaagtgaggtcagatrattcattttccttattccctagatctcatgacccacagccagccactcatatgctcccagtgggacttggactcttgccaagaccacgaacacttaaaaaattccaatttttggcagcatcattgaatttagagtccaacagcagaagcaaatgtcccagtggcccttcaccatcactttaacagactgatgttggctgtgttctcagcggtctagccataccatttctacctgatatccagtttccttttgattctgtacctcaaaaaaaattttcccaatgaattccttttctgcttaagtcagccagcctggttcctgttgtttgcaattgagaattccaactgacacaataataagaaagatgcaagtagttttgaaaaaaaaggaatccaagaatttaatctagttaagttgtctttcctatgaaaagccatcaaaaggacattctcaaatattcaagggttcaggaaaaataccaaacatatagctttcttaaaatgatttattaaaaatgcaacttaactg

SEQ ID NO: 220135 - DNA, 426 bp, Homo sapiens
tccctaacatgaggtttttccatggaaatgcagaaaacagtgtttggaacttacatttacacagtacatagtcttccatgttctctctgcatgcatatttaaccttcttgttttcccattaatgttgattatccttttcttctgtcatttatgtctttgcagggagctcattatttggccaataagaaacctgattttgttttgggatgaaaatacatataggcaaagggaggctaagctttggattmaaattggcatctgggcttcgttgtctcatctggagttctctagcatcttggctttctttgatttccttggaaatctgtcctatggtttagactgggcccagcagttgcaatggatcactgtgcaaacctttactagctgcaaatgccctcttaaaaatgtatttaaccacaaatttca

SEQ ID NO: 220136 - DNA, 426 bp, Homo sapiens
tccctaacatgaggtttttccatggaaatgcagaaaacagtgtttggaacttacatttacacagtacatagtcttccatgttctctctgcatgcatatttaaccttcttgttttcccattaatgttgattatccttttcttctgtcatttatgtctttgcagggagctcattatttggccaataagaaacctgattttgttttgggatgaaaatacatataggcaaagggaggctaagctttggattcaaattggcatctgggcttcgttgtctcatctggagttctctagcatcttggctttctttgatttccttggaaatctgtcctatggtttagactgggcccagcagttgcaatggatcactgtgcaaacctttactagctgcaaatrccctcttaaaaatgtatttaaccacaaatttca

SEQ ID NO: 220137 - DNA, 607 bp, Homo sapiens
gctctggccaaagtcatctaagcaataacatcctactctatatacctcaaagccctgtgttcattattaaggagttcttctttgcttcttgttctaaatatctgtgtaacattgctgaatttatgtcaacaattttttctacatctcattcagcagtacatgaagtgaaatgatccatgcattatacatatactatgtgcaattttgttcaatgcatatatttaaagttataccccttattgttaagtggataatctctttggaagtggaacagaatgctatttaagccatattagataatatgctgtgcatgaattcatcactgattttataaaatacacaaaatacatcacttcattgtcaaaacaatcataagggcctttaagtggtcctgaaaattacctgttctaatatgaataggaatgtactcaactaaatgagtcctgaaatatacttgacattagctcagctcaaagtcaggaaacagttctgcatttgttgattagatgcagatcatttaaaaatggtgctggacagcaacattataaatgagtaargatggagaaatatggaacgcatgtattgtagataaactgaaaacagtaaa

SEQ ID NO: 220138 - DNA, 423 bp, Homo sapiens
tctctgaaagctacttgcttatagtcacagaagttcaagaagataataaaatgcctcacaggagtttgcatgaattttcaggccaggcataattaagttcaaatctctgctttttcacttactagttgtgtgaccctgagaaaggattttcaraagttagtactccgtcaataaaacatgttaaaagtgatacttaccttatccattgatgtaaagaataaataacatagtgtttgtgacaatactctctcagcacttggctcagagtagacatttattgaattaacacaggtaaagtgtcttattaccgagaaaagtactgattaaatcaagaagaccttctatagatttaagttcttcagttgtaagttcttccatcataaatgtttatggattatgattttacatttcttctatttggta

SEQ ID NO: 220139 - DNA, 630 bp, Homo sapiens
taagtgaaatataaggttttaatggactgacataaatcattcacaactgtaaagaaaactgttcaaagcatccttctagtttttattgatggcttattcctattatctttttagtagaaaattgttttctcagaatgtccaggacaggagctgtttgaattaatcatgtttggtatttaaatatctcagctccaaaaagacacaatatcaaaaaataaacttgattctattcagccccagaatcttctttgtgcatttttaaaaaaaaagtaaaaataaaattttaaaattcattatatggattaaggaataacatttatcatatatgatttttcatagttaaagctctaaaagtgattattacctactaagatatagaaatgacagaatggttcctactgaggagtttcyagttagctcacaatcgcttcttggtcctccttgtgactgtacctcacattggtacttcacggttgaggctgctgtgatatcatctaccaattactggtaggtctacgatcacccccatgtgttacagcaaactataccaaaattatttaaatgaagggattttaaaaatgggtgattattaatatattgttttataacaattttcaaattgtgattaat

SEQ ID NO: 220140 - DNA, 630 bp, Homo sapiens
taagtgaaatataaggttttaatggactgacataaatcattcacaactgtaaagaaaactgttcaaagcatccttctagtttttattgatggcttattcctattatctttttagtagaaaattgttttctcagaatgtccaggacaggagctgtttgaattaatcatgtttggtatttaaatatctcagctccaaaaagacacaatatcaaaaaataaacttgattctattcagccccagaatcttctttgtgcatttttaaaaaaaaagtaaaaataaaattttaaaattcattatatggattaaggaataacatttatcatatatgatttttcatagttaaagctctaaaagtgattattacctactaagatatagaaatgacagaatggttcctactgaggagtttccagttagctcacaatcgcttcttggtcctccttgtgactgtacctcacattggtacttcacggttgaggctgctgtgatatcatctaccaattactggtaggtctacgatcacccccatgtgttacagcaaactataccaaaattatttaaatgaagggattttaaaaatggrtgattattaatatattgttttataacaattttcaaattgtgattaat

SEQ ID NO: 220141 - DNA, 416 bp, Homo sapiens
aaaaagcatagaacataaagcaaaagtacaaaaaggagattgataattgcaggtaattccatactaggggatggccaaatttaatgtagatgtgaatcatggtaggtccagttataatgtcttttatttgtctgtttgttttaactttcactgatatatcatgctttttcctctgatactttgaatgggctcttccttaatcctggaaaactttccagcctctgttgcaatagccaaccaccaactaaatttgagaaagttgcctgacctttgtccttctctcttcatatcatcatgttgtataataataacaatgcatttgctgttccaggctgtaaactccacaagagaaagacctgcttctgtctttaatttttaatatttctrctgcctaccagagtgccaggcatatagta

SEQ ID NO: 220142 - DNA, 250 bp, Homo sapiens
aatcctgtccctttctcacctgcatagctccagagatcaaagtcttttgtttctttttcagcacgtactgagtccgtgtctgataatgccactatctgagtcccctgtaggactgttttttktttttttttctgctagttttcattcatgttgggcagtcctttcatggaactgtttattattattattattattattattattattattattattattattatgccagactttgaatttgcaaaattac

SEQ ID NO: 220143 - DNA, 250 bp, Homo sapiens
aatcctgtccctttctcacctgcatagctccagagatcaaagtcttttgtttctttttcagcacgtactgagtccgtgtctgataatgccactatctgagtcccctgtaggactgttttttttttttttttctgctagttttcattcatgttgggcrgtcctttcatggaactgtttattattattattattattattattattattattattattattattatgccagactttgaatttgcaaaattac

SEQ ID NO: 220144 - DNA, 532 bp, Homo sapiens
gtatggaattgtctgaatgaccaggcaaagtttgctgcaggagtagagacctcatggagaacctctgctagtgttaccggtggagggtcttgacaacatgttgtccaggtccttggcattttgaacaaagaattgaacaaaatgcacaaagtaacaaaggagtgaaacacaggaatgaaacagcaaaaacaggaatttactaaagtgagaaagcactccacaggatgggaacgggcctgatcaagcagctcaagggcccagttacaaagttttctgggctttaagtactctgaggttcttgtcagcttccccctatctggatgaaggctttggtctgtggctaattaaaggctgagatgaatttcacctgtggccaatccaaggcactttccctttccatctgagacttggtggaaggggagggctgtagggagagtagccyttgatcctttgttactcaggtgtggggagatgggtttttccttttggtttaaccttaggaagtttgtgttaattggctttagattacctg

SEQ ID NO: 220145 - DNA, 573 bp, Homo sapiens
ctcttgcctcactagggcagtgcagaagggaaatgtggggtcagaacccccacacagaggccccactggggcactgccaagtggagctgtgagaagagggccactgtcctccagaccccagattggtagatccacagacagcttgcactgtgtgcctggaaaagccacagacgctmaacgccagccggtgaaagcagcggggagtggagctgtaccctgcaaagccacagggtggggctgcccaaagctgtaggagcccatctcttgcatcgacgtgacctggatgtgagacatggagtcaaaagggatattttggaactttaagatttaatgactgcccagacggattttggacttacatgggacttgtagcccctttgttttggctaatttctcccatttggaatggtaacatttacccaatgcctgtgtccccattgtatctaggaagtaactaacttgcttttgattttacaggctcctacatagaagggacttgccttgtctcagatgagactttgtacttggactttggggttaatgctggagtgaattaagactttgggggctgtt

SEQ ID NO: 220146 - DNA, 573 bp, Homo sapiens
ctcttgcctcactagggcagtgcagaagggaaatgtggggtcagaacccccacacagaggccccactggggcactgccaagtggagctgtgagaagagggccactgtcctccagaccccagattggtagatccacagacagcttgcactgtgtgcctggaaaagccacagacgctaaacgccagccrgtgaaagcagcggggagtggagctgtaccctgcaaagccacagggtggggctgcccaaagctgtaggagcccatctcttgcatcgacgtgacctggatgtgagacatggagtcaaaagggatattttggaactttaagatttaatgactgcccagacggattttggacttacatgggacttgtagcccctttgttttggctaatttctcccatttggaatggtaacatttacccaatgcctgtgtccccattgtatctaggaagtaactaacttgcttttgattttacaggctcctacatagaagggacttgccttgtctcagatgagactttgtacttggactttggggttaatgctggagtgaattaagactttgggggctgtt

SEQ ID NO: 220147 - DNA, 573 bp, Homo sapiens
ctcttgcctcactagggcagtgcagaagggaaatgtggggtcagaacccccacacagaggccccactggggcactgccaagtggagctgtgagaagagggccactgtcctccagaccccagattggtagatccacagacagcttgcactgtgtgcctggaaaagccacagacgctaaacgccagccggtgaaagcagcggggagtggagctgtaccctgcaaagccacagggtggrgctgcccaaagctgtaggagcccatctcttgcatcgacgtgacctggatgtgagacatggagtcaaaagggatattttggaactttaagatttaatgactgcccagacggattttggacttacatgggacttgtagcccctttgttttggctaatttctcccatttggaatggtaacatttacccaatgcctgtgtccccattgtatctaggaagtaactaacttgcttttgattttacaggctcctacatagaagggacttgccttgtctcagatgagactttgtacttggactttggggttaatgctggagtgaattaagactttgggggctgtt

SEQ ID NO: 220148 - DNA, 573 bp, Homo sapiens
ctcttgcctcactagggcagtgcagaagggaaatgtggggtcagaacccccacacagaggccccactggggcactgccaagtggagctgtgagaagagggccactgtcctccagaccccagattggtagatccacagacagcttgcactgtgtgcctggaaaagccacagacgctaaacgccagccggtgaaagcagcggggagtggagctgtaccctgcaaagccacagggtggggctgcccaaagctgtaggagcccatctcttgcatcracgtgacctggatgtgagacatggagtcaaaagggatattttggaactttaagatttaatgactgcccagacggattttggacttacatgggacttgtagcccctttgttttggctaatttctcccatttggaatggtaacatttacccaatgcctgtgtccccattgtatctaggaagtaactaacttgcttttgattttacaggctcctacatagaagggacttgccttgtctcagatgagactttgtacttggactttggggttaatgctggagtgaattaagactttgggggctgtt

SEQ ID NO: 220149 - DNA, 581 bp, Homo sapiens
tccccggccatgtggaactgtgagtaagttaaacttttttcctttataaaccacccactctcgggtagtatttttatagcagtgtgaaaatggactaatacaagaaagttcttctctatgaaattctcattattggagtgatttttttaaggcatactttcaagaagaactttatcaaaattatagtaagcctttatttaagttttctaaatttgtgtttattagaagcagagcagttaatatttcacattcaataatttacagtttatgaaaatttgagctatacaataaccatttgaggtaggagaagccgtggtagaaattgctacttgctttctctcgtttttccataatcattaattttttmagctggaacatggtcaaagtaaagatacgtttttctttgcagtgagtgtggctatggtactttgttctggtcagtgggatagatgttgaagcgtcatgtagcatttgcacagaaatctttaagaggttgttgatgtgtactctttgacacttcaatttttcatctactttgctgcttggaacatggataataccatcttaggccatgagcataa

SEQ ID NO: 220150 - DNA, 629 bp, Homo sapiens
tatgaaaaaagcctcaacattactaatcatcaaacaaaggcaaatcaaaaccaaaatgagatatcacctcactctagtgaggatgggtatgaccaaaaagataagagataacaagagtcggcaaggatgtggagaaaaggggacacttgcacactgttggtgggattgtaagttaatatagccattatgaaaacagaggttcctaaaaaaattaagaatagaactaccatatggttcagaaatcccactactggatatatatccaaaggaaatgaaatcagtatgtcaaataaatccatgtttatcacagcactattcccaacagacaagatatrtaatcaatctaaatgttcaacaatggatgaatgaataaagacaatgtagtagatatacacaatgcagtactattcagccataaaaaagaatgaaattctgtcatttatgacaacatggatgaacctggagaacattaaactatgtgaaattagccaggcacagaaagaaaataccacatgatttcattcatgtgaaattttaaaaagttgatctcatagaagtagtgaataggacagtggttaccaaagacaagggagacagggggagtaggtcagtgggtacaaagttacaat

SEQ ID NO: 220151 - DNA, 458 bp, Homo sapiens
gggggagtaggtcagtgggtacaaagttacaattagaaaggaagaatgagttctggtgttctattgcacagtagggtgactatagttaatartatactattgtatatctcagagtagctagtagagaggaatttcaatgctttcaccacaaagaactgataaatgtttgaagtgatggaaatgctaattaccctgatttgataattacacaatgtatacatgtatggaaacatcacattgtactccctaaagatgcataataattatgtgtcaatgagagaaaaaagaaaaactgtgtgtctgggaggtgcagggtggggttgggtagcaaattcctgtacatcaattcacagaacatgaggagtaagaggagatgacataatgtgatcctgtacattcattattcacatatcaagtattaattattgaatatacgttatatgacaggtatgtttcta

SEQ ID NO: 220152 - DNA, 570 bp, Homo sapiens
gcataaaatttcccaaaactcagaacagtttgtagcagattgacagtgttgtttaatatactagcaagaatactggagtccacatatttagcaattaaacagtatttgaccacgtgggacaaaatgtagagaattgttaatgcattaatgtttggtggtagaagaaatgagcactgtcaacaattctggtaagctaatcacgagggagaagtttccacatcccttatattaagctgcagatacatcagggtaaaaaagacagaaaagtgctggaaaaaatatgaacctaaaaagcaaagggtaaagtttgagtgtcyagagggactgagggcccaactgagtggagatgatatgggaagatgaatccacctaaggttgaccaagaagtccatctgagaagataataatgaagtaacagggcttgggcaagggtagaaaaagaaacaaaaaaaattgaagatagaaggagaagaaatgtttaaaaaatgtttagcaaaaagcatagttaagagagtaagcaaagtgtagaacgctttccagaaatgtaagaaaatgaggctggcatagtgg

SEQ ID NO: 220153 - DNA, 576 bp, Homo sapiens
agtaaaattttgtctgattataaatctcatattttacattttttaaaatcacatttttgaaaacaatagaggcttaagttaatttcagatgtgtagggaatagtctggtggtttatttatgcaatcaatggtgtcatctagtggcaattcattcaaatttcaatcaaatcccccagagggctatgctaaagtcattagagagtatgactaacttctccaacttaaatgactgtcaaattatagtcatcacttttttgcaataattacattcagaggaagttacaaagatagtacaacgaggcctgtgcacccttcatctaattttccttcatctaactttcccctgtgcacccttcatctaatgtactatagttacttttaatgtaactgatagttatataacyatagtacattatcaaaaccaggaaattaacattggaacaatgtgtctatagttccatgtctttttatcatacatgtagattttgcataaccaccgtcacaatcaagatacataaatatttcataatcccaaatacagtcagccctctacaactatgggttctgcattcatgg

SEQ ID NO: 220154 - DNA, 503 bp, Homo sapiens
gtgcctctcacagtttcactggactataggattcaggagcaattgtgagtctcaggggagaaagcttaaagaaagaacacaccagatagaaacaccaactgttaatctttagttcatcccattaaatgtaccaccgcttagcaccaagacccattaaatccttatacttgaccaaccatatgagaaatcccctttcttcaagggtaaattgggggtcagaagaggtaaagccccttagaaattctcaaatatgagagatccaagtagaagagtaaataagatttacagaagagttgatggtcaaggaaaccaattggtaatcaaattagaataggcacatgaacacataaccaaagcttatagcttacaagaygacttagcatcagaattaaagaaaccatttggagtcagtgtattcacaaagtataaaggtgagtacaaaaccagacaaccagagaaaatgaagaaaccacattccagaagttcagaaaaatgcccaaggt

SEQ ID NO: 220155 - DNA, 605 bp, Homo sapiens
aaaatgctgattgactgccatgctacaattatgttcatttaacactttcatgctcatggacgtgtggactgcagtattagaactggttaaagagttaacaattaaaaggaacaggcaggagcttgggaggacagagtaagactaaaataaaaaattaatgaggaaaggaagagtggctgatttagtaatggatcagctgttttgtygcctaggagataaagtgagagtgaagaaattggacctgtacatagaaacatcaggatggcaaacaaaaagttcagtcaattttccttcactccctggtgtctgaagagcatttggaagagtggctgaaggcttcatctttctcctgtggtcatggttaggcctctcagacccttgactcccagtaagtccagggcctgaaaaaacagtgatttactagcaccagatgaccatagctgctaacagatcaagattttgttgtatcctgtggtatttccaacatatggacaatggtattaggagcatcagtaaaagatatgtaatgagacatgtgcttgtctgggtgttttgcacatctgaatatttatcactgcatgtgtggccatgctggacacagatct

SEQ ID NO: 220156 - DNA, 547 bp, Homo sapiens
ctgggtaactgaagccttaattatattaaataaatcagtggttggattgttggtggtgaaaactgttagtgtctttggccctacacttgaagaatgttttttatttttcttttagagtaacagctcasagacatatataattcacttcttataggacgataacaaaaacatatagccacctattcatgaaggcaaatatgaaggaaaaagccattcccctcatctgtacttagataacttacactttctgttttttctttttttaaaatcaaattgtaaaaaaaatttcataaagcatagggaaaataaggttagcattttattgaatatttgaaacaaggacttccatcaagaaggcgtcccttatccctgtatgatttcttagcttaacaaccttaatgaattttaatgaattttaattttgtggaaaattcaagctccctcttccactccttccatgatctccatggtcatctagaggatgtcagcacattgaggaacatcttgtactttattactgaagaggaagatgatttaaaaattacac

SEQ ID NO: 220157 - DNA, 257 bp, Homo sapiens
aactttatagggtaactggaaataaagaactttcaacataggatcctggccagcttggctgggagcccctccactgagcataacactgggctgtaggtagcctaccataaagagattggcttctgtagatgactatgctattccaatggctgtggcttttatcagggttgggggctttgcatggctttctaaaytttaagatgtgattcacaaaggctaatttctaataaaaaccggtgaccctctgccgtcattgt

SEQ ID NO: 220158 - DNA, 596 bp, Homo sapiens
gctttattatactttgcctaattatttgtataaagtgcagcaagaataattatttgccatgtaagctttttaaattggttttggtgtggaactctgttccataaggaatctcaaataagactttttttttaaagctgagcccagccttgggtttgtaccctcaaatatctgagttgagyaaattcttctcctcttgaggttccaagacaacttggggcttctgggcctgatagaaagtggcattatttacttactacaggtcagaaaccttatacacagactgtgtggacaaggtatgaggcatttcccaaggggcttttattggctttacaagtcaagtttgatttcttaaaggaaaacacaccattccagtcaaagccttggtaaaatacccagtttttccaattgtgtcctgttacaaaaaaaaaaaaaaaatactgcacttatgcaaataactatattgctataagttaatacaaatagttcccaaattctagtgaaattgggtagggagaaacaaatatgctccaaaatttgtttacaggagtatacttaattgctacaagctgtaaatagtttaaaagttttcttaactc

SEQ ID NO: 220159 - DNA, 607 bp, Homo sapiens
  misc_feature (1)...(607): n = A,T,C or G
aagagactttactgagaggggcttctaatcccctaaatcttagaagggactctaacccttctaagttgggcctctaatccaaggtcggtcaagcgtccttgccttttagtaaggggcctttaacccaccctgtcgtaggagagactctgactcccctaaattgggcctctaacccaatcccatcctttacctgagtacctcaccacttacccaaagttnnnnnnnnnnnnnnnnnnnnnnnnnnnnnnnnnnnnnnnnnnnnnnnnnnnnnnnnnnnnnnnnnnnnnnnnnnnnnnnnnnnnnnnnnnnnnnnnnnnntagcctttggattggggttttccatactatagtggcttctgtgatctccagaaagatgttacaggacagaggtccctcgttctctatcttttggaatagtgtcaataggattggtatcaattcttctttgaakgtctgatagaattcagctgtgaatctgtctggtcctagactcctaggcattttttttggttagcaattttttttaaattaccatttcaatcttgttgcttgttattggtgtgttcagagtttctatatcttcctggtttaatctaggaggcttgta

SEQ ID NO: 220160 - DNA, 607 bp, Homo sapiens
  misc_feature (1)...(607): n = A,T,C or G
aagagactttactgagaggggcttctaatcccctaaatcttagaagggactctaacccttctaagttgggcctctaatccaaggtcggtcaagcgtccttgccttttagtaaggggcctttaacccaccctgtcgtaggagagactctgactcccctaaattgggcctctaacccaatcccatcctttacctgagtacctcaccacttacccaaagttnnnnnnnnnnnnnnnnnnnnnnnnnnnnnnnnnnnnnnnnnnnnnnnnnnnnnnnnnnnnnnnnnnnnnnnnnnnnnnnnnnnnnnnnnnnnnnnnnnnntagcctttggattggggttttccatactatagtggcttctgtgatctccagaaagatgttacaggacagaggtccctcgttctctatcttttggaatagtgtcaataggattggtatcaattcttctttgaaggtctgatagaattcagctgtgaatctgtctggtcctagactcctaggcattttttttggttagcaatttttttwaaattaccatttcaatcttgttgcttgttattggtgtgttcagagtttctatatcttcctggtttaatctaggaggcttgta

SEQ ID NO: 220161 - DNA, 484 bp, Homo sapiens
ccagcaatcccattactgggtatatacccaaaagattataaatcatgctgctataaaggtggcagagctttttaattacagcatattcaatggagtgccccttcttacaattcaccacagttattccaacatgcttaaaaagattgccatttatggcactttaagatatttattaaaaataaagactaatgtaaaggagctcaaaagtgctccagcttgatggctgtcatctttcatgaaataactaaacgttctgggtgagattctcakgctcatcaggaagcccttcagtaagagtcatcggaaaacagagcatccataattggataaacataaaataatccaatggcccactggagagtttacagaaccacttaaggggctgacccaaagacaatgtcactgggttgagaatttaagcaagtcaagtcattttgtgactaggctcagtatttaacagggtgaatttacattttcttcatca

SEQ ID NO: 220162 - DNA, 642 bp, Homo sapiens
ctctaattttctgttttctccaaaatgaattaataacttctctagtagaacagtagggatagaaattgaaaagtaaagtaattcctagaagattatcactaatgagtatgactcttttgctttacaacacatctgtacaaaatgaattccccgggaacaaacagattttcagaagcacaaagacatratgacatagccaggtaggtgcatatatcattcccactttgcaactagaaaagttaaagaatagctgagctcaagtcttggacatcatgaaattctccattaatcttgctgtggtatcctcacacccctaatttagcataatccatatacatcctcacttttgtccctccagtcccagaaacagaagttccctacacatggattcttatgctgtttcttcctgtctctatcctaattgctaattatttcaccttttcaacattggctgtaaaatgagatcactttttcattttaaacaattctgctacctgggtccctcctccagacattctgacttcattgttccaaggtatggcctggggtttaggattctattgcacagccaaggcagagagtaatgcaggatctattcccctagcccagaagtcacaaactcacagcttgtgtgccaaagtg

SEQ ID NO: 220163 - DNA, 573 bp, Homo sapiens
tctgctacttgggagttccggtttgttcctttgtgctgtaacaacatgatgtgaccttctgtatgggatgtactttttacttcttaaagagaactgctggggttgtggaggaaataggggcagaatttgatttgaaggattattagsggagtcagttcttgtggctatagactgaaataacagtgatgctcagaaggaggagggtgattttgagaggtgaagccaactggacttcctgggtcgagtgggaacttggagaacttttctgtcttacaagagaattgtaaaatgcaccaatcagcactctgtagctaggattgtaaaatgcaccaatcaacacactgtaggtagctagaggtttgtaaaatgcaccaatcagcactctgtaagatggaccagtaagcactctgtaaaatggaccaactagcacactgtaaaatggaccaatcagtgctctgtaaaatggaccaatcagcaggacatgggcaggggacaattaagggaataaaagctggccaccccagccatcagcggcaacccgctgaggtccccttccacactgtggaagctttg

SEQ ID NO: 220164 - DNA, 426 bp, Homo sapiens
ggtgttaaatatacttattccaaagaaagctagacccctattcatctatattttaaaaattcaaaatgaattaaaagcttcaaggtgtgtgaaaaaactacaaaactcttggggaaaaataggtataaatcttgatgacaccagattagccaatggtttcttagctatgacatgaaaagcataagtaacaaaagaaaaatttagktaagttgaatttcatcaaaactgaaagtttttgtgcttcaaaggacactatcaaaaaagagaaaaaaaccctaagaatgggataaaatatttgcaaataagtgtctaatatccaacatgtataaatacctattccaacacaacaatgaaaagaaaaataaccaaattttaaaattagcaaataaattgaataggtatctcccccaagaacatgtacaacta

SEQ ID NO: 220165 - DNA, 368 bp, Homo sapiens
catggtgaaaccccgtctctaccaaaaaatacaaaaattagccaggcatgatgatgcgcacctgaggtcccagctacatgggaggctgaggcacgagaattgcttgaatcctggaggcaggggttagcgtgagccaagatcgtatcattgcactcaagtctaagcaacagaaggagaccctatctcaaaaaataaagcattcttcaaacagtracaaagtaaaacaatcataaaaaatagcctggaactaaaagtataaacacaaaagttagtttctttcagctacaacaaaaactatctgatgctaataacctttgatgaatatgtaagagaaagttcacacatgaagaattaacttatatggaaat

SEQ ID NO: 220166 - DNA, 366 bp, Homo sapiens
caagggtcttaggaaatatcattcatttatgacacagaaacactaggaggatcctcattgtagactagcatgtatttctygcatgtccagttcttttaggccgctttaagaccaccgtaaacctagtgatacttacaggatcaacataggagggaaacaccagaaattattcccgatatctaagtcacagcatactggcctgttattaatctaagaggtttcctatctgagaactgaaaaaaaaatggagtgtaatttacatatcaaaccaggtcttaggtttcagaacaaagaaaatcacttgaggttggaaatatgtaaatgctaaatttcagggcacagcatcacgggctgtttctgtctcca

SEQ ID NO: 220167 - DNA, 366 bp, Homo sapiens
caagggtcttaggaaatatcattcatttatgacacagaaacactaggaggatcctcattgtagactagcatgtatttcttgcatgtccagttcttttaggccgctttaagaccaccgtaaacctagtgatacttacaggatcaacataggagggaaacaccagaaattattcccgatatctaagtcacagcatactggcctgttattaatctaagaggtttcctatctgagaactgaaaaaaaaatggagtgtaatttacatatcaaaccaggtcttaggtttcagaacaaagaaaatcacttgaggttggaaatatgtaaatgstaaatttcagggcacagcatcacgggctgtttctgtctcca

SEQ ID NO: 220168 - DNA, 455 bp, Homo sapiens
tagaccactagctagattaattaaaaaaagagagacgatgcaaataaacacaacaagaaatgataaaggggacattaccactggccccacagaaatacaaaaccccttacaaactagaaaacctagatgaaatggataaattcctagaaacacacaatgtcctgagattgaaccaggaagaaattcaatccctgaacatatgaataacaggttctgaaatcaaatcagtaataaaaagcttaccaaccgaaaaagacccaggaccaaatgcattcatagccaaattctaaacaatgtataaataagaattggtaccatttccactgraactattccaaaaaattgaggaggaaaaacaaagtcaacaaaaacaagcaacaggggaaagagtccttattcaataaatggcgctggggtaactggctaatcatatgcagaagatggaaactgaatcc

SEQ ID NO: 220169 - DNA, 596 bp, Homo sapiens
agcagagaattcaagttaagccacatctggatgtctaacacacagaattgtgagttagtaaataaatgttattttaagaaaaagaaagggaaacagaaagtagtgaagacatagcaagagaaactattcacaatgaaaaccagaagaaatactcaaagaaatgaacagagtaacactttgaacaggagctgtagggcaactccaagaggcctaatatatgtgtaattggagtccctgaagaggaagaattaggactgaaaatatttcaagaaacaatgggcaaaacaccctaaatttgatgaaaaccatataaaacagatccaaaaatctcaacaaacttcaagcacaaaaacatgaagaaaacaacatcaaggcatattgtaaacaaactgttcaaaacccatgaaaaagagaacatctttaaggcagccagagaaaaccgacacaytatgtacaaagacccaaagataagaacagtagattttccactagaaaccattcaagctagaaattactaaaacagcatctttaaatatttaaagaaaaaaaatgccagcttggattctgaacaaagcaaaaatatttatcaaaagtat

SEQ ID NO: 220170 - DNA, 596 bp, Homo sapiens
gtgctttgttaaacagatgcttgaaggcagcatgctygttaagagtcatcaccaatccctaatctcaagtaatcagggacacaaacattgcggaaggccgcagggtcctctgcctaggaaaaccagagacctttgttcacttgtttatctgctgaccttccctccactattgtcccatgaccctgccaaatccccctctgtgagaaacacccaagaattatcaataaaaaaataaatttaaaaaaaaaaaaaatgactagtcaatgtcagaatgttaagacctgatccacggtggttcatgcctgtaatcccagcactttgggaggccaaagctggtgatcacttgaggccaagagttcaagaccagcctggccaacatggtgaaagcccatctctactaaaaatatgaaaaattagctgggtgtggtggctggtgcctgtaatcccagctacttgggaggctgaggcaggagaatcgcttgaacccaggaggcagaggttgcagtgagccaagactgcaccactgcactccagcctgggccacagagcaagattccatctcaaaaaaaaaaaaaaaagaaaagaaaagaaaaaaa

SEQ ID NO: 220171 - DNA, 596 bp, Homo sapiens
gtgctttgttaaacagatgcttgaaggcagcatgctcgttaagagtcatcaccaatccctaatctcaagtaatcagggacacaaacattgcggaaggccgcagggtcctctgcctaggaaaaccagagacctttgttcacttgtttatctgctgaccttccctccactattgtcccatgaccctgccaaatccccctctgtgagaaacacccaagaattatcaataaaaaaataaatttaaaaaaaaaaaaaatgactagtcaatgtcagaatgttaagacctgatccacggtggwtcatgcctgtaatcccagcactttgggaggccaaagctggtgatcacttgaggccaagagttcaagaccagcctggccaacatggtgaaagcccatctctactaaaaatatgaaaaattagctgggtgtggtggctggtgcctgtaatcccagctacttgggaggctgaggcaggagaatcgcttgaacccaggaggcagaggttgcagtgagccaagactgcaccactgcactccagcctgggccacagagcaagattccatctcaaaaaaaaaaaaaaaagaaaagaaaagaaaaaaa

SEQ ID NO: 220172 - DNA, 596 bp, Homo sapiens
gtgctttgttaaacagatgcttgaaggcagcatgctcgttaagagtcatcaccaatccctaatctcaagtaatcagggacacaaacattgcggaaggccgcagggtcctctgcctaggaaaaccagagacctttgttcacttgtttatctgctgaccttccctccactattgtcccatgaccctgccaaatccccctctgtgagaaacacccaagaattatcaataaaaaaataaatttaaaaaaaaaaaaaatgactagtcaatgtcagaatgttaagacctgatccacggtggttcatgcctgtaatcccagcactttgggaggccaaagctggtgatcacttgaggccaagagttcaagaccagcctggccaacatggtgaaagcccatctctactaaaaatatgaaaaattagctgggtgtggtggctggtgcctgtaatcccagctacttgggaggctgaggcargagaatcgcttgaacccaggaggcagaggttgcagtgagccaagactgcaccactgcactccagcctgggccacagagcaagattccatctcaaaaaaaaaaaaaaaagaaaagaaaagaaaaaaa

SEQ ID NO: 220173 - DNA, 538 bp, Homo sapiens
atgttattctttctaaaaattaatttcctaaaccatgtagtttaatgtgatttaatgtagttaaatactagcattaaaacttgtttcttgaagggcgcagtggctcacacctgtaatcccagcattttgggaggctgaggagggcagatcgcctgaagtcaggagttcgagaccagcctggctaacatggcgaaaacccatctttagttaaaatacaaaaattagctgggtttggtggtgcatgcctgtaatcccagctgctcgggaggctgaggcacragaattgcttgagcccgggagatggaggttgtagtgagccgatatcgcaccactgcactccagcctgggctacagagactctgtcaaaaaaaaaagaaaagaaaagaaaagcagaaacttgtttcttgatgaagtttgttttcctgggatcacacacagatctcccacggtggtccttcttgttctttctccttctgcaaagaccctggaaaccgcttgttgaagatggcggggccacagaatgaaaggagccttggtc

SEQ ID NO: 220174 - DNA, 438 bp, Homo sapiens
acaatggaatatttattcagccatagaaagaataaagttctgacacatgctgcaaaatgaatgaaccttgaaaacatgctagatgaaataagccaggcatgaagacttattacatactagtaagtacatattacacaattaataataaacttgtctatgaagcttgaaatcttaaaaagagtaattttttatgatccttgaatttaggcacctcgtctttgggtccaaactaattttgctgggagatcaaaatttttatgatcggtttgtttaaaaaaataccagcccattcaaatggcagattttrtctgcactttcaagcggctactaatttaatgattgttgctatgctcagtctacttaaatagaaacacaggtagtctaaaaatgttttttactctgtgatgaccagggcagcacctaccagaagcgattaaa

SEQ ID NO: 220175 - DNA, 522 bp, Homo sapiens
caaaaaaggatatagatgaataaataaaatagaactacacatataacccacaccccttcagcattactaagagtcagagaacactaaaaatttccattatctgtaagaggagaaaaaattaaattctagcttttgtctggacctcttgcctcaagactgtgtaaaagagaggacagaagctgggcctaagagctgagcccacctaccagcccatttcccactctggaagtgaggaggcctcccygctggaggtgtctgcagatgctgggtctgagaacaaagtctggctactgcccaccctggcagtaacagtaactagatttacctagaaacaggggtctcaaagcataacaccaatatgtgtaggctacaatggaaaataacccttcataccaagatccaggaaattctcaaaagagaaaagacagtcaacagatgccaatattgagatgacacacatattggaattatctgacaaggacttgataagattttaaagtaactatcataaaaatgcactgg

SEQ ID NO: 220176 - DNA, 494 bp, Homo sapiens
gaattcctaagttacatttttagccctccttccgaaatacagcctccyccaggtgatctcattcaatgcccaggttttcatcaatcccttaaatactgacgaatccaaaatctgtattgtcttttgcttttggaaaataccgccactgaggaacaacaagttccaagttctactcactttatttcctaacactcaaagttttttctcccttaacgattcctattattgcaatttagtaatagtccatgccttcatcaacttccctaaacctattatgatagcaaaatacatctacctacagtcaaactttccctacttcaaaccttccatatttgtgttatttgtctgttacagataattttatctgtataaaacaaatatcatttctcgatttaaaaaatctacaatgactctgcagtcattacaagataaacttaaaactctttaatatagaatcaaaaactcatataaaaaattagcagggagtggtggca

SEQ ID NO: 220177 - DNA, 628 bp, Homo sapiens
tattggcattttgggctggataactctttgttatggtaggatgtttagcagtatttattcctggctttggccccctacatgccagcagcaccctcctcctgagtggtgacgatcaaaaattttctagacattgccacatatcccctgggggacaaaaattctcccagttgagaatcatttctctattcaaatatgtttatggtggttaaatctgggtgacagtattataggtaatttttctttcttcccctatttatttctagttaytctacaatgaataggtatacatatatcttaatatatgtcttctataataaaaataaaagctattgttaaaatacccataaccatagcactatttattttaaaaattataggtacatgcttttgagcaaaatctttgaaaaatatctgtagataggtttatggaagacacaatgtggggaattaaaaaggaaaagttcttctaagataatttagcaaaaattaatctgcaagatgtgggggtggtaatgtgtgggccagaaataacttgattaatgacccaggggtacccatccatgacaaccaatcctctgtttaatgttctcattagatttaccaagctggcggtcttgtgctctgggct

SEQ ID NO: 220178 - DNA, 551 bp, Homo sapiens
ctattggcattttgggctggataactctttgttatggtaggatgtttagcagtatttattcctggctttggccccctacatgccagcagcaccctcctcctgagtggtgacgatcaaaaattttctagacattgccacatatcccctgggggacaaaaattctcccagttgagaatcatttctctattcaaatatgtttatggtggttaaatctgggtgacagtattataggtaatttttctttcttcccctatttatttctagttattctacaatgaatakgtatacatatatcttaatatatgtcttctataataaaaataaaagctattgttaaaatacccataaccatagcactatttattttaaaaattataggtacatgcttttgagcaaaatctttgaaaaatatctgtagataggtttatggaagacacaatgtggggaattaaaaaggaaaagttcttctaagataatttagcaaaaattaatctgcaagatgtgggggtggtaatgtgtgggccagaaataacttgattaatgacccaggg

SEQ ID NO: 220179 - DNA, 551 bp, Homo sapiens
ctattggcattttgggctggataactctttgttatggtaggatgtttagcagtatttattcctggctttggccccctacatgccagcagcaccctcctcctgagtggtgacgatcaaaaattttctagacattgccacatatcccctgggggacaaaaattctcccagttgagaatcatttctctattcaaatatgtttatggtggttaaatctgggtgacagtattataggtaatttttctttcttcccctatttatttctagttattctacaatgaataggtatacatatatcttaatatatrtcttctataataaaaataaaagctattgttaaaatacccataaccatagcactatttattttaaaaattataggtacatgcttttgagcaaaatctttgaaaaatatctgtagataggtttatggaagacacaatgtggggaattaaaaaggaaaagttcttctaagataatttagcaaaaattaatctgcaagatgtgggggtggtaatgtgtgggccagaaataacttgattaatgacccaggg

SEQ ID NO: 220180 - DNA, 460 bp, Homo sapiens
atgattgaatttatctgtgggaccttgtataatctggtggttaaatagaacatcttttcaaagctaaggaaaatgttctgttagtcagctaatccagaaagcktttttttttttttttttttttttttgagacagagcctcagagcctcactctgtcacccaggctggagtgtagtggcacagtctcagcttgccgcaatcttggtctcccgggttcaagtgactctcctgtctcagcctcccgagtagctgggattataggcatgcattaccacatccagctaatttttgcatttttagtagagatggggtttcacactgttggccaggctggtcttgaacttctgacctcaagtgatccaactgcctcggccacccaaagtgctgggattacaggcgtgagccaccatgcccagcccagaaactgttttttaattcaccagctatttaactttaaatt

SEQ ID NO: 220181 - DNA, 355 bp, Homo sapiens
ttctgtttccttagtcacatgcataaacagtagatggttaatacaatcaaaactgtttgtaagatttctgtgacttgaaaagttggtgataaatgacaacaacatgacttgataagtggaaaatcagagatgtgattagaatgatctagaacagagaccaggcgacttttatcctaaaggtctggacagtaaatatttcaggcatcgcaggccatatgatctttgttgcactactccactcttgctgtattgcgaaagcaatctaaggtaactgtgtaaacaaatgagtgtggcttgtgycccaataaaactttatttatgaatagacatcaacatttcaatttcctttactttt

SEQ ID NO: 220182 - DNA, 518 bp, Homo sapiens
tataatgtggacagtatattttggaagcatatattttactgttattctttggctacagtgaaatttttacatattgtgtgatcaattcttctagtaattatctgtgtaggtttttagtctactatgtacacgaggtcagtttgacggattgtttgaagaacagtttgtcatttttttcttggaagaaaaattactttgacgttctcatagcatataaaaatctaagtatcaatgattctagggaaaatacaygaggctggagtgcatacagaaatctgcatttttgataattatagtgatgatgataatattgactagattggtcatactgattttccttttctttattaaaaacacaacccccatagcaaatagggaggtggcaatattttcagcccttttcaggtgggagagactgaagtgtagagttcaggtaacatgtgataagccagtgaaagggacaggggaggcagtttgggaaaggtgatgggttacaagtggcagcctagggaacagct

SEQ ID NO: 220183 - DNA, 516 bp, Homo sapiens
aaaaaaaaaaaaaacccctccattcccaataatttaataaatggctcttgccttaayaattttgagaaatgttctttctaatagtttgattttatgtttatgaaaaaaattaaaaactacccgaggagaagaccagaaacttactatctttttaatagcaagtaaagatcacagtaaaaactttttgaatttttttttaaaaaacaaatgcttagttaagctcattgcaaatacgctgacaagatttcagagtaataaacatctttaacagaaatccacttaaaaatgaatgttatattttgtacactgcatctggggaaaaaatactacagcttttagacctgcagtttcttcctttggattgacgttatctttctgatggcagaggcagaaaatgtttcagttttggatcatcctgttgtcaataaatcaaactattattcaggggcagacctgtcatgagaaaagtaggtcacgtcttgatatcagcccatctctaaatctctccaggacaca

SEQ ID NO: 220184 - DNA, 516 bp, Homo sapiens
aaaaaaaaaaaaaacccctccattcccaataatttaataaatggctcttgccttaacaattttgagaaatgttctttctaatagtttgattttatgtttatgaaaaaaattaaaaactacccgaggagaagaccagaaacttactatctttttaatagcaagtaaagatcacagtaaaaactttttgaatttttttttaaaaaacaaatgcttagttaagctcattgcaaatacgctgacaagatttcagagtaataaacatctttaacagaaatccacttaaaaatgaatgttatattttgtacactgcatctggggaaaaaatactacagcttttagacctgcagkttcttcctttggattgacgttatctttctgatggcagaggcagaaaatgtttcagttttggatcatcctgttgtcaataaatcaaactattattcaggggcagacctgtcatgagaaaagtaggtcacgtcttgatatcagcccatctctaaatctctccaggacaca

SEQ ID NO: 220185 - DNA, 576 bp, Homo sapiens
tattgatgagaaacatcagttcgacactcatctgattcagtcattcaactcatatttattgggtaygcttatgggttgaattgtgttcctctcttgcaaaaacaaataaataaaaataaaatatatattaaagtcttaacctctgagtacttcagaatgtgacctatttggaaatagagttgttgcagatacagttaacatgagatcatactgaagtcaggtgggctcctgattcagtataacagatatccttataagaagacagccatgggaagacacagagacacaaggagaatgccatgtgaagacgaaggactggagtgatgcacctacaagccaagaaatgactgggaccaccaggagttggaagaagcaaggaaggaggcttctctagtcttcagaaggagtgtggtgctgccaacaccttgattttgacttctagcttccaaaactgtgagagaataaattgtgttttttaaagcaaaccggtggtactttgccatggcagcccttgaatactaacacagtgcctaccatgtggatatcttatggtgaatagacaggtaagttcctgcc

SEQ ID NO: 220186 - DNA, 576 bp, Homo sapiens
tattgatgagaaacatcagttcgacactcatctgattcagtcattcaactcatatttattgggtatgcttatgggttgaattgtgttcctctcttgcaaaaacaaataaataaaaataaaatatatattaaagtcttaacctctgagtacttcagaatgtgacctatttggaaatagagttgttgcagatacagttaacatgagatcatactgaagtcaggtgggctcctgattcagtataacagatatccttataagaagacagccatgggaagacacagaracacaaggagaatgccatgtgaagacgaaggactggagtgatgcacctacaagccaagaaatgactgggaccaccaggagttggaagaagcaaggaaggaggcttctctagtcttcagaaggagtgtggtgctgccaacaccttgattttgacttctagcttccaaaactgtgagagaataaattgtgttttttaaagcaaaccggtggtactttgccatggcagcccttgaatactaacacagtgcctaccatgtggatatcttatggtgaatagacaggtaagttcctgcc

SEQ ID NO: 220187 - DNA, 496 bp, Homo sapiens
cacaaacacaactgtagttagakttagtactttggtggtggtggcttacttttatggaacatgtatgcttttgtttctgttttttttgtgtgtgtgtgtatatttttctcttcagtgaaaggaaggacaatattctttttctgacctaatgtgatgttgtttgaggataaaattgtgtccctttggtcagaacccctgtagcctgtttccagaggaggtcataaagccctttacttaggccttactacaaaggttagtagtcaggaatgtcactttgttgtctattagatggggtggagaatgaggatatgtagctctcatcaatcagagtaggtatattgatacttcaggtgccaatcaaaggtcaaacttgtgttactacaacccagtatctaccaaaaccacaggcaaaatgctgatacattaaagataaagtcattgctttgttttatgttgtttgttgtcaatatgttaatatgacaatatgcagttgtcc

SEQ ID NO: 220188 - DNA, 591 bp, Homo sapiens
taaaaactacaatgagatgtcatctcgccacagtgaaaataacttttaataatgaatgctggtgagcatgtggagaaaagggaaccctcctacactgttggtgggaatgtcaatgagtacaaycactatggaggacagtatggaggttcctcaaaaaactaaaagtagacctaccatatgatccagcaatcttactcctaggtatatctcaccaagaaaggaagtcagtatataaaagagatatctgcactattatgtttattgcagtactattaacaatagccaagatttggaagcaacctaaatgtccatcaacagatgaatgaataaagaaaatgtggcacatatacacaatgcagtactattcagccatataaaagaatgagattctgtcatttgcaacaacatggatggaactggagggcattatgttaagtgaaataagccaggcacagaaagacaaactttgcatgttctcacttgtttgtgggagctaaaaatgaaaacaattgaacttttatggaggcagagagtataatgatggttaccagaggctgggaagggtagttgtgagggagggggttgtcaagt

SEQ ID NO: 220189 - DNA, 556 bp, Homo sapiens
aaaataattttccttattgtcaattttctacaaattacagagttgtcaratagcttagacaatgaaaatgtttgaagataacccagggggagtgttagactgaacacagaagaatccttttcctgccccttcaaaaatctttcatgcctgatgcccctccaggaaaattttatcaacttacatcttactcccacaatgtgtaaggaatagaatcctctttttaagacacaagtcagatcatggaattcctattcttacaactattccatggccctcctctgccttcctgatacatgtctcataccctaacaggcttacaatgtcccccaggatctggcccttgcgtactagtacagcctcttcttctctggtcactctgaaatactgtcattctggaatgctccatgcagttttatgcttctaggtttttgcttaccaacctttctctgcctggaatgatttttccagcctggtctgtcccaataagtgtatttctcacattttttcctcacttggttattgcttgggggaatcattcttgatgccactactgtgg

SEQ ID NO: 220190 - DNA, 556 bp, Homo sapiens
aaaataattttccttattgtcaattttctacaaattacagagttgtcagatagcttagacaatgaaaatgtttgaagataacccagggggagtgttagactgaacacagaagaatccttttcctgccccttcaaaaatctttcatgcctgatgcccctccaggaaaattttatcaacttacatcttactcccacaatgtgtaaggaatagaatcctctttttaagacacaagtcagatcatggaattcctattcttacaactattccatggccctcctctgccttcctgatacatgtctcataccctaacaggcttacaatgtcccccaggatctggcccttgcgtactagtacagcctcttcttctctggtcactctgaaatactgtcattctggaatgctccatgcagttttatgcttctaggyttttgcttaccaacctttctctgcctggaatgatttttccagcctggtctgtcccaataagtgtatttctcacattttttcctcacttggttattgcttgggggaatcattcttgatgccactactgtgg

SEQ ID NO: 220191 - DNA, 517 bp, Homo sapiens
cgcacatgccactaaatggacccccgagatgacatttcagatcctggatcaggccccattgtatatagctctcctcttcctctctcccattcttctgttcctttcctcttttgtcttccacctctctctctatttcattacccccacagacttatatttgggatccccagagcattgcatcagttatccagtagacatctattatgtatcagacataatgctggatcactgttatcttggatggtcagaggaaaaaactttctaaggcaggcgaaacttgaacaataataagctaagatagtcttattgaagtttcttgaagcaaaacaaacaaatgttgctgaggtctggactaattcctccgggacttattgttcctccttcttttacattctttctagtccaaagtgaaatattagatttgtagaayagattttgattatatttagaattttctcaatataataaatatagaataaatagttatgaacattctttcaagtattagtaattttca

SEQ ID NO: 220192 - DNA, 390 bp, Homo sapiens
ttatctgtagggacatagctggyttatccagttctctgggatacagtccttgatttgaggggtctggggttttgaaaattggcaccacctgaggagtatgaccctgtgcattcccattcttcagctggattttgggcttctctcagggttttgcctctgactgcagtggatggtcacaccagtaactgcaggctccactccatacagctcaaggcctgtctgcttctgttgctgaaactgaaaaagctgatcaacagggcctcagctccttacagtggggtgatggcccttcccacatctccaggagggtctgtctgctgaaggctggaggggagcatccaagctgccttgattggtactacagataaccctccctaagtctctctcagg

SEQ ID NO: 220193 - DNA, 576 bp, Homo sapiens
agatcttcccataggcgtgggtgtggattcgatgaaccttcaaagtcttttcaacattctgattctgtggtcaggattagacagactcatgtggccacaaatgaaataaaatagggatctaatggaatgttttatgttctgcatctttagttccaaatgggagatagtctgttgagtgctgcaagattgatcctgtcctgtttctacttcaaaagctgattagaattgattctcttcatcttggccttaacattctactttaaataaaygtagaaacgtattctgaatctctctgaaaaacccaaagcaaaggacctgagagaatgtaccattctagggtattgcaaatgtacttacttgaatccatttatttaatgcctcctggcacccaattccaccaaggtagtttggtttttctgttaacattaaaaattcaccccaaaagaactaacaaacccaaaatccaagtgtcttacagaaactgtctttttctttgtaggtgcttcttgcttgaaacaagaggatcttgtggcttgataaaatgtttggaatacccaaggagggcctccttttgaa

SEQ ID NO: 220194 - DNA, 580 bp, Homo sapiens
aaaccatacccaatgttttctcttgtaaagtggggtaagatgaggattaaatgagataatatagttgtttctcctacagtgccatatacatctttctaaaaaataaatgtaatgtagaatttcatgcaataaaaatgatgagccttctgggaaaaatttaattgggtgaaacacaacacctgtatagtctagtaaggaatactcttctaaaaccctaataaaagctttaaaaatctcaagtcccttataaaatttaaaaaataccatggtacataagtgcttcaccttacagaaagyacaaggtttgcttggtgagtcgtaagtgcacagtgggggcttctgagttatggagaaggaggaaaatagtaggacaaaatgctattgcactaaaggtgctatggtttgtcctgtttaccttttacattaatttaaaatagaaatgcagaagttgttgttaggccattttctcctttctttaagaagctgcatatatggcctcaagtgatatgggagactgctaggcagtgggtgctttgctcagtggggtaattgttttcaatacctgtgggtgcacatcagc

SEQ ID NO: 220195 - DNA, 616 bp, Homo sapiens
catagtaagtactcaataaatatttttggaattaattaatgccttaatcaaatctatcaatcctagaagccctcctggtgagtctggtaccttcccctcccctgctccctagacctctcccagaagcagctttgcctttttggaatctcccagaagaagcttcctaaggtagtgttgaggaaatataattaaaagcaaaaccccctcccagcccagraaacctctccacaaacataatcaagaaagaaaacaattttactattgaataaacattaaaccagaacgtaacgcgtatcacgaacaattcactggagagattgcaatggtgaaaagaaatctttcatagagcaaagtggatataatccattacactcatgttttcaagaaaaaatccctaagtttattgtatcattataactagaggtaggggtttgccatttcaagtcggggagagttgaaattaggcccattttctcccaggaaactgagagatgaggccttatcttttttgacgattacatttcgagaagatgaggaacatgaagaagcgtgtcaaccaatgttgccacaagtccatgaggaaatattcttgagttgtgtcaaccaaagaattatg

SEQ ID NO: 220196 - DNA, 485 bp, Homo sapiens
aatattataaaaagtggtgtcatatccaggaaaccattgcttggtcctaagacataaatatttactcctatattttcttctgagaatttcatcaacacttgttatttttcgtgtgtttgataatagccattctaatatgtatgagatgatgcatctttgtggttttaatttgtatttctctgatattgaacattttttcatattcttgttggctgttcatatatcttcttttgagaaatgtctatttaaattctttgcccattttaaatagggttatttctattttttgctattgagcttgttatttttttaaatatgggcwttttgagtaataaatttccctctaaacactgccttcaatgtatcccatgagtcatggtggttttttatttttttaattttcattaatcttaaagtactttctaatttcccttgggatttcttctttaatccattgggtttttttgtttgtttttgtttttttt

SEQ ID NO: 220197 - DNA, 485 bp, Homo sapiens
aatattataaaaagtggtgtcatatccaggaaaccattgcttggtcctaagacataaatatttactcctatattttcttctgagaatttcatcaacacttgttatttttcgtgtgtttgataatagccattctaatatgtatgagatgatgcatctttgtggttttaatttgtatttctctgatattgaacattttttcatattcttgttggctgttcatatatcttcttttgagaaatgtctatttaaattctttgcccattttaaatagggttatttctattttttgctattgagcttgttatttttttaaatatgggcattttgagtaataaatttccctctaaacactgccttcaatgtatcccatgagtcatggtggttttttattttttwaattttcattaatcttaaagtactttctaatttcccttgggatttcttctttaatccattgggtttttttgtttgtttttgtttttttt

SEQ ID NO: 220198 - DNA, 485 bp, Homo sapiens
aatattataaaaagtggtgtcatatccaggaaaccattgcttggtcctaagacataaatatttactcctatattttcttctgagaatttcatcaacacttgttatttttcgtgtgtttgataatagccattctaatatgtatgagatgatgcatctttgtggttttaatttgtatttctctgatattgaacattttttcatattcttgttggctgttcatatatcttcttttgagaaatgtctatttaaattctttgcccattttaaatagggttatttctattttttgctattgagcttgttatttttttaaatatgggcattttgagtaataaatttccctctaaacactgccttcaatgtatcccatgagtcatggtggttttttatttttttaattttcattmatcttaaagtactttctaatttcccttgggatttcttctttaatccattgggtttttttgtttgtttttgtttttttt

SEQ ID NO: 220199 - DNA, 481 bp, Homo sapiens
ggacccaggcctgctctcagcacaatgagaggaaaactaaccctgaactccctgccaccccccacccctggcccctggaatgtgttcagtgtagatttggaaaagaaacctgcgccaggcatggtgcctcatgcctgtaatcccagcactttgggaggctgaggcaggtggatcacttgagttaaggagtttgagacaagcctggccaacatggtgaaagcccatctctactaaaaatmcaaaaaaaaaaaaaaaaaaaaattagctgggcgtggtggcaggtgcctgtaatcccagctactcgggaggctgaggcaggagaatcgcttaaacccaggaaacggaggttgctgtgagccaagatggtgctactacactccaccctgggtgacagagcaagactctgtctcaaagaaaaagaaagaaagaaaagaaaccctgttccataagtaaaaaacataagagccgacgtctgctgagt

SEQ ID NO: 220200 - DNA, 567 bp, Homo sapiens
cagtggtttcacagaattccttatgcactctaagccggagctttcattcctgaacactacaattcagggcctacagttcattcctcaaaaatgaggccataattcagttgaggtcatttgttttctaattcctcttcagtatctgtttggaaaatcacttacttagctttcttcatccactcacagtgtcattactctgaacttttaacataagtgtgtrtatgtgtgtgtgtgtgtacacatacagtttatatatatatacactttatatacatacgtatatgtacacacacactttttatgtatttatatatttaaagtatatactttatatatacatatatttgaagtatttatgtatataaaaatatgtatatataaagtatatctgtaaagtataatatatattataaagtatatttacacctaattatacatacttgaaatatatatactgtatatatgtatataaagtatatgtatacataaagtatatatgtaaagtataatgtatataatttatatatgatattatatatgataaagtataaatagtacatatattat

SEQ ID NO: 220201 - DNA, 567 bp, Homo sapiens
cagtggtttcacagaattccttatgcactctaagccggagctttcattcctgaacactacaattcagggcctacagttcattcctcaaaaatgaggccataattcagttgaggtcatttgttttctaattcctcttcagtatctgtttggaaaatcacttacttagctttcttcatccactcacagtgtcattactctgaacttttaacataagtgtgtgtatgtgtgtgtgtgtgtacacatacagtttatatatatatacactttatatacatacgtatatgtacacacacactttttatgtatttatatatttaaagtatatactttatatatacatatatttgaagtatttatgtatataaaaatatgtatatataaagtatatctgtaaagtataatatatattataaagtatatwtacacctaattatacatacttgaaatatatatactgtatatatgtatataaagtatatgtatacataaagtatatatgtaaagtataatgtatataatttatatatgatattatatatgataaagtataaatagtacatatattat

SEQ ID NO: 220202 - DNA, 545 bp, Homo sapiens
cttgacacagagttgcctcaaacttaccatttgtaaaagccaaaataaagtgaagtacaataaaacaaggtatgcctgtagatattaatcactggattagctcatcaaagggtttttagagaaagttagctttgggagccatagagtaaatgtaaatgtaacttaactcctggccagcttcaacaatatttttaaataagtaagattctaatgattataattgcctccagttccgcaagtcaaccattaagctgataatagtagttattcatccagggttagctccartatgtctttcaatatgatcttaatacttgccagttgctcattggaccttgccatttcataaaggatatgccgaacatcccaaactaggactgaggcgggactgaggaccatgggaacctctactaggaaataactactgtctgaatatgtgaaattctaggcgtcaggataaaaatgcagaaagaaacagattagaaatatgtttcactagtggtagagtgtaccacgttaggaaccacatctcttctcaacagtgg

SEQ ID NO: 220203 - DNA, 547 bp, Homo sapiens
ttaatgtagtactgacttgagctctctgattttaggttcttcagaagaggatgaggtcattcaaccaggtttcatcagccccaggttagtcttttttttttttttwaaatattttgtttaattaatgttttaaaagatcaagatcgctagaggcatatgagaacctgacagccctcaggaattctccatcctttctactttggcaagacaggtaccaagtcctcctatacttcgtcctgatcactccatctaaaaaactggtgttcccataagaattacgtggacaacctcttctaattaacccctttccccccacccccacttttagcagtattgtattttgtgattcctttttctgtaactcaagcagcatagataacagatatttaaatgcttatggagatgaatgaaaagtattcatggtttgttcatttttgtaactcccaaagtaaaatatgcactaacgaatatctgctgaactaaattaaaaatggagacatggtgctgttttaaaataatttatcataacagaaatagcacaatatat

SEQ ID NO: 220204 - DNA, 529 bp, Homo sapiens
caaatgcatatctgattgcttcctctgccctgtcttttatgtaaaaatgcagattcatggctgggcacagtggctcatgcctgtattcccagcatgttgtgaggccaaggcgactggatcacaaggtcagaagttcgagaccagcctgaccaacatggtgaaaccctgtctctactaaaaatataaaaattagccaaacgtggtggtgtgtgcctgtaatcccagctactcaggagtctgaagcaggagaatctcttgcaccctggaggtggagcttgtagtatgccgagaacatgccactgcactccagcctgsgcgacagagtaagacactgtctcaaaaaaaaaaaaaaaatgcagattcactgaggaagactaaattgtatattcagtggaaggctgatcaaggactcaaaagaatgcaaccttttgttccttatctacttctaacctgcaagtccccacttcaagttgtccctccttactggactaaaacaatgtacatcttacacatgttatttgatgtcaca

SEQ ID NO: 220205 - DNA, 359 bp, Homo sapiens
ggttagtcacaggtaaattgcagtttttctttgacaaaaaaaaaaaaaaaggttcctgcaaaatttaagaaactccttattcttagtctaggtttgcattttcttaatgtaatttatgcttccagatatgaaaagctaccttgcatcagcttgcatttagaaggattckcctgaagaaaaacaaaatttgtataaaagtgcatcctttgaaattaatttgagtaatcatggcaaccagacttgagtgaccatgagaccatggtattattgaaaatgtacccataaataagtacactccaaaacctagctggcaaggggtcatatgctcatgtaaaagtgacatctgagaagctaattac

SEQ ID NO: 220206 - DNA, 359 bp, Homo sapiens
ggttagtcacaggtaaattgcagtttttctttgacaaaaaaaaaaaaaaaggttcctgcaaaatttaagaaactccttattcttagtctaggtttgcattttcttaatgtaatttatgcttccagatatgaaaagctaccttgcatcagcttgcatttagaaggattctcctgaagaaaaacaaaatttgtataaaagtgcatcctttgaaattaatttgagtaatcayggcaaccagacttgagtgaccatgagaccatggtattattgaaaatgtacccataaataagtacactccaaaacctagctggcaaggggtcatatgctcatgtaaaagtgacatctgagaagctaattac

SEQ ID NO: 220207 - DNA, 587 bp, Homo sapiens
attgaggatttttatttcaatgtccttcagagatattagccaatggttttctttttttgatgtgtctttgtctgattttggtatcaagataacactggcctcatagaatgaagttaaaagtattccctctttctctattttactgaatagtttgcatagtaatggtattaattcttcttaaatgtttggcagaactcagcagttgaagccattgggttccagacttttctttgctggaaaactttttattgtgacttcaatctcgttagttgttttgggtcagttcaggttttggattcttcatggttcaatcttggtaggttttatgtgtctaggaatttatccattttttatgggttttccaatgtattgccatatagttgctcatagtagtccctaatgaacctttgaatttttgtgctatcagttgtaatatatcctttttcatctctgaatttatttcttcaggttttctctcrttttttcttagtctgcctaaaagtttgccaatattatcttttcaaaagccagctttttgttttgttgatcttttgtatttttttcttcactcctgaattgaagaattc

SEQ ID NO: 220208 - DNA, 278 bp, Homo sapiens
cccgctgaaggccctgaaattacctgtgttcaggccacccactaaggataaacaaagcttccctgatatggggaattagcycaagtggtagagcgcttgcttagcatgcaagaggtagtgggatcgatgcccacattctccaagctttattatttaggtacccaaacccgagtcagtgtctgagagcaagacactgctctcagtgtctttggttcaagacataggagcagcaacaatacaggactggtgacagcttcctgctggcattcagtatagtg

SEQ ID NO: 220209 - DNA, 278 bp, Homo sapiens
cccgctgaaggccctgaaattacctgtgttcaggccacccactaaggataaacaaagcttccctgatatggggaattagcccaagtggtagagcgcttgcttagcatgcaagaggtagtgggatcratgcccacattctccaagctttattatttaggtacccaaacccgagtcagtgtctgagagcaagacactgctctcagtgtctttggttcaagacataggagcagcaacaatacaggactggtgacagcttcctgctggcattcagtatagtg

SEQ ID NO: 220210 - DNA, 498 bp, Homo sapiens
aaaaaaaaaaaaaaaactccaaaaagtaagtaaagaggaggtttggaattagatatttggtgtatgaatgaatgggctaaagtgcaaaagaacaggcagaataactgagctggtacagaggaaaaaaatcacacttaaaatctaaaartatctgcttctcaatttgggctttcccacttagcagctttggcaccttagaaagaacacttaacttacctgagcttctattacttctaaaaagtgcataaagtgcaggctaagacatagttttttggcaaaattcagtcagactacatcaagtaaactccctaagtctcctagtataattcatggcacaaaaactggggaaaaaacagggaggatatgattataagttcagtttgtgttttttgttgagtgaatgtctccagccatagagatgcaagtgtagatacacagtaagagtagtatgaatggcagacaccttggaaggctatttcttccttcattcattcagtt

SEQ ID NO: 220211 - DNA, 498 bp, Homo sapiens
aaaaaaaaaaaaaaaactccaaaaagtaagtaaagaggaggtttggaattagatatttggtgtatgaatgaatgggctaaagtgcaaaagaacaggcagaataactgagctggtacagaggaaaaaaatcacacttaaaatctaaaaatatctgcttctcaatttgggctttcccacttagcagctttgrcaccttagaaagaacacttaacttacctgagcttctattacttctaaaaagtgcataaagtgcaggctaagacatagttttttggcaaaattcagtcagactacatcaagtaaactccctaagtctcctagtataattcatggcacaaaaactggggaaaaaacagggaggatatgattataagttcagtttgtgttttttgttgagtgaatgtctccagccatagagatgcaagtgtagatacacagtaagagtagtatgaatggcagacaccttggaaggctatttcttccttcattcattcagtt

SEQ ID NO: 220212 - DNA, 249 bp, Homo sapiens
cctgctttcccgctgaaggccctgaaatcccctgtgttccaggccacccactaaggatcartaaagctcccctgatgtgggggaattagcgcaagtggtagagtgcttgcttagcatgcaagaggtagtgggatcgatgcccacattctccaaactttattatttagaccctgggtctccaaacactcaggtctccaaacccaagtcagagagcaggatgctgctttggttcaagatgtaggagcagca

SEQ ID NO: 220213 - DNA, 249 bp, Homo sapiens
cctgctttcccgctgaaggccctgaaatcccctgtgttccaggccacccactaaggatcagtaaagctcccctgatgtgggggaattagckcaagtggtagagtgcttgcttagcatgcaagaggtagtgggatcgatgcccacattctccaaactttattatttagaccctgggtctccaaacactcaggtctccaaacccaagtcagagagcaggatgctgctttggttcaagatgtaggagcagca

SEQ ID NO: 220214 - DNA, 249 bp, Homo sapiens
cctgctttcccgctgaaggccctgaaatcccctgtgttccaggccacccactaaggatcagtaaagctcccctgatgtgggggaattagcgcaagtggtagagygcttgcttagcatgcaagaggtagtgggatcgatgcccacattctccaaactttattatttagaccctgggtctccaaacactcaggtctccaaacccaagtcagagagcaggatgctgctttggttcaagatgtaggagcagca

SEQ ID NO: 220215 - DNA, 249 bp, Homo sapiens
cctgctttcccgctgaaggccctgaaatcccctgtgttccaggccacccactaaggatcagtaaagctcccctgatgtgggggaattagcgcaagtggtagagtgcttgcttagcatgcaagaggtagtgggatcgatgcccacattctccaaactttattatttagaccctgggtctccaaacactcaggtctccaaacccaagtcagagarcaggatgctgctttggttcaagatgtaggagcagca

SEQ ID NO: 220216 - DNA, 293 bp, Homo sapiens
ttcctgctgaaggccccgaaatcacctgtgttccaggccaccygctaacaataaataatgctcccctgatgtggggaattagctcaagtggtagagcgcttgcttagcatgcaagaggtagtgggatcgatgcccacattctccaagctttattatttagacatcgtgtctccaaacactcaggtctccaaacccaagttagtgtctgagaacaggatgctgctttggttcaagacgtaggagcagcaataatagagggctggtgatggctccctcttggcattcagtatagt

SEQ ID NO: 220217 - DNA, 293 bp, Homo sapiens
ttcctgctgaaggccccgaaatcacctgtgttccaggccacccgctaacaataaataatgctsccctgatgtggggaattagctcaagtggtagagcgcttgcttagcatgcaagaggtagtgggatcgatgcccacattctccaagctttattatttagacatcgtgtctccaaacactcaggtctccaaacccaagttagtgtctgagaacaggatgctgctttggttcaagacgtaggagcagcaataatagagggctggtgatggctccctcttggcattcagtatagt

SEQ ID NO: 220218 - DNA, 293 bp, Homo sapiens
ttcctgctgaaggccccgaaatcacctgtgttccaggccacccgctaacaataaataatgctcccctgatgtggggaattagctcaagtggtagagcgcttgcttagcaygcaagaggtagtgggatcgatgcccacattctccaagctttattatttagacatcgtgtctccaaacactcaggtctccaaacccaagttagtgtctgagaacaggatgctgctttggttcaagacgtaggagcagcaataatagagggctggtgatggctccctcttggcattcagtatagt

SEQ ID NO: 220219 - DNA, 386 bp, Homo sapiens
atgtaattaattctctgtttctttgaggagctgtgaaaccaagggacatatacaactgctcttttctccctgtttctacctgcagctttgtcctaaatgtgagacaattatgaaaagtgcagsgcagagccacttgggtaaatacagccccggctttctgctcaggggacagagtttgaggcactgcagaggaaccagccaaagtatgagacccatatgttgagagtgacagtgtaaagttcaaaaaaatcaaaatgtttaaagatttatcatgggtcttgatgacatgatggaatctctctactctctggactgattatgtgtggtaataaatttactttttaaaagccagttgagtgtttttaatgttgtggagctattgctaa

SEQ ID NO: 220220 - DNA, 386 bp, Homo sapiens
atgtaattaattctctgtttctttgaggagctgtgaaaccaagggacatatacaactgctcttttctccctgtttctacctgcagctttgtcctaaatgtgagacaattatgaaaagtgcagggcagagccacttgggtaaatacagccccggctttctgctcaggggacagagtttgaggcactgcagaggaaccagccaaagtatgagacccatatrttgagagtgacagtgtaaagttcaaaaaaatcaaaatgtttaaagatttatcatgggtcttgatgacatgatggaatctctctactctctggactgattatgtgtggtaataaatttactttttaaaagccagttgagtgtttttaatgttgtggagctattgctaa

SEQ ID NO: 220221 - DNA, 386 bp, Homo sapiens
atgtaattaattctctgtttctttgaggagctgtgaaaccaagggacatatacaactgctcttttctccctgtttctacctgcagctttgtcctaaatgtgagacaattatgaaaagtgcagggcagagccacttgggtaaatacagccccggctttctgctcaggggacagagtttgaggcactgcagaggaaccagccaaagtatgagacccatatgttgagagtgacagtgtaaagttcaaaaaaatcaaaatrtttaaagatttatcatgggtcttgatgacatgatggaatctctctactctctggactgattatgtgtggtaataaatttactttttaaaagccagttgagtgtttttaatgttgtggagctattgctaa

SEQ ID NO: 220222 - DNA, 386 bp, Homo sapiens
atgtaattaattctctgtttctttgaggagctgtgaaaccaagggacatatacaactgctcttttctccctgtttctacctgcagctttgtcctaaatgtgagacaattatgaaaagtgcagggcagagccacttgggtaaatacagccccggctttctgctcaggggacagagtttgaggcactgcagaggaaccagccaaagtatgagacccatatgttgagagtgacagtgtaaagttcaaaaaaatcaaaatgtttaaagatttatcatgggtcttgatgacatgatggaatctctctactctctggactkattatgtgtggtaataaatttactttttaaaagccagttgagtgtttttaatgttgtggagctattgctaa

SEQ ID NO: 220223 - DNA, 294 bp, Homo sapiens
atgatctttgcactcaattctcaactctgtgccctattggaatggtactgaaatgcaaattcagttacagtstctcctaaattcatttaccagcaaactttgcttacagtgcttaaacattttatcctgacattcaaagcccttcataaaaagctggcctctctcgcagctttactcctggaattcaatcctatgcacactctcagaaaacaaaatcattgttaattcaccttcaaaacctgttgttttattcttctgagactttgcaaatacctttgagcaaggcatctggat

SEQ ID NO: 220224 - DNA, 294 bp, Homo sapiens
atgatctttgcactcaattctcaactctgtgccctattggaatggtactgaaatgcaaattcagttacagtgtctcctaaattcatttaccagcaaactttgcttacagtgcttaaacattttatcctgacattcaaagcccttcmtaaaaagctggcctctctcgcagctttactcctggaattcaatcctatgcacactctcagaaaacaaaatcattgttaattcaccttcaaaacctgttgttttattcttctgagactttgcaaatacctttgagcaaggcatctggat

SEQ ID NO: 220225 - DNA, 607 bp, Homo sapiens
ttaatctggtattcattttttcatattgcacattagggacttagttcattttatactcataacagactctcacagacttgttaaatttataatgaaccatggttcrtggttctggagactggaaattcaaatgcatagcaacggcatctggtgagtgcctacattctctgtcatcccatggcagaaagcagaaggtcaagagtaggcaaaagcaagcgagcaagaatgggccaaacttgtctttataacaaacccattctcataataactaacccactccaaggaaaatgatattagtccattcatgaggacagaactctcataatttaatcacctcttattaggccctaactcccaacaccattacattgagaattaggtttccaacacataaactttgggggacacattcaaaccatagcaggtatataattaaattaatggttttgtctagctctgaattactagatatggcagaaaatcatttctacagttgagattttaaatgcagagcatcttgaattcctctattgtttttatatgcaagttctctttatgtatcagtgaagaggggctaaaatattacagaaaattgcttcagattgat

SEQ ID NO: 220226 - DNA, 607 bp, Homo sapiens
ttaatctggtattcattttttcatattgcacattagggacttagttcattttatactcataacagactctcacagacttgttaaatttataatgaaccatggttcatggttctggagactggaaattcaaatgcatagcaacggcatctggtgagtgcctacattctctgtcatcccatggcagaaagcagaaggtcaagagtaggcaaaagcaagcgagcaagaatgggccaaacttgtctttataacaaacccattctcataataactaacccactccaaggaaaatgatattagtccattcatgaggrcagaactctcataatttaatcacctcttattaggccctaactcccaacaccattacattgagaattaggtttccaacacataaactttgggggacacattcaaaccatagcaggtatataattaaattaatggttttgtctagctctgaattactagatatggcagaaaatcatttctacagttgagattttaaatgcagagcatcttgaattcctctattgtttttatatgcaagttctctttatgtatcagtgaagaggggctaaaatattacagaaaattgcttcagattgat

SEQ ID NO: 220227 - DNA, 607 bp, Homo sapiens
ttaatctggtattcattttttcatattgcacattagggacttagttcattttatactcataacagactctcacagacttgttaaatttataatgaaccatggttcatggttctggagactggaaattcaaatgcatagcaacggcatctggtgagtgcctacattctctgtcatcccatggcagaaagcagaaggtcaagagtaggcaaaagcaagcgagcaagaatgggccaaacttgtctttataacaaacccattctcataataactaacccactccaaggaaaatgatattagtccattcatgaggacagaactctcataatttaatcacctcttattaggccctaactcccaacaccattacattgagaattaggtttccaacacataaactttgggggacacattcaaaccatagcaggtatataattaaattaatggttttgtctagctctgaattactagatatggcagaaaatcatttctacagttgagattttaaatgyagagcatcttgaattcctctattgtttttatatgcaagttctctttatgtatcagtgaagaggggctaaaatattacagaaaattgcttcagattgat

SEQ ID NO: 220228 - DNA, 607 bp, Homo sapiens
ttaatctggtattcattttttcatattgcacattagggacttagttcattttatactcataacagactctcacagacttgttaaatttataatgaaccatggttcatggttctggagactggaaattcaaatgcatagcaacggcatctggtgagtgcctacattctctgtcatcccatggcagaaagcagaaggtcaagagtaggcaaaagcaagcgagcaagaatgggccaaacttgtctttataacaaacccattctcataataactaacccactccaaggaaaatgatattagtccattcatgaggacagaactctcataatttaatcacctcttattaggccctaactcccaacaccattacattgagaattaggtttccaacacataaactttgggggacacattcaaaccatagcaggtatataattaaattaatggttttgtctagctctgaattactagatatggcagaaaatcatttctacagttgagattttaaatgcagagcatcttgaattcctytattgtttttatatgcaagttctctttatgtatcagtgaagaggggctaaaatattacagaaaattgcttcagattgat

SEQ ID NO: 220229 - DNA, 432 bp, Homo sapiens
attgctaagataattgctccagtttgagaaggtagaagatttaacaagtaactaatatgyaaaggatagagagaagaaggggagaggttgatatgatccctgtcctttcacactgttaatatgccaggtgataaaatgtctcattcactctgaaacattatcactatacaggcactccttacagtgtttgttctcatatatgtcctcgtatttttttttccttttaaagtggctctgagaaatggctaatgcacaatctaattatgtgataataaatgttaatgacagtattatcagatgataactaggcttcattaatgtgtctcattatgattctcagtcccttgtggaagattgtgaagaaaggaccttagatattccagattatatttgaatgtagtagttacagagcccatatccagggagaaagga

SEQ ID NO: 220230 - DNA, 432 bp, Homo sapiens
attgctaagataattgctccagtttgagaaggtagaagatttaacaagtaactaatatgtaaaggatagagagaagaaggggagaggttgatatgatccctgtcctttcacactgttaatatgccaggtgataaaatgtctcattcactctgaaacattatcactatacaggcactccttacagtgtttgttctcatatatgtcytcgtatttttttttccttttaaagtggctctgagaaatggctaatgcacaatctaattatgtgataataaatgttaatgacagtattatcagatgataactaggcttcattaatgtgtctcattatgattctcagtcccttgtggaagattgtgaagaaaggaccttagatattccagattatatttgaatgtagtagttacagagcccatatccagggagaaagga

SEQ ID NO: 220231 - DNA, 432 bp, Homo sapiens
attgctaagataattgctccagtttgagaaggtagaagatttaacaagtaactaatatgtaaaggatagagagaagaaggggagaggttgatatgatccctgtcctttcacactgttaatatgccaggtgataaaatgtctcattcactctgaaacattatcactatacaggcactccttacagtgtttgttctcatatatgtcctcgtatttttttttccttttaaagtggctctgagaaayggctaatgcacaatctaattatgtgataataaatgttaatgacagtattatcagatgataactaggcttcattaatgtgtctcattatgattctcagtcccttgtggaagattgtgaagaaaggaccttagatattccagattatatttgaatgtagtagttacagagcccatatccagggagaaagga

SEQ ID NO: 220232 - DNA, 432 bp, Homo sapiens
attgctaagataattgctccagtttgagaaggtagaagatttaacaagtaactaatatgtaaaggatagagagaagaaggggagaggttgatatgatccctgtcctttcacactgttaatatgccaggtgataaaatgtctcattcactctgaaacattatcactatacaggcactccttacagtgtttgttctcatatatgtcctcgtatttttttttccttttaaagtggctctgagaaatggctaatgcacaatctaattatgtgataataaatgttaatgacagtattatcagatgataactaggcttcattaatgtgtctcattatgattctcagycccttgtggaagattgtgaagaaaggaccttagatattccagattatatttgaatgtagtagttacagagcccatatccagggagaaagga

SEQ ID NO: 220233 - DNA, 400 bp, Homo sapiens
tatgtggttgcattcttatatctaataaaatattcagttgtcttaaacttaacattcttaaggcctagggcaagaataataatcaaaacctatatagtgtatgtttgcatatttaaaagttataaatcaagttaacaaactgttaaataaagtatgctgtgttctctcactttgacacatataccttctcaatgaaattcaggtttggaactagaattcttgggccgtcaacatccagcacagaatatgacgacatagagagagccggtgccctgayctggtctcacaccatgagaggccttctgtgtatacattttgggtacctctgttgatatgttgaaactcagtctaccactgtagctctagcaaaaagcttcccattggcccacagggcctctag

SEQ ID NO: 220234 - DNA, 215 bp, Homo sapiens
agatctgaagccagatattaaggtacttcattaatttccatgtttgtcctctatgcaacctagcaatcaagcmagaagtcaaaacatactgacatagtttggatgggtccccacccaaatctcaccttgcattggaataattcccacgtgtcaagggtggggccaggtgcagataactgaatcatgggggatggttccccccatactgttctcgt

SEQ ID NO: 220235 - DNA, 215 bp, Homo sapiens
agatctgaagccagatattaaggtacttcattaatttccatgtttgtcctctatgcaacctagcaatcaagccagaagtcaaaacatactgacatagtttggatgggtccccacccaaatctcaccttgcattgkaataattcccacgtgtcaagggtggggccaggtgcagataactgaatcatgggggatggttccccccatactgttctcgt

SEQ ID NO: 220236 - DNA, 215 bp, Homo sapiens
agatctgaagccagatattaaggtacttcattaatttccatgtttgtcctctatgcaacctagcaatcaagccagaagtcaaaacatactgacatagtttggatgggtccccacccaaatctcaccttgcattggaataattcccacgtgtcaagggtggggccrggtgcagataactgaatcatgggggatggttccccccatactgttctcgt

SEQ ID NO: 220237 - DNA, 360 bp, Homo sapiens
ctggctccgttaactattactgctgttactcccaaktaaattccctctaaaaaataaaaatttttaaagctctaatttaagctctctgctgcctcatgacttcaattccatcagagttatgcattgtttcctctgtacatctttgctctgcttccattgctaattccctagtaaagtgttgtatattcaaagttccaaagaaacagaatatccaagacatcaccaatcatccaaaacacagtgtaggaggccacagttaagagaagcaagaccattagctctttttataggctcgagaacaacaggatgctttggtcctgtatcagcaggacgcttttcgggtagatcctactgccaccc

SEQ ID NO: 220238 - DNA, 360 bp, Homo sapiens
ctggctccgttaactattactgctgttactcccaattaaattccctctaaaaaataaaaatttttaaagctstaatttaagctctctgctgcctcatgacttcaattccatcagagttatgcattgtttcctctgtacatctttgctctgcttccattgctaattccctagtaaagtgttgtatattcaaagttccaaagaaacagaatatccaagacatcaccaatcatccaaaacacagtgtaggaggccacagttaagagaagcaagaccattagctctttttataggctcgagaacaacaggatgctttggtcctgtatcagcaggacgcttttcgggtagatcctactgccaccc

SEQ ID NO: 220239 - DNA, 447 bp, Homo sapiens
accactttctttcctcctttttttttttttaaattaagagacagggtgtctcaatgttgcccaagctggagttcagtggctagtggctattcacaagaacgatcatccgatcatcgcacactacctcaaactcctgggatcaagcaatcctcctgcctcasctttccaagtagctgggactataagtgtgtaccacagcatgtcagctctctctctccttcttgacctaaagcctagcataaaattagctaagtagaatgtttccaaagatgcctgcatcagtatctcccatcccacataatttctgtttgattttgccattcacccataaaatggtgggatctacctcccctccttgcaaatttgagctggccctctgatcctgtctaagatctgaagccagatattaagctacttcattaatttccatgtttgtcctctatgcaa

SEQ ID NO: 220240 - DNA, 447 bp, Homo sapiens
accactttctttcctcctttttttttttttaaattaagagacagggtgtctcaatgttgcccaagctggagttcagtggctagtggctattcacaagaacgatcatccgatcatcgcacactacctcaaactcctgggatcaagcaatcctcctgcctcacctttccaagtmgctgggactataagtgtgtaccacagcatgtcagctctctctctccttcttgacctaaagcctagcataaaattagctaagtagaatgtttccaaagatgcctgcatcagtatctcccatcccacataatttctgtttgattttgccattcacccataaaatggtgggatctacctcccctccttgcaaatttgagctggccctctgatcctgtctaagatctgaagccagatattaagctacttcattaatttccatgtttgtcctctatgcaa

SEQ ID NO: 220241 - DNA, 447 bp, Homo sapiens
accactttctttcctcctttttttttttttaaattaagagacagggtgtctcaatgttgcccaagctggagttcagtggctagtggctattcacaagaacgatcatccgatcatcgcacactacctcaaactcctgggatcaagcaatcctcctgcctcacctttccaagtagctgggactataagtgtgtaccacagcatgtcagctctctctctccttcttgacctaaagcctagcataaaattagctaagtagaatgtttccaaagatgsctgcatcagtatctcccatcccacataatttctgtttgattttgccattcacccataaaatggtgggatctacctcccctccttgcaaatttgagctggccctctgatcctgtctaagatctgaagccagatattaagctacttcattaatttccatgtttgtcctctatgcaa

SEQ ID NO: 220242 - DNA, 360 bp, Homo sapiens
ctggctccgttaactattactgctgttactcccaattaaattccctctaaaaaataaaaatttttaaagctctaatttaagctctctgctgcctcatgacttcaattccatcagagttaygcattgtttcctctgtacatctttgctctgcttccattgctaattccctagtaaagtgttgtatattcaaagttccaaagaaacagaatatccaagacatcaccaatcatccaaaacacagtgtaggaggccacagttaagagaagcaagaccattagctctttttataggctcgagaacaacaggatgctttggtcctgtatcagcaggacgcttttcgggtagatcctactgccaccc

SEQ ID NO: 220243 - DNA, 501 bp, Homo sapiens
ttaaactttgaacttgagagagakaagttagggcatctggcagaagaaatttgtaagcagaaaggcattcaagatttgacttggtggtttctttttcttttccttttttttttttttttttttttgagatggagtctcgctctgtcacccagactggagtgcagtgttgtgattttggctcactgcaacctctacctcccaggttcaagcgattctcctgcctcagcctctcaagcagctgggattacaggcatgcaccaccacgccctgacctggcagtttctaaaagtgtacagtcacatgcattcacaaacagatggtttgaaattggaatttatgtttaaaaggaaagaagacattaaaagtttggaaaatttgcaacttgaccatgtggttaaaaaaataaaaacccattttctggggagaaattcaggctggctgcataaatttgcataaatcaagaggatcctgatgttaatctccaagaaagtgaggaaaaag

SEQ ID NO: 220244 - DNA, 486 bp, Homo sapiens
agatctgttaaactttgaacttgagagagataagttagggcatctggcagragaaatttgtaagcagaaaggcattcaagatttgacttggtggtttctttttcttttccttttttttttttttttttttttgagatggagtctcgctctgtcacccagactggagtgcagtgttgtgattttggctcactgcaacctctacctcccaggttcaagcgattctcctgcctcagcctctcaagcagctgggattacaggcatgcaccaccacgccctgacctggcagtttctaaaagtgtacagtcacatgcattcacaaacagatggtttgaaattggaatttatgtttaaaaggaaagaagacattaaaagtttggaaaatttgcaacttgaccatgtggttaaaaaaataaaaacccattttctggggagaaattcaggctggctgcataaatttgcataaatcaagaggatcctgatgttaat

SEQ ID NO: 220245 - DNA, 472 bp, Homo sapiens
tggcagaagaaatttgtaagcagaaaggcattcaagatttgacttggtggtttctttttcttttccttttttttttttttttttttttgagatggagtctcrctctgtcacccagactggagtgcagtgttgtgattttggctcactgcaacctctacctcccaggttcaagcgattctcctgcctcagcctctcaagcagctgggattacaggcatgcaccaccacgccctgacctggcagtttctaaaagtgtacagtcacatgcattcacaaacagatggtttgaaattggaatttatgtttaaaaggaaagaagacattaaaagtttggaaaatttgcaacttgaccatgtggttaaaaaaataaaaacccattttctggggagaaattcaggctggctgcataaatttgcataaatcaagaggatcctgatgttaatctccaagaaagtgaggaaaaagtccccagg

SEQ ID NO: 220246 - DNA, 482 bp, Homo sapiens
ctgttaaactttgaacttgagagagataagttagggcatctggcagaagaaatttgtaagcagaaaggcattcaagatttgacttggtggtttctttttcttttccttttttttttttttttttttttgagatggagtctcgctstgtcacccagactggagtgcagtgttgtgattttggctcactgcaacctctacctcccaggttcaagcgattctcctgcctcagcctctcaagcagctgggattacaggcatgcaccaccacgccctgacctggcagtttctaaaagtgtacagtcacatgcattcacaaacagatggtttgaaattggaatttatgtttaaaaggaaagaagacattaaaagtttggaaaatttgcaacttgaccatgtggttaaaaaaataaaaacccattttctggggagaaattcaggctggctgcataaatttgcataaatcaagaggatcctgatgttaat

SEQ ID NO: 220247 - DNA, 456 bp, Homo sapiens
tttgaacttgagagagataagttagggcatctggcagaagaaatttgtaagcagaaaggcattcaagatttgacttggtggtttctttttcttttccttttttttttttttttttttttgagatggagtctcgctctgtcacccagactggagtgcagtgktgtgattttggctcactgcaacctctacctcccaggttcaagcgattctcctgcctcagcctctcaagcagctgggattacaggcatgcaccaccacgccctgacctggcagtttctaaaagtgtacagtcacatgcattcacaaacagatggtttgaaattggaatttatgtttaaaaggaaagaagacattaaaagtttggaaaatttgcaacttgaccatgtggttaaaaaaataaaaacccattttctggggagaaattcaggctggctgcataaatttgcataaatcaag

SEQ ID NO: 220248 - DNA, 456 bp, Homo sapiens
tttgaacttgagagagataagttagggcatctggcagaagaaatttgtaagcagaaaggcattcaagatttgacttggtggtttctttttcttttccttttttttttttttttttttttgagatggagtctcgctctgtcacccagactggagtgcagtgttgtgattttggctcactgcaacctctasctcccaggttcaagcgattctcctgcctcagcctctcaagcagctgggattacaggcatgcaccaccacgccctgacctggcagtttctaaaagtgtacagtcacatgcattcacaaacagatggtttgaaattggaatttatgtttaaaaggaaagaagacattaaaagtttggaaaatttgcaacttgaccatgtggttaaaaaaataaaaacccattttctggggagaaattcaggctggctgcataaatttgcataaatcaag

SEQ ID NO: 220249 - DNA, 456 bp, Homo sapiens
tttgaacttgagagagataagttagggcatctggcagaagaaatttgtaagcagaaaggcattcaagatttgacttggtggtttctttttcttttccttttttttttttttttttttttgagatggagtctcgctctgtcacccagactggagtgcagtgttgtgattttggctcactgcaacctctacctcccaggttcaagcgattctcctgcctcagcctctcaagyagctgggattacaggcatgcaccaccacgccctgacctggcagtttctaaaagtgtacagtcacatgcattcacaaacagatggtttgaaattggaatttatgtttaaaaggaaagaagacattaaaagtttggaaaatttgcaacttgaccatgtggttaaaaaaataaaaacccattttctggggagaaattcaggctggctgcataaatttgcataaatcaag

SEQ ID NO: 220250 - DNA, 319 bp, Homo sapiens
cactgcaacctctacctcccaggttcaagcgattctcctgcctcagcctctcaagcagctgggattacaggcatgcaccacsacgccctgacctggcagtttctaaaagtgtacagtcacatgcattcacaaacagatggtttgaaattggaatttatgtttaaaaggaaagaagacattaaaagtttggaaaatttgcaacttgaccatgtggttaaaaaaataaaaacccattttctggggagaaattcaggctggctgcataaatttgcataaatcaagaggatcctgatgttaatctccaagaaagtgaggaaaa

SEQ ID NO: 220251 - DNA, 319 bp, Homo sapiens
cactgcaacctctacctcccaggttcaagcgattctcctgcctcagcctctcaagcagctgggattacaggcatgcaccaccacgccctgacctggcagtttctaaaagtgtacagtcacatgcattcacaaasagatggtttgaaattggaatttatgtttaaaaggaaagaagacattaaaagtttggaaaatttgcaacttgaccatgtggttaaaaaaataaaaacccattttctggggagaaattcaggctggctgcataaatttgcataaatcaagaggatcctgatgttaatctccaagaaagtgaggaaaa

SEQ ID NO: 220252 - DNA, 496 bp, Homo sapiens
tatttttttattgcattctgttctgaaagtgtgcttggtatgatatctaattctttgaatttattgagacttgctttatgactgaccatgtggtcaatattagaacatgttctgtgtgaaggtcagaagaatgtatattctgtggttgctgggtggagtgttctttggatgcctattagatacatttggtctagtgtcaagtttaagtcaagtgtcaaagttaagtttctttgttagagttctgctttgataatctgtctaatgctgtcactggggtgttgatgtcttccactatgaatgtgtggctaaataagtcttttggtagataaagaggaacttgttttatcaatctgggtgctccaatgttggktgcatatatatttaagacagttagttatgtcttcttgttggattatatcctttatcattacgtaatgcctttcttaattattattggttttaagtctgttttatctgatacaagaatagtgattct

SEQ ID NO: 220253 - DNA, 496 bp, Homo sapiens
tatttttttattgcattctgttctgaaagtgtgcttggtatgatatctaattctttgaatttattgagacttgctttatgactgaccatgtggtcaatattagaacatgttctgtgtgaaggtcagaagaatgtatattctgtggttgctgggtggagtgttctttggatgcctattagatacatttggtctagtgtcaagtttaagtcaagtgtcaaagttaagtttctttgttagagttctgctttgataatctgtctaatgctgtcactggggtgttgatgtcttccactatgaatgtgtggctaaataagtcttttggtagataaagaggaacttgttttatcaatctgggtgctccaatgttgggtgcatatatatttaagacagttagttatgtcttcttgttggattatatcctttatcattacrtaatgcctttcttaattattattggttttaagtctgttttatctgatacaagaatagtgattct

SEQ ID NO: 220254 - DNA, 496 bp, Homo sapiens
tatttttttattgcattctgttctgaaagtgtgcttggtatgatatctaattctttgaatttattgagacttgctttatgactgaccatgtggtcaatattagaacatgttctgtgtgaaggtcagaagaatgtatattctgtggttgctgggtggagtgttctttggatgcctattagatacatttggtctagtgtcaagtttaagtcaagtgtcaaagttaagtttctttgttagagttctgctttgataatctgtctaatgctgtcactggggtgttgatgtcttccactatgaatgtgtggctaaataagtcttttggtagataaagaggaacttgttttatcaatctgggtgctccaatgttgggtgcatatatatttaagacagttagttatgtcttcttgttggattatatcctttatcattacgtaaygcctttcttaattattattggttttaagtctgttttatctgatacaagaatagtgattct

SEQ ID NO: 220255 - DNA, 590 bp, Homo sapiens
cccccatccctgttcatagccattgataggccaacaggtgtcctaccttgaaatatcttatgagccttctcaaggtaaaattttcacctaggtaatctaataaaccagactcagacagattcatggttttcacacgaacagttaaattggggtcctcaggataccaccccctcctccaatctttttatataaccgagtgctttttgactctggctgtacagatgaatcaactggggagttttaaaaaacgcagatgcattggctccattccagacccattgaataaaaatttctgtatttttaaaaagcttcaaatatgattctgagacaaactcaaaggggagatatttttgaacaggcagaacacttctcagctttgaaaattacacagaactccaccctgagtgtgaacactatacttaagtaactttgaaaagttactttgaggtataaaattacatccagtgtcactttaaagacaaaaaaggaacccaaagcctgtttttgctgtgtgaaccatctttatgttctgttaggagcttrtttcttattatgtgaaactgtagaaatacacagtgaaaataagatct

SEQ ID NO: 220256 - DNA, 543 bp, Homo sapiens
gagtgattgctgtgagtagaacatggcatgcaacagctttttgaaaggtaaaaattagcagagagttctggtgcataaaacattttgcagatgcctgaagattatttttmagttttattgggatggtgtaaaagagttttcagaaggatatttattttggtctttgccttaccgatggcagtttgggttcttccagtggccttggggaggcacagtaggagacctgcaaggagtgcaccatgcgggcactgaggcacatccaccaaagtagaagaaactgggaaagcaggccaggtagaacagagggaataaaccacaccaggaggtttagattttactcaacaactaatggaggaattgctgcagaaattgctaagatgaagacaattgatgcttttttaatccagagaatgaatggcatggtcaactgtacatgttagaaaaatccaactggcagcagtaaggacgagagactcaaggcgaggagaccctacaagtgagaccgtcacctagaaaggagttatttaaagaaggaccagaagt

SEQ ID NO: 220257 - DNA, 554 bp, Homo sapiens
agagaattctgtctataatctctactatgttagcagagctaaaagtggcatcaggtattgaaacccattgacaagctccagatttcattgaccacattctaactctgctgtatcaaacccttttaaatatggagttttagacagtgcagtaaaaggaaaccagctgaaagcatggataattcataggatgcgtgcatagttaaggactgtctttttccttaaattgttcttctttagtttctgctccatctataggtgcttattttttcaatctcgaagatatttagtgctttgaaattgttcagtaaaatgatctcttaarcagaaatgattatttaagaataggactgctaagaaactgatggcctcagcttatgctaaaaattaaaccctgctgacaactgcagcagatagtttaatttctataagaattattcatataagcttatttctactgtaaggaaatttaggtttcttagtgctaattttgtgtagtaattccatacggcgatacagaaggtagagaagtacagtggcacactacagtgttgtcg

SEQ ID NO: 220258 - DNA, 473 bp, Homo sapiens
gtgttagatgagggcccactacttggtttatagatggccatcttctcactgtatcttcacctaacagaaaaagagcaagagagcaatctgcagtccctttcatacaggcactaatctcattcatgagggctccaccctcattacataattatctcccaaaggcttctcctaatactatcacrttggaggttagaatttcaacttacgaattttatgggaggaaaaaaaatgttcagtttataacacctagtatataatagatgttcaatgttaatatatgattttaaatggacatatttgagagatattataaaggaagaaacaaatgaataatggactgaatataggaaaccagggagaaagatactcaaagacggggaggtaactaggttattgacacacatgttgtagttgggaaagagagtcaatttggagtaaaagctaatgaatttaacattgaacacattgagctt

SEQ ID NO: 220259 - DNA, 366 bp, Homo sapiens
ccaataatctattgcctgagagcatagtgggagggacaatgatggggatataaacccaggcattcaagctggcaatggctaccctctttgagtcccctccctttgtatgggagctctgtcttcwccctattaaatcttgcaactgcaaaaaaaaaaaaaaaagaaagaaaatgaggcttctgagtgatggtggagaacagtggctggaagaatagaacatctacatgtatcagtgatttcttctgcattctctatatctccctggagcccttctgatatgaattaatctctctccctccctctctctctctctctccctcactctctctcctctctggcacagtttttttgttccaagaatttaag

SEQ ID NO: 220260 - DNA, 600 bp, Homo sapiens
ttcatgaatccagtcagcttccattctaaaaaataggatgagagttcccactgggcaatgacaaaatactcggttaggcagaaacaaggaaacagaataatgaggggaaaaaaagctgattggttaacatcgggttacttcaggctactttttttggtgaaggttaaagcatagggaacttcccaattacactgactcagcaagactggaatctcctgttttcaggaaaaactgatctgtttggggatctgtctgcttccttaaagtttccgttcaactgtgtggcatttggtttgttctgtacaactggggcctcatggaggagctcagtagaaaacagtggcttcccacaatttttgtttgacatcgcccacatgtaagtctttctttcaggctccactttggggaaatccaagctaagatttggaaaaacagttaattatattatgtagcctgtaagatatgttatgataaatatgtattacagtgaaaacacaaaggaaagcaccaaaactatacataggaattggggaactcttcccagaggaagtgatgtccacttgayagtaaagggtaaatagccagagggagtgggaggaa

SEQ ID NO: 220261 - DNA, 459 bp, Homo sapiens
ttagatgtgtaaataggcacattaaaatagttatcgtaactatattccacatgtttaagaagatagaaaatggatttttcaattcaataagtgaaaaaaaagtagagaaaagattgaacacgttatatgatgacactaaagacataaaaaagatccaaacaaacttcaacagatgaaaaatacaatgtctaagataarataataatggataggactaaaatcagattaaatactgcagaagaaaagattagtgaacttgaagacacagcaatcaaaactattcaaaatgtgacaaagagagaaagattgaaaaaaaataaagagagcattattgaactgtgggatagcattaagtagcctaatactgtggtttggctttgtgtccccaaccaaatctaatcttgaattgtaatccccatgtgtcaagggagagacctagtgggaggtgattggatcatg

SEQ ID NO: 220262 - DNA, 490 bp, Homo sapiens
gtgttatggagcaccaaagaacaataacttctgtttattatgagagtattttgagacaaccaaagctttagcaataaaatgctcaggaaagcttccagagagtccttcaccacggcaatgttcctgctcagtcctctcatcaaacaaggacaatttttatgagagtttctatgggaaattattaggkgtatgccgtatagtcctgatttggccctttctgatttccttgtatttcctaatcttaaaaagtctgcaaagagcacccgtttttcttcagttaataatgtaaaaaagaccgcattgacattgtaaattcccaggaccctaaattctttagggatggactaaattgatggtaccattacaaaagtgtcttgaacttgatggaggttgtgttgagaaaaaaagtttatattttgtgtttttatcttttaattctatttttccatgaacttttagagtatctctacgtgccaggcactgcgactca

SEQ ID NO: 220263 - DNA, 633 bp, Homo sapiens
tttattattattcaccaaaggagaagtactaaattttatactgaaagacaactccaattgaagttcataagggtaatgtctataatatgcccatgaaataatttttaaggtgcatttaattatgaaactgtttggctgttcattgtgatattaccaagaaagtcaagtggatttttcacttaggtgttttggtgtagttgacgtagaaaatcattgctattaacaaggcaaattcaatcctgaacatcaaagattatgtatttgtatggcacataacttcagcatattatcaaatttggctcttttgtktgtaaaaatatcatttgaatgtgacaaaatagtcacatattgcttgtgcttaaaagaaagaagtaaggaagaaaggaaagaaggaagagagggaaggaggaaaaaatgaaggacagaagaaaagtaaatggacttctttggattttggattgggccttcttaccttttgttttactagtttacttggtgtacttttttccttgtcacgaattccaagaggctccaacaccaagacagatttctcctccggtatggcaaaaattacaaaaaaattgttaagtatttattattaaaccaggcaattaaaggtaagatgaaatgtat

SEQ ID NO: 220264 - DNA, 597 bp, Homo sapiens
ggaatgtctgtttgatggttttcaaaatcacttatccatgcagttttggcacttctgtgctgtgttaccaatctcaattttgtattagattttactttaatctcttatgtaggtcctgaatttcccctcttcttccccatcaaaatatataaccaggtagcctgcatttgccgatgaccacaaaagagtaatttagggctgtgaaaaaccctaatatttcaaaatatttctcctaaatcatgcacatacttttagtaaaggtgcagaagctaaatagtggttacctctctgaagtcatgaaaccaytgagaaaatctttaatgtagtgatggaaatccttacgaaatgtttgagaaacaccttagtacacctatgaaacatttcataccagtagatgaattaagtttgagttttgtttccatcttcttatcaatgattttaaaaggtgcccatgacttttcagagataaaattcattttgtctctaaattatctatgcttgtcagtcacacgtccttctttacatatttaagtgcttggttactgtttgccgggtactatattgtgctttctatacactcatggtctcatataatcc

SEQ ID NO: 220265 - DNA, 507 bp, Homo sapiens
aatgcatgtttaaaaaagaatctctgcatgaaactaaaatttatcaagacagtttttcacctctatatccccaccactaagcacagtatggtgtatagtaggtgctcaatatatgtcaagaaatgaataaaagttccatcacctattacagtagcatcatcagagcatcatattartaaccttacctataaccccaaaccttaaatgacatggttatattccattcattttgatcattttctggtatcacaaacaaaaatacacccaacaacctcctattaaacttttttgaaatgatttaaaagaagaaaaattaacagagatcattatatgaaaccacatgaccgtcataaatccacaaagtttttaaaatgtctatcaagttatttttttctttctcttttattcatggtagctgtttctgtaagatcttcttctccatgactcgcgtgggtggataactttcctgcccagtaggtttactattttgaaagacaactgtgctta

SEQ ID NO: 220266 - DNA, 507 bp, Homo sapiens
aatgcatgtttaaaaaagaatctctgcatgaaactaaaatttatcaagacagtttttcacctctatatccccaccactaagcacagtatggtgtatagtaggtgctcaatatatgtcaagaaatgaataaaagttccatcacctattacagtagcatcatcagagcatcatattagtaaccttacctataaccccaaaccttaaatgacatggttatrttccattcattttgatcattttctggtatcacaaacaaaaatacacccaacaacctcctattaaacttttttgaaatgatttaaaagaagaaaaattaacagagatcattatatgaaaccacatgaccgtcataaatccacaaagtttttaaaatgtctatcaagttatttttttctttctcttttattcatggtagctgtttctgtaagatcttcttctccatgactcgcgtgggtggataactttcctgcccagtaggtttactattttgaaagacaactgtgctta

SEQ ID NO: 220267 - DNA, 597 bp, Homo sapiens
ggaatgtctgtttgatggttttcaaaatcacttatccatgcagttttggcacttctgtgctgtgttaccaatctcaattttgtattagattttactttaatctcttatgtaggtcctgaatttcccctcttcttccccatcaaaatatataaccaggtagcctgcatttgccgatgaccacaaaagagtaatttagggctgtgaaaaaccctaatatttcaaaatatttctcctaaatcatgcacatacttttagtaaaggtgcagaagctaaatagtggttacctctctgaagtcatgaaaccattgagaaaatctttaatgtagtgatggaaatccttacgaaatgtttgagaaacaccttagtacacctatgaaacatttcataccagtagatgaattaagtttgagttttgtttccatcttcttatcaatgattttaaaaggtgcccatgacttttcagagataaaattcattttgtctctmaattatctatgcttgtcagtcacacgtccttctttacatatttaagtgcttggttactgtttgccgggtactatattgtgctttctatacactcatggtctcatataatcc

SEQ ID NO: 220268 - DNA, 538 bp, Homo sapiens
acttatcttgcttagtaagacttcatgcctatagattagtaactcattgtaccctatataagtagaatcatgcaaaatttgtctttctgcaactgctcatttcacataacataatgtcctcaaagtttatccatgttgtcacatattgccaaatattctttttttaaaatcaaatagtgttccattgtatgtatagacctcattttctttttttctttttttattatactttaagttctagggtacatgtgcacaatgtgcaggtttgttacataggtatacatgtgccatgttggcttgctgtacccattaactcatcatttacattgggtatttctcctaattccatcgtcccccagcctgccacctcaaggcaggccctggtgwgtgatattccccaccctgtgtccaagtgttctcattgttcaattcctacctatgagtgagaacatgcggtgtttcattttctatccatgtgatagtttgctcagaatgatggtttcagcttcatccatgtccctgcaaaggacatgaactc

SEQ ID NO: 220269 - DNA, 545 bp, Homo sapiens
agtattctgagtgacacttagtggttgctatgccttaatatcgcaaagcacacacacacargcacacacacacatgcatgcacacgtacacactccagaaattacccctttataacagagatgcagactcagatacatggattatgtctgtaagtaatacgatgtggtagtgattccagttatcaaacctaggttaaatcaaaaccgtcccataattctaacccagagtacgagatagtgtcttaaatgacctccgccatccagtttttgtacttgaagaagtcaaatagttctcctctcaacttctgtctattttatacgttgctgttgaactgcctcattgtgattcttgaaggtgcaactgtatagtaattatccacatctgaaaaaggaagaaaaaaaatcttacactcttgatgacttatttttgcttggtgcttggcaagccatttaagttaggttttaatcagtgttggcatcacttctgctcatgctataaagaattatgttcctacatatgtgaagccccaggaggaaagaacctt

SEQ ID NO: 220270 - DNA, 555 bp, Homo sapiens
attaagggcagtgggtagacaaaagcagacaaccagttactcttttccactaatgcattgcgctacaagagccttccaaaactcagacacaattgggaaaggaaggaaacaccttgagttgatggagaaaacactaaartcaatgagataatcccaaattgattatggagaagctgagacaaatctgaactggctgagaattagtttttagtttttttagttttagttctacattctccactcaccagaaagcagaaattattttaagttaaagtaaataacattatatttcctgtgcctatgaacttgtagactgcaattgggatacgagtatggatggaagaaagatttggtaaataagtaaagaacataattcattgcaccagagcagatgttggcaaactataggccacaggccaagttcaacctgtttttgcaaataaagttttgttggaacagagctacaactattcatttacatgttatcgatggttgctttccagctacaaagacaagttgagtagttacgacagagaccatatgtcctgcaaagct

SEQ ID NO: 220271 - DNA, 555 bp, Homo sapiens
attaagggcagtgggtagacaaaagcagacaaccagttactcttttccactaatgcattgcgctacaagagccttccaaaactcagacacaattgggaaaggaaggaaacaccttgagttgatggagaaaacactaaagtcaatgagataatcccaaattgattatggagaagctgagacaaatctgaactggctgagaattagtttttagtttttttagttttagttctacattctccactcaccagaaagcagaaattattttaagttaaagtaaataacattatatttcctgtgcctatgaacttgtagactgcaattgggatacgagtatggatggaagaaagatttggtaaataagtaaagaacataattcattgcaccagagcagatgttggcaaactataggccacaggccaagttcaacctgtttttgcaaataaagttttgttggaacagagctacaactattcatttacatgttatcgatggttgckttccagctacaaagacaagttgagtagttacgacagagaccatatgtcctgcaaagct

SEQ ID NO: 220272 - DNA, 555 bp, Homo sapiens
attaagggcagtgggtagacaaaagcagacaaccagttactcttttccactaatgcattgcgctacaagagccttccaaaactcagacacaattgggaaaggaaggaaacaccttgagttgatggagaaaacactaaagtcaatgagataatcccaaattgattatggagaagctgagacaaatctgaactggctgagaattagtttttagtttttttagttttagttctacattctccactcaccagaaagcagaaattattttaagttaaagtaaataacattatatttcctgtgcctatgaacttgtagactgcaattgggatacgagtatggatggaagaaagatttggtaaataagtaaagaacataattcattgcaccagagcagatgttggcaaactataggccacaggccaagttcaacctgtttttgcaaataaagttttgttggaacagagctacaactattcatttacatgttatcgatggttgctttccagctrcaaagacaagttgagtagttacgacagagaccatatgtcctgcaaagct

SEQ ID NO: 220273 - DNA, 558 bp, Homo sapiens
accctctgcatggagctcacattattaatcattagagaaatgcaaatcaaaacagcagtgagatactatctcacaccagccagaatggctgttattaaaaagtcagaaaataacagatgctggcgaggttgtggggaaaaaggggaatgtttagatgctgctgttgggaatgtaaattaggttagccattggggaaagtagtttggtgttttcacgaagaacttaaaacagagctaccatttgactcagcaaccccattactgggtatctactcaaaggaatatacactctcctcctataaagatacatgcatgtatatgttcatcacagcattaatagcaaagacctgggttctcaaatttaagggagaaagtccacataattgaatgatgctccagtcctgtggaaatagcctgagaccacccaaatgatagcaagcaaaggctatttatttagagcttgctacagcatgctgtcagctgccagcatttgtgtttgacaaaagaytgacaggcaggcaggggagtgggaaagctgtatagtaaagggaaggcccca

SEQ ID NO: 220274 - DNA, 556 bp, Homo sapiens
gcaattagtgatgtttacaagatattcaatgttgggacccatttcaatgataaattcctacaggaaatttagtactgctagaatttatgtccaactaatttattgaatgacattgcagctattgaacatgagcatgagagatattatttatctaatagtaggctaatgagataaaacataaattgttgagataatgagtccattgctttagtgtaaattgagaaaatggctataattaagagtggtattgattatgaaactttcccaggtcgactgacctcagaatgcacgactgccacattctgtctgtcattgccatagaattggctggatcaatcttacaagtggaaaatccacccacaagtgggaaatccgcaagggaaagatagaattgtcattctagggaggtaatgtggattcccactttctggaatagtgccatgggtctgaattcacagatgctgcggtcccrttatgattactcaactccttaggttacagtggctcaaattctaccactggcattttaacctgtgtcccaactgttttatttgtc

SEQ ID NO: 220275 - DNA, 483 bp, Homo sapiens
gcaaaatcagctcagttgcaacagatatcataggaataaattaagtaattgaaatgcatcctttatgttatcttaagtgtctataccaaaatccaccaacaaagaatgttttagtggtaataaatgttataactgttagttattgaaggtttgtttttccccagaaaaaaaaagaaaggtcttttttaaatttgcaattttatgatggttttctataacttcgggtggtcttgatcaagytgcttttcctcattggacctcaatttccatatctataaagcaaagaaaatggtccagttgatctctgacattccttctagcactaagaacctgattccaacacattcccatttgccagtacagtaacatagtacaaagtaaatgacaagcatagctaagatattgaaataatactaatgttttatctccttgtgacttgtccattatctgttagtgagcacatgacattctgtgtgacagaga

SEQ ID NO: 220276 - DNA, 532 bp, Homo sapiens
gaattcatctttttgttgaaatgttgtgaaggttctgaattgcctctaccttctgcagcatagttagctgtgttcctggggacagaaatgataccaggcttatccatctcttgcaaagctaacaaatatcaaagccaatgargtccactaaggtttgagtggtggagcgactgagataatcagttggtgtttggtataagaaaacaagtctagtctaaccttttgaatgatacactggctagaataaatagctagatttctgggagttggaagcaggattgcatttgcaaagcctatactagaaaaggaaatacatatatttttaaattacacttttaatgaccatttctgcccatctttataaccttacatagcatgaacttgagcaaacgaggattgagatttcaaccttaatcaagccctaaatattggcaaaactcttcttggattcatggcaggtctttttgcctgtttctaaaaaaaaaagaaaaaagcagcctattagctgtgctgcagaagaataaatcaggat

SEQ ID NO: 220277 - DNA, 548 bp, Homo sapiens
ttgttatgtggattctgagaatacttttatcttcctgatataaataatacactttgctgttctctcctattcccagacttcttccttccttsagtgtgcacctgatgcctggggttaagacagccaccagagggaaaggctgagagaatttcaaaaccattgagatatggaaccattgagaatttcagaaccattgagatatggaaccattgagaatttcagaaccattgagatatggaatttactctataatatagagtaggaatatactctataatagcaacttcccacaagacatcttgttatatgagaaaaataaatctctatttgttaaggccactgaaaagtaggctcactctgtcacccaggctggagtgcagtggtacagtcttggctcactctgcctcctgggttcaagcgattcttttgcctcagcctctcaagtagctgggactacaggtgcccaccaccacgcctagctaattttttgtatttttagtagagacagggtttcaccgtattagccaggatggtctcagtttcctgac

SEQ ID NO: 220278 - DNA, 553 bp, Homo sapiens
tcattactctgagagggggtgatactctcagtgtttccagttttttcttcaggtcatctatgatggtaagaaagaacactactcaaatctttaaagtagacttcagatgtgggagccgatgcttaatgggaagattggatcccaccaaagtgagttttgatttcttcattatttttcctaaatcagatgatgatgggagcaatagacttgtaaatgttctgtctcatttctctgatttgtatacatagaagataaagaaaaaaacttgataaggcaaccacaaagcaagtgtcaaagaagaaattgctgttgaacataaaagatcagaggatttaatstttcctgacaacctatagaagcagaataattgaacctgcctcctgcttagttcatccactttccctatctgctttccacagtcttatcttagccttgacttggccaatggctgttttctaaggtgaatactgaagaatcgagtctacagtactaattgttccataaggccactaatatattctgacacatgtattgatttaaaactatgcgtatt

SEQ ID NO: 220279 - DNA, 554 bp, Homo sapiens
ttacacgttgatcagcaggtggtggctgaatgttcccctttgatttctgtggctcaggagcagcgggctaagacatgagctgaataaacatcgtatcatttggcactggcaggattcctggtaacccgggtcaggcaaggtttaagaaggattaggtttagattagaaaaggggttgagttcttttttttcccctgtggtctcttaagtgcctaggggttttgtaagaggagagtgggctgaccgcctaggctcagtttccagaaataaaagtggtgagcttggtgttcttttgcagaagacctaagtgtgtgctaattctgagtttggcttctgctgtaagggtcgtgggctcttgggaatttggtgaaagctctagatcttttctctagagaattgcacacacacacacacacacacacacacacacagacaattttatttatttatggtgyttcctgaaacactcagcctgggggaattttaatagcccacacagctcactaataggaggctgtactcttccccaaggtgagactggggggtaccccctct

SEQ ID NO: 220280 - DNA, 514 bp, Homo sapiens
tatgtcttctcctgagcatacactagatcacatctccttgccttcctaggcaaagatgcctttggctgctttctggccaaagcmatgtggtgagaataatgcatgccatttacagaatgaacctacaaaaatctcccgtgtgatcctctacttcttgccttccttcatttgacagcccaaagccaagaacctagcagacaattctgctgtagggccctaggaaaggacttggcaaactttttcttaagggcaagatggtaaatattttaggctttgtagactaagaagcaaaatcaaggatattatgtgttattttataaccatttaaaaacacagccatttaaacagataaaaaccatttttggctcatgggctgtaaaaaaagaaaaaaaaaaagctggaacaggccaatttggcccatgggccatcatttgctgctttccattcaaggcagtaatggagaaccatgctgggaggagcctgggtctctgaatgattgtgtggaacacagagc

SEQ ID NO: 220281 - DNA, 601 bp, Homo sapiens
aagctttggctgattctcaaccttgcccagggcacagtgtgttagactctcagttgaagaaaataaacagggttctttcatcgacatcaacagaaggctcttacttcaggaaggggatcaggggaggcatggaagaatgaacgagtgagtgaatgagattacaaacacaacatacctgggtccagaatgcagatggttgctagaagcccccytatctcgggagagtttctgacacctcaggatccatttggcagttgggatttaagattagctctatacgcagatgacagggcagattcatttccccaaagctcccctttccaatgcttatcttcggggtcagtgagagagagaggactgggattctggaaacacagtcagaataaaatgcagccattcctgagagctcactgtgttgaagccctgaggctggccttggggacaccattaaaagacctatggagctctcattcaaccccaccccagtcctacctgggggaggcacaggtgtaaacatctaatgaggcaataggagaacgtcacaggggtgtgtgcaatggcagcagatcacagaagacaggcaggttctttctgcttggat

SEQ ID NO: 220282 - DNA, 547 bp, Homo sapiens
tcaaaaattaataaaattgtgaattctgacgtaagtccaatgccttttgatttacttttggggtcctggatttccactcagttcctctcaatccaatcataaaatcttatagtccacagaaactgtaaatattatccagtcctctattactgagatgagaagcctaggatttaaaaatttgcccaaagttatgcatagtggcacagtcagaactagaacccaggtttcttgaccgccartcctctattctctattctataatgttgcttcttgctatatgtgggagacaatgtctagattaaaaattacagaaaacgtcaaaagtccacaagcctctggagtcagaatcagaagcaggagagccaatttatttatgattgagtagaggttgtttgaaaaaaattaataaaacattgtttaagaggctaagtgcctctagggataagaatctggcctcctttgccaagatggaactcaatgaaaactaagactaacgtgtaaatgtatttttgttgaagtttttcccttgagattgggggagggcaaa

SEQ ID NO: 220283 - DNA, 570 bp, Homo sapiens
tcaaaaattaataaaattgtgaattctgacgtaagtccaatgccttttgatttacttttggggtcctggatttccactcagttcctctcaatccaatcataaaatcttatagtccacagaaactgtaaatattatccagtcctctattactgagatgagaagcctaggatttaaaaatttgcccaaagttatgcatagtggcacagtcagaactagaacccaggtttcttgaccgccagtcctctattctctattctataatgttgcttcttgctatatgtgggagacaatgtctagattaaaaattacagaaaacgtcaaaagtccacaagcctctggagtcagaatcagaagcaggagagccaatttatttatgattgagtagaggttgtttgaaaaaaattaataaaacattgtttaagaggctaagtgcctctagggataagaatctggcctcctttgccaagayggaactcaatgaaaactaagactaacgtgtaaatgtatttttgttgaagtttttcccttgagattgggggagggcaaactgatttagataaaatgagatct

SEQ ID NO: 220284 - DNA, 526 bp, Homo sapiens
tcacaggagttatgatggcttagtttgggctcagaggcctgacaagtagtaagccccttgccacaaaatgtgtagcagaggtaacataatcaagcggaaaagacattgtagaaggaagacaagcattataacaaaagatctgggaattgaactaaatggctctaaagttatttgagaccaattagttcacagcatagtaacataagtggcccttattgagtcagaagttggctttttttttcatattttttctagtcagtcaactgagaatctttgtaatttcaaaataacactttgggacgatgtgaaaattcttccccaaacacttacagtatttacttctataacatgactcataatgggtctgggctyatgagaaggcaagacctctgtgtgaacctgaaagtttctacctccatccttatcccaccgagtcttggtgcctgaatgtgatcatcactattgcttcttacccacaagaatttgccttgaaccttcttcctaacagaaactgaagcttgctaaa

SEQ ID NO: 220285 - DNA, 509 bp, Homo sapiens
acccacaaaggaaaacctttcagactaatagcgracttctcggcagaaaccttacaggccagagaagattggggttctaacttcaacccctttaaacagaacaactgttagctaagaactttgtatccagcaaatctgtttcataaatgaaggtgaaataaatcattttcagacaaacaaatgctgagggaatttgccaccaccagaccagccctacaataaatgctagaaggagttctaaaccttgaaataaaagccaaatatgcaccaaaatagaacctcttgaaagcttaaaactcacaagggctataaacaataacacaatgaaaaaaatcaaacttaggtaacaacatgataaagagaacagtaactcacatctcaatatttccattgaatgtaaatggcctaaatgctacacttaaaagatacagaatggcagaaaggatttttaaaaatcacaaaccaaatatttgctgtcttcaacaggctcacctaacatgtaagaattc

SEQ ID NO: 220286 - DNA, 509 bp, Homo sapiens
acccacaaaggaaaacctttcagactaatagcggacttctcggcagaaaccttacaggccagagaagattggggttctaacttcaacccctttaaacagaacaactgttagcyaagaactttgtatccagcaaatctgtttcataaatgaaggtgaaataaatcattttcagacaaacaaatgctgagggaatttgccaccaccagaccagccctacaataaatgctagaaggagttctaaaccttgaaataaaagccaaatatgcaccaaaatagaacctcttgaaagcttaaaactcacaagggctataaacaataacacaatgaaaaaaatcaaacttaggtaacaacatgataaagagaacagtaactcacatctcaatatttccattgaatgtaaatggcctaaatgctacacttaaaagatacagaatggcagaaaggatttttaaaaatcacaaaccaaatatttgctgtcttcaacaggctcacctaacatgtaagaattc

SEQ ID NO: 220287 - DNA, 552 bp, Homo sapiens
acttttctgaaatggtatttgttgtgtttttgttttggctggtggttttgtggttctctagcagtttttattttttgtctgtgttattatgaactaataggcttaaaatatattcaatatgagatagtcaatttcagtcactattgtttttgatgtaaagattgtcccatyttgcaccggcagaagttctttcaaactagttcctgggagatctttttgacacagccctgttatctttgagagattctttattgccaccgcaaggtttatcatcaggttcatcttacttatttcaccctggacttggactcagcccttctccatgaatctctggtcccttttagtgttaatgttacttagaaaccataatctgaacacgtatggatatttcttgccactggtttgtcattatttctaagaatttgagtggacaaaattagggaatactcattttggttgtcctgttttactacatttcaaaataaaaaaaatccctagttgatgaggaacatctttttccttagagaagaattatagttattaaatgtagaa

SEQ ID NO: 220288 - DNA, 612 bp, Homo sapiens
aaacatctatatattttttcataattgggggaatcccaatatgagtgagagataaaatcttatttacaagaacagacattatcaccctttacttcctgtcagctagagtgtgagctcatgcctctgaaatttgaaggaatgacccggaggttcagggtcagagttacaaagttgagaccccagtagtgagatcacaaaggacgcatggtgacaatgccaaccagcagtgatctaagagggtaactcctatggcatatctttgactatgcttcatttcctttggcttycatctatgcctagtctattatccttcaaatggaggtatgggatattattcctataaatttatattccacttaagttaaccagattaatttctgttttattcactaatagaatcttgactcccacaaaaatactagtagaagttattgcaatttacagagctataggataatgaaagaggaatggacaaaacaatacatggaatttgttatgtagcttatttgctgacaaaggcagtgaaaatatagctagcattaagggatgggaatactgatgctcttggcacagattgatagcatgactaatgaaattgtgacctgtgatttg

SEQ ID NO: 220289 - DNA, 612 bp, Homo sapiens
aaacatctatatattttttcataattgggggaatcccaatatgagtgagagataaaatcttatttacaagaacagacattatcaccctttacttcctgtcagctagagtgtgagctcatgcctctgaaatttgaaggaatgacccggaggttcagggtcagagttacaaagttgagaccccagtagtgagatcacaaaggacgcatggtgacaatgccaaccagcagtgatctaagagggtaactcctatggcatatctttgactatgcttcatttcctttggcttccatctatgcctagtctattatccttcaaatggaggtatgggatattattcctataaatttatattccacttaagttaaccagattaatttctgttttattcactaatagaatcttgactcccacaaaaatactagtagaagttattgcaatttacagagctataggataatgaaagaggaatggacaaaacaatacatggaatttgttatgtagcttatttgctgacaaaggcagtgaaaatatagctagcattaarggatgggaatactgatgctcttggcacagattgatagcatgactaatgaaattgtgacctgtgatttg

SEQ ID NO: 220290 - DNA, 566 bp, Homo sapiens
aagttccagtgtttcagggctcttgtatttttccaatagagggaagagagagtgattaattatatastttgttaaagaaagtttgcatattagaattttaagagaaacacagaaaagaaactgaatgcataactgtaaaactactagggttggaagaggttataagattcttaatgcatgactgcagtagacgaagtggccacagaaattgatatattcataatgaactggatgtttctaatccacctatcattaagttgggcatacccacaagcattccatcatctagtggaagtaaacatattcaagatctgaatgttgcagttccccaggttggacaagcaagtagctcacactcctagcatgtctactccagccacacagtgacattctaccttctcccacacccatagccttataaaaagttgtctaggaccgtattttgagtcttatttacagaaggcttatcatgacatagatagaaatggacttttacaatgcaacagtggtggctctgaaggatagtgaaaactaaaattcttccaatgggacaaatgtgaaatgct

SEQ ID NO: 220291 - DNA, 566 bp, Homo sapiens
aagttccagtgtttcagggctcttgtatttttccaatagagggaagagagagtgattaattatatactttgttaaagaaagtttgcatattagaattttaagagaaacacagaaaagaaactgaatgcataactgtaaaaytactagggttggaagaggttataagattcttaatgcatgactgcagtagacgaagtggccacagaaattgatatattcataatgaactggatgtttctaatccacctatcattaagttgggcatacccacaagcattccatcatctagtggaagtaaacatattcaagatctgaatgttgcagttccccaggttggacaagcaagtagctcacactcctagcatgtctactccagccacacagtgacattctaccttctcccacacccatagccttataaaaagttgtctaggaccgtattttgagtcttatttacagaaggcttatcatgacatagatagaaatggacttttacaatgcaacagtggtggctctgaaggatagtgaaaactaaaattcttccaatgggacaaatgtgaaatgct

SEQ ID NO: 220292 - DNA, 566 bp, Homo sapiens
aagttccagtgtttcagggctcttgtatttttccaatagagggaagagagagtgattaattatatactttgttaaagaaagtttgcatattagaattttaagagaaacacagaaaagaaactgaatgcataactgtaaaactactagggttggaagaggttataagattcttaatgcatgactgcagtagacgaagtggccacagaaattgatatattcataatgaactggatgtttctaatccacctatcattaagttgggcatacccacaagcattccatcatctastggaagtaaacatattcaagatctgaatgttgcagttccccaggttggacaagcaagtagctcacactcctagcatgtctactccagccacacagtgacattctaccttctcccacacccatagccttataaaaagttgtctaggaccgtattttgagtcttatttacagaaggcttatcatgacatagatagaaatggacttttacaatgcaacagtggtggctctgaaggatagtgaaaactaaaattcttccaatgggacaaatgtgaaatgct

SEQ ID NO: 220293 - DNA, 506 bp, Homo sapiens
gttgagcatgttttcctgtttgttggccattagtatatcttcttttgagaattgcctattcatgtccttagcccactttttgatgggattgtttgttttttcttgctaatttgtttgagttccttgtagattctggatattagtcctttgtcagatgtatacattgtgaagattttctcccactctgtgggttgtctgtttactctgctgactgttccttttgccatgcagaagttatttagtttaattaagtctcacctatttatgtttgtttttgttgcatttgcttttcggttcttggtcatgaagtctttgcctaagctgatgtctagaagggttttttccattgttatcttctagaatttttayagtttcaggtcttagatttaagtccttgatccatcttgagttgatttttgtataagatgagagatgaggatccagtttcattctcctacatgtggcttgccaattatcccagcatcttttgttgaataaggtgtctt

SEQ ID NO: 220294 - DNA, 436 bp, Homo sapiens
taactctgaatctgggcaagtttcctggagaagttgatccttgagcttcagttraaagaggagacgtgtatttggcagatagtttttatccatgtgatcagaatgatttcaataaggtctaaaaaggaaagtgaatctcacacactaaaccctgcctgccatttctctctttgtaccttgggatggtgatacttgcataaaaagaaaaaaaagaaaagaaaaaaagactaaaaattattcccagaagaggaaactagagaaaaaaattgttattaggataaataaaaaattatctggacaagtcttcgggtatttttacagagtaggtgctagcaatgataaataattggctaaaatatattttattccccaatcagggagagatttactctcaataatgtaatattttgtgatatatatttattaatttttatac

SEQ ID NO: 220295 - DNA, 595 bp, Homo sapiens
tgaatgacacagccaagctgaagcttgattgagtttcagtttaccagaatggtcaggagggaacaaagccagatgaagagtgtaagcctcacctagaggagaatgccaagttttaaaactagagaaaagcagccaattctgtggtcaggaccgaggactaatttgaggatcacagatgagagataaagccaagaaggtccaggaggtattaaaagcaatcatagtggaatcaaacaacaaaggcagggaggcaggagggtttcaaactttttatgtgaatagggctagaattgataaaaagtgtttttatttggttctacattctatataaagcttaaatgttaaatagggctgggaaaacatcacattgcataaaacatcaccatctgtaaaaattagcaaaaaaaaaatttagcaataagtgttcatcacagttcatttttgtaaaatgaaacttgaagacctttacgtaagtaaaatttactaggaggaaaataytgaacaattaatattggtgcttcccttttatattaatttgtataggtatacgtatttatatgttatatgtaatatgtgttatacctctttatgtatt

SEQ ID NO: 220296 - DNA, 499 bp, Homo sapiens
ggtcatcctgatgagtgtccagctctcagcagtgaggagacctgtggtgggtagcccctctccgcaggcaggtcatcctgaaaagtcaaggagaccaaagtgggtagctccttcctgcagctgatagtcctgacatctgtgtgagtttggctgagtctggggtttttacgggctcagaagggaggaagtatatgctgacgggtccatgggctgccatgggtgggcctggaaaaagcgccgtaagttctcactccaggccacatactctacctggaactggcagcctggcmtccaggcgtcaggccatctctggcttgaaggtgaagtttgactggggacctgcccctttcctcccaggaatatgtctgctttccactatcaacataccatccatggtgcccaggctgttcagtgcctgctggcacatgctgagctgccctcagcaacccccagcctcccttctgtgctcatcagcacacaaaatccataaagggccagg

SEQ ID NO: 220297 - DNA, 478 bp, Homo sapiens
ctaaaatcataaatccgtgttctggatccaatgaatagctatctcattttcattatgcagaatcctaatactttttagtattmatatcaacctaaaaatagattttgtctcaaaaggatccactataaccattgctttgaaaaaataagaaaatagtcatttggaaaaaattatatgtatttgttatccagtttatccaatttccatacaaagtacttattcataaatttaaagtacaatatcctggtttgagtatgataaataaccaaaagaaaatagtcatgcttatgaatgattagcctacaagtgtggtaacattctttctgaacaaacacaaaagtccatgcttcaaatttggttttctgcccaataaacttcttatttaggatgtgattaatgtaccattacttcaacatcactaatgcatatactcagtcatatgaatcacacatttagattaaaaacttgccaggaatga

SEQ ID NO: 220298 - DNA, 610 bp, Homo sapiens
tggccactgagtacatatctttttaataccttgtgggatgaaatgggcagaaacaaagcattttcagtgtaaccaaaaatagtgttttgtcttgaggaaaagcccatgtgccttttgacctgtgagctctactagccacgttttgtgtggatctccatttttaaytgaaagagctgacagaaaaactttagttattcatatttgggtattttccaatttttttcttaaaaatgaataaagaaagccagactgtcccttcaaggaaaacaagtgacagtattttttgccaatgataaaatttgagcttggagcaaaaaataagataaaattttggaaaacttctatctgcctccatgagcttgacagccgtcctatacatagttttctgagaaaatcagtagtgatattaacaaatgtaatttttaaaaatcaataggctctctaattttgtttagcagtttagggtttacagagaaattgaacagatagtatagagtgttaccatacattccctcctccactccccagctttctgtattattaacatgttgcactagtgcattgcatttgttcaatatgaatcaatattgatacattgttattaagtaaa

SEQ ID NO: 220299 - DNA, 591 bp, Homo sapiens
ttgccaattatcccagcaccacactgaacagacaaataacaagcagtgaggttgaaatggtgatttaaaaaattgccaaaaacagagtccaggaccagatagattcacagctgaattttaccaaacattcagagaagacttggtaccaatcctgttgacactattccacaagataaagaggtaatcctccctaaatcactctatgaagtcagtatcaccctaatacccaaaccaggaaaggacataacaaaaaaaagaaactatagaccaatattcctgatgaacatagatgcaaaaatacttagcaaaatacctgctaaccgaatccaacagcatacaaaaaagataatctacgatgatcaaatgggtttcataccagggttgcagggatggtttaacatgcgcaagtcaatgaatgtgatacaccacataaacagaattaaaaacaaaaatcacatgatcatctcaatagatgcagagaaagcacttgacaaaatccagcattcctttatgattaaaaccctcagcaacatcgacatacaagggacatacctcaacgtaataaaagycatctgtgacaaccccacagcc

SEQ ID NO: 220300 - DNA, 404 bp, Homo sapiens
gttttctcaaaaaacagctattttgaactctctgtctgaaagatcacatatttctgtcactctgggattgatcactggtgccttatttagttatggtgaggttatgttttcctgaatgatcytgatggctgtggatgttaatcaatccataatccacaatcttcaatgtctgggcatcgaagagtcagatatttattgtagtcttcacagtctgggcttgtttgtactcatccttcttggggggctttccaagtattcaaagagaactgagtgttgtgaactaagtctttggtcactgtagctttatctgtattaggaggcaccccaagcccagtaatgctgtgactgttgcagacttgtagaggtaccaccttggtggtcttggggaagatccgggagaattc

SEQ ID NO: 220301 - DNA, 415 bp, Homo sapiens
catctacttctgactgcaccagagaccatagaaagaaaayggcaagctgggaaactttacacttttggatcaaggcctggtcaaggactagaggacttctaggacccttgtagctacattgctgatatagccaaaaatcagacctaaggtccgcttctgcatgttgcaaaattacagcataaaataaattcaaagacttgccaagtctcttacatgaaagctaaagttcttattgtaaagagtgggctatgagaactggaacaggggcatttgtaggatttgggtgaatccgaggactttgaatgcaaatcctcctgaggcacttacttgtcaggaaaataagtccctctgtcctcgtttgtcctttctcccttgtcaacagactattgattccactacaggccattacgtaaca

SEQ ID NO: 220302 - DNA, 363 bp, Homo sapiens
catctacttctgactgcaccagagaccatagaaagaaaatggcaagctgggaaactttacacttttggatcaaggcctggtcaagractagaggacttctaggacccttgtagctacattgctgatatagccaaaaatcagacctaaggtccgcttctgcatgttgcaaaattacagcataaaataaattcaaagacttgccaagtctcttacatgaaagctaaagttcttattgtaaagagtgggctatgagaactggaacaggggcatttgtaggatttgggtgaatccgaggactttgaatgcaaatcctcctgaggcacttacttgtcaggaaaataagtccctctgtcctcgtttgtc

SEQ ID NO: 220303 - DNA, 447 bp, Homo sapiens
tgagtataatgtactcttggaaactgagtgattggaagaaaaacctaacactgtctaaatacatgggagtgttgtaaactgcatagtaggactcaaaaaccaagactgtgctatgtgctagtatttctgctgtaaatgcctagtaattccttattcccaatctgtagttggaccttgaacactggctcacgcaaagcaagttctattgattttatttatatcctatagatacagaatgtgaatgcataccaataactgcaaaagcaagcagctaacgcagattagagttaacattagcaaagaaagatgggttggtacttatttttttgaaaaamcacagcaggaacaatttaatagctgactgaattgctaccagaaagacatgcacaggcacgtttgctgattagccgaggtccactttgttcttatttggcagattatgcaata

SEQ ID NO: 220304 - DNA, 415 bp, Homo sapiens
atggggtgtgtcatctacttctgactgcaccagagaccatagaaagaaaatggcaagctgggaaactttacacttttggatcaaggcctggtcaaggactagaggacttctaggacccttgtagctacattgctgatatagccaaaaatcagacctaaggtccrcttctgcatgttgcaaaattacagcataaaataaattcaaagacttgccaagtctcttacatgaaagctaaagttcttattgtaaagagtgggctatgagaactggaacaggggcatttgtaggatttgggtgaatccgaggactttgaatgcaaatcctcctgaggcacttacttgtcaggaaaataagtccctctgtcctcgtttgtcctttctcccttgtcaacagactattgattccactacaggcc

SEQ ID NO: 220305 - DNA, 415 bp, Homo sapiens
catctacttctgactgcaccagagaccatagaaagaaaatggcaagctgggaaactttacacttttggatcaaggcctggtcaaggactagaggacttctaggacccttgtagctacattgctgatatagccaaaaatcagacctaaggtccgcttctgcatgttgcaaaattacagcataaaataaattcaaagacttgycaagtctcttacatgaaagctaaagttcttattgtaaagagtgggctatgagaactggaacaggggcatttgtaggatttgggtgaatccgaggactttgaatgcaaatcctcctgaggcacttacttgtcaggaaaataagtccctctgtcctcgtttgtcctttctcccttgtcaacagactattgattccactacaggccattacgtaaca

SEQ ID NO: 220306 - DNA, 599 bp, Homo sapiens
cacaacacccatgaacaaaaccatggaataacttttattccacagcttttggcattacaccaattcattccccttacctccgctctctctcctttttaagttactcttcatccctagcgaaagtgagttgcccttcaggaaagactttttctggaacgaatctttccaactgcagaggagcttttgagtatctggcaacgatgagtagtattactgacattctggttttgtgacgttgggcgggtcatagactctggagctgtttcctaatccataaaaagtgctcttattctagaaatctattattctgggagtccccttattctgtttattggctttgaagctcttccaatccaaacaatttctcccataagkcataggaaatgagcacttttacaaaaagcaagacattgaggactgaagtgagtcattctaacagctaattagattgttgtgcattttggatacatgtaattaatggaccctcctttaagaatagtgagaagatctgattggcaaaatggacaaaaatagaacatactttggtttgtaaaagtttgaatttacgtaagatggtagtaacattacctcaattgtta

SEQ ID NO: 220307 - DNA, 651 bp, Homo sapiens
taattagcttttatttctataaaagagagagttataaggtggcataagggtacctgacaaagttagaagagtaagcctgaaaattcagaagacaaaactcctgagcactagatacttatcactagcctttggtatcaattacttcatgtctataggttatgttggctacaaaatgtaaagtctgtactgctacaaaatgcaacacatctagcctgcatcaaaggaaactgggtgaaatgrcaggaagtgaaagtgatctggcgagtgtgacttcacaaattgatcagctggattaattctgctgattcagttggtgacgtgcaggtctcttgctctcagttgtcactgtgcatatttactaatgctttaagtccaaagaggggccaatctccacagaaagaggagatctgtcctctgtcaagggtatttagtaaccctgcttacctgctggaacctccaaacaagtgcccaagatcctaataaatggagggctggtattattgcccagataattaagacaaatttgaggaaaagtaaatttccattaacgtaaacagaaccagagttgctaattttcaaagttcaaattcataagaacattctcctagaatcctttttctttgtctagatatgtataatgagtaactaatg

SEQ ID NO: 220308 - DNA, 651 bp, Homo sapiens
taattagcttttatttctataaaagagagagttataaggtggcataagggtacctgacaaagttagaagagtaagcctgaaaattcagaagacaaaactcctgagcactagatacttatcactagcctttggtatcaattacttcatgtctataggttatgttggctacaaaatgtaaagtctgtactgctacaaaatgcaacacatctagcctgcatcaaaggaaactgggtgaaatggcaggaagtgaaagtgatctggcgagtgtgwcttcacaaattgatcagctggattaattctgctgattcagttggtgacgtgcaggtctcttgctctcagttgtcactgtgcatatttactaatgctttaagtccaaagaggggccaatctccacagaaagaggagatctgtcctctgtcaagggtatttagtaaccctgcttacctgctggaacctccaaacaagtgcccaagatcctaataaatggagggctggtattattgcccagataattaagacaaatttgaggaaaagtaaatttccattaacgtaaacagaaccagagttgctaattttcaaagttcaaattcataagaacattctcctagaatcctttttctttgtctagatatgtataatgagtaactaatg

SEQ ID NO: 220309 - DNA, 651 bp, Homo sapiens
taattagcttttatttctataaaagagagagttataaggtggcataagggtacctgacaaagttagaagagtaagcctgaaaattcagaagacaaaactcctgagcactagatacttatcactagcctttggtatcaattacttcatgtctataggttatgttggctacaaaatgtaaagtctgtactgctacaaaatgcaacacatctagcctgcatcaaaggaaactgggtgaaatggcaggaagtgaaagtgatctggcgagtgtgacttcacaaattgatcarctggattaattctgctgattcagttggtgacgtgcaggtctcttgctctcagttgtcactgtgcatatttactaatgctttaagtccaaagaggggccaatctccacagaaagaggagatctgtcctctgtcaagggtatttagtaaccctgcttacctgctggaacctccaaacaagtgcccaagatcctaataaatggagggctggtattattgcccagataattaagacaaatttgaggaaaagtaaatttccattaacgtaaacagaaccagagttgctaattttcaaagttcaaattcataagaacattctcctagaatcctttttctttgtctagatatgtataatgagtaactaatg

SEQ ID NO: 220310 - DNA, 563 bp, Homo sapiens
aatttgaggaaaagtaaatttccattaacgtaaacagaaccagagttgctaattttcaaagttcaaattcataagaacattctcctagaatcctttttctttgtctagatatgtataatgagtaactaatgtgtttgaggttttttttccccatttttgggtttcattgtcatttcagacctgtgcataactaataaagagcatgcagctttgaataattgcaacttggcactactcccttgcttatttagcttacacccataattgctgactatttttcctgcttttaatttttatttctagggctaggaaattaaagcacacacagagattgctacataatttagctgcaacagtagccattcaatatttcacctttgccaatatttgtgcttgtttgagcataatgttttaggctgggatactgaattatgratgagcagtcagactgcaatgcagagtttcatttgcttttaagaataatgaatgtttctggaactttactcaatttaaatataaccgtaaaagcaaatacaggacaatagtataataaaggggtatta

SEQ ID NO: 220311 - DNA, 563 bp, Homo sapiens
aatttgaggaaaagtaaatttccattaacgtaaacagaaccagagttgctaattttcaaagttcaaattcataagaacattctcctagaatcctttttctttgtctagatatgtataatgagtaactaatgtgtttgaggttttttttccccatttttgggtttcattgtcatttcagacctgtgcataactaataaagagcatgcagctttgaataattgcaacttggcactactcccttgcttatttagcttacacccataattgctgactatttttcctgcttttaatttttatttctagggctaggaaattaaagcacacacagagattgctacataatttagctgcaacagtagccattcaatatttcacctttgccaatatttgtgcttgtttgagcataatgttttaggctgggatactgaattatgaatgagcagtcagactgcaatgcagagtttcatttgcttttaagaataatgaatgtttctggaactttamtcaatttaaatataaccgtaaaagcaaatacaggacaatagtataataaaggggtatta

SEQ ID NO: 220312 - DNA, 537 bp, Homo sapiens
tttgtgaaatgggcactcaacactgagggaagtggggaatgaggagagtcccacatatgagactaagaagctgcagcctgtgtggtaggaagaaaaaagacaaaaggaaggtctgaaagccaaacaaagaatgagttcaaggagggagtgatcaactgtgttaatgttgttaattttctttacatgtacatgtttctacatgttcataatatataaaaagagtatgtgcattttatatataaatatcaggtctgagcmggtgcgcgtgtgcctgcctatcatttaaaatcatttctggaaaaataaagaatggctttgtgcattgcccacaaggaggttcaagatgctcagaaattcactggttaggagcaattctttaagaacacgttaaatataattctataccttatgtagagcccatttagacataagtcctcagagtaagacgtctcttctttcaggccctccctcaatcagcctccctctcttgttgagttggggaccgtgctatgagctgacaatgacccttgagaaatt

SEQ ID NO: 220313 - DNA, 537 bp, Homo sapiens
tttgtgaaatgggcactcaacactgagggaagtggggaatgaggagagtcccacatatgagactaagaagctgcagcctgtgtggtaggaagaaaaaagacaaaaggaaggtctgaaagccaaacaaagaatgagttcaaggagggagtgatcaactgtgttaatgttgttaattttctttacatgtacatgtttctacatgttcataatatataaaaagagtatgtgcattttatatataaatatcaggtctgagccggtgcgcgtgtgcctgcctatcatttaaaatcatttctggaaaaataaagaatggctttgtgcattgcccacaaggaggttcaagatgctcagaaattcactggttaggagcaattctttaagaacacrttaaatataattctataccttatgtagagcccatttagacataagtcctcagagtaagacgtctcttctttcaggccctccctcaatcagcctccctctcttgttgagttggggaccgtgctatgagctgacaatgacccttgagaaatt

SEQ ID NO: 220314 - DNA, 537 bp, Homo sapiens
tttgtgaaatgggcactcaacactgagggaagtggggaatgaggagagtcccacatatgagactaagaagctgcagcctgtgtggtaggaagaaaaaagacaaaaggaaggtctgaaagccaaacaaagaatgagttcaaggagggagtgatcaactgtgttaatgttgttaattttctttacatgtacatgtttctacatgttcataatatataaaaagagtatgtgcattttatatataaatatcaggtctgagccggtgcgcgtgtgcctgcctatcatttaaaatcatttctggaaaaataaagaatggctttgtgcattgcccacaaggaggttcaagatgctcagaaattcactggttaggagcaattctttaagaacacgttaaatataattctataccttatgtagagcccatttagacataagtcctcagagtaagacrtctcttctttcaggccctccctcaatcagcctccctctcttgttgagttggggaccgtgctatgagctgacaatgacccttgagaaatt

SEQ ID NO: 220315 - DNA, 504 bp, Homo sapiens
tttatattgactatctttttaaggctgtctactgtaagctacttgcacacactatagtactaattctaattctaggccaccacyattggctcttttttccttttctctccacactcatctgttcacatagcttcaatcatcccttctacattagtgtttgccaatggtcctcctctagtgctgattcttctctgccttcaggtccacatttctgatggtccattggacaaccataaccaaccaatgttccacccaaaaattaacacaaccaaaatggaattatcttattttccttgctcccaaaccagtaactagctgccattctctaagccacctgggctccactccacttcctctcttctcctctcttcttcactcctctcttcttcactcctctcttctctcttcctctcatcatcacatccttcatttcttacttcagcacagctacataatgccgtggtgacatgattatgcatttaaggtcagaaacacttgggaaca

SEQ ID NO: 220316 - DNA, 257 bp, Homo sapiens
accacacaattacaggaaaattaaacaacttgctcttgaatgacttttgggtaaacaaagaaattgaagcagaaatgaaaaaaatctttgaaatcagtgaaaacagagacacaatatcaaaatctctgggatgcagcaaaagtggtgttaagaggaaaattgatagctctgaacacctacctcacaaagttagaaaaatctcaaattaacaatctgacatcacacctataggarctagaaaatcaaggacaaactaa

SEQ ID NO: 220317 - DNA, 565 bp, Homo sapiens
acaaaagtccaaggattatgttaataatagtaccactacattaatccttgtgtccaaagaaatatcatgagactgactggcttaggtcagggttatataaagctattgcagtggggtgatgggagggattaccctgatattccagtacaggccccatgggcactgtattggcctgccaaagctgctgtaacaaggtaccatagaccaggtgggtaccttaaacaatggaaatttattttctcacagtttcagagtctagaaggccaagatcaaggcatcggcaggcctggtttctcctgaggactctttccttggcatgcagatgatactttcctactgtgccctcacctggcctttcctctaattaaaagacccaaaagaaccacaaattgaggcatataacctgatatcaaagcttgattcactatggccccyataatatataaactgtacatcagttacagtgattttcattccagataaaacaatacaatgtggcttaagtaatagaagaaacttcttagttcacataattgaaaacttcagcctgcaggcagggactaat

SEQ ID NO: 220318 - DNA, 561 bp, Homo sapiens
gaccatcagtttgagaccagcctcggcaacttggtgaaatcctttctctatgcacatgcacgcgcgcgcrcacacacacacacacacacacattagctaggcatggtatgagcacctgtagtccctgctactagggaggctgaggtggaagaattggttgagcccaggagtttaaagttgcagtgagccatgatcacaccactgcactccagcctgggcaacagagtgagaccttgtctctaaaaaacaaacaaatcaaaatttagtttcttaaagaacatcttaatagggctctgagccatttttcaagtcacatgtatgttttcacaggaaatagggcagggggataggaaataactgaaggacagactgtatagaggaatatccacaggggaagacagaagttagcaaaagagcatggtgtggaggatggtctaactgagaaagagggcattactagaatataagatctgctgcagttagaagagacccaaaataacattgtggcaaatggagacaactttatctctgttgtttaatggcccagagagacatgggcag

SEQ ID NO: 220319 - DNA, 626 bp, Homo sapiens
aagggcaagagaggaagtatactccctcttccaccttgagcctttttatgagtcctaatctcatctatgggagctctgactttattacttaattacctcttaaagaccccaccttttgatcctattacattgcagattaggtgattaggtttcaagctatgaattttggagaggatgtaaaaatccaaaccataataattatgtgtgcttatttatatataatatatagttgtaagcatacactacaaactctagggcaaccactaaaaataaaaatagaagtataactgatatgctaagaaaggagataaaatggcatcatgtaaaatgctcgattaaaaccacatatagcagaaaaaaggacaaaaataagaacaagaaaaagaactagagaactgttccaagtaaatcttaatctaaatatctaaatatcaataatcactttgaatgtcaatggtctaaatgatctacttaaagaaaaaagattgtcagaatgaattaaaaacaagacccaaccatatgttgtctayaagatacccactttaaatataaagacacacatagattaaaagtaaatggatggagaaagatataccatgctacacacacacacacacacacacaca

SEQ ID NO: 220320 - DNA, 430 bp, Homo sapiens
gacagcagtcttgtaaggactttatgaataaaaatgtatttaatcttcataatagcttgatgagtcatagtcaatcaattctcattattcacagtacttatgttctgtacaaacaatgaattggactgctgctcctagaaaaaataaatggtcaggttcctttgagcccctggtgacagcattttyatcaactgaacatctatacaaccctgttttatgtgtgcttgtgtttaaagacacctcatgtaacatataatgttgttttatttacattaaactcatggccaacagcactataactcctgcctgaataaaacttatctaacacatgtattttctccataaaacacaccacagccttcttgcacacagaaacactagacagacagcactttggcactacacttagggccattttagaaggtgaaat

SEQ ID NO: 220321 - DNA, 430 bp, Homo sapiens
gacagcagtcttgtaaggactttatgaataaaaatgtatttaatcttcataatagcttgatgagtcatagtcaatcaattctcattattcacagtacttatgttctgtacaaacaatgaattggactgctgctcctagaaaaaataaatggtcaggttcctttgagcccctggtgacagcattttcatcaactgaacatctatacaaccctgttttatgtgtgcttrtgtttaaagacacctcatgtaacatataatgttgttttatttacattaaactcatggccaacagcactataactcctgcctgaataaaacttatctaacacatgtattttctccataaaacacaccacagccttcttgcacacagaaacactagacagacagcactttggcactacacttagggccattttagaaggtgaaat

SEQ ID NO: 220322 - DNA, 619 bp, Homo sapiens
cattgtttaacaacctattccatgaagatatatattgcttccagtttattatcttagttgatagcataatacatggaaattcaaaaaatyctttttgaattaactattaaacagacatatttagctataaggaaagaactatctttctaattgcttattttacactcctataccagaatatccgggcactgaatgtattgacttttggtcaaaacttcggaaaagaaaacagtttcagataaagaggaatggatatctccaaagtagatgtccagagaaatataaaaagaatttatttatggaacctacatcaactaaatccttttctggaattgaaatgccattcacctctcaaagatgcccaggaatatgaactaagttggttttgatatgattggctgatggatgatgccattatctgagtttggtatctttggggcgcagttatcaattacacagcatatttcatcaaagctaagatagcgttcattgtaaaatgcaccattattttatgtaccttcaaaatagtaaaggaaaacccgataaataacaattctgtgacagtaactaagaaatattgattgtaagacacacttcaattttagagacactaaaatgt

SEQ ID NO: 220323 - DNA, 619 bp, Homo sapiens
cattgtttaacaacctattccatgaagatatatattgcttccagtttattatcttagttgatagcataatacatggaaattcaaaaaattctttttgaattaactattaaacagacatatttagctataaggaaagaactatctttctaattgcttattttacactcctataccagaatatccgggcactgaatgtattgacttttggtcaaaacttcggaaaagaaaacagtttcagataaagaggaatggatatctccaaagwagatgtccagagaaatataaaaagaatttatttatggaacctacatcaactaaatccttttctggaattgaaatgccattcacctctcaaagatgcccaggaatatgaactaagttggttttgatatgattggctgatggatgatgccattatctgagtttggtatctttggggcgcagttatcaattacacagcatatttcatcaaagctaagatagcgttcattgtaaaatgcaccattattttatgtaccttcaaaatagtaaaggaaaacccgataaataacaattctgtgacagtaactaagaaatattgattgtaagacacacttcaattttagagacactaaaatgt

SEQ ID NO: 220324 - DNA, 458 bp, Homo sapiens
ttgaagccaaaatcatgtcctttatactttgcatcttcttcaagattaactcatagccttttacataatagttgcaccattgaataagctgagtgagaaatacattattgcrtacatgccgtggctgcttttctaatgtgcagaaagaaaggctttaatggtaatttaaatcaagactctaaatattaatagcaatcatttattgtattctgcatccaaatactgttcttaaaatgttaaaaaactttaaggaaaactagtaattcttcattgttgcctacatcttaactttaatcaatattacaaaatttcagccaatgcctgctccgctgcctaatcagttttggggagggaaaaaaaaaacaggtctttggagaaagagcttaaattcaaatctctcactgctacttctcaagtgttattcatcctgagattccttccaaaagcttaccaatatt

SEQ ID NO: 220325 - DNA, 578 bp, Homo sapiens
ccttgaggagttcattttagtggaagaaacagtgatataaattaattaaatacagtgataggaaaagtgttatcagtgcttgtaggacaatatcatttactctgcaagggaagatttaacagagacaattggagttgagctttgttttcaactatttctggaaattgcaagacacagaagagaagaaaaattttgagaaataggaaaaaaaatatcatgcaaaggcaaggaagtaagaaatagccttttgtattctagacatgctacaaagttcaaagagtttagaaagatgcacaaatgatggggaatggagggaaataaggtgggcaggagagagccttgagactatactacaatctgctatgacaaaatgaggatcattatgagagaaaatagacacytaagtaaatgaaggaatgcgctatactcatagattgaaagactccatattttaaacataaacatttttaattgaagcataaatataaaacaatcagaattaatatttgattagttttgtgaaagtaggtaaacccatcctaaaatttgtgtacaaattatgaggtcaaaaaatagcc

SEQ ID NO: 220326 - DNA, 587 bp, Homo sapiens
gaattctaattgccccgttaccccacatgctcagggcacctatcctccccatcccataatatccctgtgcctcagttatctcatctgtataataggtaccagcatatccaccctgcttatttcctagatttttaggataaacacacgtgaaggtgctttgtagtctagaaccttcccttccactggggatgttgctgttgtcttctcagttggccccatgcttggagtccagggcaggccccgatgctgcaggatgttaacattttcagtggttgcgctctcaatgttctctttccctattttttttttcaagttggggtctcgctttgtcacccaggctggagtgcagtggcatgatctcagctctctgcaacctctgcctcctggattcaagtgattctcctgcctcagcctcctgagtagctgggattatagctgtgggccaccacacccagctaatttttgcatttttttagtagagacaggttttygccatattaaccaggctggtcttgaactcctgacctcaggagatctgcccgcctcagcctcccaaagtgctgggattacaggtatgagccaccgtg

SEQ ID NO: 220327 - DNA, 369 bp, Homo sapiens
agctttagggtgggaccaagattctgctttttgtaacaagcctwcctactgatgctactctacatggcccgtgaaaaccgtattggaaaactcctagcatttcagtagattttccagttaatgaagtcttacattttaagcatcaaaactttgtgtaaatgttggtgcttttcagtggaaaattaagatttttaataatattttatatggtgttctgccctcataaaaactgaataaacaagaatttggccttctaccgaggactcacgccctctgtaataagtaccagatgctgtgcttggttgtcccatctttgggaaaatgagatattcaaggctgtcagtcccagtgtgagatgggctcagatgc

SEQ ID NO: 220328 - DNA, 435 bp, Homo sapiens
ttgatagctttagggtgggaccaagattctgctttttgtaacaagccttcctactgatgctactctacatggcccgtgaaaaccgtattggaaaactcctagcatttcagtagattttccagttaatgaagtcttacattttaagcatcaaaactttgtgtaaatgttggtgcttttcagtggaaaattaagatttttaataatattttatwtggtgttctgccctcataaaaactgaataaacaagaatttggccttctaccgaggactcacgccctctgtaataagtaccagatgctgtgcttggttgtcccatctttgggaaaatgagatattcaaggctgtcagtcccagtgtgagatgggctcagatgccttcgcctgttgagtctttgggtgtgcttttaatggtctctctgcctcttccttaggtgtc

SEQ ID NO: 220329 - DNA, 416 bp, Homo sapiens
gctttagggtgggaccaagattctgctttttgtaacaagccttcctactgatgctactctacatggcccgtgaaaaccgtattggaaaactcctagcatttcagtagattttccagttaatgaagtcttacattttaagcatcaaaactttgtgtaaatgttggtgcttttcagtggaaaattaagatttttaataatattttatatggtrttctgccctcataaaaactgaataaacaagaatttggccttctaccgaggactcacgccctctgtaataagtaccagatgctgtgcttggttgtcccatctttgggaaaatgagatattcaaggctgtcagtcccagtgtgagatgggctcagatgccttcgcctgttgagtctttgggtgtgcttttaatggtctctctgcctc

SEQ ID NO: 220330 - DNA, 446 bp, Homo sapiens
ctggtgcagtcaccaatacaaagcaggaaaaaatgtggtgcccaacagatggtgaaaagaacactggtttacaggatgagagctgaaacaagaaggcggtgtgtgcccttgttmtatatcacctggaaatgggagttaagtgttgggcaactcaaattttttgtccatgaatgtgtgtgaaaattagaaaacaccacaagtattgatttggaggttacaaatcaattttattatagcatgtagggaaattcagatacagaaccagtaaataatgaggatggactgtaccaacatagatagttggggatacctggtgtcacaggccaggcattgtccatgtgttttggttttcctctttgtagccagtagggtgagtccacaaacacagggtacaagttaaggcacagttctttaccttaaagctattgctcagggacacatccgcc

SEQ ID NO: 220331 - DNA, 446 bp, Homo sapiens
ctggtgcagtcaccaatacaaagcaggaaaaaatgtggtgcccaacagatggtgaaaagaacactggtttacaggatgagagctgaaacaagaaggcggtgtgtgcccttgttatrtatcacctggaaatgggagttaagtgttgggcaactcaaattttttgtccatgaatgtgtgtgaaaattagaaaacaccacaagtattgatttggaggttacaaatcaattttattatagcatgtagggaaattcagatacagaaccagtaaataatgaggatggactgtaccaacatagatagttggggatacctggtgtcacaggccaggcattgtccatgtgttttggttttcctctttgtagccagtagggtgagtccacaaacacagggtacaagttaaggcacagttctttaccttaaagctattgctcagggacacatccgcc

SEQ ID NO: 220332 - DNA, 446 bp, Homo sapiens
ctggtgcagtcaccaatacaaagcaggaaaaaatgtggtgcccaacagatggtgaaaagaacactggtttacaggatgagagctgaaacaagaaggcggtgtgtgcccttgttatatatcacctggaaatgggagttaagtgttgggcaactcaaattttttgtccatgaatgtgtgtgaaaattagaaaacaccacaagtattgatttggaggttacaaatcaattttattatagcatgtagggaaattcagatacagaaccagtaaataatgaggatggactgtaccaacatagayagttggggatacctggtgtcacaggccaggcattgtccatgtgttttggttttcctctttgtagccagtagggtgagtccacaaacacagggtacaagttaaggcacagttctttaccttaaagctattgctcagggacacatccgcc

SEQ ID NO: 220333 - DNA, 578 bp, Homo sapiens
cttttctcctcctattaaaatagcgcttttcacactttcatgtgcatagtgggaatcccctggcatcttgttaaaaggcagattcaggccaggcgtggtggctcacgcctgtaatcccagctctttggtaggccgargcaaatggatcacttgaggtcaggagttcgagatcagcctgaccaacatggtgaaaccccatctctactaaaaatacaaaattagccagatgtggtggcacatgcctgtaattccaaactactcgggaggctgaggcaggagaatcacttgaacccaggaggcggatgttgcagtgagccaagatcaagccattgcactccagcctgggagacagagcgagactccatctcaaaattaaaaacaaaaaaaggcagatagattcaggttcagtaggtctaggatggggtctgagattctgcatgtcccctaagctcttacataatgcaattgctgctggtctgtggaccacattttgagtagcaacatatatgtgagaatgagacggagaggagaaagcgcctggttagccaggcagtcatgtcttccttgcacacacacac

SEQ ID NO: 220334 - DNA, 599 bp, Homo sapiens
aaatcaaactgccttttctgggtcagattctggacaattctgggaacttgtctgcagaacaaattgatttatggggacccagctgtgaggaactgtacaaaacagggatcagaggagatacactccagatgtggcttcattaaaagcagggagagaaaaatacggctgaagggcttcttaggtccattgggccgtgactcggagtcttgggagaaagtatggcaagggcctgtggcatcaagcggctgactttgagctggatagcagcttagaattcattctgtccaacctccagacactakggatggggaagccagaggcctagagagcaaaggggctgattcggtatcacacagccagggtagccaaggttgggaccagaacccacgtcttctgctgccagttccaacgtctgtcccatcacctgcccctgcctctcactctaagagtctgccttttagaaaccaactcaaggctgttttcttaattaaaagccaatctcactgtgttggtgagattggccacactttgaagaatgaggccaggcatctatctatctatctatctatctatctatctatctatctatctaattagct

SEQ ID NO: 220335 - DNA, 354 bp, Homo sapiens
acaggaaggcaagtggccgcaaatcatgttgtactagttacagactttggcactaacatggtgggcactcaaatcctagtggtgaccctggggactccaggagggcaggctattttccctctcagccccacagaggagagtatctcaagaaagagaaggtgttcacctgtgtygagatgttcctgaaaggccaaggaagaaaaggactgaggtatgtctattggactcagtcacaggaggttatggtgaccttgacaagaacagttttaaaggactggggagtcggaaaccagactgcaggggagggagcaggagtcaaggaagtgggaattgtgagtagaaattactcacgga

SEQ ID NO: 220336 - DNA, 401 bp, Homo sapiens
ctgttggtctgagggatattaagcagaatgacatgttcaaatctgttatctgaagaggacactgggggcacygtgagggagaatgggttggaaagagcctggtgtcaaggaaaccagtttcacagtattctaggcttaggaggagagatgcgagtctcagttaaggcattggtaatgggaatggaggctagtctgtatttcaggaatggtcagatgatgtttatagccagcatctggtaagtgctgatttcattctcataacaaccatcagagcagactgtcgtcatatacatgaagaagctgaggcccagagatgctaagaaacttgtctaacttctccaaagccactgcttggaggagttaaatttagttctgtttagtgttacctgagtccatgtttc

SEQ ID NO: 220337 - DNA, 645 bp, Homo sapiens
agatctgttttagaaaagaaaagaaaagraaagcatagatggcaaattatttgagcaatattgagatgttgtttattgtgaaataaacaatttcacattaaacatttatgaaaactctctaacagcaaaactggatcttccttaagtgggcagctttctcaatccagcagtagttcatttctcattccacacatgatggtcagaaggtaggttttgttgtcctttcttcccactccacgacttgtaaagaaaatgaaacacgattccctctgcatctgtgacacttcatccatttgcttaaactatcacttcctacccctcaccctgccatgtctgaccttgctcaggcaccaggcttgctctgtttgctttatgccttgcccatcctcccttctcaccaacactacccctaatttttcccaaggtatcagccttctcctttcttgtttaccttttgatccaactcagcttcctgacacttccttaaactttcttctctgactccttattttgctcttttgagaggtagatttactatgaagctaagattacttaagcttcagggtccttcatttaaataaaccccttccaaagccctgcatgtaattttctgcttcgctaaaggcctctccccaactatataag

SEQ ID NO: 220338 - DNA, 484 bp, Homo sapiens
tttcattagtccattttgatattctttttcttaaaagcatgctttgatttggaatttttagagctttgaatacatcagattctttttaaaactctgacgctgtcaaatacatcagcttgtggttttcaccattgtgccttatctaagtaatatttactaagcaactctggtgcaaaaatcctcatatggaatctatatcttgccaagtttcctgtatggatttagaccatgttatttgtattctatatggaaaagaataccataaaagctttcctgagattttatctaaaagttgctactgcaaaaatggagagacattcaaataacttgaactggatttaaacaaaaatttttctgtgtgttacggctagatttgttgaatagtatattctaggcattaacaaagtaaaacagttatgaacagttgwtaaataatattgaaaatatatattttaattatacttttagatcttttaattaattt

SEQ ID NO: 220339 - DNA, 571 bp, Homo sapiens
ggccaagggaacacacagagaaaaggctgccatctataagccaggaaaagtgctcttatcagaacccaaccacggtgacacactgacgtcagatatccaggttacaaaactgtgaaaaaactaaatttctgtgtcagaatacwaacgtttgtggtattttattatggcagcctgagcagtctacacttctagcagactaataccacccctaccacaagagtccttgaataaagtattccttgctgttttaacaagtgttagaataatttttctttaacaacataataatagaaatgaaatattcactagaagctatagaagataaagacgaggcaacctttcagagttaagataaaatggaagagcgtcagaggcatgtgaaccagagcaactccatcttgaataggaggtgggtaaaataaggctaaaacctactggtttgtagacatttaaggcattctaagtcacaggatgagagaggaggtcagcagaagacacaggtcataaagaccctgctgataaaacgggctgcagtaaagaagctggctaaaacccatcaaaaccaagatgg

SEQ ID NO: 220340 - DNA, 571 bp, Homo sapiens
ggccaagggaacacacagagaaaaggctgccatctataagccaggaaaagtgctcttatcagaacccaaccacggtgacacactgacgtcagatatccaggttacaaaactgtgaaaaaactaaatttctgtgtcagaatactaacgtttgtggtattttattayggcagcctgagcagtctacacttctagcagactaataccacccctaccacaagagtccttgaataaagtattccttgctgttttaacaagtgttagaataatttttctttaacaacataataatagaaatgaaatattcactagaagctatagaagataaagacgaggcaacctttcagagttaagataaaatggaagagcgtcagaggcatgtgaaccagagcaactccatcttgaataggaggtgggtaaaataaggctaaaacctactggtttgtagacatttaaggcattctaagtcacaggatgagagaggaggtcagcagaagacacaggtcataaagaccctgctgataaaacgggctgcagtaaagaagctggctaaaacccatcaaaaccaagatgg

SEQ ID NO: 220341 - DNA, 595 bp, Homo sapiens
atcattatcagttttattgctcatgctgttccagctttggccactaagagttccttcagtttggctcctgtgtccctctaaggaaccccatcttttttgagcacttcatyaactttctagtgccaacaacattccagactcatctagtgttttccctgccccaggcctggaattaatgacttcctcaggaagctctggttccttctattggagaaaggtgtttagaaaccaaaatctgggtgtgaggtatgcttattgctactggaatgttgtttctaggtgctctcggtggacggagctgggaaatatgtgtgtatagactaacgtagttatacacacacatctatatttctgtatgtatctgtgggtgtgtatatatatttaagaccgtgagtttgtaatggtgccactaatttcaacctaacaatcaagtttcattctagccttcctctttcatttacagcctctttgtctaacagtgagaaacccagatgtcattatctacaatagacttatttgcctgattctaatataaatattttcaggattgctaactcatgctcttatgagaaaaacgtgtacttactaaattata

SEQ ID NO: 220342 - DNA, 595 bp, Homo sapiens
atcattatcagttttattgctcatgctgttccagctttggccactaagagttccttcagtttggctcctgtgtccctctaaggaaccccatcttttttgagcacttcatcaactttctagtgccaacaacattccagactcatctagtgttttccctgccccaggcctggaattaatgacttcctcaggaagctctggttccttctattggagaaaggtgtttagaaaccaaaatctgggtgtgaggyatgcttattgctactggaatgttgtttctaggtgctctcggtggacggagctgggaaatatgtgtgtatagactaacgtagttatacacacacatctatatttctgtatgtatctgtgggtgtgtatatatatttaagaccgtgagtttgtaatggtgccactaatttcaacctaacaatcaagtttcattctagccttcctctttcatttacagcctctttgtctaacagtgagaaacccagatgtcattatctacaatagacttatttgcctgattctaatataaatattttcaggattgctaactcatgctcttatgagaaaaacgtgtacttactaaattata

SEQ ID NO: 220343 - DNA, 411 bp, Homo sapiens
accagaactaatccaaaggaacaagcagtccatgtgagagaattcttttaactcctctttgcagaaaagtcaaacctctctgtagtaagaaccatctrtttccattgatcaaagacacattattaaaagtccataattaacaaaatactactaatccacagcaatttataagcatccatttctgaaaataaaatgtcgacaagcagagagacaagatgtgctttgcctgatctaaggaaagatgactaacgtggcttaatttgttctgatttaaaaaaaaaaaaaggtttcaaaaccagcagaccatgtcataacaggaatattttgtgtcctggagagatttagagatgggctgatatcaagacgtgacctacttttctcatgacaggtctgcccctgaataatagtttg

SEQ ID NO: 220344 - DNA, 319 bp, Homo sapiens
ttaattatattgtgtcttgaagagaacctacttggatataatttgtttagagatttttaagcttcatggatctgaatgataataygttttccaaaacttggaggtttttcagcaatttttttattaaataaactttccactcctatctttgcctcttcaccttctgaaataaacatactgcaaatgtttgttcacttagtgatggcccatatgccctctaggctgttctcattctttttcattcttttttttctctttctctgacagggtaatttcaagaaacctatattcaagtttagagatttttttttcttctgct

SEQ ID NO: 220345 - DNA, 351 bp, Homo sapiens
atgagcatatacttaatgatgacatactgaaagtatctccttaaggtcaggaataaaccaagtgtgtctcctgtcattccttctgaattcaatattatgctggatgtcccagccattatggcagggaagaaaaagaaagaaagtcataagaattagaaatgatgataaaattgttatctttcatagataatatgattatatgcacagacagtggaaaagtatctctgggtaatttacaartatgaatgtgagagtttataggattctattcatgcattcaatgtcctcaaagcaattgcacgccaataatacatagttaaaatgaaataaaagtactattttgtaataacg

SEQ ID NO: 220346 - DNA, 622 bp, Homo sapiens
caggctcagaaattactagggctgagacataagatgacaaatttcttaaacttcatttatgtgttggaaaagactgatayaattatagaagataattaaattacatgatacaggtcatggaaaaccttatatctacaagtttgctcataaaatgtgaaatgtactcacatttcaggggtcaaaccactggcaatgttttctgctatttgtatgtggcccgttgcatacaatggacattttggctttaataacatgtcattcttcctgtaatgttttaacatggcaggagtatccaaatttctaaaaataaagctatgaatcacagcacagtgattttttcttacaaaattctccctaaattgttctgaaaaatcttgaacatttttttccttctctaataggtcatgtatttatttgcctggtgtttttccatcccattttctactttccatcaattgcaggtattatctcattcaagtagaaatgccctttcaattgtagatattttctccagttaatattttaattgagctaaaatttactttcagtgaagtacagaaattgtaaagatttttataaacaaatatacctgtgtaatcactaccctaataaagatacagac

SEQ ID NO: 220347 - DNA, 491 bp, Homo sapiens
aaatgtatgggggttttccccaccaacaagcagtgggcatcagctgggtgtcctccaattaaattctgacattatctacctggagatggcatcaaatcccacaggttgaaggctcagattccaagactgcccattcattcaacagataccagttgtaagtctgtgcctccagaagttttgacccactggcttcaagttgggattcccatgaccccgccccctttacttttgattaatgtgctcacaaactcaaggaaacacgtacttatgtttgctagtttattataaaggatattacaaaggatacaggtgtcagggaaggggctcggagcttccatgccttccctgggtgcaccrccctccagaaaactccatgtgctcagctacccagaagctctctgaacccagtcctctgggggttttggaagcttcataacatcagcgttccttgtccctggtagagggcaggatactctctggggagggtctta

SEQ ID NO: 220348 - DNA, 575 bp, Homo sapiens
ggtgtcagggaaggggctcggagcttccatgccttccctgggtgcaccaccctccagaaaactccatgtgctcagctacccagaagctctctgaacccagtcctctgggggttttggaagcttcataacatcagcgttccttgtccctggtagagggcaggatactctctggggagggtcttacacccacaatcagaaaagtgagggaagatcagagtcctgccttggggcaggtgaaaggagggcaggagaaggtcagagagattctgtttcataactccaaggcctattggagttataaaccaasaatcatggatgaaaaccaatatatctctatctagatatgtttataataacaccacagtagtgtatccattaaaaagaatacctaattgtagctgcaggttttctgttgattctacatatcagaatgaggttgttctcttatattgcaagtttttatttgatgataattttcaaaattatatatgaatattgaaatttgttaagtgcttttttgacacaagagcatacagtttctgctgccttaatcagtcactatggtacatggcccc

SEQ ID NO: 220349 - DNA, 575 bp, Homo sapiens
ggtgtcagggaaggggctcggagcttccatgccttccctgggtgcaccaccctccagaaaactccatgtgctcagctacccagaagctctctgaacccagtcctctgggggttttggaagcttcataacatcagcgttccttgtccctggtagagggcaggatactctctggggagggtcttacacccacaatcagaaaagtgagggaagatcagagtcctgccttggggcaggtgaaaggagggcaggagaaggtcagagagattctgtttcataactccaaggcctattggagttataaaccaagaatcatggatgaaaaccaatatatctctatctagatatgtttataataacaccacagtagtgtatccattaaaaagaatacctaatkgtagctgcaggttttctgttgattctacatatcagaatgaggttgttctcttatattgcaagtttttatttgatgataattttcaaaattatatatgaatattgaaatttgttaagtgcttttttgacacaagagcatacagtttctgctgccttaatcagtcactatggtacatggcccc

SEQ ID NO: 220350 - DNA, 438 bp, Homo sapiens
agatgaaagttattactcttgattatcataattcagaagagatgtagcagcaagaagcacatttaggggataattcacagtaaaagaagaaaatctgttcttatttttcacccttgcaactcctgagtctacagggactgccatgatttagatttaaatcctccatgcctcctgcatctgcagcctggcatgagaaaacatactggcatccagggaaaagtgaaatgcaacttttctcacctattwtgcatttttctgggacccttaatggttaaaacccaggggaagcagtgcgactgagtgcttcccaacctggggatgccacaccaagtcccggagagcagaggtcgtgtccaggaatgggcagcctttgaggggagactactgccaggccagcggtcaatagcctcatccgggaaatgtgtttggaaatgtcgc

SEQ ID NO: 220351 - DNA, 555 bp, Homo sapiens
tctgctaactaaaattaatggttgtgcacataaaaacagctcttttatataattctgtaaacttgaaaaatgcaaaggtaataaacaattataagctgacaaagaatttataatgtgctgaataaatatcatctatatttaatacatcctgagctacagcttcatagcaggtgtttttatgagtagcaaagtaacatgacaaaacacacttctccaacacaaaggaaaaaaacataatgggattgtctgggggagaaatgtacctattaaagatcttgtcttcagagcagaagttccctcctattctcctactttttgtattcatcaaaatcaccagaaccaccagcaaggcttaccactaggatttccaaacctggctattcatcttccctaccctaagatgcacatcccgtccagcttccttcrctgggtcctttgcacagtgggtgtggcatggaggcagcttttcaaatgtccccagcgattcctgcttccgggcattcatgtccccatgcaatgccctccccctgagaacgggctgcatctgggcctcac

SEQ ID NO: 220352 - DNA, 604 bp, Homo sapiens
aagcttgagactgtgttgtggagggctgattcaccgtggtctttaaaatcctcctggcaagkcacggtggctcacacctgtaatcccagcactttgggaggctgaagcgggtggatcacctgcggtcagaagttcaaagtcagcctggccagcatagtgaaacctcatctctactaaaaatataaaaattagctaggcatgatggctcatgcctgtagtcccagctactccagaggctgaggcacaattgcttgaatctgggaggcagaagttgcagtgagctgagatcgtgccactgcactccagcctgggtgacaaagcaagactttgtgttaaaaaaaaaaaaaaaaaaaaaaagaaaagaaaagaaaaagagaaaaggaaaaaaaaaaaaccctcccatgtttgaagctcagctgtgagacaggggccctttgatctgacctggactgagggctcctggaggaggcagtgatcatcgtctgcctcctcttctcagtgtcctagtgcttgtcttgatagtcactcagtgctgttcaaccaaattagggcaagcctagatctgtgtcatggcgacgcacttcctgctaatttctctgtgaaa

SEQ ID NO: 220353 - DNA, 604 bp, Homo sapiens
aagcttgagactgtgttgtggagggctgattcaccgtggtctttaaaatcctcctggcaagtcacggtggctcacacctgtaatcccagcactttgggaggctgaagcgggtggatcacctgcrgtcagaagttcaaagtcagcctggccagcatagtgaaacctcatctctactaaaaatataaaaattagctaggcatgatggctcatgcctgtagtcccagctactccagaggctgaggcacaattgcttgaatctgggaggcagaagttgcagtgagctgagatcgtgccactgcactccagcctgggtgacaaagcaagactttgtgttaaaaaaaaaaaaaaaaaaaaaaagaaaagaaaagaaaaagagaaaaggaaaaaaaaaaaaccctcccatgtttgaagctcagctgtgagacaggggccctttgatctgacctggactgagggctcctggaggaggcagtgatcatcgtctgcctcctcttctcagtgtcctagtgcttgtcttgatagtcactcagtgctgttcaaccaaattagggcaagcctagatctgtgtcatggcgacgcacttcctgctaatttctctgtgaaa

SEQ ID NO: 220354 - DNA, 604 bp, Homo sapiens
aagcttgagactgtgttgtggagggctgattcaccgtggtctttaaaatcctcctggcaagtcacggtggctcacacctgtaatcccagcactttgggaggctgaagcgggtggatcacctgcggtcagaagttcaaagtcagcctggccagcatagtgaaacctcatctctactaaaaatataaaaattagctaggcatgatggctcatgcctgtagtcccagctactccagaggctgaggcacaattgcttgaatctgggaggcagaagttgcagtgagctgagatcgtgccactgcactccagcctgggtgacaaagcaagactttgtgttaaaaaaaaaaaaaaaaaaraaaagaaaagaaaagaaaaagagaaaaggaaaaaaaaaaaaccctcccatgtttgaagctcagctgtgagacaggggccctttgatctgacctggactgagggctcctggaggaggcagtgatcatcgtctgcctcctcttctcagtgtcctagtgcttgtcttgatagtcactcagtgctgttcaaccaaattagggcaagcctagatctgtgtcatggcgacgcacttcctgctaatttctctgtgaaa

SEQ ID NO: 220355 - DNA, 444 bp, Homo sapiens
gtgattaaaattatgttgaggatgatggggaggaggaagaggatggtgatgaagatgattatgaggatgaggaggaggatggtgattaaaatgatgttgaggatgatggggaggaggaagaggatggtgatgaagatgcttatgatgaggatgatgatgagaaggaggagatggggatgaagataacgatgaggatgatgatgaggaggaggtgatgatgaaratgatgaggtgatagggatgacgacaacgatgcagctgcattctttcagtttccacaccatgctcttccaggtcccgtcgagctgggctgctgtctgaaggcgcagggctggcatctcctgtgtctgccatcccaggctccacagagccgcacatgctagcagaactcgggaaggctgagagctgggctgacgggttttaggtttcataattctcttgtgt

SEQ ID NO: 220356 - DNA, 566 bp, Homo sapiens
cagtgatttcagagagctttttttttttttttaaaaaaaagacaaactaaatctctattccccaaagaagctaaaggccactcaccaatgccacgyggtgcccacagctctgcaccaggatgcagagagagagcagaggtggctggaaggaggacatggagagatctcagcgctgccgcccttagatcaaaaggcatctttcttcagaaaacatcacacaggccgagagaggcgctggaggggctgctcctgggaagtggaccccccaaatgtcttcggatgcctggagaggctgctggcatccgcctcaggcatgagtcacatcaggtgggggctcctaggtccgagtaggaggaagggacttgactttggccctcctagaacaccggcccaggaggagtatttctgttatacgcagtctccacgaaaaagccaggcagcctctccttggcctggagaatgacctccccaagagaaacctgttgccttctggttcttcagagccaggctctgctgggagcacaaagctggctgctcacggctgctcacggctgctcacggcccag

SEQ ID NO: 220357 - DNA, 566 bp, Homo sapiens
cagtgatttcagagagctttttttttttttttaaaaaaaagacaaactaaatctctattccccaaagaagctaaaggccactcaccaatgccacgcggtgcccacagctctgcaccaggatgcagagagagagcagaggtggctggaaggaggacatggagagatctcagcgctgccgcccttagatcaaaaggcatctttcttcagaaaacatcacacaggccgagagaggcgctggaggggctgctcctgggaagtggaccccccaaatgtcttcggatgcctggagaggctgctggcatccgcctcaggcatgagtcacatcaggtgggggctcctaggtccgagtaggaggaagggacttgactttggccctcctasaacaccggcccaggaggagtatttctgttatacgcagtctccacgaaaaagccaggcagcctctccttggcctggagaatgacctccccaagagaaacctgttgccttctggttcttcagagccaggctctgctgggagcacaaagctggctgctcacggctgctcacggctgctcacggcccag

SEQ ID NO: 220358 - DNA, 606 bp, Homo sapiens
ctcttacactggataaggtttaaagttagcacttcttcgcttcattttgccacagaccaattaaggtctgtgtatttgttcaggtcagtgaatttgaatgtgggacattgattgtgaactctggccctgccatttattagctaaaatgaacgagggcatgttactgaatgtaaaatgagtttcattttgcctcatagacttgttctgaaaattagctgaagaaatgtgtgccaatgtcatcagcacatagtaggtcttcagaagacgtcatttccctccacctcactcttctttgtcgagggagatatgtagtcaaggacrcttaggcgaatgccgcagagcgatccacttcatcgtcatactattttttgttgcctcaaaaaactcagtgagattaaaacattttctgaatgataaagtgctccttttatattaggaaataaaattagaattttatattttaaaattatctaatttctctcttttattataaaatataataatttaaactttttgaagaaaaaatactcttgctctcgttttgttacaaggaatgtttataccgtgttctaggagctttttattttatatactctggtaacaatt

SEQ ID NO: 220359 - DNA, 606 bp, Homo sapiens
ctcttacactggataaggtttaaagttagcacttcttcgcttcattttgccacagaccaattaaggtctgtgtatttgttcaggtcagtgaatttgaatgtgggacattgattgtgaactctggccctgccatttattagctaaaatgaacgagggcatgttactgaatgtaaaatgagtttcattttgcctcatagacttgttctgaaaattagctgaagaaatgtgtgccaatgtcatcagcacatagtaggtcttcagaagacgtcatttccctccacctcactcttctttgtcgagggagatatgtagtcaaggacgcttaggcgaatgccgcagagcgatccacttcatcgtcatactattttttgttgcctcaaaaaactcagtgagattaaaacattttctgaatgataaagtgctccttttatattaggaaataaaattagaattttatattttaaaattatctaatttctctcttttattataaaatataataatttaaactwtttgaagaaaaaatactcttgctctcgttttgttacaaggaatgtttataccgtgttctaggagctttttattttatatactctggtaacaatt

SEQ ID NO: 220360 - DNA, 589 bp, Homo sapiens
tgaagattttaaaatgtgagaaacatgtacttctggtgctgcttaagtaaacactctgcagtttgtgttaaaaataaaattattcagaggtacttcttaaagggtggtgaggagccttttgtcagggccatcacaatacatacacggtcctcttcaatagggtttggcagtgggggagagagattagattaagctccattttgaatacagcctgggtgagcggggacttacagctgcagctcagggygggggtccacagatggaaaattactacaagaaaatacaagggctcagcggattctggctaaaccgacctaacaggattcttactgaagacaggccgggtgaccagttatcattgggggaggtggaggaggaggaaatggatggatgtgagggtgatcagatgcctgatctgtgcataggtggggttcttgttaaacttaccgagagggctcttggttgaaactggattttataaggaagagtacggatgggcttggaaggggtttcaggaacctgactcaagtttggccatgccgagaatctctgtcacctccttctctactaattacaataaaaccaccaa

SEQ ID NO: 220361 - DNA, 472 bp, Homo sapiens
tgggaggaaaacaaaaggcaaggtagggatgagggtgagtctggaaccaagagaccaagaaaaagatcccaatggagaagaggtcagagtctgggcaaatgctgagcatgaagctgagcgagggagctgaagggtaattcaagtaagaagctggtcacagcagaggctggtggggaggggaggattatgtcaaaaacctctctggaataagaaagccttttgaaggcaatggcccrgagcttcccatttgtttctatctgatctacagggggcccagttctgccagtgcccacagtggcatctggcccagagtagcagttcacaaatatttatgaaaggcagggaaggaaaaagaaaaggagggagggaggaggagaactacgaaaggaaaaaaggaaggaagggctgtggcttgggcattttatgggctattacataactaattcaatcacagaatgtaagagttgttaaa

SEQ ID NO: 220362 - DNA, 601 bp, Homo sapiens
atatcagtttctactgaaaacactcaattgtttggtttattctcaattctgccactatatatctgcccctatacaaggaagagataagarcagatctttcatacctattatgccatgactacccctagttttagaacagatttagagtttctctcatttctttagagattgggttgaagttaggggaggtatgaggaagtattatttcctttacaaagatgtaaagcagaaagctgagcaaattgtccgattttatctgaatcttaatcctacaaagcttgagtctcaggcctccatttctttgtacaatgaagacggacatctttctagaggacaaaactcattcattcctacaaccagccaaaggttagctcttactggtgttgaaaatgaagacagcagattgcgaagattcctccaaccctctaattagcaagttttggcccccaggcagtagtcctgagaggaatgagaaagttattctgcaggaaacaactgtccttgcaggaatgagtcccataaaaaaaaaaaaaaaaaaggaaggggggtggttcaaaggcattctaactgaccattcattgtacaagcagagcagagcaag

SEQ ID NO: 220363 - DNA, 647 bp, Homo sapiens
gattaagaaaaataaaccaataatgaatagtataagacactgtgttatacagtaggagcatttttggtcccaattaggttctgaaggaattcagaacaggatctttgtggaatctagagtggctgggcaggaattcctataaggatgaaatctggtctggcccttgacaaatgggatgtttagatagaaacaaaactaagattacatgaataaagatagtccacagccacctgtatgctgagagtggggcaggcagatggcaaataaagaagaagccacaaccagattcaccaccaaaatgtagagataagtgaaacaggaggtttcagayaaaagaaatcccttagggataagaggggacatttagtatatgttatatcttctagtttcagaagatctctatccaataaattcaaaagcatgagttccagcataaataattatatcattgtctctgccattaataatagaggacataataataaagtttgaggtacataaaataatagtaaagagagtgctagacatttgagaagaggatgccagcctgcttttaccactatagatcccccatgtcaagatgcgcagagctgctatgacattatgggctggcaaagctaggatttggagaaacaaatttggaaaaa

SEQ ID NO: 220364 - DNA, 330 bp, Homo sapiens
gtgtttggaaaatgcttagcactttttaactacacacagarttccttttaaagtcagccctaaacgtcagtggataaaactgggcagacacctcttgcccaacttgcgatcagggacgaaggccgatggtagacgcagacgcacacacagcacccagacagatgattttcttagaggacaggaatgcaagggaccacggcaagagtcaagttgctaaaaaactgagaaagctcctcagagcacaggcccctttctctgagaaggctacttttaaaccctggctgtggtgtaagtgaagcggtttaatcatttgccccatggtaatgaagg

SEQ ID NO: 220365 - DNA, 311 bp, Homo sapiens
attcagctggaatcccccaagtactgctccttggtcctattctccctctaccccaagccccacaaacamaaccatcatcccaaatctgcttccaaatgtttcaaacactacatatcacggaacaacatgtttttctggaaacatatttttgagatctatgcatggtgacttatgttctagttccttcattttaactgcatatgatattcctctataaataccacttatctatccatttgcctctgttgttagatgtttagtttatgtccattttttccccttttactaataatgctagagaagaacatttt

SEQ ID NO: 220366 - DNA, 311 bp, Homo sapiens
attcagctggaatcccccaagtactgctccttggtcctattctccctctaccccaagccccacaaacaaaaccatcatcccaaatctgcttccaaatgtttcaaacactacatatcacggaacaacatgtttttctggaaacatatttttgagatctatgcatggkgacttatgttctagttccttcattttaactgcatatgatattcctctataaataccacttatctatccatttgcctctgttgttagatgtttagtttatgtccattttttccccttttactaataatgctagagaagaacatttt

SEQ ID NO: 220367 - DNA, 399 bp, Homo sapiens
gggaatgtctgtcttcccctttcattctcagactattgatcctcattcatcctttattgtcagctccaaatccacctccagcacgacgttttccctactcatccacaacataatcaagtgtttctgtttcagctagcaaatagctgcccactaacttttcaaagagagtgtatgcaagtgaattttttttatttttaaaaaacttcatggtttttacatttatacaacacccaaaattattctttttcatcaggctaccacttctgtggtcrctatctgctggaatggttcctttcctgaaatttagccataaggtaaatcgattgtcctaaaacagcaagaaaccccatgctagctgattgaaaataccaggatctagcagacagctcagcaggaaag

SEQ ID NO: 220368 - DNA, 680 bp, Homo sapiens
ctaagtatgtggggcaatttttgcttttgtcctttttggtgacatccttagtagactagcattttaagaaaatgcatagcaagttagcaagagttagaaaagaaataaaatgctaaaatattgtggaagtgacccaagctagagaagacaaggttaaggagaaccyttgtatgtcttctggtaaaggtaggaatcgtttaataattctttcagtgtaataactaatctaagtactttgtgataacctattcctcccacttccctacaatcaagtcgagccttgaaaaagtaccattctatccttttagtctttgcttaaaattatacctacaatatgagaaagaggttactcacaatatttgcagattacataatccaaaaaatgctttcctggatatgtgtctaatgcaattatgctgaagaaatctggtaggaataagataagagagtcaggtgattatggtttatggactatattaggttgttgaacatattctccactttctttacctgaagacaattgtgaaattgaagtacgaagtcctattctcatgttggggagatgttgtcagtgagaaatggctaccaactagccagtgctttcctcatagtactcatgcaatgagattgaggcatctctgattcatacgctgaactccagtgtgatgtgtctgcggaag

SEQ ID NO: 220369 - DNA, 268 bp, Homo sapiens
agaagggccatcccagcctgagtcctttgtagaatcatctcagacatagttctctayccaaatttgctttttaggatcaccctcaggtgttaatcctgagagtgtgctccagtaaatttcctgcatagaaatcttcagagcaggcttcctggagacccctatctgagatgagtcgagagaggaaggagatagacaaggagatgaagtgcggggaccagaagaaatatcatattttctcatcatgtatatggcccacattcctttttca

SEQ ID NO: 220370 - DNA, 458 bp, Homo sapiens
agaagggccatcccagcctgagtcctttgtagaatcatctcagacatagttctctacccaaatttkctttttaggatcaccctcaggtgttaatcctgagagtgtgctccagtaaatttcctgcatagaaatcttcagagcaggcttcctggagacccctatctgagatgagtcgagagaggaaggagatagacaaggagatgaagtgcggggaccagaagaaatatcatattttctcatcatgtatatggcccacattcctttttcacatttttatatctctaaagttgaaatgcagtttataattcatgtgataaacaaggcttgtgttactgttttattggcaatattttttgttgtagtatatacattaatgacttattttacatccaaaacacagatctgattaaaaaaaaaacggaaacaaatacaaaacaaaacaagcaggaagaggttag

SEQ ID NO: 220371 - DNA, 542 bp, Homo sapiens
ttgcaaacacaaaagctatacacaaacattagactggaattttgttactcatatgctttggttatcatgcggatcattttgtcatttcaagcttcacctaatgctgttgttttctggacataaaatgatagataagaggatgacaggtaatcagccaggcattggcatactatttctttgcctttgagtctgatgctttgtttatatgactaggagcaagagctaaatattctgaagtagttcagtttgtgaattcagtttcatgcaatggggcaaggaggtyctttcacacactttgcaagaagtacagtgattaaaaaaaaaaaaaaaacctttaattaggtccaaactttttttacagaatagaagactaaagacacatgatgtcactgcttgcttatcatttttctattgtaaaatcaactttaaaaagatataaatgtatgtatgtatatgcatacatgtaagtgtacactcatatattttatacaagttttcaaaaagttcatggaaaatgcatgttttcaaaacactatgcatgg

SEQ ID NO: 220372 - DNA, 450 bp, Homo sapiens
gccatcccagcctgagtcctttgtagaatcatctcagacatagttctctacccaaatttgctttttaggatcaccctcaggtgttaatcctgagagtgtgctccrgtaaatttcctgcatagaaatcttcagagcaggcttcctggagacccctatctgagatgagtcgagagaggaaggagatagacaaggagatgaagtgcggggaccagaagaaatatcatattttctcatcatgtatatggcccacattcctttttcacatttttatatctctaaagttgaaatgcagtttataattcatgtgataaacaaggcttgtgttactgttttattggcaatattttttgttgtagtatatacattaatgacttattttacatccaaaacacagatctgattaaaaaaaaaacggaaacaaatacaaaacaaaacaagcaggaagaggtt

SEQ ID NO: 220373 - DNA, 584 bp, Homo sapiens
acttctgacttcacagaccctccaaagagtatcagggttccccaagagtttccagatgagacttcttgcaccactgctccatacaatgatccaaagatcctggcttcttccagcccttgcttttctatcctccttaagacctcatcaggttgtctacatccagccagttgaaggagacagatcctggatggcacactcaattcttaaaaatcaatttcccagaaatgacacacattatgtctgctagtattccactggtgagaactatttatatgggcacatctacatgtgaagaagtgagacatgaaatatagtccctaggaaatattgtcttgctgctaaaatgctctaacattgtgctgtatatacactgaattgcaggggagattctttcaacctcagcatcttgacaatagcatagttacttcttaaggaaatcccgaacctaaatgaacaaagagaaagcagccctcacagatgagattcagtcataatactgctgcgttactgaatagctgggacgcagtgtggctrcggtggctgccccttgcttctgttgatccttgtactaactattcaacaat

SEQ ID NO: 220374 - DNA, 268 bp, Homo sapiens
agaagggccatcccagcctgagtcctttgtagaatcatctcagacatagttctctacccaaatttgctttttaggatcaccctcaggtgttaatcctgagagtgtgctccagtaaatttcctgcatagaaatcttcagagcaggcttcctgragacccctatctgagatgagtcgagagaggaaggagatagacaaggagatgaagtgcggggaccagaagaaatatcatattttctcatcatgtatatggcccacattcctttttca

SEQ ID NO: 220375 - DNA, 449 bp, Homo sapiens
ataaaaattgttgatttcagtgccttacaaaaatctcaccaagtagccattttctaaatctcatttaatcacacttggatgaaaagaaatcattttctatgtctttgcatatgtatgtgtggctgaaaggaagtggatatgatatgtgatttatcagggtgggtttttagagttgtgcatttgtaattttttcttttaagcaacattatatctccaattagagagtaattaaatttcaatttctttgcacctttctcccacacaaacacttcaaatctcaaaactgttcattgcttttctgacctttcctgctacctactattagaatcttcttttacattctctattcatactccaatgtaaamtatgtgcaggcaccctcagacattatgtctcttagaactaagggcaaaggcttaacctagagagtattctctatgtaacattaa

SEQ ID NO: 220376 - DNA, 450 bp, Homo sapiens
gccatcccagcctgagtcctttgtagaatcatctcagacatagttctctacccaaatttgctttttaggatcaccctcaggtgttaatcctgagagtgtgctccagtaaatttcctgcatagaaatcttcagagcaggcttcctggagacccctatctgagatgagtcgagagaggaaggagatagacraggagatgaagtgcggggaccagaagaaatatcatattttctcatcatgtatatggcccacattcctttttcacatttttatatctctaaagttgaaatgcagtttataattcatgtgataaacaaggcttgtgttactgttttattggcaatattttttgttgtagtatatacattaatgacttattttacatccaaaacacagatctgattaaaaaaaaaacggaaacaaatacaaaacaaaacaagcaggaagaggtt

SEQ ID NO: 220377 - DNA, 570 bp, Homo sapiens
ttcctaactgccttaccaccaaatctaccagtctgcctgcatctacatacatcagctctgcattttctccttgcagcagattcactgtcccttttcttacctaaggtcaaaccctgtacttcagcactggtttccatcctctctaagttactcaagaattttgctcccactccatcagtttctccgtctcactaygttgcttccatcagcatacaaacatcttccaataactgtattcaacaaaaccaacaaaaacaaatgaacaaacctccctggactcctctgtgtcttttttcctgcatccctatttctcagcatcttactacaagacctcatgaaaaagccgcctttactctctgtctgcattttctcacctcacctcatttaataaagctctctttactatttttccaccaaaaccacttttagcaaagttggcaataactttctctttgccatacttaatattcactttttaatcttcatccttatccaatttatcatccttccctgtcagtgttttaaccaaagctcttgaacactagtgccctggcttccttcctacgtcac

SEQ ID NO: 220378 - DNA, 599 bp, Homo sapiens
acatttcagtgtgaagtaaacttgagtatcctttctcttaaggcagtttatcaattaagacaaacataaaaatcctgagaacagcaattctagtgaatttcaaagactggcttttctctatctgggaagggcagcctgctcaagtgagtggacagcttcaggaaaaataaacacagatggaacagaccctgaagatctgaggggtgatasatgtcacatacagacagcctgcacatcccactcaaaatattgttttttcatgttgtatttttccttttaacacacgctgggagaatgtaacttgaaattcggccaaacatatgatgaaatatttagattataaaataccttgtaataatataaaactgaaaccaaatttctttcattaataatactttgtataaacatgtatggtattttgtcatgagagctttttgtagtaccaataaatttatcatcaaaaccaatccagtttctccttatttttaaatatgtaattgttttactcccttcctttctcaatcttcatgtctttatgtttagtaattccacagttgtcaagagaaaatactagggtttgtgttcatttgcattttagc

SEQ ID NO: 220379 - DNA, 598 bp, Homo sapiens
ttggacaagcttgacctaaggggccacttaataggaaataattcttatgtggaccaattatttcaaggttttcagaaaattacagtggtgtccattttttaaaattcaawtatttttaaatttaaagccatggaactcttaatgcaaatgtattcttgttattttacatgactccataaataataaacctatacaagcacaggtttttaaaatgggggacagaataaaaattactatcctagaataatttccatagagtgggctttagagacaaacaaggatggtaattgcttacgtcatgttcatatttgttattattttatttccagcaggatactatcttggaatgttattatctgtgcttttaatttttatacttatgttttgcaaactttctcttctgagttagtaatatcctcattgcttcaaagagaattagcattgttttagtaggaatgcaaaaagaaagaaatggttggtgcttgatttttattttatttttcaaaagagcctctcaaagaccacatcagaaataacagctttgaaaccaaagcttttgatctatgagagaataaaaggttgctgagaaagaaatgtt

SEQ ID NO: 220380 - DNA, 598 bp, Homo sapiens
ttggacaagcttgacctaaggggccacttaataggaaataattcttatgtggaccaattatttcaaggttttcagaaaattacagtggtgtccattttttaaaattcaattatttttaaatttaaagccatggaactcttaatgcaaatgtattcttgttattttacatgactccataaataataaacctatacaagcacaggtttttaaaatgggggacagaataaaaattactatcctagaataatttccatagagtgggctttagagacaaacaaggatggyaattgcttacgtcatgttcatatttgttattattttatttccagcaggatactatcttggaatgttattatctgtgcttttaatttttatacttatgttttgcaaactttctcttctgagttagtaatatcctcattgcttcaaagagaattagcattgttttagtaggaatgcaaaaagaaagaaatggttggtgcttgatttttattttatttttcaaaagagcctctcaaagaccacatcagaaataacagctttgaaaccaaagcttttgatctatgagagaataaaaggttgctgagaaagaaatgtt

SEQ ID NO: 220381 - DNA, 587 bp, Homo sapiens
tctgtcatcttcacttcagatattgcttctatccaattctgtttttttatcctggtaattcaataatgtgcatattgaatcttttgttgaacccatatgtttttgacattcttttctctcttttttttttttttggtatttttaaccctttcctgtgctttagtttggagaatgttaatcaattatttctcaagttccttaatcctctcttctattcttttaaatctactattaaacctacttaatgagttcttacttctagatattatatttttaagtcttagaatttccatttgattctttacataaattccagttctctggggctaaattatytctctttcaatgtattagttccagttttcccgtttattttctctaatatattgtttatgtgtttttaaaaatctttaccagataattaaaatatctgaatcatctcttggtctatttcaattgtgtatcttcttcttctctttcaatcattacattctttcttttagcatctgtaataattttcaattgcctgatgtcatgcacataaataaactgtaaatgtctaatataatggtgtctttatcctaaga

SEQ ID NO: 220382 - DNA, 450 bp, Homo sapiens
gccatcccagcctgagtcctttgtagaatcatctcagacatagttctctacccaaatttgctttttaggatcaccctcaggtgttaatcctgagagtgtgctccagtaaatttcctgcatagaaatcttcagagcaggcttcctggagacccctatctgagatgagtcgagagaggaaggagatagacaaggagatgaagtgcggggaccagaagaaatatcatattttctcatcatgtatatggcccacattcctttttcacatttttatatctctaaagttgaaatgcagtttataattcatgtgataaacaaggcttgtgttactgttttattggcaatattttttgttgtagtatatamattaatgacttattttacatccaaaacacagatctgattaaaaaaaaaacggaaacaaatacaaaacaaaacaagcaggaagaggtt

SEQ ID NO: 220383 - DNA, 430 bp, Homo sapiens
atccttccagaactttccctgtatatacatactctatacacataacacctttctgaaacacccttatgaatagaagcatattattcctatgatcttgtgctttgcattttgctttatatgcttattgatctttgtatttcaaaataactatatccacgtcattctttttaacagcaktataattggtacgtaccataatttattaatcaaacctttattgcttgagtataagttgttttcttcttttgtcattgttgccatcataaactatggtgcagtgaaaatccttgtacttacgtttctgcaaacacatgcaaatatacccattgcaaatttttttgaaatggaattaattgctgggtcaacaccttcatcatagatttcaccaaattcttctcccaaaatatggtataaattccaatttctacct

SEQ ID NO: 220384 - DNA, 672 bp, Homo sapiens
attttttaaaaacccaaagactccaccaaaaactattagaactggtgaaaaaaattcagtaaagttgcagaatacgaaatcaacatacaaaagtcagtagcatttctatatgacaatagtgaacaacctgaaaaagaaatccaaaaagtaatcctacttacaacagtcacaaacaaaattaaacacctaggatttaaccaaagaagcaaaaaatttctacaatgaactctataaaacactgattagataaattgaagacagcaccaaaaaaaatgtaaagatattccatgttcatggattggaagaatcaatgttgttaaaatgtccaaactacccaaagcaatctacagattccatgcaatccctatcaaaattccaacgacattcttcacagaaatagaaaaaacaatcctaaaattcacatggaatcacaaaagacccggaacagccaaaattatcctgagagaacaaagctggaggaatcrtattacttaacttcaaattatactacagggctatagtaacaaaaacagcatggcactggcataaaaacagacatatagatcaatggagcagaatagagaacccagaaacaaatcaatatatctacagtgaattcattttcaacaaaggtgccaagagcatacaatgcagaaaagacagctttttcaa

SEQ ID NO: 220385 - DNA, 597 bp, Homo sapiens
tcacttttatgggtcaaaaacagtcaaatattagcgatgtcttatggttttacatatgtcatgatggactaacttactatgttcctaagatttgactgattagagcataatttccaagtcttcgaatatttgcagaattgtcccatataggagcttccaatagcaatttagcaacacgtttktatcaacccagaaaacaaacagcataaaggtgtggaagcacaaattcatttattcagttacctactgagcactccctgtatgtgccaagcacagtatctgctgaaggctgcacaaaagagactctaaaagttattttggtctcctgggaggttacagtctcatgggacagatttcagcacaagaagaagaaggacttcccaatcaacatcaaaaaaatcaaatttgaatttttgaatttatcaaaaaatttgatggatataagaaatggacttctgttaacagaaaattaaaacagtgggcatttgtactgttctttactacctaatgtttatttattatcttatttgctataacaatcttaaatcaactgagtctaaagaaaacatttttctctttttttcctttttttttttt

SEQ ID NO: 220386 - DNA, 583 bp, Homo sapiens
gctccaccaagcaacagggaaaccctgcatggaatcagttcatcctggcagggatggtggagagatagccagctctcagaagcagtagtggcaaaggccctacctggctggggtgtcccacatcccacatatccctattctgtgtaagaattacaagctggtaaaaaagtagcaccagctggattctcccagatcagctggcagtgtaataaggcattgttcctactgcttagccacccagcctaattttctggaccttctaaggattctgtgagctactgaatatcctttaattagttccctttccatttaaactagccgaagttggttctgttatttgcagctaaaaatcttgactaataaaggctctactcrctaaatcagtatttcaacacaaggcacaactggcattttggattggagatttcttcgtagtgtgggatggttctgtgcatagtaagttaccaatccagatccccagacactaaatgccagtagcagattcttgttattgtgacaacaaaaatgtgccccacacatttcccaatccacttcagacaggggtcacacaacccccagttga

SEQ ID NO: 220387 - DNA, 541 bp, Homo sapiens
ctaacctgtaatcccagctactcgggaggctgaggcaggagaatcactggaacccaggaggcggagggtgtagtaagctgagatcgcaccactgcactccatcctgggcgaaagagcaagactccatctcaaaaaaaagaaaaagaaaaaaaaaaaaaagaaaccaacaagcaatgtctatcagaaattcttgagttttcatgatggcagataagaaacaacctgctgaaacactgaaatttgctctkcttatgagataaaagaactggctgaaatctgtttgaactcagatagcagactggcatttgtgcagaatgaacctgctgaagtcatagcctgaattcccactgcatgtttcatactaactccccctgaatttgcacacgggacccatgaagtggcatgaagagataactgagcatgcccacggactttccagacctcccctttccttccaccaaccacctgctaatcccagtatccaccccttaaactttttctaataaaattactgccttaaggccagcacagggggacagat

SEQ ID NO: 220388 - DNA, 576 bp, Homo sapiens
tctgatgaattctatagtattattcccaaatcacatattccccagcacataaaaatagaatgtaatcattgaaaaaggctatgaaacacaatttgctgaatgcttctgctgaatgcttctgctgcctttgattcagaaagaagacatttaatttggaaaactttgccacagatatccagtgacagagctggaggccctcatrgcaaaactttccttggttgctttatctcactttgctggaagcttaaggcctctaacccctctgaccaaagatgccccatggatggtgcctgggtaataacatcaaacattttgcagcatatttccctttatctggttgagtgaggcatcctctgcaggtaacgagtatgttcagtattatttacacctttacttacccttttcccacttctttaaaaaaggtggtagtttggctcgtgtacttgtcctgtggaagaggggcacagtttctatttggaaatggcctggcatccccagctttcttgatttctccctgaagacagttgtggacaggaacactctgacttaactgaagtgcagggacatcaacttgct

SEQ ID NO: 220389 - DNA, 423 bp, Homo sapiens
gctgtcctagtagaggttctccatgagggcyctgctcccacagcaggcttctgcctggaaatccaggcttttccatacatcctctgaatcttaggtggaagctctcaagcctcaactcttgcattctgtgcactggaaggcctaacaccatgtagaagccaccaagtcttacagcttgtactctctgaagcagcaacctaaactgtacctgggaccctttgagccaaggctgaagctggagtggctgggatgcagggaccagtgtcctaaggctgtgcagggaatcagggccctgggcttggcccatgaaaccattcttccctcctaggcctcagggcctgtgatgggaggggctgccacaaaggtctctgaaatcccttcaaggccttttccccattgttttggttattagcacatggctcc

SEQ ID NO: 220390 - DNA, 488 bp, Homo sapiens
tgaggttaatgagcctcataatcactagagaggtgtactctacgataaggtaagggtggttcattcacagggcagtgattgtgcagtggcacgatcacagctyattcctgggctcaagcaattttccggcctcagccttctgagtagctggaactatagggctgtgccattgcactcagcttttttttttttttttttttttgagatgagttcttgctctgtcacccaggctggagtgcggtgatgtgattgtagctcactccaacttcaaactcctgagctcaagcgattctcccacctcaggcttcttagtagctgtgactacaagtatggaccacacacccggctatatttgttttgtaaagatggggtctcactatgttgcccaggctggtctcaaactcctggcttcaagtgatcctcctgcctcagcttcccaaaatgttgggattacaggcaggaaccacgaagccctactgttcatggga

SEQ ID NO: 220391 - DNA, 339 bp, Homo sapiens
taatgagcctcataatcactagagaggtgtactctacgataaggtaagggtggttcattcacagggcagtgattgtgcagtggcacgatcacagctcattcctgggctcaagcaattttccggcctcagccttctgagtagctggaactatagggctgtgccattgcactcagcttttttttttttttttttttttgagatgagttcttgctctgtcacccaggctggagtgcggkgatgtgattgtagctcactccaacttcaaactcctgagctcaagcgattctcccacctcaggcttcttagtagctgtgactacaagtatggaccacacacccg

SEQ ID NO: 220392 - DNA, 370 bp, Homo sapiens
gccttctgagtagctggaactatagggctgtgccattgcactcagcttttttttttttttttttttttgagatgagttcttgctctgtcacccaggctggagtgcggtgatgtgattgtagctcrctccaacttcaaactcctgagctcaagcgattctcccacctcaggcttcttagtagctgtgactacaagtatggaccacacacccggctatatttgttttgtaaagatggggtctcactatgttgcccaggctggtctcaaactcctggcttcaagtgatcctcctgcctcagcttcccaaaatgttgggattacaggcaggaaccacgaagccctactgttcatgggacttgcctatggcctac

SEQ ID NO: 220393 - DNA, 545 bp, Homo sapiens
catccagtaaaacaaaaattgctcaaaagagaagtgttgtatttttgttgaaacctattttgtctttgttctagtaaattaggtgtttcactgggagcatggtatatagcctgaattttcaaagagctcttgttttgcctatggaagaaaagatgacatatatcaaaatgagcagtttggaaaatgttattcttaaaacaaagaacctactctagctacagtttattatcttcactccaattcccaaaaaccagccatagtcacacagctttagtacattagccctgtggctgacaatatcttttcagaaatgatgtctctaccttagtttttacagcattattttacttaccaacttatattgatcttggtgactccagtcatatrttcctattaccacaatccctaaataatatactttcctcttaaacctagcctccaaacagtaacatttcctctctatattgaaaaagtcatgctttatctttaaggtctactgtaaatttcaaaacttaagactctcagaaatcctatgaccgaagaga

SEQ ID NO: 220394 - DNA, 460 bp, Homo sapiens
attagggtgatgagcaaacttctacctacttcaacctccttcattttgaagagagagaaggacagagacagggtgcaaatttgagcaagatgggaagcattcaagaagaaaytaaataactccaaacagaaaagtgggtgaatggtgactgatggctttggatgagtgaaaccaatttatctcccagaagcccctggaatgcacatggcttggctccacttcagcatttgaggatggcaaatctcttctaaatcataagtagttcgggcagcaaaatcttgactttcatttcatcttatttcatgttttggtgttctcatccaatccaatcttttttatagaagatggtcaataaatcattcaaaattagaattgtagatttatgtacatcagtggtactcagctggggatgatttgacccccagggaacgcttaccaatgtctgcaaacatttttgatg

SEQ ID NO: 220395 - DNA, 460 bp, Homo sapiens
attagggtgatgagcaaacttctacctacttcaacctccttcattttgaagagagagaaggacagagacagggtgcaaatttgagcaagatgggaagcattcaagaagaaattaaataactccaaacagaaaagtgggtgaatggtgactgatggctttggatgagtgaaaccaatttatctcccagaagcccctggaatgcacatggcttggctccacttcagcatttgaggatggcaaatctcttctaaatcataagtagttcgggcagcaaaatcttgactttcatttcatcttatttyatgttttggtgttctcatccaatccaatcttttttatagaagatggtcaataaatcattcaaaattagaattgtagatttatgtacatcagtggtactcagctggggatgatttgacccccagggaacgcttaccaatgtctgcaaacatttttgatg

SEQ ID NO: 220396 - DNA, 486 bp, Homo sapiens
ggtggccctcttctcacagctccaataggcagtgtcccagtggagactttgtggggtgctctaacckcatgtttcccttccacgtgtccctagtagagggctctacccctgcagcaagcttccacttggacaccaggcttttctataaatcctctgaaatctaagtggaggctcccaagcctcaactgttgcactctgagcacccacgggcttaacacaacttaaaagctactgagctttagtgcttgcaccctctgaagcagtggcccaagctgtacctgggcccttttgtaccacagctggagttgaaacagccagggtgcaggaagcagtttccagcagctgcatagggcagcggggccctggccctggtgcaggaaatcattcagttttaggcttccaagcctgtgatgggaggggctgctgaaaagttctatgaaatgccttcaaggccttttccccatttcctggctattaccacttggc

SEQ ID NO: 220397 - DNA, 486 bp, Homo sapiens
ggtggccctcttctcacagctccaataggcagtgtcccagtggagactttgtggggtgctctaacctcatgtttcccttccacgtgtccctagtagagggctctacccctgcagcaagcttccacttggacaccaggcttttctataaatcctctgaaatctaagtggaggctcccaagcctcaactgttgcactctgagcacccacgggcttaacacaacttaaaagctactgagctttagtgcttgcaccctctgaagcagtggcccaagctgtacctgggcccttttgtaccacagctggagttgaaacagccagggtgcaggaagcagtttccagcagctgcatagggcagcrgggccctggccctggtgcaggaaatcattcagttttaggcttccaagcctgtgatgggaggggctgctgaaaagttctatgaaatgccttcaaggccttttccccatttcctggctattaccacttggc

SEQ ID NO: 220398 - DNA, 292 bp, Homo sapiens
gtggatgctttcgcttactatttatagcattatttgtctttgactttagacattttgactaaaatatgttgtagataagatctatatgtattgtatttatttggggttctaagaaactcctatatctgaatgtccaaatctcttgctagacttgagaagtttttattttgttaaataaatttcttaatctattcattatttcttcttattagaccctaatarttcaagtatttggttgctttaagttttcccctacatcagaaaggctttgctcattcttttttgttgtgtt

SEQ ID NO: 220399 - DNA, 605 bp, Homo sapiens
accagctgtgtctatttattagtttagagagacagtttaacaatttcctgaccatcacctgatggtcgtctgatattccttggcgggggcactctcctgccttgctcatgtctgcctggctacctcctctcacacactgagaagaaattcctgttggatcttcctggttctgtcaaacttcattttattcctggttagggaaggcctattttgctttatatatcggacttagattgtggtaattgctctaggtgctttatttactccaaaggcttgtcctttctgggatcaaaccaaggactcaatgaggtttcttcactctgkatagatcataaatctaatgtttccccatactacacagcctttcctagccccattcatcttttagctttgtagcaggtaatcttgtaaagtgtgagcataagttgccaagaccttcgttaattatctgtgatgaatcttctttcagaccctcttctcccacacaattcttccttttcagaacaactgtccttaaattcttgtcagttttacagtccagtatttgtgttatctgctcagtgaaaccacagttctgcttgtatttcatcttcatgaacattggc

SEQ ID NO: 220400 - DNA, 605 bp, Homo sapiens
accagctgtgtctatttattagtttagagagacagtttaacaatttcctgaccatcacctgatggtcgtctgatattccttggcgggggcactctcctgccttgctcatgtctgcctggctacctcctctcacacactgagaagaaattcctgttggatcttcctggttctgtcaaacttcattttattcctggttagggaaggcctattttgctttatatatcggacttagattgtggtaattgctctaggtgctttatttactccaaaggcttgtcctttctgggatcaaaccaaggactcaatgaggtttcttcactctggatagatcataaatctaatgtttccccatactacacagcctttcctagccccattcatcttttagctttgtagcaggtaatcttgtaaagtgtgagcataagttgccaagaccttsgttaattatctgtgatgaatcttctttcagaccctcttctcccacacaattcttccttttcagaacaactgtccttaaattcttgtcagttttacagtccagtatttgtgttatctgctcagtgaaaccacagttctgcttgtatttcatcttcatgaacattggc

SEQ ID NO: 220401 - DNA, 605 bp, Homo sapiens
accagctgtgtctatttattagtttagagagacagtttaacaatttcctgaccatcacctgatggtcgtctgatattccttggcgggggcactctcctgccttgctcatgtctgcctggctacctcctctcacacactgagaagaaattcctgttggatcttcctggttctgtcaaacttcattttattcctggttagggaaggcctattttgctttatatatcggacttagattgtggtaattgctctaggtgctttatttactccaaaggcttgtcctttctgggatcaaaccaaggactcaatgaggtttcttcactctggatagatcataaatctaatgtttccccatactacacagcctttcctagccccattcatcttttagctttgtagcaggtaatcttgtaaagtgtgagcataagttgccaagaccttcgttaattatctgtgatgaatcttctttcagaccctcttctcccacacaattcttccttttcagaacaactgtccttaaattcttgtcarttttacagtccagtatttgtgttatctgctcagtgaaaccacagttctgcttgtatttcatcttcatgaacattggc

SEQ ID NO: 220402 - DNA, 586 bp, Homo sapiens
gcagagaaacatggtccacttggagcaaatcagaaagtttcaaggaaacatttctcacagaatgaaatgaaacctcagacaattggagaggtggttggaaaatgattttagaaatgagtccatagaaaactcagcaaaatttttaaaaagcaaaatcgtcattaatcccagggaaagcagttttcacaagaaaggcaacgtaatcgtagtatactacaagattcagtgctgacaggtattctcctaaacatactaatataaacatggaatattcgcctaaatgaaaacaggccataggggttagagaactgttgagaagatagagaggtggaatgtgtgcttgtgtggggggtcatgaagtttgaagaggaggagagctggaagaagagggaaaccctcctctctccccatgagaagtcacagctactacttccacaaaatgtagttctataacaatgttatcagacatgaaggagctaaaagtcaaaagactcccgaatggraaaagatggatgggttggcaggggttgcagtttttcttaatacacagttaggcttgacttttcagactgcacatgtgtacctt

SEQ ID NO: 220403 - DNA, 513 bp, Homo sapiens
tgaatagacttaaaatttttgagtgacaatttgacactgtctaataaaattatttgaagtttttatcctttcatttaattccgcttggagractttgttacatttgcaagactggccaaaatatattcatgttaagtttggtattcatatcaacatcaagtggatatatttttaaatgatccatcatatataaattttaaacactaatgttgccctgcactgaaaagacatgctgaaactaggacaggttgataattaaacattttttttaaatccaaattaataagtttaaagagacaaaaaatatctgatttgaatataatcaaactatttattactaatgttcataatttaaatatggcatatcattgttagttcttcccaacaactgagtttcaagctgtctctagaactgacagcaaggtaagtaggaattagtaggagctgaaattatagaaatgaatgaatgtatgcatgtgtttttacttgtatgtctatacttctatattatat

SEQ ID NO: 220404 - DNA, 513 bp, Homo sapiens
tgaatagacttaaaatttttgagtgacaatttgacactgtctaataaaattatttgaagtttttatcctttcatttaattccgcttggagaactttgttacatttgcaagactggccaaaatatattcatgttaagtttggtattcatatcaacatcaagtggatatatttttaaatgatccatcatatataaattttaaacactaatgttgccctgcactgaaaagacatgctgaaactaggayaggttgataattaaacattttttttaaatccaaattaataagtttaaagagacaaaaaatatctgatttgaatataatcaaactatttattactaatgttcataatttaaatatggcatatcattgttagttcttcccaacaactgagtttcaagctgtctctagaactgacagcaaggtaagtaggaattagtaggagctgaaattatagaaatgaatgaatgtatgcatgtgtttttacttgtatgtctatacttctatattatat

SEQ ID NO: 220405 - DNA, 497 bp, Homo sapiens
tcttcccttggtaatgagactgactgataattctatgctctaagtatctaaactttactaatgtgaacccaagtctgtaaattatattttatatgttgctgactggtaagcaaatttgatttcatgcaaatattttgaagtggattagttgatggagaaacrgcatctgaatgccaataacatgcctcaatatataaacaggataaaaactacttcaatccattggaaagtgtcagaattaataaagcaatgtcaagctatatctcccccataggtggcctatattgacatgaaaaattataatggtagaaatacagaacttttcagatataaataacctcactgatttatgaaatttttatcaggaactggtaactgaagagaagggaaaaatcgctgcaaagaattttattgccatctattgacaatggaatttatgataaaatgtaaaatcaattttcattatataatgttggaagtcctatttattaaataat

SEQ ID NO: 220406 - DNA, 594 bp, Homo sapiens
ggaggactgaatttggcttgcagacctgttttatttggcctacagagaattattattatttttttcatggagctaacattcagaaattgggagttttcacataaaaatccagatttctggcttctttacataaagcacattcccatgtggctgctcagttggagctgagtagcagatgcacttggatatggcctggcctcacctgctgcattgctctacttgcctgggcccacaggtggctgaggctgtgaccgtggggtaagtcatyttttggaaagttgtttcaatgtttcaagcaggcagtgggaccaacaccaagtttaggaatcaaaacctttaaagtgctgagactgaattttggttcttctgctttgctacttagagggggcatcaattagggtgaaccggcagattctctagcacccttttagaaatgatctaagtaaatgttcacaacattcacaaaaagactcatccaccacaatgtgcattaatcaatcaatatcaagaaatgttttattctcatgacccaagttctgtttatttcccctgacctactctaaaacaatctaatctttaataatttaataaata

SEQ ID NO: 220407 - DNA, 504 bp, Homo sapiens
ttatcgttaccagattttattagcaaattaatgcaaagattttcatagctgttttgaaagtagctcttgtacagagagtttttctacagatggaggaatataaaaatgaagtagatatgattcctattctcaaagtgctttataattggatagttgcagtacttgaggatttccccaattacctcgctgtctattatgagaatatcatgtatttctgctacaaaatgaagatttactaacttataaaacatatacatatatatatttatgwatatgtatgtatatatatgctttgcatagatagatattgcatagataggtaaatattgcacatatgggtaatgtgtatatctgccaataatgtcctcgataaatagcaataagggtaaaatattttaaaaatcaaagaattactaacagtgagtggtgtgagtcctgttttctagatttaaaaggtctgtaaagatacagaagaattgatccaatactcttctaataagccac

SEQ ID NO: 220408 - DNA, 460 bp, Homo sapiens
agttctacctcccaacactaaagagctatatcaacgtgcacacaagagctataaggcagaaagtcttcccttccaggaatcacactctgctagtcaatgtgaccattcacaacaacacttagatgtgcttctttaaacatcctacagaacatctctgcttcagtttcctcctctgttgactagacataagaccacttgctgataaagggcaaaacaaaaacaaaaacaaaaaaacacacatgtgaagactagtaggaagatagactattaagctactcctacaggtttgaaacttcggctgattcattttattgctatctttatttatatragctatatgtctaaaatcaacaatatgttagttattggtatgaggtagcattccataatccataaagattaaggtcttctacagtgtaatatactgttgccaaagggagtgtctgaaaacataaaactg

SEQ ID NO: 220409 - DNA, 460 bp, Homo sapiens
agttctacctcccaacactaaagagctatatcaacgtgcacacaagagctataaggcagaaagtcttcccttccaggaatcacactctgctagtcaatgtgaccattcacaacaacacttagatgtgcttctttaaacatcctacagaacatctctgcttcagtttcctcctctgttgactagacataagaccacttgctgataaagggcaaaacaaaaacaaaaacaaaaaaacacacatgtgaagactagtaggaagatagactattaagctactcctacaggtttgaaacttcggctgattcattttattgctatctttatttatataarctatatgtctaaaatcaacaatatgttagttattggtatgaggtagcattccataatccataaagattaaggtcttctacagtgtaatatactgttgccaaagggagtgtctgaaaacataaaactg

SEQ ID NO: 220410 - DNA, 460 bp, Homo sapiens
agttctacctcccaacactaaagagctatatcaacgtgcacacaagagctataaggcagaaagtcttcccttccaggaatcacactctgctagtcaatgtgaccattcacaacaacacttagatgtgcttctttaaacatcctacagaacatctctgcttcagtttcctcctctgttgactagacataagaccacttgctgataaagggcaaaacaaaaacaaaaacaaaaaaacacacatgtgaagactagtaggaagatagactattaagctactcctacaggtttgaaacttcggctgattcattttattgctatctttatttatataagctatatgtctaaaatcaacaatatgttagttattggtatgaggtagcattccataatccataaagattaaggtcttctrcagtgtaatatactgttgccaaagggagtgtctgaaaacataaaactg

SEQ ID NO: 220411 - DNA, 400 bp, Homo sapiens
cacatctgccacagaaacatcaatttaaacaagtatccatgcaagaaaataccttcacaagagccagggagacaaggtgagagattacagcaactgggtgtagaataaaaatcagaaaagacacattgaagagggtatgaaggacagttttacattatccatgtctctcctctcccaaaccctggcacaacattgtggagagacataccttcctatttagagaaagaagtgaacastgggctacctatattttaatactgaactattccaataaaacccagcagtaggcaggccctcagaaccccagactccaggctgatatcagtgaactgagccttcaggtcagccctggcaccaggcccagcccgtctctaggtctgcctagcagacatgatgaaaa

SEQ ID NO: 220412 - DNA, 506 bp, Homo sapiens
caaaagttttctccaggcaaagcttaatggatataacaagaagatgcttgcataaaacactaattcctaccaatgttccttctatgaaggaattaagtacaaattctttaggagcagggacctctggttattgaaggtacagagaccatttataatgattttcagaaggtagraaaagaattgaccagttatttctggttttgctttcctgtctctaattacctctcagggcccttcctccttcttatgttctaccccacaggcccactgtttcagttcctttctagaggtcaatgacattcagaggatctagctttatttctttcatattctcctcgctatatgaatttccccttaatgattttgtttttcttgattctttatgttattagatcagggactaagctgctaaagtaaaagataccagggagatatgtcaggaaaactcacccactgaaatgtttaagaggaactatatctatactaattagagattcagaaggtta

SEQ ID NO: 220413 - DNA, 506 bp, Homo sapiens
caaaagttttctccaggcaaagcttaatggatataacaagaagatgcttgcataaaacactaattcctaccaatgttccttctatgaaggaattaagtacaaattctttaggagcagggacctctggttattgaaggtacagagaccatttataatgattttcagaaggtaggaaaagaattgaccagttatttctggttttgctttcctgtctctaattacctctcagggcccttcctccttcttatgttctaccccacaggcccactgtttcagttcctttctagaggtcaatgacattcagaggatctagctttatttctttcatattctcctcgctatatgaatttccccttaatgattttgtttttcttgattctttatgttattagatcagggactaagctgctaaagtaaaagataccagggagatatgtcaggaaaactcacycactgaaatgtttaagaggaactatatctatactaattagagattcagaaggtta

SEQ ID NO: 220414 - DNA, 575 bp, Homo sapiens
agcatatccttttatatgcaaactgggatgttccagtttatggatgtaccataatttatttataagtcctgcgttgatagatatttagttattatatcagtccattctcgcattgctgtaaaaatacctgagactggataatttactaagaagagaggattaattggctcatggttcttcaagctgtacagaaagcatgatgctggcatctgttcagcttctggggaggcctcaggaaacttaaaatcatggtagaagttgaagggggagcactgacatcttacatggcaggagcaagagggtgaaagtgaggtcccccacactttaaacaaccagatctcktgaaaatttactcagtatcttgaagacggaatgaaaggggtggtgctaacccattcatgagaaagccaccctcatgatccagtcacctctcacccggccccacctccaacattggggattacaaattcaacctgagatttggtgagataacagatacaaaccgtattatttggcctctggcccctcccaaagcttatatgcctctcacattgcaaaatgcaatcatgccttcc

SEQ ID NO: 220415 - DNA, 449 bp, Homo sapiens
agctccttgattaaagaggaggctgggagccaggcacagtggcccatgccatcccagtgagtcaggaggctgaagcaagaggattgattgcttgaagccaggagtttgacctcagaccctacgaaaaaattaatctaaaatgtcggggcgcggtggcccatgcctctaatccgagcactttgggaggcacaggtgggcagatcacaaggtcaggagtttaagaccagcctggccaacatggtgaaaccctgtctctctaaaaatacaaaaattagctggggatggtggcatgtgcatgtaatcccagccacttgggaggctgaggcaggataattgcttgaactgggacccgggaggcggaggttgcagtgagccaagattgcaccmctgcactccagcctgggctacagagggagacaccatctcaaaaaaaaaaaaaaaaaaaaaaa

SEQ ID NO: 220416 - DNA, 518 bp, Homo sapiens
atcttacttttttacaacagttttaatctaaggttctccacaaatacttttttcttagaaaagagatccccttggggcggggggcgggaggcagaggggggrattaaggaacaaatttttccataagtacaaaaaaaaaaagacatgcccaaacatcacaaatatttcaacacatctctgccttaacataaattttaaataagtaaatttcaaaaaagaaaaatctcaaacaggttaagcattatagttcagaaataaaagtcctctacactttatgaatgcagccataaatacaccaagaaatatttcattgacttaaaactaaataactgtatctggctggtaaaattgcaattactgataagtggcacgaaagcataagataatcaataaaactatgaaaactttttttacaaaaggtcagtcatattttgtttacttaaaatactaagtttaatcatgacctatctaaaccttatcattgctcattgtataaaattagcactgcacttgcaaac

SEQ ID NO: 220417 - DNA, 407 bp, Homo sapiens
aagcttcaggaaacttgggttttctgggacaaaatctcccctcctcctgccttttccataaatatagaacaagcktttttcaaggctttttgagtcaaatttgtgttccttttaactggaacactaggcagagacaggccagaagggggcacaggatgacccagatttattcggattatgtggacaggaggaagctgaggcagagagcagttaggtcctgtgtccagggctgtgaggctgcagacggggcccttcgcagcctctccacagccctcactcaggaaagagccctgtggaattctctctctctctctttctctcattgaaaatagagtccaggtagctaagtcttcagttcagaaaagtcatttgcctaatcacggtgacaaactattggaatgtggcca

SEQ ID NO: 220418 - DNA, 554 bp, Homo sapiens
agatcttttcttccacgtataaaccctggagaaaccccarcttgttcagagtccactttgtagccacattctttcctttttcctccttgggaatcattttgacaacaacacagcactgtcacaaagtgattaagaacaaggactcaggtaccaagttgcccaggtttgaatcccactaccttacctactggctatgtgaccttgggccaataacttcacctctctgagccttagtttcatcctctgtaaaatagggataataataacacttagcgcataggactgtggagataattaaatgagttaagacatgcagagtgtgcttagaacagtgtatgccacactggcactcagtaagtatttttaactatacttattcatattgttgtcatcaaaagctaaaatggatccctggtccctgctcagttccaacactgtgtttcctgggaaagtggtacactgccacccaaaccagcctcctccagtgtggcccagatatcacggcaggctgtgagggagaagtagtctgtttgcctgtgggaggcaccttggtc

SEQ ID NO: 220419 - DNA, 474 bp, Homo sapiens
atatgtaaaaattgacaaatagaagattctatatttgtgtaattttgagcgagcccatggtattctgataacatttcccagaggtcaggcttctccaatgtctatcaatttgttgtaggtaagaagagaagcaggggcaaatgraccaacatcttaaatttattaaactcaattgattccttttgattagtagaggaaaagaaaatttgctttggtgtgaggaggaattcaacaacacaataaatgttgattatgaagcagttaagatcctcagatcaacatcttaaatttattaaactcaattgattccttttgattagtagaggaaaagaaaatttgctttggtgtgaggaggaattcaacaacaccataaatgttgattatgaagcagttaagatcctcagcggtgggtgtggggtggaaatctcattacactataaaatgaaacttaagcaaatttcaaaagagtaaaac

SEQ ID NO: 220420 - DNA, 668 bp, Homo sapiens
aatccatcctgtgaagaatatcctaggcacaaaaatggctccttgtgtcatttccatctactacaatgtggacttaatatcaaactcttataagggaatatctagcttattctgaacatttcatcttatgaccttaagtatagaaagatataagtaatgcttggtgcctaaatattcaattccttaaatgtcagtcatccttatttgttatagatagaagaaactatgagtactaacaattcaaatgtcattcatgatttatgagtggccarttttatctaatggattaggattatctagtctttctccatcttttaagtaaaaagagaattttgatactaaattttagccacttgggcagttagtttattttttagcagagctaaactcatgaatatttttggagctataataaaaaataaaaacagcttcattgagaacaaaatgaactttctgtaaatataatttaaacctatgttttaaggctttgtgttttaaaaacaaagatgacactgttaaagtgagactgataaaggtgtacttggggaattcatcagcataagaaatgtattatcccctggtagtacgagtttaaaattacaacttgcttagcaaatgtgaaaaataatgtctcctgttgcagattgcattttgctagtttatttctc

SEQ ID NO: 220421 - DNA, 512 bp, Homo sapiens
ggtaggcccagttttaactctcaaatcacaattgaggtaggtttgtgaagaaggtaagagcgctgatgctacgctcctgtatttaaaccccaagttggcttctttcaggctatataacctgggatatgttacttaayctctctgtgactcagttttctgtaaattgggaataatagtgcaggcctccaaggttagttgtgaggattaactgagttttaatacatgcttaagcacttaaaatagtgccttgctcttaacaagctttcagtaaatgttagttcttattattgttagtgaccacgcttcattttaaacatgttggccaacacaaaatgattcattgatgtcagttacaagtagcgcagaataatagcatcactcctagacgttgtgtcagggctgtgatatgaagcattctaaaaggcaaattattttaatgggtaatgcttaacatgcacatttctagagtagcatattggttaaatataaagttttgctcaaagagtcaatta

SEQ ID NO: 220422 - DNA, 586 bp, Homo sapiens
gtttcaccatgttggccaagctgatcttgaactcctgatctcaggtgatccgctcacctcggcctcccaaagtgctgggattacaggtgttagccactgctcctggcctgtatttacgtatttttaatatcaaagttcatttctagaaagagtattgtaatttcattttaattatggccaacttaatcacataatattttttataattttttttatatgaaccttagtaagacttacacagatcrttcctgaaaggcttggattttctggtttgttctaaatatccctctttcttacacaagtcattttattttagggcaaaaatttatgatacaaaattctttttcatacaaaattatttttattttaatttttctaaccaaaaatacctctttatttctgtaactttctttacagctcttatttcctgattccttttaccttgattcataaataatctttaaacaaccttggaatcagacaaaacttcattttttagaaaatttttttctataatttttaaattggaaattacccagacatttaatgaatatctgaaatttaatctttagattctaaattatat

SEQ ID NO: 220423 - DNA, 473 bp, Homo sapiens
ccctggcaagatctgggtggataatcagactgactggtcccactcttcccacaggcctcagagccccaactttgttccctggggcagcctggaaatagccaggtcagaaaccagcyaggaatttttccaagctgcttcctatatgcaagaatgggatgggggcctttgggagcacttagggaagatgtggagagttggaggaaaagggggcttggaggtaagggaggggactgggggaaggataggggagaagctgtgagcctggagaagtagccaagggatcctgagggaatgggggagctgagacgaaacccccatttctattcagaagatgagctatgagtctgggcttgggctgatagaagccttggcccctggcctggtgggagctctgggcagctggcctacagacgttccttagtgctggcgggtaggtttgaatcatcacgcaggccctggcctccacccgcccc

SEQ ID NO: 220424 - DNA, 540 bp, Homo sapiens
gtggaaatttagtataagataaagaaggtattctcaaatcagtggaggaaaggtgtactattcaatacaacctaatctactttgaataatccaggaataggaaagctctttctaactacaggcaaaatccagactacataaacattcaattagcaacaaaaaacttctgcaacacagattaaaaaaaaagtgacaaaatgagaaaaaaatctgcaacttaacatagtaagtgctaaactcaaaaattcataaaataccaagaacctaacagaaaacaataagcaactgtttccatgtcccagaactgaaacaaacagaaasagctttatgaaggcataaactacagctttttccttgtttcccatccccaggcctggcatatagtagaggctcaataaatgtttattgaatgcattttataactgatggcttttatacacagccagaaacatgaaaattatttttataaaattaatgatttgtaacagcctggaaaaaacgtaatctgacttatgttcctaaaattagttgagagtggaa

SEQ ID NO: 220425 - DNA, 549 bp, Homo sapiens
agcaatgggaagggacagaatagaaggttaaaaaaataagcaacagaacttgggatatgagaagtaaaggtgaaggataaaatcaaagatgattccaagattttgagtttatgtggttgagaataatggtatattaagcaaacaagacagaagaaactcttatggcagaaaggaaggggaaaagagaaaggaaaatttagtttttgacatggtgtgtttgatgtactactggtacagtattccagcaataatgtayaataggcagctggcaatttgtttttggagctcaggagggattctagagatacaaatcgtaagtaacacattaggtgaaactatgagaataaataagaaagcctaagaaaaaaagtgtgaaaaataagagaaaaagccaagacccagtcttacctagttatgactgatttcaaacaaccaactaggctatgtaaaattaattttaaaatgtgatttatattttaattctaatgcatttcaaatttctcaatcattacatatttgtcccactaatgcattttcaggtttctcaag

SEQ ID NO: 220426 - DNA, 549 bp, Homo sapiens
agcaatgggaagggacagaatagaaggttaaaaaaataagcaacagaacttgggatatgagaagtaaaggtgaaggataaaatcaaagatgattccaagattttgagtttatgtggttgagaataatggtatattaagcaaacaagacagaagaaactcttatggcagaaaggaaggggaaaagagaaaggaaaatttagtttttgacatggtgtgtttgatgtactactggtacagtattccagcaataatgtataataggcagctggcaatttgtttttggagctcaggagggattctagagatacaaatcgtaagtaacacattaggtgaaactatgagaataaataagaaagcctaagaaaaaaagtgtgaaaaataagagaaaaagccaagacccagtcttacctagttatgactgatttcaaacaaccaactaggctaygtaaaattaattttaaaatgtgatttatattttaattctaatgcatttcaaatttctcaatcattacatatttgtcccactaatgcattttcaggtttctcaag

SEQ ID NO: 220427 - DNA, 549 bp, Homo sapiens
agcaatgggaagggacagaatagaaggttaaaaaaataagcaacagaacttgggatatgagaagtaaaggtgaaggataaaatcaaagatgattccaagattttgagtttatgtggttgagaataatggtatattaagcaaacaagacagaagaaactcttatggcagaaaggaaggggaaaagagaaaggaaaatttagtttttgacatggtgtgtttgatgtactactggtacagtattccagcaataatgtataataggcagctggcaatttgtttttggagctcaggagggattctagagatacaaatcgtaagtaacacattaggtgaaactatgagaataaataagaaagcctaagaaaaaaagtgtgaaaaataagagaaaaagccaagacccagtcttacctagttatgactgatttcaaacaaccaactaggctatgtaaaattaattttaaaatgtgatttatattttaattctaatgcatttcaaatttctcartcattacatatttgtcccactaatgcattttcaggtttctcaag

SEQ ID NO: 220428 - DNA, 523 bp, Homo sapiens
ttgctcggccaggcatggtggctcacrcctgtaatcccagcactttgggaggccaagacaggcagatcacgaggtcaggagtttgagaccagcctggccaatatggtgaaaccccatctctagtaaaaatacgaaaattagccaggcgtagtggcacacacctgtaatcccagctactagggagactgaggcaggagaattgcttgaaccggtgaggcggaggttgcagtgagccaagattgcaccaccacactccagcctgggtgacagagcaagactcctcgaaaaataaaaataaaaaaggagtttctcaaggttttaatcccagccaacaaccaagaatcctgataagaatttgcttctaaaataaaagctctcggttgggtgcggtggctcacatctgtaatcccagccctttgggagaccaaggcaggatcacttgagatcaggagctcaagactagcctggccaacacggtgaaacctcgtctctactaaaaatacaaaaattagccgggtgtagt

SEQ ID NO: 220429 - DNA, 570 bp, Homo sapiens
tagagaagaaattatcaaagaaacaaatgtggccaggtgtgatggctcatgtctttaatccyagcatttgggaggctgaggagggaagattgcttcagcccagaagttggagaaccccatctctacaaaaaattttaaaaattaaccaggccaggtgcaatggcttacgcctgtaatgccagcacttcgagaggtcaaggcaggaggatcgcttgagcccagaagttcaagaccagcctggccaagataggtagacccccatctctacaaaaattttttttttttaattagctggacatggtgctctgctcctgtagtccagctactcaggaggctgaggcaggaggatacttgagcccaggagttccaggccgcagtgagctatgaccatgccactgcactctagcctgggtgacagagtaagaccctgtccctaagaaaagaaaagaaacaaacaaatgcaagaaaacatcgcagaacaaaagaacaaaatatgtctccaggatgaaaaggcccagaacaacaaatggaaaagacctaaaccaatatacacacacacatcttggaatt

SEQ ID NO: 220430 - DNA, 607 bp, Homo sapiens
tatagctgcaacacatgtatatgctttggttggtatttatttcaaacataaggtcagtaatatcttggactgagaagtaatcattgtgataaattaattcatgacctcatgccaagagacaatgctcccaaagaactagagaaatggcaatcctgctctttcatttctagtttctgattttaaaagtagcagatggccggacgcggtggcttatgcctgtaatcccagcactttgggaggcagatcacgaggtcaggagtttgagaccagcctggacaatatggtgaaaacccatctctactaaaaatacaaaaattagcagggcatggtggcacacgcctgtagtcccagctactcaggagaggcagaagaatcrcttgaacccgggaggcggaggttgcagccagccgaggccgcactactgcactccagcctgggtggcagagtgagactccttcttaaaaaaaaaaaaaaagtatcagatgagttagaggcctcaggaacaggtttgttaagaggagagagaactaaaccaaaagccattttgatcatctttgacagggagtaaacacagagtaggttttataaaccctcaggttaggtaaac

SEQ ID NO: 220431 - DNA, 491 bp, Homo sapiens
  misc_feature (1)...(491): n = A,T,C or G
caagacaagggtgtctgctctagccatttctattcaatattgtactggatgttctagccagggcaattataaaagaaaaataaaataaataaataaataaaattgtatttttctatacttataataaacaatctgaaattgaagttatgaaacagttccatttacactatcataaaaaagaataaaatgcttgtaaataaatawcttaaaaaagtgcaaaatttttactgccaaatctataaaacaatattgaaagaaattaaaaatgcaaataaatgggaaaacatctgatgttcatgttgtttttccaataaattgtgctgagacaactggatatatacatacaaaagaataaagttagacccttagctcacatcatatataaaaattaactcaaaaaggatcaaatacctaaatgtaagagttaatactataaactcttagaagaaaatataggaataaaccttcatgacctgatatttagcaatnnn

SEQ ID NO: 220432 - DNA, 491 bp, Homo sapiens
  misc_feature (1)...(491): n = A,T,C or G
caagacaagggtgtctgctctagccatttctattcaatattgtactggatgttctagccagggcaattataaaagaaaaataaaataaataaataaataaaattgtatttttctatacttataataaacaatctgaaattgaagttatgaaacagttccatttacactatcataaaaaagaataaaatgcttgtaaataaatatcttaaaaaagtgcaaaatttttactgccaaatctataaaacaatattgaaagaaattaaaaatgcaaataaatgggaaaacatctgatgttcatgttgtttttccaataaattgtgctgagacaactggatatatacatacaaaagaataaagttagacccttagctcacatcatatataaaaattaactcaaaaaggatcaaatacytaaatgtaagagttaatactataaactcttagaagaaaatataggaataaaccttcatgacctgatatttagcaatnnn

SEQ ID NO: 220433 - DNA, 510 bp, Homo sapiens
gaaccctttgtggaatggatcaagagtattcattttcttctggtaaacagcaatctgaacccaagagataatcctttctcaaacacycaatcagcaatcagccagcaccagtgtcttgatatttctaaagagtatactccggtggtttggcctcctggaggacgctgtgaggaagactgtgcttgcgtccctgagcctgttgccactccttactaagggccttactaagggcatgcccagagccatcccagtctgctatgtttggaaagggttctgggcatcaagacttatcactcagaatactgtgggattttcttctacctaagacaaaagaaagaagcaattccattaatgtacgcttttcaggatctgttgggtttttcatctgttactgctttgggaactttttctgtgtgccagcacagcgctatgcactggacattccatgatgagcaagacggatgtccgtgccctcatggaccttagagaacctaaaagattctcatttct

SEQ ID NO: 220434 - DNA, 570 bp, Homo sapiens
ttcctcatcagcaacttgcatatcatagatgctcaatggtatttgttgaattaataaatatatggaaagaaggaaggaagagagagagtcagaaaatgttatgcaaggcttaccaaaaatagggtaacctaatttcttaaggacttttacatattcttgaatgtgtrccatttataagggaatcatgggtctggggtgacatctttgaccaatgtccagaagtctactagaaattttcctggacattctctcagggaaaatactaagtgaaatagtttgggccttgtggacctggagtcacacaactgaaaaaggttttattagttcttgatgtcactgagtagggaaggagagaaagaaatactcctgggctctaggaaaccagctccacctgtggcttagatagatccttagagataagagacaagcagggtttgcatgggtctgcaatgttttcctttaaccaaggcccacattctaatgaaatatatttgttgttcatataaaaccacccttaaaaagattttttctaacatccataattgtgtttttctagttagagttgacata

SEQ ID NO: 220435 - DNA, 632 bp, Homo sapiens
aaatatgtgaatcctaccatttgcaacaacatggatgaaattgaaggacattatgctaactgaaataaaacagacacagatatacaaatactctatgatctcatttatatgtggaatctaaaaaaygtgaactcatagaggcagggaatagaatggtagctaccaggggctgggcaggggcaggtggggagatgttgattaaagagtacaaatttttagacataagatgaataagttctgggtttctaatttacagcatggttattatagttaataatactgtattattcacttgaaatttgctaattgagtggaccttaagtgcctttaccacacacacacacgcgcgcacacacgcacacacacacaaaatggtaactaagtgtggtgatagatgtgttcattaatttgacagtggtaatcattatacaatgtatacatatagcaaatcaccatgttgtataccttgaacatatacaatttttgtcaattatacaatttgtaaagatgggggtaaaaacctagctaagtcactcccaattcctgacctacagaaactgtgctataataaatgtttgttgttttaagccactaaactttgggttaattcattatacagcaagagatacctc

SEQ ID NO: 220436 - DNA, 632 bp, Homo sapiens
aaatatgtgaatcctaccatttgcaacaacatggatgaaattgaaggacattatgctaactgaaataaaacagacacagatatacaaatactctatgatctcatttatatgtggaatctaaaaaatgtgaactcatagaggcagggaatagaatggtagctaccaggggctgggcaggggcaggtggggagatgttgattaaagagtacaaatttttagacataagatgaataagttctgggtttctaatttacagcatggttattatagttaataatactgtattattcacttgaaatttgctaattgagtggaccttaagtgyctttaccacacacacacacgcgcgcacacacgcacacacacacaaaatggtaactaagtgtggtgatagatgtgttcattaatttgacagtggtaatcattatacaatgtatacatatagcaaatcaccatgttgtataccttgaacatatacaatttttgtcaattatacaatttgtaaagatgggggtaaaaacctagctaagtcactcccaattcctgacctacagaaactgtgctataataaatgtttgttgttttaagccactaaactttgggttaattcattatacagcaagagatacctc

SEQ ID NO: 220437 - DNA, 563 bp, Homo sapiens
ttatgttattaagagacacactagattgagaaatttgatcacacttataatatgtggttgtacttaggtaacatttactgagcgatgcctattaagcagttggctaagccctttccacatattaygtcatttaactctttccctcataatcaactgaggtatgtattagtattcccatttcagagatgaggaaactgagagaggtgagagagaggctcaaataatttgaaactcttcagcattactaccactttcaagcaaatatactgtacatttatttgtgtatgactatgcaggtatatccatatttagcccaccagggctatttttcattttccaacgaattcatcatgacattactcataagccacctcagtgcatttgagatcaatttataaagtttgattgctgcaaaatttttcaaaaacatgtttacagattattgaaacccatattgcctaccatatgttaggcactctgctaggtgataaaatggaagaatgcaaaatcactcctccaaggagctcagattcttcttttgtaggaaagtcaattattcattc

SEQ ID NO: 220438 - DNA, 608 bp, Homo sapiens
tggttactttggaagtactttcaacgtcaggctttaaaagggcaagaatattaactgagaagaattgaagctactttattgaatgycctacatggtttgttaagtgaacataacctaatattaaaatagaacgcttctcacctcagaagcgtcagtccagagggactgacattgtggctctcaggtaccaatgtgcgcatgggacagaacaccataagagtaatctaaaacaaaacaaaccctgatgtttgggtttggttgcaaattttaaggtcatttatccaagggcttctttctctcttcaagaatagaaaagattttttggagagtaagaagaaagaagaaagattctagtgagaaggattttttggaaaagtttttgctgtaagcctgaagtcctgtatctcaagaggaaataaggggtgaggggacacctgaacctccctcaggttttgagggccttcaacacggccattctgagagtctaatatgtgtcacctgaagtttgaaagaccgtgagctgagggctgatttctgccccagaaaatgtgcagagtaagagagaagctggccagttgtgttgaggatgatgaagccaaagcaagtag

SEQ ID NO: 220439 - DNA, 585 bp, Homo sapiens
aaacagcctattgcacggcaagagtgacgccatcttgaagtgaaatcaccgtggtggctaatatttgactcctccatagcaaggttttaagcagcaaggtctttaaacaatgttatagtgtagatagcctgaaaaagatgcttccctaaccttcccaatagtcacaagtttcacaagaaaatctgaaacatgaccaactgcacatgttttactctaaaatcttgctacaagtgtaggaatccaccgtctcatggccaccagagaccttgcttctgttcctaagtccctaaaaaaawtttttttttttctgagaaactggatttgtcaacctctttctttggcctgttagctcccttggctttgggagttaggtttgcatagacctgttcaccacatggaataagtgagaattagccaaagaaagggagaagggtattctaagaagaggctagcacatgtggaagggagcacgtccagggatgggaacagttagaaatgttgatcagtgctgtccagaactatctacgaaagtcctatatctatgatgtccaaatggtagctactagtcacatgtggctgttgagc

SEQ ID NO: 220440 - DNA, 572 bp, Homo sapiens
agagcaagaattgcccatcagtgtccggtattgggctggaatggcttgggcctatatatccccatctggctttgtagctggatgcaggttgtcctgggaaggaagtggccttaggagtggtacagctctgttgctgagccagatcctgaaggagccaacacctgggggctgtctgctgactgcagccccagaactgggggctgtaatgggtcctggaaggggaatctaggaagtgcatctttgtgtctacaatatacgaagtggtcttcctatccttattttactgatgaggctcatagagagtatggcactgcctgtggccacacagctagtaaatagcagagtctggatttgaacccaggcctgcctgaagtcaaacctcatgctttttctgtgaaacagaaccatggacctcggggaggaataaggagcatgtagtgatgtataacatttgtttctagggttgttcatcagtgtttgttgtgcaactgsggggagaaaattggttctaataagcagataacaggtagtaaaggacaatgtgttaaccccaggtgcctaggaaaaagctt

SEQ ID NO: 220441 - DNA, 575 bp, Homo sapiens
gatctgaaagtttctcagtgggaagaagggagacttctcatgggctcagcctgctaaacstccccaggtatttctcttccgtggactgcacccattagagtgggcccctggtcctgctgtcacctacagatgtcccctactctgctctcgtgtgtcccagtcacaccttttcctcatattgttggtcccaactaactcccacctgtcttaggcatctcacccaggtttcaaacaatgaagtgctttcagggagcagttcccaggctgcggttactccccttcccgggtcacagagggttgtggtcatttccttcttgggatgccccacctatcagtctgatgctttgcatgccttttgctgtgaacagagctgctaaactctagagagtaggtcattttggggtttacattttgacccttcacctgcttccagtcttgattccaatgtcacctcagtgagttcttctctgactacccatttcaaatgcactcctgcctcctacatgccccatcccctaactgctcaaatgtcctccagagtacctgattactttctaattcactgtatcacttac

SEQ ID NO: 220442 - DNA, 575 bp, Homo sapiens
ttctccaaccaaagagtccatccgagggactgggcagggaggcaaaagtaaatggacacaggtcccccasaatcaaagcagatagctcatgtgaattattagtcatgtaacagcatgccctctgtccctccaagcccatatttaaagctaaataatgtttcagcccccaactctgacatctatctaggccagcctttcttgaaaccacactctgacacacgaagcctataagatgcttcatgaaaaagggttcctagatacaaataatttgggaaacactgcctgccttcttggagattcacagcacctatgaaaggctctgagaagttctgcaatgaagaaatttgtttcattctatttcatccagtatttcccacactcaaactcttttatcaccttctaatatcccttgtattggggtttcccatagagcccactgggaagcacaggtcctgaggataggcttctagaaatactgatgattggtttggcccacttggcacctttagtccccgactccatgtgatcttcactcatggctgcacagccttccactgaagcccacctgcttggta

SEQ ID NO: 220443 - DNA, 575 bp, Homo sapiens
ttctccaaccaaagagtccatccgagggactgggcagggaggcaaaagtaaatggacacaggtcccccacaatcaaagcagatagctcatgtgaattattagtcatgtaacagcatgccctctgtccctccaagcccatatttaaagctaaataatgtttcagcccccaactctgacatctatctaggccagcctttcttgaaaccacactctgacacaygaagcctataagatgcttcatgaaaaagggttcctagatacaaataatttgggaaacactgcctgccttcttggagattcacagcacctatgaaaggctctgagaagttctgcaatgaagaaatttgtttcattctatttcatccagtatttcccacactcaaactcttttatcaccttctaatatcccttgtattggggtttcccatagagcccactgggaagcacaggtcctgaggataggcttctagaaatactgatgattggtttggcccacttggcacctttagtccccgactccatgtgatcttcactcatggctgcacagccttccactgaagcccacctgcttggta

SEQ ID NO: 220444 - DNA, 573 bp, Homo sapiens
agctaaataatgtttcagcccccaactctgacatctatctaggccagcctttcttgaaaccacactctgacacacgaagcctataagatgcttcatgaaaaagggttcctagatacaaataatttgggaaacactgcctgccttcttggagattcacagcacctatgaaaggctctgagaagttctgcaatgaagaaatttgtttcattctatttcatccagtatttcccacactcaaactcttttatcaccttctaatatcccttgtattggggtttcccatagagcccactgggaagcacaggtcctgaggataggcttctagaaatactgatgattggtttggcccacttggcacctttagtccccgactccatgtgaycttcactcatggctgcacagccttccactgaagcccacctgcttggtagggagcatcagacagttcaagctcactaataagagccaggagcagaaccttgttgtctagaccaccaagcctctttcccaagctgttttcatgtggtagggtgttttcaccattcactatgtcagcacggatgaacctaggcc

SEQ ID NO: 220445 - DNA, 266 bp, Homo sapiens
caaaccccagcattttttgttgctatgtgtgtgatctttgcctagtcwcttgcccactctgtgcctcagtttcctcatgtgtaaaatgaagatgatagtagtaactgcctcatatggttgttgtgaggattgcatgagttaatggaatggctcctggcccagagcaaacactccataagagttacctactgcttttactgttaatgacgaatgtcatgcagtacaataatcctggccacatgcccataaatcaagggccaaagaag

SEQ ID NO: 220446 - DNA, 488 bp, Homo sapiens
tcaaaccccagcattttttgttgctatgtgtgtgatctttgcctagtcacttgcccactctgtgcctcagtttcctcatgtgtaaaatgaagatgatagtagtaactgcctcatatggttgttgtgaggattgcatgagttaatggaatggctcctggcccagagcaaacactccatmagagttacctactgcttttactgttaatgacgaatgtcatgcagtacaataatcctggccacatgcccataaatcaagggccaaagaagacttataaaatcttgtcagcagggagggcttggttcagggtgaggtccacaagcaggatcatggcctggagatctgggtagcttccacattgaaagaaccactcaagaaaactgtagggtgcttagtacatccaaacatacataaatacagagtctggctcaagatttttggccagagtcccttgagagttatgaatccctctttgaacaatggcagctat

SEQ ID NO: 220447 - DNA, 483 bp, Homo sapiens
ccccagcattttttgttgctatgtgtgtgatctttgcctagtcacttgcccactctgtgcctcagtttcctcatgtgtaaaatgaagatgatagtagtaactgcctcatatggttgttgtgaggattgcatgagttaatggaatggctcctggcccagagcaaacactccataagagttacctactgcttttactgttaatgacgaatgtcatgcagtacaataatccwggccacatgcccataaatcaagggccaaagaagacttataaaatcttgtcagcagggagggcttggttcagggtgaggtccacaagcaggatcatggcctggagatctgggtagcttccacattgaaagaaccactcaagaaaactgtagggtgcttagtacatccaaacatacataaatacagagtctggctcaagatttttggccagagtcccttgagagttatgaatccctctttgaacaatggcagctat

SEQ ID NO: 220448 - DNA, 591 bp, Homo sapiens
ccagacccctgtggtggggagcccaggttggagactgtaaaagctcacaggttgtggtgtaaatcaagcctgtggtcctgggtggctgaacatgtggttctgtgacaagagacctagcctggacgttgggaagcctgggttccatgcttgcttctgtcagaatgtgactcagggcaaactatttctcttctctgggatacagtatccccatcctttaacataaggacaggtcacattaggcagtctctaaggtgttttgtgagctttagactgatttattctgttacttaagaaagcagatgaattatcctttcacctccataagaatctgtgaattttagatraaatgaccacaaaagaatcaagatgggttatacaattttgtgatgctcacttcacatcacaacactggaaagtatgggagtgaaaaggagtgaggacggacccagagaggccacccttaggatacccagaccaggtcactggaagcagacacgaatgctttgctggtctaggacaccatcccgttgaagtctccttgagaaatgctatgcagttttcactcatctttccagctgtcaagttctctac

SEQ ID NO: 220449 - DNA, 479 bp, Homo sapiens
gaattccctgaccacttgcacttcccaggtgaggcgatgcctcgccctgctttggctcacgctcagtgggctgcacccactgtcctgcacccactgtcccacaagccccagtgagatgaaccgagtacctcaggtggaaatgcagaaatcacctgtcttctgcgtcgttcacgctgggggctatagactggagctgttcctatwtggccatcttggaaccacccagtcaatctgactttaatcaaaaagtgctgaaagaaaaaaaatacaatttttctgggatgtaaaacaaaattttttaaaggggaaattgagtggtttatttaaaactctgaccaccttggaactatttgaaactctgtgtcccttttaaattttgttgcttctgagttaataggtaagattatagcaaggaagaatagggtaataggaaataagggagaggatttgaaacataagaagtgtcagcttcagaactt

SEQ ID NO: 220450 - DNA, 479 bp, Homo sapiens
gaattccctgaccacttgcacttcccaggtgaggcgatgcctcgccctgctttggctcacgctcagtgggctgcacccactgtcctgcacccactgtcccacaagccccagtgagatgaaccgagtacctcaggtggaaatgcagaaatcacctgtcttctgcgtcgttcacgctgggggctatagactggagctgttcctatttggccatcttsgaaccacccagtcaatctgactttaatcaaaaagtgctgaaagaaaaaaaatacaatttttctgggatgtaaaacaaaattttttaaaggggaaattgagtggtttatttaaaactctgaccaccttggaactatttgaaactctgtgtcccttttaaattttgttgcttctgagttaataggtaagattatagcaaggaagaatagggtaataggaaataagggagaggatttgaaacataagaagtgtcagcttcagaactt

SEQ ID NO: 220451 - DNA, 613 bp, Homo sapiens
tgctctgtttctgtaattgctctaaccttgttttattttgatatgagatttcttggcctcatctcagatagcaacaccaccctacactttctcctccacaccctttgcaaatagaattccaaaaggtagttcaggcactttagagttcatcctgggaaatggctcatcttgagggcatttcagtgcagtaactgagatttcgtctrctccttcccgggccgccgcactgcccatcccctgcccagtgatttccccaggaatccggggacggcaggaaaagagctccatccacagccagcccctcgcctttccggggacggccctcagccctgagggctgcccgtttaccgtgcgcatcccccggccaagcatccccgcaaggcgcccctcaccgccaactttccccactggaaactattctccgagcaaccgttaaagatcattgaccccgcgaacgcctcttcctgaggtagatcacgtaagatctctccctaactcccactttcccctccagaccagacgtcgcagtgcccacatcccactcaggattgagctaccccgaaagaacaagtgcgcccggagccgccacgggccagaagtcctcgcctccaga

SEQ ID NO: 220452 - DNA, 613 bp, Homo sapiens
tgctctgtttctgtaattgctctaaccttgttttattttgatatgagatttcttggcctcatctcagatagcaacaccaccctacactttctcctccacaccctttgcaaatagaattccaaaaggtagttcaggcactttagagttcatcctgggaaatggctcatcttgagggcatttcagtgcagtaactgagatttcgtctgctccttcccgggccgccgcactgcccatcccctgcccagtgatttccccaggaatccggggacggcaggaaaagagctccatccacagccagcccctcgcctttccggggacggccctcagccctgagggctgcccgtttaccgtgcgcatcccccggccaagcatccccgcaaggcgcccctcaccgccaactttccccactggaaactmttctccgagcaaccgttaaagatcattgaccccgcgaacgcctcttcctgaggtagatcacgtaagatctctccctaactcccactttcccctccagaccagacgtcgcagtgcccacatcccactcaggattgagctaccccgaaagaacaagtgcgcccggagccgccacgggccagaagtcctcgcctccaga

SEQ ID NO: 220453 - DNA, 452 bp, Homo sapiens
gttttgtttttttctctaagggtcagatgcctactctgatcaactatgatgattctattgattttttaaaaaaaattatatcttttaaactttcatatcttttttagacttcccctgaatcttttaaaatagaagttgtccatgtgtttagaaaagttttcttattctggctagctcaggggattaaaatacacattcacattcaccattgagtttggcacatggtttaacatattaatcattccagctyatgtgttcttggtcttttatttttatttttgtcagatgtctatttttccccgtttttttaaattgtgaggtacagtatacatgcagaagagtgtgaagcacttatattgagttttaacaagtaactatgaacagtcacctttatgatccaccacccaggacaagaaatagaacagttccagcacctgagaaaccttgtgtct

SEQ ID NO: 220454 - DNA, 430 bp, Homo sapiens
gggagaattccgactcaagaactgtagtttgttgtgtgttgtttttgctttggggctcactgggaaactctcaccagtcacctgcattacagcctggggcttcctgtcactgtagagcaggtaagaagaggagggaaagaaaagacctcagcagcacagcaccagaccttcctccacttggtggggccttctgaccacgaatggtgaatagtcyaactaacaactaaaagctccagctgggaggaccctggagctcccctgagcctgtggccttcaaacggtactgaccaagcccatcagtaagcagtgcattttacaacgcaacagtccaggacacccctgcgttgaaagaactcaggaagcaatacttacccttagtatgcatagcgtattttgacacttccattacttttgattctaaaaaaaaaaa

SEQ ID NO: 220455 - DNA, 468 bp, Homo sapiens
actgcactccagcctgaatgacagagcaagcttccatctctaaaaattaaaattaaaatttttaaaaaattgtggtctaggcacaaaggctcatgcctgtaatcccaacactttgagaggctgaggcaggaggatcacttgagctcaggagtttgagaccagcctatgaaacatagtctagagatcctgtctccaaaaaaaaaaataatttaaaaatyagctaagcgtggtggcacgtgcctataatcccagctactcagaaagctgagatggaagggtcacttgagccctggagactgaggctgcagtaagttgtgatcatgctactgcactccaatctgaatgacagagcaagaccccatctcaaaaatatttttttaaatttaaaaatagaaaaataactttcaatgtggtgggattcaaaattagtatgcaataattatttaaaatagcttaatgaacaatcaa

SEQ ID NO: 220456 - DNA, 468 bp, Homo sapiens
actgcactccagcctgaatgacagagcaagcttccatctctaaaaattaaaattaaaatttttaaaaaattgtggtctaggcacaaaggctcatgcctgtaatcccaacactttgagaggctgaggcaggaggatcacttgagctcaggagtttgagaccagcctatgaaacatagtctagagatcctgtctccaaaaaaaaaaataatttaaaaattagctaagcgtggtggcacgtgcctataatcccagctactcagaaagctgagatggaagggtcacttgagccctggagactgaggctgcagtaagttgtgatcatgctactgcactccaatctgaatgacagagcaagaccccatctcaaaaatatttttttaaatttaaaaatagaaaaataactttcaatgtggtgggattcaaaattagtatgcaatmattatttaaaatagcttaatgaacaatcaa

SEQ ID NO: 220457 - DNA, 553 bp, Homo sapiens
actcaactggtccctcaaatgtgaatgttcaagtaatacttcaagagaatccattgcaatcataggtgtctagtcacacacaactatgtggtggaaaattcttgggctgagagaacatgcaaccctgagggagggtaggagaaaataagaagcagttgatttcctcagccagtcaacaaatttgattcttttcttgttttaacggcttttgtattaagaatgcttaatttttatgaatcatatggataaagtaagaaaattctaatttgggctattttaacatgtcagccattttaatcttcagttgcatcagtcttgaaaattgtaatccaataacctagaaatgttaattcaaaaaaatccattataacatataaacaaccctagtcagatcaattgactgaaaagaaaggaaggaaagaaattgaagtcaaaaacatacaaaaaccagaaatgagaaaaatttatgtagaatgatattcactatagagttacttattttttwtaaaaaaagaagcaaccaaggtgccccaaaataggaaatattaagtag

SEQ ID NO: 220458 - DNA, 553 bp, Homo sapiens
actcaactggtccctcaaatgtgaatgttcaagtaatacttcaagagaatccattgcaatcataggtgtctagtcacacacaactatgtggtggaaaattcttgggctgagagaacatgcaaccctgagggagggtaggagaaaataagaagcagttgatttcctcagccagtcaacaaatttgattcttttcttgttttaacggcttttgtattaagaatgcttaatttttatgaatcatatggataaagtaagaaaattctaatttgggctattttaacatgtcagccattttaatcttcagttgcatcagtcttgaaaattgtaatccaataacctagaaatgttaattcaaaaaaatccattataacatataaacaaccctagtcagatcaattgactgaaaagaaaggaaggaaagaaattgaagtcaaaaacatacaaaaaccagaaatgagaaaaatttatgtagaatgatattcactatagagttacttatttttttwaaaaaaagaagcaaccaaggtgccccaaaataggaaatattaagtag

SEQ ID NO: 220459 - DNA, 613 bp, Homo sapiens
ttaatacattgaactgaaatgaactttcttgattattcaatactgtatataaatgtcaaaagccaaacatccaacttttaccttcartgatcttgctgagaaaatcgtggttttaagatggtcatgtttcatgataaattcccttatgactttgtggtttaaaaataaatcatgtttgaaaaccacttcagcatttattattatatctttttattacatgtatgttgtctttcctcacacaaagtgtttcaactcctcttgtctgagtacattacactgttttcctataaaattgaatttatgacattcctgccttatactaagtacttaaaaatcctcataatctcaaattttctacaactggaaatgtctctgtatctcccatgactaacacagtatatggaaagtagtatttgttgattaaatctttgttggataataataaagtaattcattgtgaacacagaatgagttcaatgatgctactgaaaccaacatggctactaacaagtttatccatacagaagggtgacagaatataaatgcattcatatcatggatatccttgaaagccatggtcaggagctcatgcatttatgtgtagaaaatgaag

SEQ ID NO: 220460 - DNA, 553 bp, Homo sapiens
tgtgtgtatgtgtgctgtgggggcaggggttctgtgtgatctgaatgcctttaggtgaggcatgcactccactactgtggccacatggtaaccactccttaattttagaaaggaagacacaacacacacrggctccctttgtttctgtacatatgttgactttgtttatgtgcctgcagacactagtgtctgcaacttctgaattaaaggggtggaaaaaatcagagatatttaaaagtgttttctgaggaactgtggaaagaacttcatggttgtctgggtatggagacagcagagtcacagctcatctggtaagactggcttagaactaggtaagctgtgatgcttttcactaagaaaataaagcccagaagcaggacagggtgggtggatggagtaagatgctgcatttggttagggacctgcttagtttgcccacaggacatccaagtggattatagtcatggaatgactattggatgatgatgaagctcattgatcctagaaggatcacatctcagggctgtcttgggaaagctgtgcagatagaatc

SEQ ID NO: 220461 - DNA, 415 bp, Homo sapiens
aatttttctgagtatgtacatgtttatcaacttatctttacatattatkttattgtaaaacataaaacgggaaaatttttgcttgaattgtgaaaaaataagttttgctgtcacactcttaatataggacacatattaaagtgagatagtactggatcaattccccaatttatcaaaagccaagaactcccggagatttgaaagcatgcattcaaatgttgtctgcatcctgggaactaattagagtggaagagagtaaaatgaattcaacagcggtgtatccaggagctgcacacgaggacttatatttcccacatgatataggaagttgtaaattacattatgcactaaattactatattttatgattgttttctatattaatagtaaagtatttcaaagtaacataatttac

SEQ ID NO: 220462 - DNA, 609 bp, Homo sapiens
tcaattagctcaacatcattaaattagtggtgcagcacattgtcttatggaatgaagaggtaatcaagtttcctatggacaagatggtaagagaattggagaggaattttaatcctgaggtgggatactgaagaagtattgctggctttgcttattaaaagcaaacggcttctgatgatgtctgttaacaagaattgagaaaaaaaatcactgtatcagggttgaaatagaacatatatatatatgattgatggcagggaattggtttatggaattgtaaaggctggctgggcaagtctgaaattcataggacagcctgtcagaaggacaggctggaacactcaggcatgggtgcatgctgctgttcacagatggaatttctgcttcttcagggaagcatcggctctgctattcagatgtttcaactragtgaatcagctgctcccaaaccacctagaataatctcccttacttaacatcaactggttatagaatttgatcaaatttacaaaacacctttgtagcaccacctagattcatatttgggtgagtaaccagggattacaacctattcaagttgtatagcaggtaccaggggtattgatgttt

SEQ ID NO: 220463 - DNA, 474 bp, Homo sapiens
gcagcacgtggctggcagaaccccatgaggacctggcctctgtggtgccctgtctggaagccagtataaagccattgcttgtctattcggtgcatgaaggcaggccttcttgatttcagatttttttcttttaacagaagggttgagttcattttcaaataatgtattagttttctaggactgtcataagaaaataccacagactgggtggcttaartaacagaaatgggctgggcacggtgcctcatgcctgtaatcccagcacttttggaggctgaggcagtcagatcacaaggtcgatagactgagaccagcctggccaacatggtgaaaccctgtctctactaaaaatacaaaaaatagctgggcgtggtggtgagcacctgtagtcccagctccttgggaggctgagacaggagaatcaaatcgcttgaatccgggaggcagaggctgcagtgagctgagatcacatca

SEQ ID NO: 220464 - DNA, 509 bp, Homo sapiens
attattctaagtgaattaatgcaagagcagaaaaccaaataccacatgtcttcacctataagtgggagctaaccattgagtacacatgggcaaaaagatgggaacaacacacagtggggactactagagggggtagggagggatcatggattgaaaagctacctactgggtactcttcccactacataggtgacaggatccataccccaaacctcagcatcattcaatgtactcatgtaacaaacctgyacatgtaccccttatgtctaaaataaaatttgaagataaaaattgttgtttccacagattaaagcaatatgtaagaagcaataataatatgtagaacaatttaatggtagaaacaagacttttaaaaacagaccaattctttcaggacaaataaagaatattgattcaaataaaatttaaagtttcatgttttaaagaaagaaaaactttgctgagaggtgatggtatccaagcaggccatttgaatggatttctactac

SEQ ID NO: 220465 - DNA, 489 bp, Homo sapiens
tctagttactcgatggtgataactagagtaacagtgtccactgctggcaaatcagataattgcaccacactttacacagttgctgtatgtgaggaataacattttactttcaccaggatgtattctcaggtaagggttttaaggcatgcaatgtgaaaagatgccattattatttaagagaaaaatattagttttatattagcccaatagtcaattaatgattgatcagcaatcaatttgcctctctaaacctaagaaaacaacatagtaacaattcctattaagatagttgaggtttaaaatattaagagagtaaaacatatagttttacaaactaaggtttgtacttaatgctacccaataagcaaaagaaatgattaccatgatgcaactaagttttgtcatcatttaaaayaattactcgccaaaaatttacctgggtttattcttttcaggacattcatcataggtgtggaagaggaaagtaga

SEQ ID NO: 220466 - DNA, 414 bp, Homo sapiens
aaaaggacactaaggttatctgcagtacttcacagtgtgtgggtggmtgttaatgtggccgtctccaatcacaaattataggggacttacctgacagtggtgtgctggtaaattggctgtctggaaaaaaaaaaaaagccctgatgtgtagcatttgccagttttcatgatataaatactcccctcctggctgatttcaggctactaatatgacatcactgaatacggagttgggaggtgatagggagaatcggctcattgctgctaaatcaggggcatggtttccaggaagagagtgctggacaactattgtgaggttgtctagtgttttgtctccttttctgaaacttgtcctaaccatggcacagttgacacacagattattctgacaggaataatcggaataatcagaat

SEQ ID NO: 220467 - DNA, 414 bp, Homo sapiens
aaaaggacactaaggttatctgcagtacttcacagtgtgtgggtggatgttaatgtggcygtctccaatcacaaattataggggacttacctgacagtggtgtgctggtaaattggctgtctggaaaaaaaaaaaaagccctgatgtgtagcatttgccagttttcatgatataaatactcccctcctggctgatttcaggctactaatatgacatcactgaatacggagttgggaggtgatagggagaatcggctcattgctgctaaatcaggggcatggtttccaggaagagagtgctggacaactattgtgaggttgtctagtgttttgtctccttttctgaaacttgtcctaaccatggcacagttgacacacagattattctgacaggaataatcggaataatcagaat

SEQ ID NO: 220468 - DNA, 552 bp, Homo sapiens
gaacaaagctgccacctgtactgaggcctctaactcttgaatagtgtggatgggcgcattcccagctggagactgtacgtagatctagcaagccagaatgagctatgatcactgcagcctgaacrctttcattttagttgtctgaaaattttagcaatacaccaaagttgttttctaaatggaactcagttttcaggaatctctttgaactagtaggcaatttcctttaaatcgttctacactgcaattgggtttagcttctaatgtggcttcaatgattctcacaaccagcaggcctcctgccttcatgagtggggcaatgatttgtggcttgtgtcagccatggaaaagctggtttcttgtgaaagtacaaagggacacaatttgtgatgcaaggaaacaagctcacaaagacataaaaattagctttccacatgatttattctactgcttcatgtcaataaaatgggaaaatggtttaaaaatattataaaatgcataggtaggtaggtgtcaaagttatagatgacagcattggatgtgcgtgacacg

SEQ ID NO: 220469 - DNA, 550 bp, Homo sapiens
agaccttctgggatatgagaaggggaaattaaatcccctgaatctgtgaggtttgctgtctccttaaaaattcagcttttccatacccctgactcatatcatagaatagtggcagtaaggcaacacatactttctttttatcttgccttcatrttcctgaaccatcagaagtagaaaataaaaatagcaatggcagcctggatagcagagaaaagcagcacaaagcaaaacgagaagccaacactagaggggcaaacctgccatgacaattactcaaccatagtacaggaatcacgtcttaggatgcacacacaatcacggtacatcaagtgagtcacagataaattcatgttgtaaatatttagtgggtgattaccatgtagccatgttaatccaaaaagttggattttgctacatgcagaaatcattagacagtattctattaagcatagaaatagctctgtaatcttgtgtgttttctctgaaaatacagctgaattgaggaaaaaatgccaaatacgatagaatttagcttgtgtaaagtgtgcta

SEQ ID NO: 220470 - DNA, 550 bp, Homo sapiens
agaccttctgggatatgagaaggggaaattaaatcccctgaatctgtgaggtttgctgtctccttaaaaattcagcttttccatacccctgactcatatcatagaatagtggcagtaaggcaacacatactttctttttatcttgccttcatattcctgaaccatcagaagtagaaaataaaaatagcaatggcagcctggatagcagagaaaagcagcacaaagcaaaacgagaagccaacactagaggggcaaacctgccatgacaattactcaaccatagtacaggaatcacgtcttaggatgcrcacacaatcacggtacatcaagtgagtcacagataaattcatgttgtaaatatttagtgggtgattaccatgtagccatgttaatccaaaaagttggattttgctacatgcagaaatcattagacagtattctattaagcatagaaatagctctgtaatcttgtgtgttttctctgaaaatacagctgaattgaggaaaaaatgccaaatacgatagaatttagcttgtgtaaagtgtgcta

SEQ ID NO: 220471 - DNA, 622 bp, Homo sapiens
tgagaacttttttttaagaacatgggaaactgaaagatcattttattctacttttaaatatttaagctgcatcaaagtcccacagcttattcagtttatagtttggttaatttttgttgtaaactgaatagcaattattgttcacaaatttmtgcatagcattttacaggatgacactaggagctggaaaaagagcgagagataaagatgaaaaacacatattttcaggtttctttattacaaccgtagactcttttttacaacaaagaaaaagccatttccttagtagatgttctcacaccatgaaggacagtactaatgcatgaggaatatgtcatctatgattaatgctgatgattcagtgaaacacagcaagatactgaaataatgggatttttctgcattttaggaatgcaatcatcttaacacatggtccatggaacattttaatacaagtgctatgtttttttatttttagtagttatttaacatcataatgtaatgagttctgtataaataatgaaacacacatacgtataactcttctttttctaaatagaaatcacatacacatatggaaattcagtcagttcatttaattaaactaacttagaaattgcca

SEQ ID NO: 220472 - DNA, 402 bp, Homo sapiens
aaaaagtatatctatacatatatacacagatgtttatgtaaatttttttaccacaaaaatggtttgcacacattttcactactcaaacacctgaatagcttttggatattttccttctttaagtacatttcgtttctaatacccactatgcatttagyaggacattgaacagaaaagtaaatgaaacactgcaaacacaaatacccctaaagaaatcttaaagacatttaacattgttaatataaatgtgatgccgtgtttgtatataaagcataatgttaagcatctccagcatgtggcacagctcaggttttctgaagaaaaacctatctaccaaaagataactggatatttgtaaagttttactttgctgttatccagaggagtaaaagaaaaagggag

SEQ ID NO: 220473 - DNA, 584 bp, Homo sapiens
atcattagcgtcagcctcatattggagatttggagatttgaagatttgtaccattgtataacaaacatccaaaaacttgaaaaaagaaagctactaactaaaaagtaaggagagatttcttcaaagacagcttggcctggaatctctagacaagacaggccagatgatctatgaaggaaagtgccccacaggggactcagaacattaaaaatctatgaggctgggtgcagtggctcatgcctgcaatcccaacactttgggagactgaagcagatgaattgcttgagcccaggagtttgagaccagtttgagcaacgtggggaaaacccgtctctgaaaaaatataaaaactagccaagtgtagtgacgtgtgcctgtaatcgcagctactcagaaggctgaggtgggagctttgcttgagctttggaggtagagcctgcagtgagccgtgatcatgccactacacgccagcctgcatgacagagrgagaccatgtctcaaataaaaataaaaaataaaaaaaaagatgaaaaaaactaatttttctcaaaagttttcttatgtttcttttatctcataataac

SEQ ID NO: 220474 - DNA, 569 bp, Homo sapiens
tttttttttttaaataaattacccagtctcgggtatgtctttattagcaccgtgagaacagactaatacagtggagttcaatttatggtgtgtggaaggtgcaaaatctaggctgggttgtgcccaaggagagggcaggagacagtaccctgaggccagtctggacagatgagtatttgacgagagacttatgttgatgactttttgtgagaatgctgccgttgttcatgagagacattcatatcccaagcatttgttggatccaggaagatccagatccatctaggttaggggccacaaaaataagacaaaaatctctgcataaagggccaytgggattgcaactggacagtggctgattatctctaggaagaggctgaattctgaaaacattttgtatatgcaatgccccggattggttaaaggagagataatttatttcgttttatttttgtgtctctttgatatagaagaaaagaaatgtgaacagaacttgtacaatatatggtaaattctctctaccagaatattgttgatgttcaggctccaagaattaatgtggttttatc

SEQ ID NO: 220475 - DNA, 552 bp, Homo sapiens
actatgtgatgtggtcatttgttaatttaatactcatccacatctcaattatactgtgagctccctaaggacagggaattggttttgttcactgcagaaatccagagcccacaacagtgtctggcacagagtgccagacaataactgtttgtcagataaataaaggaatgagaaggagtccttttgcttcatacaacaaccctacaaggtgggaacagttcttatgttcatttcacaggaaattgagactcagagataaactgagtttctcagccatacatagctaggaagtagtgggacccaggagcccaggtatatcaagccacctcaaagcccattctcttagttacctgagtctgtggcctcctgcttttatattgggggtagaaactgtgtgtgcatgtgtgtrtgtgtgtgtgtgtgtgtgtgtgtgtgtgtgtgtgtgagatgtatttgtgagggactcagtgatcttccaccaggcagcttctcagtaggcagtttccaccacccactataatttggagtagagtaagccttccttggctgaat

SEQ ID NO: 220476 - DNA, 616 bp, Homo sapiens
gtcaatctctgttttatatataaggaaactgaggcacagggtgggtaagtaattccctgagcttggaaagtaatggtaatagaattcagtgtatgggctccagggctgactcaaatgagaagggctctataatccatctttaatttttaaacttgcttcgttttctggaaggtcataagctaccttttcataggctaccctttgcaatctggaaaccccaaacaggttcgtctacacagtttcagmcctttaaaacagatttaccaaacctgatagtctcttgcaaaggtaaattgcttgctcaggaggtctgaaagctgcgatcattcagacatgcatactaaagtggggactccagcagtaaacactgcttaactctggcactttctagatgtacaaacatcatttgctcaagaagtcagctaattcctcatgatggagggcctgtcgtcgtgctcaggagggagtgtgcctgtgtgagcagattgtagaagcgggatggaccagtttaatggattaagctacttaagaaaatttaaaaagactcactggttaatatgcacaccctctttgcttgacggaaacaggctggcgtttttgatctccctggcggggt

SEQ ID NO: 220477 - DNA, 318 bp, Homo sapiens
gactatggtcatatatggtccatcactgaccaaaagtccttatgtggtacacaactatactttaacatcttatagttgtatatcattttacataatagaaaagatatataatcttatttaatttgcatagtgatctggtgatatggaaatgattacacccattttatcrtaaaaaacaggttcagagaggttagattcctggcttaaagccaaagacccaacagcgcagagccagaaccaatgtattgtgatgacagggaaaaaaaatctttccctttataccagtttacaatccaacatgggtcaatatctgctatg

SEQ ID NO: 220478 - DNA, 577 bp, Homo sapiens
gtgggtaggcctgatgtggaatagagagcctgaagaggcacastggagaaaagtgataaagaagggactgggaaataaagaatctgggaaatatatggactcttagaaagaggaagggttaataaaatttagggagctcaaaccaatgaaatgcctgtaggaaattaagatttttgaggggactcttgaacaaggattcaaagataagagccgctaattttaggtgttatggtagattatgatatgtaccatttccttgaacttggagatatccctctagctaattcagacagcatcctaaagagaagaaggagaagagacagatattatccaacagattaaagtccaagttcaagaaaaaaaattaactttacatagaaacattaactccaattatatggccaatcaaaaatttgcctgcttctctgcagtttatgcacaaagaatctatattgaattaaaaaataatttatatacattataaaattatttcagattgtgctggttcctggaagccactgaaaatgagaattggggtcctgttcctcagatccaaaggggtcaagtgttctcagtc

SEQ ID NO: 220479 - DNA, 616 bp, Homo sapiens
gggcatgcgcagctaagaggtggggccgactgggcaccacctccgcagacttcagagctgtgtctgcagcacactaggacacggagaagcttgcatggagatacttttgtacagctgaaaatggtgatggctttttgctgcgaatcctgcaaaaaggcaaaagcgacctttggtatcttagaatccatccctctcactttacaggtgaggctctgaggcacagaacataaaaggatctgctgaaggtcacagcatgagtcagtagcagaaatacagccagaaaccaggtgcccctttcatgatttaacacctttgttaactgtctacaactggccagamactgtgctgctataattagtattattttccttgtgccgtatgcctgtgtacctggtgtatacctggagaattcttgagggggttggttgtttttaaagatatggttgacttcatatgaacactgttttaaagagattccactaatcaagttatcaaagtataaaaatcttaagctgcatgtatcgttagcttttgggacatatctaaaaatggattaacctacctggtttgctatattttgttacaaataatgcaatattttagtaccccccctcaa

SEQ ID NO: 220480 - DNA, 615 bp, Homo sapiens
ctcttgaaaatgtttgcttaatgcctgtgagatatcatcctgtcttcctttgaattattagtattataggtagtccttgaaatgttatacatttaacagaaatttctcttatctacttatggactttaaatttagggatattcctagattggaagaaggcaatattcagagcaaaaaggtacaagctttacttgccaccagcagctgccagagtggaggccttatgtaattacttcggcttcagccttggcagcttttrttagcccaaagtggatttgctatatttgtgctttgaattttaccgtttacactcattaagttctataaatacaaaagcatggagagcattagtgctgtcaagaaagaggtgtgattatgttggaaatgaacatgatagtaaaaagaatatgaaagtggcagggaaatggtgactgcagctgcactgggtgtgagaggctgggcagggaacgatctgaagatgggggagggcgatggtgagaaaagacacagctgatggtcgacaggggacaggagaaagagattcacggaggggaagcaaaaagcattgaatgtgtgggataaagaaagaccattatcattagctactcactagcc

SEQ ID NO: 220481 - DNA, 614 bp, Homo sapiens
aagcttgaaatacttccatatttatatagaacagttgattgagagctgcaagagcatagtcagagagaggtttaaagtttcaaagaggctgagttcactgaaccaaataagatcctttttcctgttcagcattttktgtgtgtgtgttctttggcttattaccactttcctcatgtccccatgaatattttcatggcatatagtatatagtatgccctgctttactaaacaactactcaattcaaaaactcagtgacccaatttgttacatgtcttgcagtctcacttctttccactgacttttctaagcaaaagaatatttgctatagctggcatgatgcaacagacacatggaaaactcctcagatgatcctcagaaagtcaagttgcttgtattgatttttcagatggtgccagtaaaatcactgtgagtcagttctcctctcaagtttaaggattcgaatgctgtcctcctcagggagtggaaggaatttgtttcttcctgcttggtctgtcttgtactccctcattcatcctacaaacatcacaaagccatcatatgtttcaaaaactggaaaagcagtacttcaaagggaccacttatatgctgctgg

SEQ ID NO: 220482 - DNA, 614 bp, Homo sapiens
aagcttgaaatacttccatatttatatagaacagttgattgagagctgcaagagcatagtcagagagaggtttaaagtttcaaagaggctgagttcactgaaccaaataagatcctttttcctgttcagcattttttgtgtgtgtgttctttggcttattaccactttcctcatgtccccatgaatattttcatggcatatagtatatagtatgccctgctttactaaacaactactcaattcaaaaactcagtgacccaatttgttacatgtcttgcagtctcacttctttccactgacttttctaagcaaaagaatatttgctatagctggcatgatgcaacagacacatggaaaactcctcagatgatcctcagaaagtcaagttgcttgtattgatttttcagatggtgccagtaaaatcactgtgagtcagttctcctctcaagtttaaggattcgaatgctgtcctyctcagggagtggaaggaatttgtttcttcctgcttggtctgtcttgtactccctcattcatcctacaaacatcacaaagccatcatatgtttcaaaaactggaaaagcagtacttcaaagggaccacttatatgctgctgg

SEQ ID NO: 220483 - DNA, 491 bp, Homo sapiens
tcatgcagtaacacccaagagaaacaattgaacgatgatttagaattaataacagattaataaaataattggtgacaaaatgaatcttgaaacctcaaaggaataaatttttagatttggtttatttaaaatataaaactttcatagtaaaaatagcatactctaatgacaaatttggggtaaaacattacaaagcatatgatagataatgtaaaaatatacttagttatccaatgattgagacactccatgtgtaaaagagcataggacatgaagagattgttcataagagattgttgtctgtaataatcatatagatttaattaaataatcaaatatagcaaacaactacagatttaaatagtaaaattccattttaaattatgaacttggtataaatatttaaattataatacccattggtgatragggtgtagataaatgggttctctaaaatgatgctgctaactttatatatcacataggtacaa

SEQ ID NO: 220484 - DNA, 426 bp, Homo sapiens
agaattcacttataaaattctcttagcctgatatttattgggtgtcaaagtcataattatttctttaatggttataggtatagtcaaggttttcaattcttaattcatttctataaataaatatcaagagttatataaatgtatctatttcacttaaattttcacatattttgactgtgtggttaatatttatacctattatatatgtgtttaagaaaaaatgtatattctttaactgttgggttcaagagtttgactgtttcttaaatcyagttttgttaattatatcattcaaatcatttttatagttacactttgctttagctacaaattaccatgagaagtatgttaagatcacctactctaatggtgaatggattttccgttagtaattctgtcatgttttgttttatgtattataaagat

SEQ ID NO: 220485 - DNA, 571 bp, Homo sapiens
tatgcagatcacagcacatattctcctatggaattatgcagtatagcatagcaatctttgattttagcatttaaaaagaaatcaacttgaagctatcttttcttactttaatggcaagtgccccatatgtgacaagtgaactcagtcttcccattttgagaaaactttaaattccctgctgacaggtagtgacgcagttaatcataccaacacatacaagtggtctaattgggcttgttgccttttaaamcaattctaaaagtttttactaaaatatcaggttgaatagctgacctaagtcaagtgggcattacttggcctttgatccacccattggacacttctcccttggagagtataattagactgacagacgttttagcaaatccgctcctacctcagacatctctttcccttcctttgtagcagtggtttcatgaaggtgcatgggaggaaagaaaataagagaagaactgaagggggaaaaaaaagatcatgaaactatccaatattccttggcatttatcagaataatcagaaacaatcaacaaacataaactaaatgtgatgg

SEQ ID NO: 220486 - DNA, 590 bp, Homo sapiens
gtggatttcactttctgtcatgagttctatacattttggcttgaaatcagtcatcagtgtgatattcagaggtttactacatctcattcatacctttattttttttctagccctctcacccgggtttcatctgagtgactagaagtggcgtttatttattgactgtggaggttaacttacactgatggatgattgcagtccattttccactaagcgagtattacatgaaatgagtattgttgaccacattttattttctcttgtggaattaactcaatagtctgtaagtccttaaaagtagtttttgtggggtaagtctcttccttttcccatagtgatttgataggaagactgagtgaaaaacaatagttgtcttgtatatttgaaacgtraggaaaattatgtggatactcaagcattaaattcaaatcagtaaatggggctgccctctttggtatgttggtaaacatgttttattattagcttgagaaggaaatgcctggtatagtgactaagactgtaatagggaaagagaactacttttctggagcagtaaaagttttgactaatatagatgatcagtgtttgtg

SEQ ID NO: 220487 - DNA, 296 bp, Homo sapiens
agtcacgtgtggctatttaaataaactaaaattaaataaaaagttcagctcctcagtcacccaaggcacatttcaattgttcaacattagtatggtagctaggggctaycattaaggacagtgaaaattcatgaaacatttctatcattgtagaatgttctattgaacagtgctgatctaagagagaaaccaaaagtcctcaaagatattctatcaagagacaacatcttgatggcttgattgaccataccagatagctcatatctcatttttattctgaaccactagagatttga

SEQ ID NO: 220488 - DNA, 578 bp, Homo sapiens
cacaagtcacaaggctagacgtggtggctcatgcctgtatgcccagcactttgggaggccaaggcaggaggaagatggcttgagcccaggagtttgagactagcctgagcaacatgatgggacccctatctcyatatagaaataaaataaataaataaataaagtcacgagttttccagttttagtatagctgctgattgctcggtcactgagaatagtatataacaccagaagatttctacctttgaaatgccctaaatgattctcttttagcctttagatttaggatctgaattgttaaaggactaatcggagatcattcagtaggtaagtcttctataaatagggagtttgcggtgatgaggatagtttttaatcaggttcctgatgttttctcttaaggttgtgcacatagaaaccacttctgttagaaataacgaatgataacagctaccaggagcatgagtacaaagaagtgtgaagctttagtctaaattacaactaggttacaattatttatgtactgttcagagatgataaaaatagtctccccttctaaacctagaaacatcatattg

SEQ ID NO: 220489 - DNA, 575 bp, Homo sapiens
tttataggatacagatgccaaaatctacagcagacactcaaaggaggttggggtgacctggggggttctgagatagcttattcacagaggagatggtgcttcagtttgagagcaaggatagggtgtgagaagatgttccagggacagggcacagcaggaatgcagagatggattctgggttcacattggctggagaagagacagcaaggaaagcagtgatgaggaaggtagatgagacagaaaaggtaggaggagcagagaaaaagaagagccctgatgccacgaaggagcttaaaacttaccctacaggtcagtgtttccaaaacataactgtttggaaatcatctgggagctttgaaaaatacagattctaacattcctccctccagacctactgaattaatrtctctagtaataaggatctaggattcagttttttaaaattcccaggtagttattctaacaggtgggtaagaatcagcagagtcaataaggaggccactgaagcttttaagcacagagtatccaagcttgcttgtatatttaaatgacaagttatacagccccacagtcca

SEQ ID NO: 220490 - DNA, 436 bp, Homo sapiens
ttatgatttttaaaatttataattacataaaattgcaataatattaataggactaaaacaaaaacagaaataccaccgacaattctgatatcctaacagatcaaaccatttttaaggtttctacattcctatctgttcttgtccacaagtgtacatcgtttatacagctttcttttcattgccatcagagccaagccataactgttgtatttaacattatatacttttaccacattgctagtccttgtagtcatgtttaacagctacatttcatgaagttaataaaccataattagcctgtattcctatgctgtcaggatatttagtttgtttgtatttctttaattgtatgaatgaygttacagtaactatccatacagtgtaggcctttcactatggttcgaattatttcctcaagattagttcccagaaaagg

SEQ ID NO: 220491 - DNA, 443 bp, Homo sapiens
agatctaacattttcccccagtagttaatcaactgtcctagtactatttatcaaatagtttattctttatctattggtttatagctatctatatcatatacatgattttatttgtaggctctcttttccatttcactaatgtgtttgtctatacctgagtcaacactgtgtcattttaattattgtaactttgaagaacttttcaatatctgggtatggcttgtctccttcaatataattttgtcaaaaccttcttgactgttttyacctattgttttctcacctatttttttaaaactaaattaactttggtgggatatggtttggatgtgtctccatccaaatctcatcttgaattgtagctcccctaattcccatgtgttgtgggaaggatccgttaggagacaatttaatcatgggggcagttcccccataatgttgtt

SEQ ID NO: 220492 - DNA, 443 bp, Homo sapiens
agatctaacattttcccccagtagttaatcaactgtcctagtactatttatcaaatagtttattctttatctattggtttatagctatctatatcatatacatgattttatttgtaggctctcttttccatttcactaatgtgtttgtctatacctgagtcaacactgtgtcattttaattattgtaactttgaagaacttttcaatatctgggtatggcttgtctccttcaatataattttgtcaaaaccttcttgactgtttttacctattgttttctcacctatttttttaaaactaaattaactttggtgggatatggtttggatgtgtctccayccaaatctcatcttgaattgtagctcccctaattcccatgtgttgtgggaaggatccgttaggagacaatttaatcatgggggcagttcccccataatgttgtt

SEQ ID NO: 220493 - DNA, 552 bp, Homo sapiens
gactcaagccctacctatttctcaggattatcataagaatgtctgtgtcctgccagcatctgctcctgctcttccaacccctattccctttggactctctacccagacccctttcacctgctcagacaaggattctgttgttcaatattgttcctctttcctggatcatcaaaatttccctctcttctcgatctcaaacaaacatgctgtagtatctttaatcttaaaataaacatacaaaacattccttgacccargcctaccatcaattacagatccatatatctactccttttttatagcaaatcaccaccaaagaattgcccatactttgtttccttcttttctttccccattttcccctgacccacctcaatcaggcttttgtcctcagcactccaacaaaatagttcttgtgaacttcaccaataagtctccatcttgccaaaccatttcttaatgttcacctcaggtgacctcccaacagaactgggccaattaaagcatccctccttcctgaaacactgtcagtatttggcttacaggctacta

SEQ ID NO: 220494 - DNA, 592 bp, Homo sapiens
tggatttatagtttttatgcaatttggaaaatttccatcattttttcatgtaatttttttctgtattcactgtgccatctctgaccccagccctcaccgttcagggactccagctaatctttattagacaatttgaagttgttccacagtatccaaatgctctattcatttgttcaacagtttttttctctatatttcacttgggacaatcgctattgatgtgtcttcaaattggctaatctgtttttctgcaatgtgtaatctgttgttagtttcatactgtgtatttttcttttcttttcttttcttttttttctttttggagacaaagtctcgctcttgtcccccaggctggagtggagtgcgatggcaygatctcagctcactgcaacctccgcctctcaggttcacttgattctcgtgcctcagcctcctgcgtagctgagattacaggcacctgccaccatgcccagctattttttttttttttttagtagagacggggtttcaccatgttgactaggctggtctcgaactcctgacctcagatgatccaaccaccttggcttcccaaagtgctgggattacaggt

SEQ ID NO: 220495 - DNA, 548 bp, Homo sapiens
atccctttactttgagcatatggttgtcattgcatgtgatatgggtctcctgaagatagcatgagactatcttgagtcttgcttctttgtccaacttaccactctgtgccttttaagtggggtgtttagcccatatacattcagggttaacaatgtgtggatttgattctgtcatcaggttgttagttggttgttacgtagacttgtctgtgtagttaatttatagtatcaatggtagaccttattgtgtagtttctttatagtgtcaattccatagttgatttatagtgtcaatgtaggtgatttatagtgtcaatatacttcagtgtctttttgtggtggccagcaacagtctttcatttccatatttagcactcccttaaggacctcttttaaaggaggtctggtggtaatgaattcccttagcatatgcttgtttgcaaaggattttatttctacttcagttatgaagcttagtttggctggatatgaaattcttcgttggaattcctttwctttaaggatcttgaatataggcctccaatttc

SEQ ID NO: 220496 - DNA, 620 bp, Homo sapiens
tttgccccttctgtaggttgtctgtttactctgttaatgttttcttgtactgtgcagcagctttttatcttgatataatcccatttgtctatttttgtttgtgctgcctgtgctttggaagtcttattttaaaaatatatatatttgctcaaaccaatgaccttaagcattttcccagtgttttttctagtagttttgtagtttcaattcttacatttaaatgtttaatccgttttgacttgatctttgcatatggtgaaaggtgggggtctagtttcatttttatgcatgtgaatatccaatttccccagtaccatttattaaaaagactgttctttccctcaatgtatgtttttggtgcctttgtcaaaaatgagttggctgtaaatgtgtggaattatttctgggtcctctattctgcttcattggtttatgtgtctggttttgttgttgttgttgttttgccagtaccatgyttctttggttattatacttttgtaatctattttgaagtcaagtagtgtgatgcctcgagctttgtccttttcattgaggattgctttggttattctgtgttgtttggggctccatacaaattttagaatagttttttccatttc

SEQ ID NO: 220497 - DNA, 410 bp, Homo sapiens
gaattcttttactcagacccatgacttgaccacagtgatagcagaagctggggtgggcacaaatgcttatacacaatattacaaaagacgacattcactggcttagagaaactgatgaattttcattacttttacattttataaggctagctaactttaacagttaactttagataaatctacttacacagtacaatcaactcacaaatactaaaaggtttcatgatcaaaatggctactacttcccccaaaaccaaaacagagtaaagcacaagtctttggctctcctttaaagaaaacagcargttaccattcttaaccagacctttgtttgcctaccagtagggcaaataccacatttgtgcatcactgagtaataacaccattagaaaaggcaacttcacagaagt

SEQ ID NO: 220498 - DNA, 555 bp, Homo sapiens
tagcgactccttgaaaaaagagtaagtcaaaatacttttatatttctcgctataaataaaattccctcacctatgtatgagtgaacacaatgcttattactcctaccttaacccattcaaaattgttcatctcagatatctgatttttgctttggaatttagtgaaatacaaataaagtaatatttagaagaaactaatattttagtaagtagaaaacataaaaactgtatttcctatctggtttcatctttgtctctaaaaaaaaaaattaaaaagccagaagcaattaataccttttcaattttgattttaaaaaagtagttacagagtcaagcagttatgcccaaatatgccatttgtccttacaggctcatgatatcacagagaaaaggaaaaggaaaaaaagcaaaaaacaaaaaacaaattttgggggtgttagtgaattcctaaaaccgctgatgagcactaggaaagctgcaagaatttccattaggtaaggtggaatgrccaatttaaaatacattataggcacaatgggacaatataccatcctt

SEQ ID NO: 220499 - DNA, 259 bp, Homo sapiens
ttttgtggaaatcaacgtgctgattcttgaaaaataacaatactagaaaatataaccaccacatattgagacttattataaaactatacgaagagaatgtggcatcggttcaaggatagaaatagactgacggaaaagaatagggtcaggaaacacatgtgtggtcacctgattatgataaagcaggacaccagggaaagcatgctgatttcattaaattgtgcygagtcagtgccttacaggaacaaaaaaaaagatc

SEQ ID NO: 220500 - DNA, 612 bp, Homo sapiens
agactgctgtataatttgtcttgcgtgacaccagatctttcaaggaactgcaagctcaagtgcacagttaagcaagatcaagatctacctttgtctttcagagccttcccttggcgaggtcaaggatatctgctgtgagcctgggctggctgaaccaaagggcaatggaggcggccaagaagccccagccaactgctcccctccccaacccccttctccctggaggtcccttcagctagaatttgccattttctgtcagggttgtgcatttcttccagtcaccatgacttcctgagatagccaaaagcatttgctgtgagcagagccccatggctggctttgcacatcaaacatttcagacagccatatatttcatagaatacaaggggaagataacactggacmcacagaactttccaacagcttgagaaaatgtggtgcctggtgactgactaaatatacaatcggacaacagccaggccatagcaaaagatggaactctgatccacaaggtgcagcaactttcccagaaaacaatacccttacccacaaaaagcaaccccggaagctggcctgctctaaatcagacctgctggaagccaaattgctctc

SEQ ID NO: 220501 - DNA, 595 bp, Homo sapiens
acaccaaggcaccacagggttcagcagtttactcaaggacacagtttataagtgagggagccatgaaggcactacttggacaccacaccccacacccttggcagtcatacatgctgtcttccacaaaactgcttgctaaatgaatggatccaccaagaattctctgtgtttcatgcttaatgggaaaaatcattcccaatagaatcaatcttcttgaagaatgaaattactgttgtggaatcatatactgcttcttcttcctgacacccacgtcctccacctgtggcattaacattatccaamattatgtggccattcccaggtgtgtcaatagtttgtcaagtatcagcatttttctcttggtagagcaatcaatgccagcaactgttctaaggtggtgggggggcaggagactctttcaagcagggactttctctttgaggtattcggaacctccagccagaaatattcttggcaatggggtcaaacaattcacctgatcggctgactcaggaaacacctgtaaagatacctgtgaaacttctgttgaactgaggatggagtctgcattgtagaaaggggaaggccgcaggtt

SEQ ID NO: 220502 - DNA, 599 bp, Homo sapiens
ttttgttttttcttgtcccccagccagctaagcaggagctttaaaacacactcaatgccaaagcacacttattgcaatacaaatggaagattagcagaggaatgctaaggggacagtggcagcttttttctctcccttgcgaatagccaggtttgaagtgctctgctcaccttctacagatagtcttaaccaagctgatgattcaggcttggtggattaaaaagactgtgtcctttcattaagccatacatagtgctccaaytgtttcctaaccagggtttccagttcttcagtttgtaatcatttgcaaggacttaaaacttttctttctaaacaaatctaactgtatgggaagatctatcaacaacaggagaggaaaactgctgacttatgggtaacacgacaataacaaatgggccacagggctgtgtgcccaagactcatctttttttttaaagcttgaaaatgaattcctcctgtcttgcacactcaggagggtttactagcagcctaattaattaagagcatctatgtatctgatggggatgctcccatggctggaacaggcgctctctgctcctcctgggtacctcactatt

SEQ ID NO: 220503 - DNA, 599 bp, Homo sapiens
ttttgttttttcttgtcccccagccagctaagcaggagctttaaaacacactcaatgccaaagcacacttattgcaatacaaatggaagattagcagaggaatgctaaggggacagtggcagcttttttctctcccttgcgaatagccaggtttgaagtgctctgctcaccttctacagatagtcttaaccaagctgatgattcaggcttggtggattaaaaagactgtgtcctttcattaagccatacatagtgctccaactgtttcctaaccagggtttccagttcttcagtttgtaatcatttgcaaggacttaaaacttttctttctaaacaaatctaactgtatgggaagatctatcaacaacaggagaggaaaactgctgacttatgggtaacamgacaataacaaatgggccacagggctgtgtgcccaagactcatctttttttttaaagcttgaaaatgaattcctcctgtcttgcacactcaggagggtttactagcagcctaattaattaagagcatctatgtatctgatggggatgctcccatggctggaacaggcgctctctgctcctcctgggtacctcactatt

SEQ ID NO: 220504 - DNA, 410 bp, Homo sapiens
tttactggaatagaaggatactatgaactcgtgtatttcttttatagatatcttgaatcttgccataaactttagagagaaatcgaatatataggattcaatatccctttgaaggaataactagcattcctatgaggaagccccacttaataagaccttaaaaccgtatgaaaatgagattcactgtaacagaaactatcagtcaatctttaaataaaaactttttacctttcatgtaaatgtaacattacacaccagtataaccttttagatctttaagctgtgtagtctagagggatccggtgtggtcagagtctcyagagagtgaacctaaagttcatcacaacagactaaataataatcagttgcataaaacctgaaatcaacttaaatctatttatagagggtct

SEQ ID NO: 220505 - DNA, 538 bp, Homo sapiens
aatgacaatatcccgggtataaaatgttctaacatgtctgttcagtgttcttacacccatgaagctgacatcaatgtcctaaaatggggaaaccatctaagacaaagaataacttgataagggtcatgggaatcgttcatatgtgacaggatactgtgacagaataaagaatgcattttagattgttccatggaggttctattcaaaaaataaaaatgttttaaagcctcattgaatcrtgaaatgaattggatattgaaacccgattacctgatttcaatcctggatcctatgtgtctatttcttagtttctctaattttaatcaccttctatgggctgggtctttttttgttgttgttcttaatataattagactcataaactaggagagatgaattaaatcgtagagaaagtgggaattagacaattgtcatcatcttttccagtgctaggatagctaataattcattcatttctcttgatattcagtgtcgccctttcattgctaataattttccatatccttagtaattcaca

SEQ ID NO: 220506 - DNA, 538 bp, Homo sapiens
aatgacaatatcccgggtataaaatgttctaacatgtctgttcagtgttcttacacccatgaagctgacatcaatgtcctaaaatggggaaaccatctaagacaaagaataacttgataagggtcatgggaatcgttcatatgtgacaggatactgtgacagaataaagaatgcattttagattgttccatggaggttctattcaaaaaataaaaatgttttaaagcctcattgaatcgtgaaatgaattggatattgaaacccgattacctgatttcaatcctggatcctatgtgtctatttcttagtttctctaattttaatcaccttctatgggctgggtctttttttgttgttgttcttaatataattagactcataaactaggagagatgaattaaatcgtagagaaagtgggaattagacaattgtcrtcatcttttccagtgctaggatagctaataattcattcatttctcttgatattcagtgtcgccctttcattgctaataattttccatatccttagtaattcaca

SEQ ID NO: 220507 - DNA, 568 bp, Homo sapiens
tgctgtctgcatgtggtcttgggtctcatggcgccatttagcttttttggatcatcttgcctattctcatatccatccttgctcaacagcttatattactcatctgtttatagcaagctctgctgaatcactaaggcaaaagacttattccccgatgtagtttccaactctgatctctggtcttctgagtgatctcctttgcctgtaggttactgtctcatttttctttgactttttgcatcaaacatccytgaggactcatctgtttttagagtcaccatttcctcagcaagcatgttatcttaaacaattcaaacccactgctctactgtgactgctcctctcagattgctaatgactactcagttatcaaatacagatggtccccaacttatgatggttcaacttagaggttttctactttatgatggtgtgaaagtggtaagcattctgtagaaattgcactttgaatacccatacaaccattcttattttcactttcagtacagtattcaaaattacatgagatattcaataccttattataaaataggccttgtgttaaatg

SEQ ID NO: 220508 - DNA, 568 bp, Homo sapiens
tgctgtctgcatgtggtcttgggtctcatggcgccatttagcttttttggatcatcttgcctattctcatatccatccttgctcaacagcttatattactcatctgtttatagcaagctctgctgaatcactaaggcaaaagacttattccccgatgtagtttccaactctgatctctggtcttctgagtgatctcctttgcctgtaggttactgtctcatttttctttgactttttgcatcaaacatccctgaggactcatctgtttttagagtcaccatttcctcagcaagcatgttatcttaaacaattcaaacccactgctstactgtgactgctcctctcagattgctaatgactactcagttatcaaatacagatggtccccaacttatgatggttcaacttagaggttttctactttatgatggtgtgaaagtggtaagcattctgtagaaattgcactttgaatacccatacaaccattcttattttcactttcagtacagtattcaaaattacatgagatattcaataccttattataaaataggccttgtgttaaatg

SEQ ID NO: 220509 - DNA, 568 bp, Homo sapiens
tgctgtctgcatgtggtcttgggtctcatggcgccatttagcttttttggatcatcttgcctattctcatatccatccttgctcaacagcttatattactcatctgtttatagcaagctctgctgaatcactaaggcaaaagacttattccccgatgtagtttccaactctgatctctggtcttctgagtgatctcctttgcctgtaggttactgtctcatttttctttgactttttgcatcaaacatccctgaggactcatctgtttttagagtcaccatttcctcagcaagcatgttatcttaaacaattcaaacccactgctctactgtgactgctcctctcagattgctaatgactwctcagttatcaaatacagatggtccccaacttatgatggttcaacttagaggttttctactttatgatggtgtgaaagtggtaagcattctgtagaaattgcactttgaatacccatacaaccattcttattttcactttcagtacagtattcaaaattacatgagatattcaataccttattataaaataggccttgtgttaaatg

SEQ ID NO: 220510 - DNA, 603 bp, Homo sapiens
tgattgatcctttggtacttatttagttcatttggtgaaatcatattcttctggatggtcttgatgctcatggatgtttgtcagtgtctgggcattgaagtgttagctatttactatagtctccatagtctrggcttgtttgtacccatccttcttggaaagactttccaggtatttgaagggacttgggtgttgtgatctaagtttttggtcactgcagcggattctgcattaggagacaccacaagcccggtaatgccgtggctcttgcagactcatagaggtactgccttggtagacttggacaagatctgaaagaattatctggattaccagaaagagactcttgttctcttcccttactttctcccaaacatatggagtcactctctatgctgagctgcctgagctaggagaagggtgacacaagaacccctgtggctgccaccactgggatggcactgcgttaacatacagccagcacagtactaggtcttgcccaaggcccgcagtaaccactgcctagctacaacctctgttcactcaaggccttagggctctacagtcaggaagtggtgaagcaagcaaggcttgtgtccttcc

SEQ ID NO: 220511 - DNA, 603 bp, Homo sapiens
tgattgatcctttggtacttatttagttcatttggtgaaatcatattcttctggatggtcttgatgctcatggatgtttgtcagtgtctgggcattgaagtgttagctatttactatagtctccatagtctaggcttgtttgtacccatccttcttggaaagactttccaggtatttgaagggacttgggtgttgtgatctaagtttttggtcactgcagcggattctgcattaggagacaccacaagcccggtaatgccgtggctcttgcagactcatagargtactgccttggtagacttggacaagatctgaaagaattatctggattaccagaaagagactcttgttctcttcccttactttctcccaaacatatggagtcactctctatgctgagctgcctgagctaggagaagggtgacacaagaacccctgtggctgccaccactgggatggcactgcgttaacatacagccagcacagtactaggtcttgcccaaggcccgcagtaaccactgcctagctacaacctctgttcactcaaggccttagggctctacagtcaggaagtggtgaagcaagcaaggcttgtgtccttcc

SEQ ID NO: 220512 - DNA, 603 bp, Homo sapiens
tgattgatcctttggtacttatttagttcatttggtgaaatcatattcttctggatggtcttgatgctcatggatgtttgtcagtgtctgggcattgaagtgttagctatttactatagtctccatagtctaggcttgtttgtacccatccttcttggaaagactttccaggtatttgaagggacttgggtgttgtgatctaagtttttggtcactgcagcggattctgcattaggagacaccacaagcccggtaatgccgtggctcttgcagactcatagaggtactgccttggtagacttggacaagatctgaaagaattatctggattaccagaaagagactcttgttctcttcccttactttctcccaaacatatggagtcactctctatgctgagctgcctgagctaggagaagggtgacacaagaacccctgtggctgccaccactgggatggcactgcgttaacatamagccagcacagtactaggtcttgcccaaggcccgcagtaaccactgcctagctacaacctctgttcactcaaggccttagggctctacagtcaggaagtggtgaagcaagcaaggcttgtgtccttcc

SEQ ID NO: 220513 - DNA, 603 bp, Homo sapiens
tgattgatcctttggtacttatttagttcatttggtgaaatcatattcttctggatggtcttgatgctcatggatgtttgtcagtgtctgggcattgaagtgttagctatttactatagtctccatagtctaggcttgtttgtacccatccttcttggaaagactttccaggtatttgaagggacttgggtgttgtgatctaagtttttggtcactgcagcggattctgcattaggagacaccacaagcccggtaatgccgtggctcttgcagactcatagaggtactgccttggtagacttggacaagatctgaaagaattatctggattaccagaaagagactcttgttctcttcccttactttctcccaaacatatggagtcactctctatgctgagctgcctgagctaggagaagggtgacacaagaacccctgtggctgccaccactgggatggcactgcgttaacatacagccagcacagtactaggtcttgcccaaggcccrcagtaaccactgcctagctacaacctctgttcactcaaggccttagggctctacagtcaggaagtggtgaagcaagcaaggcttgtgtccttcc

SEQ ID NO: 220514 - DNA, 486 bp, Homo sapiens
atgcttccaggtctgggactctctattcaggttagtgggctcccctctggcccagggcaggttcagaaatgccctccaagagccaagtcctagaatcaggaaccccatgagcccacttggtatcctattgtggtcgagttggtaactatgcttcaagatgaagttaagttccctttactcttccctctctttttcttaagaaggagtctagaagaaggagtatcttcccatggtcacatctgagaatgtgctaggtcacacctgaagccagcatgtctctgagtctcacccaagtcccatagtgagctctgtgagggcaccactactgactattcagagaccaagatctctttagtsagcaggtggtgaacccttccaggactgggtccttctcttcaaggctatgtgttcccttctgtcctagggtgtgtctagaaattattctgggtgccagggcctggaatggaggcactctgcctggtgccc

SEQ ID NO: 220515 - DNA, 611 bp, Homo sapiens
aaaattacactggtaaaaagagagagatacaggaagggagtgtgtgctcakgcatgggtggccatgtttccacggaaacacttgtttacctcattagtccattctttcctttcatagtaatagagtttttatctagatcacatgacctctcaggatggagactatatttctgtttaccttgcagatggatgtggcacgtgaccaagttctggctaatgagatgtctgaaacttaaagtggaagagatgtatcatctccttttccttgctccatcctgctacctgaaaaatggatgtggtgacaagccctggaaaaccacaaggatgagaacagcactggagagatggtgcagcgcatgatgcaattgcctaggtatctgatggctgagtagaatttctctcctccgacttttacatgggaaggaaataaaactctattttgtttgaaactctgttattttaggtcaatgttttaagtagctgtagccatgtactaattctttccacgaacagccaggtttcgcatgatagccttcagacatctgagagtcacggcatacacagttctgataacctcatgttgttattgctctcaggaactgacttgcactt

SEQ ID NO: 220516 - DNA, 611 bp, Homo sapiens
aaaattacactggtaaaaagagagagatacaggaagggagtgtgtgctcatgcatgggtggccatgtttccacggaaacacttgtttacctcattagtccattctttcctttcatagtaatagagtttttatctagatcacatgacctctcaggatggagactatatttctgtttaccttgcagatggatgtggcacgtgaccaagttctggctaatgagatgtctgaaacttaaagtggaagagatgtatcatctccttttccttgctccatcctgctrcctgaaaaatggatgtggtgacaagccctggaaaaccacaaggatgagaacagcactggagagatggtgcagcgcatgatgcaattgcctaggtatctgatggctgagtagaatttctctcctccgacttttacatgggaaggaaataaaactctattttgtttgaaactctgttattttaggtcaatgttttaagtagctgtagccatgtactaattctttccacgaacagccaggtttcgcatgatagccttcagacatctgagagtcacggcatacacagttctgataacctcatgttgttattgctctcaggaactgacttgcactt

SEQ ID NO: 220517 - DNA, 558 bp, Homo sapiens
ttttttacatacatacatatgtacacatacacacacacacacacatacatatctatctatatgtatataggaaggcctgcatgccctgccaagccactggtgcaagtgtcagaggccaaaggctaaagaacctggagtctgatgtccaagggcagaagaagtgtaatcaagcatccaacacaggaagaagaaaagagccaaaagcctcagcacaacaaagttaaccctccttcttctgcctgccttgttccagctgcactggcagtcaattggatggtgtcctgccacactgagagtgggtcttcttctcccagtccaccaactcaaatgtcagtctcctctggcaacatcttcacagacacactcagaaacaatacttaccagccatctaggcattcctcaatccaaccaagtagacacctaacagtaaccctcacaatgcattagaaactaccacatatttattggcttaaaayaatatatatttattaggtgggtcaggaatccaggcataacttagccaggttctctactcaggatcttacaagactattgaaa

SEQ ID NO: 220518 - DNA, 501 bp, Homo sapiens
atccacagtcaactataaagctgattatccaggaaccaagaaaagattttaatctataaaatttagtttttaaattaaataaaaatttctaagacactagggatatgtaaagcacttaattataattaaaacatttgtttagaacctattatatataaggcattgctatggaaaataaataattccttgtaaatacacagtagtttrccatttataaaccactgcccctgctttctaggagttaattatattaccagatgaattagaaagacaactagcatcagaaatattttttgttactaacagtgttgatatatcaatttatcattataagattattaattaatttttaacattattactataatttatttattgttgttttattttcagcacagtcttagcaaaaaagtgaatatttgctatgaacatttggattccatatggactttgtctttcgtggttcactgagcagcagttactcaattgtgtcttcttttt

SEQ ID NO: 220519 - DNA, 571 bp, Homo sapiens
gcagctgctatgaaaaacattatggaggtttctcaaaaaattaaaagtataattaccataagatagagtaatttatctkcttaatatttatccaaatgaattgaaaacagaatctcagatattagaacacctaagttcacagaagcattattcacaatagccaagaagtagaagcaacttaaatgtctgttaatggatgaatggataaagaaaatgtgtttatatatacagtaaaatgctattcagtcatgcaaagaagaaaactctgtaatattactacagcatggatgaatcgccagtgtattacgataagtgaaataaggcactcacgaaaaggtaaatgctgcatgattctacttatatgagatatctaagtagtcaaactcttaaaaacagaaactagaatggtagtttcaaggagctgggaggcagggaaaaagagagttattgttcagtggaaataagttacagtcctacaagatgaaaaagttctagagatctgctgcaaatccatggatatatagttaacattactatacagtatacttaaaaaatagttaacatggtgcat

SEQ ID NO: 220520 - DNA, 571 bp, Homo sapiens
gcagctgctatgaaaaacattatggaggtttctcaaaaaattaaaagtataattaccataagatagagtaatttatctgcttaatatttatccaaaygaattgaaaacagaatctcagatattagaacacctaagttcacagaagcattattcacaatagccaagaagtagaagcaacttaaatgtctgttaatggatgaatggataaagaaaatgtgtttatatatacagtaaaatgctattcagtcatgcaaagaagaaaactctgtaatattactacagcatggatgaatcgccagtgtattacgataagtgaaataaggcactcacgaaaaggtaaatgctgcatgattctacttatatgagatatctaagtagtcaaactcttaaaaacagaaactagaatggtagtttcaaggagctgggaggcagggaaaaagagagttattgttcagtggaaataagttacagtcctacaagatgaaaaagttctagagatctgctgcaaatccatggatatatagttaacattactatacagtatacttaaaaaatagttaacatggtgcat

SEQ ID NO: 220521 - DNA, 571 bp, Homo sapiens
gcagctgctatgaaaaacattatggaggtttctcaaaaaattaaaagtataattaccataagatagagtaatttatctgcttaatatttatccaaatgaattgaaaacagaatctcagatattagaacacctaagttcacagaagcattattcacaatagccaagaagtagaagcaacttaaatgtctgttaatggatgaatggataaagaaaatgtgtttatatatacagtaaaatgctattcagtcatgcaaagaagaaaactctgtaatattactacagcatggatgaatcgccagtgtattacrataagtgaaataaggcactcacgaaaaggtaaatgctgcatgattctacttatatgagatatctaagtagtcaaactcttaaaaacagaaactagaatggtagtttcaaggagctgggaggcagggaaaaagagagttattgttcagtggaaataagttacagtcctacaagatgaaaaagttctagagatctgctgcaaatccatggatatatagttaacattactatacagtatacttaaaaaatagttaacatggtgcat

SEQ ID NO: 220522 - DNA, 581 bp, Homo sapiens
tactatcattacacatggttttacaaatgcagaatgtgagaatatatataaagtagccaaaagacacaacctagtgagtggtagacctgagaatgtaacacaggcagtctgtccccaagtccctcctcttaatcatcacactcttctattttgccagtaaccagcatctcttactctatggatgcattacactatgtaactcctaaaacgagtataggaagcaatgggtcattctggacattcagggataagtgcctagaactcagggagcactagcttaaacacaggaactattggaatgatgttttagttcacagaactgaaccagaacagggactccatcactgtcatttctctctctctctctctctctctttctctctctctctctctttgtgtgggacttcatccagattataaagaatatagacacagaatttctctagaatcacatcatttggaaacttgtccggaagacattttcctagcagcccyggctctacaaagaacaagtcacagagagttgtacaactgggcccctgtttgggactccagggcatccctgcagccagaatgacaga

SEQ ID NO: 220523 - DNA, 581 bp, Homo sapiens
tactatcattacacatggttttacaaatgcagaatgtgagaatatatataaagtagccaaaagacacaacctagtgagtggtagacctgagaatgtaacacaggcagtctgtccccaagtccctcctcttaatcatcacactcttctattttgccagtaaccagcatctcttactctatggatgcattacactatgtaactcctaaaacgagtataggaagcaatgggtcattctggacattcagggataagtgcctagaactcagggagcactagcttaaacacaggaactattggaatgatgttttagttcacagaactgaaccagaacagggactccatcactgtcatttctctctctctctctctctctctttctctctctctctctctttgtgtgggacttcatccagattataaagaatatagacacagaatttctctagaatcacatcatttggaaacttgtccggaagacattttcctagcagccctrgctctacaaagaacaagtcacagagagttgtacaactgggcccctgtttgggactccagggcatccctgcagccagaatgacaga

SEQ ID NO: 220524 - DNA, 521 bp, Homo sapiens
ctctgtacactcttatgtttaacactcttcacatatgcctcatgcagctccaaggatgtttttgaaatgagtgatagtgtcactttcatacctaacatgacagatttccccaatctcaggtatcctcaaactagtgaatatttgtctactcattatcaccccattgtcytttgttgttttcctacctgacatcacagaaggcagtgtgtagaggactcagaaagggttatgtatgattcagcccaccctagctgtagtcctggctgtcattaactatcataaggacctgctgttgtaggttgggttacctgggaagtaaactctgagacagatatttgtgtgctaggggaggtttgccacatttagcaaacaaaaattcaggatgcctggttaaatttgaatttcagataaacaataaatttttttagtatattttatgtcccatgtcatatttgggacatgcttctactaaaaattatttgtttgaaattctaatttaattgtgttttacgtggcactct

SEQ ID NO: 220525 - DNA, 561 bp, Homo sapiens
ggaattcaagaaatctgaatgataccaggctgaagaagtctgggaagatttcttggaaaagctaacttggaaatgaatcacaaatgctggaaggatgtcagcatcagggcggtgggggtagggaggaatggtgtcccaggagcaaagcctcacrgcaggaatgggcacaagggtggccactttggtgggaacaggaagctgggtaagaattggttaaaggagaaggtaggcaccataataacattagtgagttggaaatttgaaagttttcttcaggaaataggaagtccccagaatccctgagcagagatgggtgtacatgggtgcttgctggccatgggcacaaagtggagacaagattggcaggaggagactgcttgaggtgatgagacacttttcacattgtggagtggaaaggaaccacaggaataagatgcatcatctctcagcagggtcaagctactgagtatgagggaagagggaggagaagtaaaatgaaagcatcattctattgtcttcggtctggatgaagtacaggcaggtaaataggagaagtgaaga

SEQ ID NO: 220526 - DNA, 561 bp, Homo sapiens
ggaattcaagaaatctgaatgataccaggctgaagaagtctgggaagatttcttggaaaagctaacttggaaatgaatcacaaatgctggaaggatgtcagcatcagggcggtgggggtagggaggaatggtgtcccaggagcaaagcctcacagcaggaatgggcacaagggtggccactttggtgggaacaggragctgggtaagaattggttaaaggagaaggtaggcaccataataacattagtgagttggaaatttgaaagttttcttcaggaaataggaagtccccagaatccctgagcagagatgggtgtacatgggtgcttgctggccatgggcacaaagtggagacaagattggcaggaggagactgcttgaggtgatgagacacttttcacattgtggagtggaaaggaaccacaggaataagatgcatcatctctcagcagggtcaagctactgagtatgagggaagagggaggagaagtaaaatgaaagcatcattctattgtcttcggtctggatgaagtacaggcaggtaaataggagaagtgaaga

SEQ ID NO: 220527 - DNA, 561 bp, Homo sapiens
ggaattcaagaaatctgaatgataccaggctgaagaagtctgggaagatttcttggaaaagctaacttggaaatgaatcacaaatgctggaaggatgtcagcatcagggcggtgggggtagggaggaatggtgtcccaggagcaaagcctcacagcaggaatgggcacaagggtggccactttggtgggaacaggaagctgggtaagaattggttaaaggagaaggtaggcaccataataacattagtgagttggaaatttgaaagttttcttcaggaaataggaagtccccagaatccctgagcagagatgggtgtacatgggtgcttgctggccatgggcacaaagtggagacaagattggcaggaggagactgcttgaggtgatgagacacttttcacattgtggagtggaaaggaaccacaggaataagatgcatcatctctcagcagggtcaagctactgagtatgagggaagagggaggagaagtaaaatgaaarcatcattctattgtcttcggtctggatgaagtacaggcaggtaaataggagaagtgaaga

SEQ ID NO: 220528 - DNA, 561 bp, Homo sapiens
ggaattcaagaaatctgaatgataccaggctgaagaagtctgggaagatttcttggaaaagctaacttggaaatgaatcacaaatgctggaaggatgtcagcatcagggcggtgggggtagggaggaatggtgtcccaggagcaaagcctcacagcaggaatgggcacaagggtggccactttggtgggaacaggaagctgggtaagaattggttaaaggagaaggtaggcaccataataacattagtgagttggaaatttgaaagttttcttcaggaaataggaagtccccagaatccctgagcagagatgggtgtacatgggtgcttgctggccatgggcacaaagtggagacaagattggcaggaggagactgcttgaggtgatgagacacttttcacattgtggagtggaaaggaaccacaggaataagatgcatcatctctcagcagggtcaagctactgagtatgagggaagagggaggagaagtaaaatgaaagcatcattctattgtcttyggtctggatgaagtacaggcaggtaaataggagaagtgaaga

SEQ ID NO: 220529 - DNA, 592 bp, Homo sapiens
acgggtaagcctcacagactctgagaatgctaacattcccagatggaaaaaaatgtrgctacttccctgattttgttttctataaggtttgaatagtttgtgagttacacatctaaactttacacatctaaaggaggaagaagtactgtatagctgcaatttgtgggcattgatacaggcaacttaaagaataatttaaacttcttgcttcctgaaatttaagacactgtgttattaacttgctgctttgctgatcagaatcattacacattaagtagtgttgactctcctctattaaactggtagaattattaacatttacaggttctctcattgcccatatacatttatccagatgtttggacattcttctccatcacccacccttgctccccaaccaacctccagtttgtccgacttgcatcagtttactgggtcctcctatgagacacttgaatgaaaagttctccagagctagaaatagatatttttagatatttttcttcctagtaaggaaattggttttttgatgacaagaaaatcatttctatgtaatggagattttcccccaaggaattttaaataaataaca

SEQ ID NO: 220530 - DNA, 592 bp, Homo sapiens
acgggtaagcctcacagactctgagaatgctaacattcccagatggaaaaaaatgtggctacttccctgattttgttttctataaggtttgaatagtttgtgagttacacatctaaactttacacatctaaaggaggaagaagtactgtatagctgcaatttgtgggcattgatacaggcaacttaaagaataatttaaacttcttgyttcctgaaatttaagacactgtgttattaacttgctgctttgctgatcagaatcattacacattaagtagtgttgactctcctctattaaactggtagaattattaacatttacaggttctctcattgcccatatacatttatccagatgtttggacattcttctccatcacccacccttgctccccaaccaacctccagtttgtccgacttgcatcagtttactgggtcctcctatgagacacttgaatgaaaagttctccagagctagaaatagatatttttagatatttttcttcctagtaaggaaattggttttttgatgacaagaaaatcatttctatgtaatggagattttcccccaaggaattttaaataaataaca

SEQ ID NO: 220531 - DNA, 520 bp, Homo sapiens
tgagcaaattttatttctctgaagagttagtattactttccttaaaatacaaaaacaatggtaagtacacttatcattaattggtaaaattgtattggtaaaatacaaaaagtaattgtatgggtaaaatacaaaaacaatggtaagtacacttaccattaattggtgagtacagtggtaagtatatttaccattaaaggtaaatacacttaatatagtgatatgcaatgaaatatttgtgtttcttgtaarttttagtgtatcttctataaattattttaagtagttcaggagtaaaatacatttgatagtccataacaacattgtttgtgggtacataagcaatggtgaatacaatcatgcaaaacttcccaggcagtccttcttttgtttgcgaaagcacattttgcaacagtgtatttctatttcaatagaacatcctaatcatggcttaaaaacagaaagtgcttgagaaagcaattatgttagatgaagaaaactcaattcttaacagacttta

SEQ ID NO: 220532 - DNA, 339 bp, Homo sapiens
ggtgccttctacaacatgtgagaattatgggagctacaagatgatatttgggtggggacacagagccaaaccatatcagtgggcattaacctagggcacagatatcttcagtctgcgcccattcccagaggtccatccacagataattcccagacttccttgtcaccagccttccagacctgtttcttctaagtccctatctagccaagccattagcagctacccattaattagtgtaagtctgtacttytggccatgtctcagttcagacaagtggccaaaggtactccttgaagttctgttccctgggaggattttttttttctttttgaccactgt

SEQ ID NO: 220533 - DNA, 551 bp, Homo sapiens
ttagatgatggctgcctttcttgattgtacagtagtcttcccacaattctgagatctaagtgttgcagatttattttttcagtatattaatgtggatttttaatggataaaagttagaaggatcctgcgtaatctctaagtcartgggaaaaggagaatgacagggtttggtctgtgggtttaactttaggtcaaaacacctaaagtggttccccctgcccacttctaaagtgtttgggtttgatttcatagagcttagtagcagagtcaaagataatacaaatgggtggttgatgctgtttgtctcttttcccctgccccccaacagatgagagctattgttcacataactcaacagttagtgattgtcaagtggggaacacgacagacttctgttccggtaagtattcatattggctgcttggaagctgaccgcagagaggtgaggaagatcattgcctcagaaagccttgtttcagtgctttgtttgaagcattgccataattctcatcttgttagaattggaatatgaatagtatattcatattgat

SEQ ID NO: 220534 - DNA, 557 bp, Homo sapiens
gacaaaacgtacttaaaacgtacaatgttrctagatataaaaatggacaatttatcatgataaagtggtcaatccatctgggagatataaccatcataaacatatatgcatgtaataacagagcaccaaaatatttaaaaccaaagctgactgaaatgaagagaggaatagacaatgcaacaataagaattggaaactataacatcccacattcaacaattgatagaacaactaagtaggtcaacaaggaaacagaagacctgaacaacactgtaagcctagtgaactataaacattataaactagacctagaagacatttataagatatttcacccaacaaaagcagaatatacgttgttcttaagcccacatataacattttctagaaaagtctgttaggcaataaatcaaatctcaataaatttttaaaaacagaaataatacaaagcatgttctctgaccacaatggaattatataagacattaataacagaaaaaaacaggaaactcacaaatatgggaaaattaaacaatacactcctaaatgaccaatgg

SEQ ID NO: 220535 - DNA, 553 bp, Homo sapiens
gaattcaggatgaatctgaayagcattgtgtcagaaaagtaaacttgcaagtcaaatacaaggacatacaccacttagtagaccacagaaggccattaaagagttcgaacaaagaaggccaggtgtggtagatcacaccctgtaatcccagcattttagaaggcagaggcaggaggatggcttgactccaggagttcaagaccagcctgggcgacaaagtgagccctcatctctacaaataataaaaaaaattagtcaagtgtagtgctgtgcctgtggtcccagctactgggaggctgaggtgggaggactgcttgagctggggaggttgaggctgcagtgagctgtgattgcaccactggattccagcctgcatgacagagcaagactctgccaaaaaaaaaaaagagtttgaatgaagaagcaacaggattttatttgagtttgagaaagatgatctcaatggacatggggaggatgaagtctatctaaataatggaaagtgataccacatttttaaagaaatactgaattaactaaaatgtcaattatt

SEQ ID NO: 220536 - DNA, 553 bp, Homo sapiens
gaattcaggatgaatctgaacagcattgtgtcagaaaagtaaacttgcaagtcaaatacaaggacatacaccacttagtagaccacagaaggccattaaagagttcgaacaaagaaggccaggtgtggtagatcacaccctgtaatcccagcattttagaaggcagaggcaggaggatggcttgactccaggagttcaagaccagcctgggcgacaaagtgagccctcatctctacaaataataaaaaaaattagtcaagtgtagtgctgtgcctgtggtcccagctactgggaggctgaggtgggaggactgcttgagctggggaggttgaggctgcagtgagctgtgattgcaccactggattccagcctgcatgacagagcaagactctgccaaaaaaaaaaaagagtttgaaygaagaagcaacaggattttatttgagtttgagaaagatgatctcaatggacatggggaggatgaagtctatctaaataatggaaagtgataccacatttttaaagaaatactgaattaactaaaatgtcaattatt

SEQ ID NO: 220537 - DNA, 553 bp, Homo sapiens
gaattcaggatgaatctgaacagcattgtgtcagaaaagtaaacttgcaagtcaaatacaaggacatacaccacttagtagaccacagaaggccattaaagagttcgaacaaagaaggccaggtgtggtagatcacaccctgtaatcccagcattttagaaggcagaggcaggaggatggcttgactccaggagttcaagaccagcctgggcgacaaagtgagccctcatctctacaaataataaaaaaaattagtcaagtgtagtgctgtgcctgtggtcccagctactgggaggctgaggtgggaggactgcttgagctggggaggttgaggctgcagtgagctgtgattgcaccactggattccagcctgcatgacagagcaagactctgccaaaaaaaaaaaagagtttgaatgaagaagcaacaggattttatttgagtttkagaaagatgatctcaatggacatggggaggatgaagtctatctaaataatggaaagtgataccacatttttaaagaaatactgaattaactaaaatgtcaattatt

SEQ ID NO: 220538 - DNA, 553 bp, Homo sapiens
gaattcaggatgaatctgaacagcattgtgtcagaaaagtaaacttgcaagtcaaatacaaggacatacaccacttagtagaccacagaaggccattaaagagttcgaacaaagaaggccaggtgtggtagatcacaccctgtaatcccagcattttagaaggcagaggcaggaggatggcttgactccaggagttcaagaccagcctgggcgacaaagtgagccctcatctctacaaataataaaaaaaattagtcaagtgtagtgctgtgcctgtggtcccagctactgggaggctgaggtgggaggactgcttgagctggggaggttgaggctgcagtgagctgtgattgcaccactggattccagcctgcatgacagagcaagactctgccaaaaaaaaaaaagagtttgaatgaagaagcaacaggattttatttgagtttgagaaagatgatctcaatggacatggggaggatgaagtctatctaaataatggaaagtgataccacatttttaaaraaatactgaattaactaaaatgtcaattatt

SEQ ID NO: 220539 - DNA, 583 bp, Homo sapiens
ctgagagacattgtaaattgtaaagatatasaaagtttaaaagcaaagtgatgggggtaaatatattaaaaaaacactaaccaaaagacatctggtattcttatacaaataacagataaagtagatttcattaaaatctactgattataaaaaggatttctatataattctttaaaaaagcatttcatccaaaagcaaaataattccaaatatatatgcatcaaataagatagcttcaatatgtacaaaacaaaaactgatggaatcataaaaagaaacttacaaatatatcattagagtagggggttttaacatgcttctcctagtagcatatcaaacagcaaaaatttttaaggatatagattgaacaatacaaaaatcagtttgatccaactggcatatagagaacaatgcactaacaattgaaaaatacatgttcttttcaagtatacatggaacacttaaaaacttgaccatgtaaaaggccacaaaataacttcaacaatctttgaaaaactggaagcgtacagatcacaatctctaatcacaatgctatggagttataaattgacaacaaaaaagt

SEQ ID NO: 220540 - DNA, 469 bp, Homo sapiens
ccattggctattgataccatttattgacgcaggtgttttctcctaaaacaaagtttaataaacgttttgaaaaataaaattaaaattgaatgtttttaaaaaacccttcttttgtccagccagcacaggtaaatagtttattgtgttggttcaaagtgatcatgttagccatgtttaggagaaatttggatccccgtcaatgacttctgaagtcaatgacagaaatggatagaggagaggagggartagaggccttggaagaacaagcaagatgacttacttagcaaccccctcatggtatcctgccatcgcattgagcatccttgaaactcactggagctcccttcctggaatgcatttgtaccgaaaggtaacaaccaagttaaattaataaccaaaagatgactcagagagaaacaagaatgctttttctccctactctactatatttagagccatttttcaaaat

SEQ ID NO: 220541 - DNA, 246 bp, Homo sapiens
gaattctttgcaatgcaatttctcagctcgaccggaaacctgcagaaactctgggagtcgttccagtggcccagagacagggttaacaagcccctagggattagtggttgcgmatcactccattaaagggcttttctgtccactgggaacggtattttaaccttagtctgattccagcggcacaactccgcccacatacacttctcaactctctaagagtgacagagcattcccctccacatcaag

SEQ ID NO: 220542 - DNA, 246 bp, Homo sapiens
gaattctttgcaatgcaatttctcagctcgaccggaaacctgcagaaactctgggagtcgttccagtggcccagagacagggttaacaagcccctagggattagtggttgcgcatcactccattaaagggcttttctgtmcactgggaacggtattttaaccttagtctgattccagcggcacaactccgcccacatacacttctcaactctctaagagtgacagagcattcccctccacatcaag

SEQ ID NO: 220543 - DNA, 246 bp, Homo sapiens
gaattctttgcaatgcaatttctcagctcgaccggaaacctgcagaaactctgggagtcgttccagtggcccagagacagggttaacaagcccctagggattagtggttgcgcatcactccattaaagggcttttctgtccactgggaacggtattttaaccttagtctgattccagcggcacaactccgcccacatacacttctcaactctstaagagtgacagagcattcccctccacatcaag

SEQ ID NO: 220544 - DNA, 246 bp, Homo sapiens
gaattctttgcaatgcaatttctcagctcgaccggaaacctgcagaaactctgggagtcgttccagtggcccagagacagggttaacaagcccctagggattagtggttgcgcatcactccattaaagggcttttctgtccactgggaacggtattttaaccttagtctgattccagcggcacaactccgcccacatacacttctcaactctctaaragtgacagagcattcccctccacatcaag

SEQ ID NO: 220545 - DNA, 612 bp, Homo sapiens
tcaaatttttaagctatatatttagacactttattttatggaccattttagcttctatcccatggaagttcactgtttcaggaacctgtttctaagaatgyagtggggaacttgcagtcattaccagaagacttttgggggaccttttataacatacatttctatttgactgtgacagtaccatgaggcatttttcaacttgactcttacagagtttactcaacctaataaaagaggccttctatctctaatcattcgttttccctcaaccaaagaagatctttgtcccattagaaaaaaacagtattttttttaaatgcaattcttagtacttagctcagtaaggtagggatgacttgattttcaggtttggtaagagtgatgtattgtttaagcaatttaagcaacaagttttaataaataaattttactgcatttaaaatttaaaaaggaattcccaagctccttaatgaaactttgccttaagtttacatacatatgtaatatatgtgtaaatataaatctgatagacttaagaaataaaatattctattaactttgaggtaggtataaataatagataataaatagatctccatttttcaaataaat

SEQ ID NO: 220546 - DNA, 420 bp, Homo sapiens
agattgtcaacaaacaccattattcctagacagtagttgaaggtgactgaactttagggaagtcaggcagctcccaaagacagagcaggactgagaccttgcactaaactacacttatcagagcaggccaggcacgcagcagagactcaactgaaacacagtcaggccaaaaccaaatacagtttttaaaaactcaaacaggagaaaccactttctgaaccactaataatctmtgaataactttaacatggatccaaggtgatggttaataaaatagacgccagtgtagacactgtttgcatgggaggcaggatctaggacattggcaactgataaataaaggaaaggacagagagaaaaaagacaaagttgtacaatgccagccgtgggactcaatgggaagacaccatttaacttacc

SEQ ID NO: 220547 - DNA, 489 bp, Homo sapiens
tacggctggagagcagaggaacagtctaggtaccatatgcactccctgggctgagtccacacggccagtcctggtggcagtgaatgtgggacctggccctcataagaaggcatagtaygctggactcagtgtctcatgcctgtaatcccaatattttgggcagccaaagcaggtggatgacttgagctcaggagtttgagaccagcctggcaacatgacgagaccctgtctctactaaaaaaaaaaaaaaaaaaaaaaaaaaaaaaaaaaaaaagagggggcacggtggtgtgcctatagtcccagctattcaggaggctgaggtggaaggacacttgagcctggtggggccaaggttgcagtgagccaagatcctgtctccaaaaaaaaaaaaaaaaaatatcagtagaatggaaagctcaagatgagtcactttcatttattttaccaacaaaattccattgttagacgcatggggagagaaaaggc

SEQ ID NO: 220548 - DNA, 489 bp, Homo sapiens
tacggctggagagcagaggaacagtctaggtaccatatgcactccctgggctgagtccacacggccagtcctggtggcagtgaatgtgggacctggccctcataagaaggcatagtacgctggactcagtgtctcatgcctgtaatcccaatattttgggcagccaaagcaggtggatgacttgagctcaggagtttgagaccagcctgscaacatgacgagaccctgtctctactaaaaaaaaaaaaaaaaaaaaaaaaaaaaaaaaaaaaaagagggggcacggtggtgtgcctatagtcccagctattcaggaggctgaggtggaaggacacttgagcctggtggggccaaggttgcagtgagccaagatcctgtctccaaaaaaaaaaaaaaaaaatatcagtagaatggaaagctcaagatgagtcactttcatttattttaccaacaaaattccattgttagacgcatggggagagaaaaggc

SEQ ID NO: 220549 - DNA, 516 bp, Homo sapiens
tcaacggttctccttcttcccactactaacctgattttagcacagggcatttragcatctaatctgtattgccatcatataaccctttaacaatcaagttttgggcttggttggcagccgttatcttccctgtgatgacaatagatgagaggtctctcagagctgccattaaggcttatgatttttagctcagatcttgagttagaaattcacagccttcaattttttcttaggtaatctctgtaggatcatctgaaacattcagctgatgtcataatcactataatcattattgctgtcacagtgatcaattaacatagccatttgttctcccagtgtcttgttctcctgcggtacttcctcttatgctatcattaaagtccctctggactagtaagggtggggaggctgttactactcctcggcctaaaagggtaataagagggaatttttgctacaattagaaaaaacaactgtacagagaaaggcaactgacaggagttatagcctttagta

SEQ ID NO: 220550 - DNA, 661 bp, Homo sapiens
tcgttattagtatagttaggatcttcccgtgtactgagctttgtatgtcactcctttaaaaagagtgtctcagtgatgaacctgttatattacagatattccataacaaacattcccctgttccagtttaaagcatgaattatcacaagagagtgattttaaggatgtgtaaaaaattgtgtcagtaaatatattggaatgtgtgataatattatccatgcctccaacatgggcatctggcatgcatctggcatcaactttcatctccatttggggagccgaattctctgagtctgggcacccactcctttagctatgtggctggccatcaccctcacttctggctgagagctggtcagcatccgggtgcagtgatgtgtgttgtaggcttcattcttaaggaggagggactctttgtccctaactcaytgtgattctctcagaagatagtgttgctagctttctctttgtatgggaccacagtgtcatgtggcacctgagtgcaaagcagtcatttaactggaattctttaaggtagtagaaaagaggaactctttttcagagttagctgaaggaaaacttagccttggcaaatcgtttttaattattaatgtgtcaagtatcttactgaattaaggattcattacagcctactaacttg

SEQ ID NO: 220551 - DNA, 600 bp, Homo sapiens
attcctgtggattttgctggtggcattttcttggtggtgtttaacatttatctctgttccccatatttcttgtaaattggtaatgacaaaggtttagttaaattcagctctcccaccttctctttctcatttctgttcttttttgaaagaatatttcataactagtgttttgatggtagtacataaagtctcatttcctctctgtgattttagcaatcattgttgattgttttctaggtcctttttttcagtgggagttgcagaatagctrtattctgtttcttcattcatattagctagatacagtttttatcagaaaggcggaataaatgtttaattctttatttgctagtttttaaatagtgaattggttcccaagaatcctccagactgaaagaatgagtgtttccctgccccccgcctttgggtatcactacgaatgcatttaaacagttttatatgtttccgttcattgaagatattatttttaactggcgctcaagttgtttggccattggagggacttcttcacattgacttctaaatcttttcaacataatcctagtagatgggaatagtaactttgccgtctagtgtagt

SEQ ID NO: 220552 - DNA, 550 bp, Homo sapiens
ctacagaaaaactactagatttgttaagtaagtttattaagcacactggtcactatgaaagcaaaattgtttatttctgtaactgcaatacctaggaaataaaaatgttaaaatatattacttataattgaattaaaacccaccacacaccaagaaataaatctaacaaaatatgtgcaaggcctctacctggaaaactgaaaattattgaaagaaaataaagaagtaaatatagtaaagatgtcatgtcaaattttaccttgttaatctgtagattcaatgcaatcttagaggacagagccacaagccacaaaagatttttcccctggccttgaaacctgatgcctgactagattttaaaattgtttggaaccagtgaattacttttycttcaattttctccccttttgaatgaatgtttacaactgtgattttatgctgatctcattattgtattttggggaaaagataatttgtttcttgaggttaataagtccacaagtaaagaaaaatttccccaggatggattcattcgaatactcacaacacc

SEQ ID NO: 220553 - DNA, 462 bp, Homo sapiens
gatagatagatagatagatagayagacagacagacagacagacagagagaaagatagtagatttattagagtaattggcttacacaattatggagtctgagaaggcccatgacagagtgtctgcaaactggagaactcagtccaagtctaaaagtgtcagaaccaggcagctaatggtgtagttctcagtctgcggccaaaagccaaagaactcagggaaggaaatgaggatgctcctccaagtcccgaagttcaaaagccagagaatctggagttctgatgtccaagggcaggagaaggacatcctaactataagagaaagaaagagaatttgccatgactttgtcttgttgtttcatccaggcccccggtcaattgagtgctgtccatctacattgatggtgaatcttctctactgccgactcacatgctattctcctccagaaatactctcacagacat

SEQ ID NO: 220554 - DNA, 453 bp, Homo sapiens
tttagctagacacagagcgctgattggtgtgtttttacagagtgctgattggtgcgtttacagtcctttagcgagacagagagcgctgataacagagtgctgattggtttgtttacaatcctttaactagacacagtgtgctgattggtgcatttacaatcctttagctagacacagagtgctgattggtgcatttacaatcctctatctagacagaaaagatctccaagtccccagtcracccaggaagtacagccggcttcacctcttactagcacttaatattttctttgatttaagttgaggtatgcatttaatccattattcttatgtattgggtctggaattgaatcattttgagtcagattgtgagctggtttttcatatcatcattttcatgcttttctcaggcaaacgatggaataatggagacaatctattttttaaaagagc

SEQ ID NO: 220555 - DNA, 583 bp, Homo sapiens
ttgtcacaggctctgggggatataacaataataaatatgtatttagtccttgtcttaatgcaattcacattttagtgggtgaggcatgtgtttaattaaaaattacactattaaaatttacttatttttaagactacagactacagcatgacaaaaggtctgatagaaatctaacattttggactgcagatggatttgatcagaaaaaatgttttctgaggaggtaaagtttacactgtgatctattcaataatttgaattctgatagccgaatgaagaggaaaaaattgactttcagtcaaaggaccaaggcaaggctattgaggtaaaaacaagacraaacaacaacaacaacaacaaaataaatgaacaaaaaatattctcagaatagctaggaacaataaccgggaagttatcgagaatgagggaagaggctggattatggagaaaattatagccaatttaagaattttaatttaatacaaagatcatagtaagttagggtgagtaagagtcttattccatttttgttgccataaaagaatacctgagatcaagtaatttataaagagaagatgtttat

SEQ ID NO: 220556 - DNA, 516 bp, Homo sapiens
aattctcctgcctcagcctctccagtagctgggattacagtgcatgccaccactccctgctaattttttatatgagtttttgattctatattaaagagttttaagtttatcttgtaatgactgcagagtcattgtagattttttaaatcgagaaatgatatttgttttatacagataaaattatctgtaacagacaaataacacaaatatggaaggtttgaagtagggaaagtttgactgtaggtagatgtattttgctatcataataggtttagggaagttgatgaaggcatggactattactaaattgcaataataggaatcgttaagggagaaaaaactttgagtgttaggaaataaagtgagtagaacttggaacttgttgttcctcagtggcggtattttccaaaagcaaaagacaatacagattttggattcgtcagtatttaagggattgatgaaaacctgggcattgaatgagatcacctggrggaggctgtatttcggaaggagggc

SEQ ID NO: 220557 - DNA, 553 bp, Homo sapiens
gaaataattacacaactcaccataatgtagaatcaatgggaggcctgagcttgttttcctgcaactagaggtcccatctggggatgatgggagatggtgacagatcatcaggcattagattctcataaggaacatgcacctagatcactcgcatgcacagttcacagcagggtttgtgctcctttgagaatcaaatgcagctgctgatctgacaggaagtggagctcgggtggtaatacaagcaatgaggagcakctgtaaatacagatgaagcttcacttgcttgcctgctgcctacctcctactgtgcagcccagttcctaatgggccacggactggtagtggtccagggttggggatccctggtctagcttaaagaaggagtgatagattatcaccattttacaaatcctagtaaataacagacttagacaatgttcctcagtggtgatgtcaacataacagaaagagacagccagacactacgtgcctttctgatggaagagaaaaccatcacatatgatgcagtcatgttcccaattcccccaaatca

SEQ ID NO: 220558 - DNA, 611 bp, Homo sapiens
ggcattgccagagaaaagggtggtaacttcggggttgttggcatggcatttgtaacttgtcacggcactggtgggagtgtcttatgctaatgagcaatgagggcagctagggattgcttttgtcaccatctgctggttttggccaggctcttcactttatcttgtctggactagattctgttttggtcagcgggattgtgaccagaaagcaagttctgctggtcttctatctcactatcacatgataggcactcaaaaaatgcttattgyattgtataaatgctctcacttgatcctaacttaagactaaagtagccaccagtgtcccacattaccaaagaggacattggttcagagcatttatgtaatttgcccgaggttattccactaatatggcagagctgggattcaaacctaggtctttcccactccaaaatgccacctcactagaagtgctgttgatagggaaggtggatgaaaggagagataaagtgaagggcctgccataagtgatcagtgatttggctttaactaaagatcatctttctctttttctctttatctcttttcttccattctaagctctttttattggaagtcattggtaagct

SEQ ID NO: 220559 - DNA, 611 bp, Homo sapiens
ggcattgccagagaaaagggtggtaacttcggggttgttggcatggcatttgtaacttgtcacggcactggtgggagtgtcttatgctaatgagcaatgagggcagctagggattgcttttgtcaccatctgctggttttggccaggctcttcactttatcttgtctggactagattctgttttggtcagcgggattgtgaccagaaagcaagttctgctggtcttctatctcactatcacatgataggcactcaaaaaatgcttattgtattgtataaatgctctcacttgatcctaacttaagactaaagtagccaycagtgtcccacattaccaaagaggacattggttcagagcatttatgtaatttgcccgaggttattccactaatatggcagagctgggattcaaacctaggtctttcccactccaaaatgccacctcactagaagtgctgttgatagggaaggtggatgaaaggagagataaagtgaagggcctgccataagtgatcagtgatttggctttaactaaagatcatctttctctttttctctttatctcttttcttccattctaagctctttttattggaagtcattggtaagct

SEQ ID NO: 220560 - DNA, 395 bp, Homo sapiens
gaattcctgacaaacaacttcgtatcagcccactcactccctgcacctcctttttgcctttaaaaatccacacgtggccaggcgcagtggctcatgcctgtaatcccaacactttgggtggccgaggtgggtagatcacctgaggtcaggagttcgagactgccctggccaacttggtgaaaccctgtctctactaataatacaaaaattagccaggcttggtggcgcrcgcctgtaatcccagctactcaggaggctgaggcaggagaatcgcttgaaactgggaggcagaggttgtggtgagccgagattatgccactgcactccagcctgggcaacaagagtgaaactccatctcaaacaaaaaaaaatacacatgtaactactgctgatct

SEQ ID NO: 220561 - DNA, 500 bp, Homo sapiens
cccagagacagtgtcagatcccacaggttaatactcaacaccataagatcatcctctccttccctgaagtcgcaattccaggcctctggaacttctgaccaattggcttcaagttggcgctcccacgatcccatctttgagattgatttatttgttagagcagctcacagaactcagggaatcatatttactggcttactmtcaagcatattttccaagatacaaataaacagccagatgaagagatacatggggtgaggtctgggaggatttgtaagtgcagcagcttctgtccctgtagagttggggtgcaccaacttcctggcatgtgaaagagtttttcaccttcctgtcatgctcaatgtgttcagctctccagaagctcctggaactccatcctttgggccttttatggagaattcattggttgtcaatgattaaagcatggacaactatgtcaaaatgtgattggacaaaaaggatgtggcctaaactcagca

SEQ ID NO: 220562 - DNA, 647 bp, Homo sapiens
gtcttcaaacttcagattctgggttgaaaattatttgatttaagaatgttgaatattggtccccaatctcttccagcttgtagagcttctggtgagaggtctgctgttagcctgatgggcttccctttgtaggtgacctggcttttctctctggctgcccttaacaggttttccttcatttctaccttggagaatctgacgattatgtgtcttggggttgatctcytcgtggagtatcttaatggtgttctctgtatttcctgaatttgcatgttggcctgccttgctaggttgggaaagttctcctggataatatcctgaactgtgttttccagcttgttcattctccctgtctccttctggcactccaatcaatcataggttcagtctttttattaagtcccatatttcttggaggctttgttcattccttttcattctttttttctctgttcttgtctgcatgtcttatttcagtaaggtggttttcaaactctgatatcctttcttccactttgtcgatttggcttcacaaggttctcatgctgtgtttttcagctccgtcagatcgtttatattcctctctaaactggttattctagttagcaattcatctaaccttttatcaatgttcttagcttctttgc

SEQ ID NO: 220563 - DNA, 637 bp, Homo sapiens
taaaagcaaggaattgtatgatttaaacactaaaaaaccagaaatgagcctatttttctcaaaggtctcacagtcagcctgaggattaaagacctgctaaagcctctgatatggccgatcaaaataagcactcaatactcatgctcaacacaaaagatctgtattatggattgaggggttgaggatcctgtgatcttaccaactactggtatcctttaatctcccatcttgctttcatttttctctggaaagaatacaactggattaagatggaaaaycagcgactcatcttggaccattacttgcatatgtctgaaacttatatcttttcaagttagaaaaatcgtccaaacaagtaggatgtgcaatcattctgagcctgagcaaatccacggtttagtacaagggttggcaaaccaaattcagcccactgcctgttttcttatggcctatgagctaaaatggttttaaaatttctaaatggttgagaaaaaatcaaaagaagaataatactgcctaacacatgaaaattatgtgaaattcaaatttcagtgtcttaaggaaagttttattgaaatagccatggccattcatttatataacatctgtggcttctttcatgttacaacagcgttaa

SEQ ID NO: 220564 - DNA, 637 bp, Homo sapiens
taaaagcaaggaattgtatgatttaaacactaaaaaaccagaaatgagcctatttttctcaaaggtctcacagtcagcctgaggattaaagacctgctaaagcctctgatatggccgatcaaaataagcactcaatactcatgctcaacacaaaagatctgtattatggattgaggggttgaggatcctgtgatcttaccaactactggtatcctttaatctcccatcttgctttcatttttctctggaaagaatacaactggattaagatggaaaaccagcractcatcttggaccattacttgcatatgtctgaaacttatatcttttcaagttagaaaaatcgtccaaacaagtaggatgtgcaatcattctgagcctgagcaaatccacggtttagtacaagggttggcaaaccaaattcagcccactgcctgttttcttatggcctatgagctaaaatggttttaaaatttctaaatggttgagaaaaaatcaaaagaagaataatactgcctaacacatgaaaattatgtgaaattcaaatttcagtgtcttaaggaaagttttattgaaatagccatggccattcatttatataacatctgtggcttctttcatgttacaacagcgttaa

SEQ ID NO: 220565 - DNA, 536 bp, Homo sapiens
gggtcaattaaatgttattctaccttctagtttaaaaggactaaaagccgtccttaactttggagggaattaaatttatgctgtatctttagactgataagaattttgcttgggtatatattcccatrggctttatttctaacttctattaatcttttttttaaaaaatttagaattcttaccaccttctattccatacagccaagcattcatggagaagcatcatgtcctggggtgaagatgtggtccatattcttcatgactaattcgtgagagaaatctgcccctgccatatacaggtgtggtatttagtcagcttccataaaaaggtctctaaacacctctagaaagaacttacgttaaattttggataaagtgaggcaatattccagaactttcaatatgttttacccagatcaaacctgagaaataagagagagcttatagaatcaccatgtctggaaaatcttcactggtgattaaaatcttaagaattttgagggagaaggaatattattttgattaaaaatttcaca

SEQ ID NO: 220566 - DNA, 536 bp, Homo sapiens
gggtcaattaaatgttattctaccttctagtttaaaaggactaaaagccgtccttaactttggagggaattaaatttatgctgtatctttagactgataagaattttgcttgggtatatattcccataggctttatttctaacttctattaatcttttttttaaaaaatttagaattcttaccaccttctattccatacagccaagcattcatggagaagcatcatgtcctggggtgaagatgtggtccatattcttcatgactaattcgtgagagaaatctgcccctgccatatacaggtgtggtatttagtcagcttccataaaaaggtctctaaacacctctagaaagaacttacrttaaattttggataaagtgaggcaatattccagaactttcaatatgttttacccagatcaaacctgagaaataagagagagcttatagaatcaccatgtctggaaaatcttcactggtgattaaaatcttaagaattttgagggagaaggaatattattttgattaaaaatttcaca

SEQ ID NO: 220567 - DNA, 544 bp, Homo sapiens
ttgttagctgtctatcattagaatgtattcatgtaggtaacatagggttaccayaaaattttagtgtatcctgttattctttcacattataatctctccaaagcattctaatatgtctactctgtggcccaaagccttgattttgttcggtatgtcacctgaaacaacagcataatcaggtgatagccttattttttatttactaccaaaacctaaattatgtgtttccactattaatgggaatatctcatgttccccattttgttccacccaatctcatttcatgtctgaagtctcttctttgagacctaactacgtaagtaccacataccaatatgttgcaaaaagctgtaaggtagagaagagagtagggtttggtacaggacaatcgttataagagtgccccaaaatgtcttatgtctctatgctgtcatcctgcattcgggtctcagtttggatgagtgaaatatgcatcaaactatgcaggatgagatcaagtgacttgccttctctttacttagtatagatcctaaaaatgattatt

SEQ ID NO: 220568 - DNA, 544 bp, Homo sapiens
ttgttagctgtctatcattagaatgtattcatgtaggtaacatagggttaccacaaaattttagtgtatcctgttattctttcacattataatctctccaaagcattctaatatgtctactctgtggcccaaagccttgattttgttsggtatgtcacctgaaacaacagcataatcaggtgatagccttattttttatttactaccaaaacctaaattatgtgtttccactattaatgggaatatctcatgttccccattttgttccacccaatctcatttcatgtctgaagtctcttctttgagacctaactacgtaagtaccacataccaatatgttgcaaaaagctgtaaggtagagaagagagtagggtttggtacaggacaatcgttataagagtgccccaaaatgtcttatgtctctatgctgtcatcctgcattcgggtctcagtttggatgagtgaaatatgcatcaaactatgcaggatgagatcaagtgacttgccttctctttacttagtatagatcctaaaaatgattatt

SEQ ID NO: 220569 - DNA, 506 bp, Homo sapiens
ttttgtaaggattatgtgagataacatatgaaagtgtctrcctaagataggcttttttccacgttagtttctgaaaagtattaacctgtttaaatgctatagaaactatgtaaatcaccaaggtcaagggaaattagagtttatgaacaaaacctaaccatttttttttcactctgaatgtatacaaatagtagatttcgagtttagaggagaattatggtaatcaagtggcaagatataactgttactctgctctctccttatttaatcaagtattcaagtctctacggagtgagaaggactaaccctttccaccaaccactaaggacaccttcctcagtaaaaaaaagtccatttccaattgttttgcaatcacccccttcaatctaatgtccaccttgcagctcaggttttctttctcaactgaaaatgtgaatgttcccacccccacacttttgaaatgctattccatttgccttgaatcacctattatcctactacctaat

SEQ ID NO: 220570 - DNA, 588 bp, Homo sapiens
caatcctctacctctggggcagctaggagggagagagtggtggaaacaagtagcaaagaacacattcattccaatgtaacactggtccactagaataaattggaagtattttaaacgtttctcttttagataattcagatctctcagaatgccctgttcttttgctcctctccaaatttgggggctsctctccaagacagacctggagtgactgggaaaatcacataagtttaagcctcgaaatctctctttgcagggactctggaatctcttccagggatctggatctattcacaagctgaaacagctttataaaatttgcaaaattaatatgtattaacttcaaccaatgaaaatgactgtccatttccactctgatttcctctctgtcatagtctcccttttgtttagtagcactggagtggccatgggaaattctgcaattagcctatggggatatttagctgagaatatatgcagtgtaagtttggagtaatatttttgtagtttgcagtcactgctgtgtaagttaaattattgctggcaatcttgaaaggcttctaggaataatgtagtcagtgtaaagag

SEQ ID NO: 220571 - DNA, 588 bp, Homo sapiens
caatcctctacctctggggcagctaggagggagagagtggtggaaacaagtagcaaagaacacattcattccaatgtaacactggtccactagaataaattggaagtattttaaacgtttctcttttagataattcagatctctcagaatgccctgttcttttgctcctctccaaatttgggggctcctctccaagacagacctggagtgactgggaaaatcacataagtttaagcctcgaaatctctctttgcagggactctggaatctcttccagggatctggatctattcacaagctgaaacagctttataaaatttgcaaaattaatatrtattaacttcaaccaatgaaaatgactgtccatttccactctgatttcctctctgtcatagtctcccttttgtttagtagcactggagtggccatgggaaattctgcaattagcctatggggatatttagctgagaatatatgcagtgtaagtttggagtaatatttttgtagtttgcagtcactgctgtgtaagttaaattattgctggcaatcttgaaaggcttctaggaataatgtagtcagtgtaaagag

SEQ ID NO: 220572 - DNA, 365 bp, Homo sapiens
tgaaaacctgggaagcattgtgctacagtatgtatttagaaatagaaattctgggttaaacgacatgaacataatctttaaatgacaatgcctaattgttttccaatttacactccactccgagcagcaaagttcaaatgtacttgttccaaatcyctgccagcacttggatggttttaaatttttataaatcttggaggtgtgcattttaaatttgtagttccctggttaccagtgattttaaatatcatcttacatgtttattgatcactcaggtgcttcttctgttaaatgtcaatccatatattttgcttacctttattgcttatctttttcttgtagagttatgtgagttctttgtttat

SEQ ID NO: 220573 - DNA, 365 bp, Homo sapiens
tgaaaacctgggaagcattgtgctacagtatgtatttagaaatagaaattctgggttaaacgacatgaacataatctttaaatgacaatgcctaattgttttccaatttacactccactccgagcagcaaagttcaaatgtacttgttccaaatctctgccagcacttggatggttttaaatttttataaatcttggaggtgtgcattttaaatttgtagttccctggttaccagtgattttaaatatcatcttacatgtttattgatcactcaggtgcttcttctgttaaatgtcaatccawatattttgcttacctttattgcttatctttttcttgtagagttatgtgagttctttgtttat

SEQ ID NO: 220574 - DNA, 457 bp, Homo sapiens
gtagcacagaatgcagactgcagccttggccagcactggggatgttctatcctcccttctttctcctttgaagggaaaatgagaataggctctctaaagatttccctagaaatgttgctcagttagtagatactgacaaaaaggaggctgattaaagactacagcattctctccaaatacagaagaaacagtcagacagcacggcgctaaatgctaagaaatctgtgaattttggattggacagagggtatgaatctcaacaatgccacttcctagttgtatcctgtttgaaaaattactcaataatttaacttcagttttcttatgtattaagagaggaaaatatttktattttgcagaattattgtgagtgttagaataagattaggcatagtagtcaccccttaaattatagctgaacagtatagaatcaggtacaaaatgaagtatagctatt

SEQ ID NO: 220575 - DNA, 457 bp, Homo sapiens
gtagcacagaatgcagactgcagccttggccagcactggggatgttctatcctcccttctttctcctttgaagggaaaatgagaataggctctctaaagatttccctagaaatgttgctcagttagtagatactgacaaaaaggaggctgattaaagactacagcattctctccaaatacagaagaaacagtcagacagcacggcgctaaatgctaagaaatctgtgaattttggattggacagagggtatgaatctcaacaatgccacttcctagttgtatcctgtttgaaaaattactcaataatttaacttcagttttcttatgtattaagagaggaaaatatttttattttgcagaattattgtgagtgttagaataagattaggcatagtartcaccccttaaattatagctgaacagtatagaatcaggtacaaaatgaagtatagctatt

SEQ ID NO: 220576 - DNA, 370 bp, Homo sapiens
gatccacctgtctccgcctttcaaagtcttgggattacaggcatgagccaccatgcccagaccatttgttctttttgagatttgatagtcataggggaagaaattaacttggatcactagcttattaatctataccaaaataattactttgtgatgtattgttcaatgagctttgattaatgcggagtcatgtaagcccatattcacccaacatcacaatcaacaaatcttattatcctaccaattccttcaggttgccctttgtagccactttycccattgctaactcctgataaccagtgatctcttctttattgctatagttttggctgttgcagaaagtgatgtagatagaatcacacagtatgta

SEQ ID NO: 220577 - DNA, 634 bp, Homo sapiens
taaaataatacttataacagattataaagtataataaatagtcataaatcaaccactcccatatctaccacacagatgaggaaataaagcatcaccagcactacttggaagcccctgcttgccttgtccttgttccatcatstcccttcatttcccataaattcactaatatcttgaactttctcattatcagtatttttaaaatatataaccatttttatctcctatgtctgtattcttaatcaatgaattgttcaatgttgcatgtcttaaaactttatgtacataaaatttttcttttatagtcttccatgtcgcattttcacctctatcttgtgattccaaggtagatccatgccaattttagctgtagctctttcatttttattgcttactaggattctaacatataaattcaccacaattctttttatcaattttattgctaacaggtcttggtgtagtccctaattctatgctgtcatcaacagtatttctgtgaacattcttatgcctacttgttggtttgcatgtttgagattttccttaggatacaatcctatgaatgaattgttggatagttaagcattctcatctttactaaatattaataccattagactattttctatgg

SEQ ID NO: 220578 - DNA, 634 bp, Homo sapiens
taaaataatacttataacagattataaagtataataaatagtcataaatcaaccactcccatatctaccacacagatgaggaaataaagcatcaccagcactacttggaagcccctgcttgccttgtccttgttccatcatctcccttcatttcccataaattcactaatatcttgaactttctcattatcagtatttttaaaatatataaccatttttatctcctatgtctgtattcttaatcaatgaattgttcaatgttgcatgtcttaaaactttatgtacataaaatttttcttttatagtcttccatgtcgcattttcacctctatmttgtgattccaaggtagatccatgccaattttagctgtagctctttcatttttattgcttactaggattctaacatataaattcaccacaattctttttatcaattttattgctaacaggtcttggtgtagtccctaattctatgctgtcatcaacagtatttctgtgaacattcttatgcctacttgttggtttgcatgtttgagattttccttaggatacaatcctatgaatgaattgttggatagttaagcattctcatctttactaaatattaataccattagactattttctatgg

SEQ ID NO: 220579 - DNA, 501 bp, Homo sapiens
actgccttagaatctagacaaagaggaataccatttcaacgtggtatatgaagttattatcattctgacayccaaatgtcaaaatttgtatatatgctatagaaagtaatcacttctgtgactataatatatcctaaataaaataccatcattcttaattccctagtaaatcatgagcaattagggtcaagaccagaaataaatctatttaaaatgtaatgattaaaagcatgggatctgaggtaaaatacatgtgatcttgaatccttaagctgtcactagctgggtgaacttagataagctctctgatctcattaagtttcagtttctttcttattaacctacttcatataggtggaggaaataattgaaatatacatatatatataggtgctaattattactaaaagtagaagattcatcagtaattatctatttacctaatcagaaaaattagagtagcctcctttgattctagaagagaacttcataaattataat

SEQ ID NO: 220580 - DNA, 509 bp, Homo sapiens
acatatggacagacactttttttttttttttcaaataaggttaaatttacaggtacctgagggctaagacttcaacattattttcttaggggacacaattcaacctaaaacaggcaaactaraagaagccagtttccgcttttaaaattcctcctggaaatcttcccagctagattggcaagcttactaggtaccctttctattttctttttattgcaggtaccagtactgccaaacttttcttattctgccacaagaatccccttctctccatcttatactcacattttcaaacctttaccaactgtcttctcaaggttcttccaacttctgcctaccactcagtttcaaagtcaatgccacgtttggtgttttgatacaacagtctctctctctccacacatacgtacatgctcagttgtatatatatatttacacacacacaaatacacatacacagacatacatatatatatatatatatatatatatatatatatatatatata

SEQ ID NO: 220581 - DNA, 509 bp, Homo sapiens
acatatggacagacactttttttttttttttcaaataaggttaaatttacaggtacctgagggctaagacttcaacattattttcttaggggacacaattcaacctaaaacaggcaaactagaagaagccagtttccgcttttaaaattcctcctggaaatcttcccagctagattggcaagcttactaggtaccctttctattttctttttattgcaggtaccagtactgccaaacttttcttattctgccacaaraatccccttctctccatcttatactcacattttcaaacctttaccaactgtcttctcaaggttcttccaacttctgcctaccactcagtttcaaagtcaatgccacgtttggtgttttgatacaacagtctctctctctccacacatacgtacatgctcagttgtatatatatatttacacacacacaaatacacatacacagacatacatatatatatatatatatatatatatatatatatatatatata

SEQ ID NO: 220582 - DNA, 382 bp, Homo sapiens
ctggcttggtttatgaaaagtgtaaactctaaatgtatgccaatgacttcaaattttttcttgttgaaacaaacattttgttggaaactgtgaactacatggcaaattcaatttgataatccttaacaatttaaaatttgactttctctgtatcaagttttatgtctttcaatgtacatataaaaagtgttactttttaattcatttaaaatataaatttcaaagtatgtaccaaaaaaaaaaccccaatgggggtttttagtctttggttttttcgtttttgtttttttttttttttttaaggtgctggtaatctattgtgggatgtccatgaaggatkaaataggaaatagttaatgtgtcttttaaaaaatattcagga

SEQ ID NO: 220583 - DNA, 531 bp, Homo sapiens
ttgtgttctgaatcctcaccagcatcctggttccatgagagagaacaggagcagtagcaaatcctgaagagggtctcctaggttgcctttcaagttggctatgccttgaaacattcaggagtgcatgtagtatggactttaccttttctcaagtttctgatgcagcaacagagctatgagatcctcacttgtttatccgatagcctggttttgagcttggaaatgtgggctttggacaataggcacagaatgctgctctgcagtggggaatggagtaggaatagrtaacagttctttgcttgtgaaggctgggagggggctgccagcagccagccaggtcagggcagatttgtcaaagtttttactcacttgccttcaaccagtgtggacagaagcttttataggaaataagaatctaagccccaaaacgtaattcaagctgagaaaatgtgtgttgtgagtacactgcatcaggcctcctgcgggtctcctgagtcctaaacatttgtgcagtttttagatcaatgatgt

SEQ ID NO: 220584 - DNA, 625 bp, Homo sapiens
aagtccttaaaagaaagaaagccaagggaatccaggaagaaacaaaggtggaaagtaatgacagggcactgagagtccccaccctggagattctaacttaggagtctctagtgaggcttgtatgtgtgtttaccaagatctcaggtgatttacagggaaccttgggaggcattggaaaaaagcagttaagataggggaggagacagagaattggcccaggtctttgaagacaagagccaggaattttaatttgctatggtggacaatgagagaaacacttaattataccaagaaggatcatgaaattcactcattatcaaactgtctacttgtcagctcacctggtgagaataagaaagctgtttttaagtattttttagaaacacagatacaaacaatgaggtacaatcatttgcatgttaaatttgtaaacacttaaaagttatagtacttaatgctggcggggatacatctttacattatgttacaatataaattagtataacacttttgcaaagcaacttattaatacataaaaccattgaaatcttacgctctttgatccagtaattycacttccagcaatctaattcaaaatgtaaggcaagccacagttaaagattca

SEQ ID NO: 220585 - DNA, 288 bp, Homo sapiens
ataacctcttctgggaaggcttcctcaatacccttctcctattccatgtggagatcctgatctcttcccactgggctacctctttactgtgagtctgtgatgctgaatwataatttatttgttcacatttctgtctaccttcttgaagttaggaactgtgtcttactcctttctgtatccctgttgcccagtacaatgactgcctgattcccagtgggttttcaatcaagcttgtggagctgaaatattgctcagcagcataatgttcctatgaagtaatcagaagca

SEQ ID NO: 220586 - DNA, 531 bp, Homo sapiens
tgagccaggaaacaggacctgaatgaggactattttacaagaaggtttaaccaaaacaggaacttgattccaagacaattcttgtgaaagggatttattaggaagtgttcctagggaaagtccatagggggataaaggggaaagcatgattaggaaaggaagaaggcaaacaaaggtgcaggattaaggacagtctcttggagagaaattgtatcagttatatatttctgtrtaacaaactgcccaagcatagtggcttaagacaacaataaatatttattatgcctctgagtatacgtggattaatatttcatgagtggcttgactgggtatatctccctggaggtctctcaagttgttgcacttgagatgtcagctggggctgcagtcatttgaaggcttatctggggcaggaggatccacctccaaggtcactcactcacatggatggtaagttagtgctggctgttgtcagaagacctcattcctctccacatggacctctcccaggactgcttgagtgtcctcatg

SEQ ID NO: 220587 - DNA, 587 bp, Homo sapiens
tttcaaagcacataaatccatattttaaataatcattatattattgattcagtaacttaaacattttatgtggagtattgggtttttcttgtgtatatgatgwtacacttactttagtcagtttgccttattggctccacatatgtatggacatgctttatacagtgtagcaaagtgaacaagtctatgattgtgtgagaaaacttgatttttattgttaatcgcacaacttctggtttgagagtaaatggctataaaaagtaaacctacttaaatataaaattcttctatgattcacatgtttgagtttttccaaatagagtgccttacatttttaggaaaatttttagacatcccatgaaaattaagtgacttttcaaattctaaaacattaatttccatttaattcaataattaaagctctagaaactaaaaaatccaaatatcactaactataatatatatgacaaaatacttttgaaagtttgattttctgaagctataaattctagagtcctcttaaaaaacttttatattagaattacttttaataattatttggagtttttaagaaatgaaccattttt

SEQ ID NO: 220588 - DNA, 536 bp, Homo sapiens
tcattctcaggtgtggcataagatgagggcagcagctccaggggccacatcgaggacagtgctcagagttagaagatgggtggtttcttcttgtgtctcttgcttaggggagagataactttccccaaaactgctcagaaaacttttcctcttatgttcagaattcagtcatgaccatttgcaatccaatcattggcctgggatggtagttggtgggtagaattattatagttaacatagaccacagtgtcctctatggcaggggtccacaacccccgggccacagactggtacctgtscatggcctgttaggcaggaagtaagccaagggctagcgagcattactgtctgagctctgcctcctatcagatcatcagcagcattagattcttttagcagcaggaaccctattctgagctgttatgcagggatctaggttgtgttctccttatgagaatctaactaatgcctgatgatctgaggtagaacagtttcatccccaaactatccccacaccctaccctgccactccccac

SEQ ID NO: 220589 - DNA, 559 bp, Homo sapiens
ttgatgttttgtggatggctgttggctaatagaagaaaaggtgagaagactcagaataaattatccaagagaaggcaaggcaatagaacacaaaagagtgagatgtccctaaaacaatgtaggatagtcataatgcatattgaagaggcccagaaggatgtagcatccgagaaactattcaatttacctgctgggaagtgtttgataatctttccaagggagatttcaggagagagaaggagaaagcataacaaaagctcaggaggagagagtttattatagggaagtagagacagtggatattgctacgatstgttccattggtctgcccttcgatcaattcattcagcaaatattctttgagcatcctctatgagccaaaaacagggaagcaaagggatgctactttcaggaaacctgtgatcttctaagagagaaagaacaagctgaaaaataatgagcagaaagctgattaagataaagtatataagggacgcacaaactgctgaagtttgagaaaggaggaggttccttctgactagcctggtgaggaaggtga

SEQ ID NO: 220590 - DNA, 559 bp, Homo sapiens
ttgatgttttgtggatggctgttggctaatagaagaaaaggtgagaagactcagaataaattatccaagagaaggcaaggcaatagaacacaaaagagtgagatgtccctaaaacaatgtaggatagtcataatgcatattgaagaggcccagaaggatgtagcatccgagaaactattcaatttacctgctgggaagtgtttgataatctttccaagggagatttcaggagagagaaggagaaagcataacaaaagctcaggaggagagagtttattatagggaagtagagacagtggatattgctacgatgtgttccattggtctgyccttcgatcaattcattcagcaaatattctttgagcatcctctatgagccaaaaacagggaagcaaagggatgctactttcaggaaacctgtgatcttctaagagagaaagaacaagctgaaaaataatgagcagaaagctgattaagataaagtatataagggacgcacaaactgctgaagtttgagaaaggaggaggttccttctgactagcctggtgaggaaggtga

SEQ ID NO: 220591 - DNA, 545 bp, Homo sapiens
ttaccttttttaccttcccaccttttcctagtactaacagctgctgagtacrtctagaatgactgatatctcttgctgatcaatataataatgtattttatgggttattatttacaaaattatacaaatgaaagacatagtagtttactaatgaaagacatggttattattaatattatgctgtttctttcataacaagacatagttttattaactgtttttgcagctcaagttccttctctctttctcttgtatgtacaaaagcagatcatcctgagctaagtaacagggttgtttcaaatattcttagaaagttagaatcagctccaaagaacgctggccatgggtgcataatacctgattgggggaaattatagatataaagtctttgggcaaattcatgttttaagcgtgtggtatatgtacagactttagacttttgtcccattgtttaattcttaccttcctccaaccctcgtcaaagaaggaaaccctaaagttggactgaaaagcctcatatgacaagaagcatcttcaaatagaaa

SEQ ID NO: 220592 - DNA, 545 bp, Homo sapiens
ttaccttttttaccttcccaccttttcctagtactaacagctgctgagtacatctagaatgactgatatctcttgctgatcaatataataatgtattttatgggttattatttacaaaattatacaaatgaaagacatagtagtttactaatgaaagacatggttattattaatattatgctgtttctttcataacaagacatagttttattaactgtttttgcagctcaagttccttctctctttctcttgtatgtacaaaagcagatcatcctgagctaagtaacagggttgtttcaaatattcttagaaagttagaatcagctccaaagaacgctggccatgggtgcataatacctgattgggggaaattatagatataaagtctttgggcaaattcatgttttaagcgtgtggtatatgtacagactttagacttttgtcccattgtttaattcttaccttcctccaaccctcrtcaaagaaggaaaccctaaagttggactgaaaagcctcatatgacaagaagcatcttcaaatagaaa

SEQ ID NO: 220593 - DNA, 422 bp, Homo sapiens
ccctagcttgggaaagagaggggcatgcaagtacctcacctagtgggagactttgatcctgatagctctctgggcaaatggcagaacatcagaaagaaatgtctgagcatatctagggaggctggatcccaggcatgttggaacagtcttggcagacattcctatgccccacatatggcctatgagcgagttgcccttggacttcagaggaacaaacaggcttacacaatgaagacatccatgacgaccacactgtaatgaaggactagacacctttccatatccttcaggtatctcttaagcctctgggttctcatgggaccattaaagaaggagatgaaacctcaacaatgaaccaagacttaacatctcactastctggccaaatgtggtccttatattacttaagctgattgttttat

SEQ ID NO: 220594 - DNA, 621 bp, Homo sapiens
gataagtatgaccagcctaaagatgtagaggctgcctctcagagtcctgctcaattggcaatatagcaatagaaaatgcataaaaagtctgggctcagggactcatgcctgtagttccaggactttgggaggccgagatgggcagatcacttgaggccaggagtttgagactagcctgsgcaacatggtgaaaccccgtctctacaaaaaatacaaaaattaaccaggcgtagtggtgcatgcttgtaatcccagctactcagaagttgaagtggggagatcacctgagcctgggagttcgaggctgctgtgagccattactgtgccactgcactccagtctgggcaacaaagtgagaacttgtctcaagaagaaaagaaaaagtaaagaaaatgcatgaaaaacccattgtcatataataactgtgcatttaatattatcagtttatgggtttcaatgttattaattacaaaaattggagtaaaatacaggttttgctatttcaatgtcagatgcattccctggactatcaggcagaattttaatgtaatttttatataattttgataatgaccatatatacttgtaaaacatcatctctattttctctctgaatggact

SEQ ID NO: 220595 - DNA, 621 bp, Homo sapiens
gataagtatgaccagcctaaagatgtagaggctgcctctcagagtcctgctcaattggcaatatagcaatagaaaatgcataaaaagtctgggctcagggactcatgcctgtagttccaggactttgggaggccgagatgggcagatcacttgaggccaggagtttgagactagcctgggcaacatggtgaaaccccgtctctacaaaaaatacaaaaattaaccaggcgtagtggtgcatgcttgtaatcccagctactcagaagttgaagtggggagatcacctgagcctgggagttcgaggctgctgtgagccattactgtgccactgcactccagtctgggcaacaaagtgagaacttgtctcaagaagaaaagaaaaagtaaagaaaatgcatgaaaaacccattgtcatataataactgtgcattyaatattatcagtttatgggtttcaatgttattaattacaaaaattggagtaaaatacaggttttgctatttcaatgtcagatgcattccctggactatcaggcagaattttaatgtaatttttatataattttgataatgaccatatatacttgtaaaacatcatctctattttctctctgaatggact

SEQ ID NO: 220596 - DNA, 472 bp, Homo sapiens
tagctaggtctaaattttttttattttttattttacttatttaagtatttattttgagatggagtatcgctctrtcgcccagactcactgcaacctccacctcttgggttcaagcgattcttctgcctcagcctcccgagtagctgggattacaggcgcacaccaccacacccggctaattgttttctagtagagacagagtttcaccatgttggccaggctgatctcgagctcctgacctcaggtgatccacccgcctctgcctcccagagtgctgggattacaggcgtgagccacctcacccaaccctaagtctaaattctaataatcacctatactcctttctctcagcagcctttgccagatggaaacttctctgaggtacctgccccaggacttggagtctaggggagggatgatggcaatgaaaggtttcttttctcctgtcacatcttgctccagacgtcatctt

SEQ ID NO: 220597 - DNA, 472 bp, Homo sapiens
tagctaggtctaaattttttttattttttattttacttatttaagtatttattttgagatggagtatcgctctatcgcccagactcactgcaacctccacctcttgggttcaagcgattcttctgcctcagcctcccgagtagctgggattacaggcgcacaccaccacacccggctaattgttttctagtagagacagagtttcaccatgttggccaggctgatctcgagctcctgacctcaggtgatccacccgcctckgcctcccagagtgctgggattacaggcgtgagccacctcacccaaccctaagtctaaattctaataatcacctatactcctttctctcagcagcctttgccagatggaaacttctctgaggtacctgccccaggacttggagtctaggggagggatgatggcaatgaaaggtttcttttctcctgtcacatcttgctccagacgtcatctt

SEQ ID NO: 220598 - DNA, 566 bp, Homo sapiens
gcctgtgaatctttgcttgggtagttcrtttgaaacaggtcattattcttttcattaagcacagacaggtaagaatggtttcctgaaacatctggtttgcagcattggcctcaggctcctacattcatggtcataataaaatcaggctaaataaccacctctgcagtcatgctagagaaagggttttgcagaaaaacaagtaatgtagcaaaatagtgacaaatcagtaacaaaagaccaacctgactattgttgcctggctaatgggataaggtgattgtgattgtcatttcgtcatagtcaagaactgtcgctcattcattttcatatacacaacactttgaacagtagttgatatgttgttgttagtagaaagatgtttgttgagtgaataactcaaaaaaaaacagaggtatagcagtagcagcagcattctctgagagactgactgctcatttaaatattacaatacagtattagccatacacctaatatggaaaagtatgcaggggttccttgctattttgccacataaagatggtagtgggcagaattctacgatgacc

SEQ ID NO: 220599 - DNA, 537 bp, Homo sapiens
gaattctgagatttcagacataaagtcacatagaacagttgaaaggagtgtgtgcgcacgtgcrtgcgtgtgtatgtgtgggtgtgtgtgcgcacgtgtgtgtatgtgtatgtttgaagatgattctgaattagagagtactcagcagcattaaaccctcctcagatgtcagagtccaatattggcacatagaaagtgaagggaatatttgctgggactagatgattctaaattattcacgaaggctttgcaatcttgaatcctttaattccatcacatctctagtacaaaaggcaaagccaatgttttctggttatagattttgtaaaataaaatccttcggctgtgccaggctggtgaaactattttaatatgaggtatcagctgctgtatctattgcttcaattaaagcctaccactggagaaaaaccaggggaaacccaactccatgaaaaaaaaatcatgaacagaggcatttttaatctctggcttgctgttaagcttgtgggactgtgctttgggatttctatacaaaga

SEQ ID NO: 220600 - DNA, 350 bp, Homo sapiens
agcagcttctcttctgtgtcacttgcgtctctttctaaggaactgtctcttcatatgtctttcccattttcctttagtcttaagggtcaaaacaatttagagcacgctttagtcttaagggtgaaaacaattttcattcctgttttttcctgctaccttctttggctgtgaggagatggtgggacccagggaaygacatagcctatcaaaacagaagccttacatttacatagttaccagttttatttaaagaacttggacttcctcaactgtcaattagatctaatgactgatatttcatggtgtcaatccctccagtcaaagacgaccaggagcacggttgacaagtt

SEQ ID NO: 220601 - DNA, 322 bp, Homo sapiens
gttttccccccttccacttgaatgctaagaacttggatgtttagaatgagctcttcgccagcagaatgaaaagtcacttccatgatcatatgagtagaccaagtacagtaaactctgtgttttctaaccagcaaaatctggaaaatygtaattttttgattccccaggcaaaaatgtcaatctaataaataggctaactgaaatagggtagggtgactgtggtgaaatttaagttgttaagagatgcaatatgtattcttattgctaattttaaaaaaaatctcatgggtttttgtgagcaaaaatgatatatttgtgtaaa

SEQ ID NO: 220602 - DNA, 519 bp, Homo sapiens
tcattgtaaattactcatatcttcatttttttttcaatggccaacaaacaatagataatcaagaggaatttctgtttcagaggtaaaatgaaacctgaacatgttttaggatgggaggccctgatgttctctactygccttcataaataagaaccatcttatttgtaagcctgcctctaaaggggataagaagatagtgtgcctgatggatgccactggtccgtgtcccattcccaccagtgttgagactagtattcttttcttacacagggttacgatagcttaatttgttcccagaatttctctcttccctgccaagaatttcctgcgaggcactctttcagtgatgggaagtggagttacttctccttctatcccttcctttccgggttcttgcatttctaatggggatgcagtgtcagacaaacaactttgatcaatgcatatattgcatgctggaggatggcagtttagccctggggtgttctacctcggagctggcacttcacctgtgccctg

SEQ ID NO: 220603 - DNA, 519 bp, Homo sapiens
tcattgtaaattactcatatcttcatttttttttcaatggccaacaaacaatagataatcaagaggaatttctgtttcagaggtaaaatgaaacctgaacatgttttaggatgggaggccctgatgttctctacttgccttcataaataagaaccatcttatttgtaagcctgcctctaaaggggataagaagatagtgtgcctgatggatgccactggtccgtgtcccattcccaccagtgttgagactagtattcttttcttacacagggttacratagcttaatttgttcccagaatttctctcttccctgccaagaatttcctgcgaggcactctttcagtgatgggaagtggagttacttctccttctatcccttcctttccgggttcttgcatttctaatggggatgcagtgtcagacaaacaactttgatcaatgcatatattgcatgctggaggatggcagtttagccctggggtgttctacctcggagctggcacttcacctgtgccctg

SEQ ID NO: 220604 - DNA, 519 bp, Homo sapiens
tcattgtaaattactcatatcttcatttttttttcaatggccaacaaacaatagataatcaagaggaatttctgtttcagaggtaaaatgaaacctgaacatgttttaggatgggaggccctgatgttctctacttgccttcataaataagaaccatcttatttgtaagcctgcctctaaaggggataagaagatagtgtgcctgatggatgccactggtccgtgtcccattcccaccagtgttgagactagtattcttttcttacacagggttacgatagcttaatttgttcccagaatttctctcttccctgccaagaatttcctgcgaggcactctttcagtgatgggaagtggagttacttctccttctatcccttcctttccrggttcttgcatttctaatggggatgcagtgtcagacaaacaactttgatcaatgcatatattgcatgctggaggatggcagtttagccctggggtgttctacctcggagctggcacttcacctgtgccctg

SEQ ID NO: 220605 - DNA, 462 bp, Homo sapiens
gaattcaaggccagttggataattccayatccaaggcctgttggatatccataaccctgttggataattccatagcattgtgccactaaagtaatcacagagcttgtatatgcctacgtgagtgtgagtccatgaaaacccacacaggaaagcattttttgtttctccgttgcctgctcaatggttgttgcacagtaagggatgatgtgatggacagcccaggaaacccaatagattgccatccttcctttcttcttgagtggccttcattgctgcccctgctgagttgcttttgattcagtgagttactaccctttattacaaaaatctgagtgtggtaaaaaggaaacgcttgattttaagaattactggctgtcatctgtccaaatgcataacgattttttttaaatctcattgaattttttgtcatatttattttagatatctcttcccaaaactcat

SEQ ID NO: 220606 - DNA, 423 bp, Homo sapiens
aaagcagatggccacaatggtattaaaactaaagactgcagtaaagcttttaattgaaaacaattggaccctgctggatggtaattaccttggctgcttgcaaataatatcctgcccctgatgccatgaaagaaaagctgagacggagtraacaggatctgcttgatgtgcatctaataagcatggaagtccccaaactactttctctaggggtcctccagtaaaaagagttagaaatgaagaggagagcttgctgtagcacaaattgtaaagacaaagcgttcatttaaaaaacaaccgaatgggtccatatttacttggagaaaattggagttccataccttcaggaaaaaaaaaaaagatactttaaatgcttctttcttttctcagttaatgataaacgctaatgaggaagatgtctca

SEQ ID NO: 220607 - DNA, 395 bp, Homo sapiens
aaaatttaagcccagaatttgttaattttctgcctcaatgatctgtctaatgttgccagtagggtgttgaggtctctaccattatcgtatggctaagtatttttaaaggtctagaagtacctgttttatgaacctgggtayttcaatggtgggtgcacatatattaatgatagttaagtcttctgggtgaattgaattctctatcattctgtaatgcattcttttccattttcagcgttgttggtttaaagtcttttttaaacaagactctttatagtcttgtctggaaaagacgatttctcatttgcttatgaagtttagtttggttcagtggctttttcaaatgctgcttgctatcacggtgtattgggcatatgagccaacacactatcttc

SEQ ID NO: 220608 - DNA, 490 bp, Homo sapiens
atagaaattattacaatgaggagcttgagagaagcgactctggaaaagaaaaattgaatttatattctgtcactgattagttgtgtagatatagtcaagytccaatcatttttccctccatttttaaataacaatatctctatcagtggtttgtataataaatgtactaacacgcgttagcacttagaaaccaaaagagaataagctttcaaaactgtttaatttcttccattgcaaaatgaaacttctcaggctgattcaaagtgatgactcttggggttagctttctatttgctatttagaaagagaaggttaaatatattgttttaaaaactataaaatgttgcttaccttaaaccttagcctaggtttatattctgtttatctgtagcttcctcggttataaaggaagaaacagatgtgttaagatcactaaagtagttagagaaaaactaaataaattaatatcttacccaacaaacagtaatag

SEQ ID NO: 220609 - DNA, 546 bp, Homo sapiens
gaggtggtatcacactgtggttctgatttgcattgccctgagcattagtgatattgagccctttttcatatgtttgttggccatttgtatatcttcttttgagaactgtctattcatgtccttagcccactttktgataggatcgttcgatttttttcttactgatttgtctgagtttgttgtagattctggatattagtcctttgtcagatatatagattttgaagattttctctcactctgtggttgtctgtttactctgctgactgttccttttgccgtgcaaaagctctttagtttaattaggtcccagctatttatctttgtttttattgcatttgcttttgggttcttggtcatgaaatccttgcctaagctaatgtctagaaaggtatttccaaagttatcttctagaatttttaatagcttcaggtattagtttaaatttgtaatccatcttgagtttatttttgtataaggtgagacatgaggatgcagtttcattctcctacatgtggctagccgattgtcccagcaccatttgtt

SEQ ID NO: 220610 - DNA, 546 bp, Homo sapiens
gaggtggtatcacactgtggttctgatttgcattgccctgagcattagtgatattgagccctttttcatatgtttgttggccatttgtatatcttcttttgagaactgtctattcatgtccttagcccactttttgataggatcgttcgatttttttcttactgatttgtctgagtttgttgtagattctggatattagtcctttgwcagatatatagattttgaagattttctctcactctgtggttgtctgtttactctgctgactgttccttttgccgtgcaaaagctctttagtttaattaggtcccagctatttatctttgtttttattgcatttgcttttgggttcttggtcatgaaatccttgcctaagctaatgtctagaaaggtatttccaaagttatcttctagaatttttaatagcttcaggtattagtttaaatttgtaatccatcttgagtttatttttgtataaggtgagacatgaggatgcagtttcattctcctacatgtggctagccgattgtcccagcaccatttgtt

SEQ ID NO: 220611 - DNA, 546 bp, Homo sapiens
gaggtggtatcacactgtggttctgatttgcattgccctgagcattagtgatattgagccctttttcatatgtttgttggccatttgtatatcttcttttgagaactgtctattcatgtccttagcccactttttgataggatcgttcgatttttttcttactgatttgtctgagtttgttgtagattctggatattagtcctttgtcagatatatagattttgaagattttctctcactctgtggttgtctgtttactctgctgactgttccttttgccrtgcaaaagctctttagtttaattaggtcccagctatttatctttgtttttattgcatttgcttttgggttcttggtcatgaaatccttgcctaagctaatgtctagaaaggtatttccaaagttatcttctagaatttttaatagcttcaggtattagtttaaatttgtaatccatcttgagtttatttttgtataaggtgagacatgaggatgcagtttcattctcctacatgtggctagccgattgtcccagcaccatttgtt

SEQ ID NO: 220612 - DNA, 592 bp, Homo sapiens
tgctgttaatctgataggttttcctttataggttacctggtgcttctgtctcacagcttttaagattctttccttcattttaacttcggataacctgatgacaacgtgcctaggcaaagatcttcttgtgatgaatttccagggtgttctttgtgcttcttgtatttggatgtctaggtctatagcaagactggggaggttttcctcggttattcttccaaatatgttttccaagctttagaatcctcttctgtctgaggaatactgatattcttaggttggattgtttaacrtaatcccagacttcctggaggctttgttcatattttcttattatttttaccttgtctttgttgaattgggttaatttgaagaccttgtctttgagcgctgcattttttcttctacttgttaaattctattgctgagactttctagagcattttgcattgctaaaagtgtggccaaagtttcctgaatttttgattgtttttctttaagctatctatttccttgactatttctcccttcacttcttgtataattttttggatttccttgcattggaaaggtctctacctaattagcttaa

SEQ ID NO: 220613 - DNA, 393 bp, Homo sapiens
aagttcagtctgtgttatttaccccctcttcaagcagtcaatgaagaaggaattcctgtcgtaggttattgctaaacacacaacatctgagtcttgatagatgaccttgatggcagtttagtgatcatatatacttacagcctaggggaagaggaaaccacgttacacatagggacacatgggagctgctctctgggtcagagggaaccagacgagtctgtggacagcaacattcataggagtgctgcaggggtccatcccacagaccctgacccartgacagacaaataacgtacattgacacagatattctgcttgtcagtccggcttagggtccgggcccctcacggacaccaaggaaggtgttgtaaagagtagcagccatggcccaga

SEQ ID NO: 220614 - DNA, 366 bp, Homo sapiens
taattttctgagaaacactccaaccagctttatgtactttctacagcagtgattcagcccacaatcaaaacacaaacayaagttttgggtttgatagtacagaaataactaataccatcagccttctatatgattgtcccaatccatacatgaaatgttttcttatcttttagaacaagaacccaaatccactttttttctgacataagcataatattccagttggtttctccagatcctagtggcaaagaatccatatcagtggttccagaaattttaaatacttgtttctgatagccaaaccttcaatgactcacttcagccagggtagcagggcaatgattttacttataaaagcttatttga

SEQ ID NO: 220615 - DNA, 366 bp, Homo sapiens
taattttctgagaaacactccaaccagctttatgtactttctacagcagtgattcagcccacaatcaaaacacaaacacaagttttggktttgatagtacagaaataactaataccatcagccttctatatgattgtcccaatccatacatgaaatgttttcttatcttttagaacaagaacccaaatccactttttttctgacataagcataatattccagttggtttctccagatcctagtggcaaagaatccatatcagtggttccagaaattttaaatacttgtttctgatagccaaaccttcaatgactcacttcagccagggtagcagggcaatgattttacttataaaagcttatttga

SEQ ID NO: 220616 - DNA, 656 bp, Homo sapiens
tgtgatatttgctgttttaagaattttagcagtaggtgccactagtattttcacagtactctggaacaaaaaattaaatgaaaagccatttttaaaatattccctttcacaaagaaccagagaattcctgtcagtattctcaggaaaatgaacaacaattctatttttattattccttttaaatatagcacaactcttccccaaacatgatctcttttgcaagatcccaaagtctttcttacatccaaatgataccctccccccattascctatcctatgttttggatagaatttattctctttagagagtttatttgcaggtttccatggtaaatcaatcaaacatgtctggcctcagtttcttatttttactcatatctgtgatattctttttttttatactttaagttctagggtacatgtgcactacgtgcaggtttgttacataggtatgcatgtgccatgttggtttgctgcacccatcaactcgtcatttacattaggtatttctcctaatgctatcttcttaagaaaaaaaaaaaaaacagagacatatcaagctaaaccaaatgctactttagcttgttaggaggtacaataagctctaaagaatcaccaaatgatctataatataacatacaacacacacaacaca

SEQ ID NO: 220617 - DNA, 483 bp, Homo sapiens
gtgaggtaatatagacatgttaagctcacaaggacctgtgcaatagcattggtacctaaggaacactgagcaacaatgcaatttcagcaaatggcattacataaaattaatccttttgattagaatggttttttgtttttcttgtattcaatttacaaatttgcctttggttgtatagtttatagctgtaagaatttacagcctatgtttttataaatttaaaaatattacaataaaaataatttaaaaactctcagaatagagtagcttttatttaaatggcatccatacattactcttgagaaacatagttatatatttttctttaaaaatgtgggctttggttctaaaaaattaagatatctgaaaaataaaataattcccctacaaaaaggcaaattagtaagataatatctggaggcctcctatttcatagtttygactctgataatggaccaagaagtatccatatgtttggacact

SEQ ID NO: 220618 - DNA, 386 bp, Homo sapiens
aaagagcaggagaactggtgagcatgtgggagtgtgtgtatgagagagagaaaattataatactattttcttgtggtatttcatacatacatagaattaaaatgcacaaaacaataaaacaaaaggcaatagtgaggtacatggatgataataaattgttttaaagtccctattattgggggagagaaaaaaaggtgttcattttttcaaatgataataaaccacacagatatgygttgtaaatcctatggtagtcattaaacaagtaggaaaataatgtaaaactaaactttaataaaggagaaaatgcaataagtatacatgactcatgaaaaaggaaagaaagaactaatgaaaagaatataatagaggcagttcaaatagaa

SEQ ID NO: 220619 - DNA, 504 bp, Homo sapiens
gcactctagcctgaatgacagagtgagaccttgtccctcaaaaaaaaccaaaaaaaaaaacaaaaaaamcaagagtccagtagggccctctgacttttcctcctttagctcttccaaccattttgtaagcaccctctttctgcattaaaactctttatgagtcatatccctggagcagtttgggtttcccgtaaatgcagtaagacagcagaagcactgaaaaagaagtagagcttgtgggatcttgatacacagaccctcatgctcagctcctcatctgcattcatcgtcagcccaggaatggaaagggtaagaaacagcaagtctgcattgtgggaagagacagtgtttgggatcaggctttcaggtttgaattctagtctcaacacttactacttagtgaaccttggacttttgtttcctcagcctataaaatgaactaatacctcctctaaacaacttagattatggctatacagatttaatgagataatggatataaaa

SEQ ID NO: 220620 - DNA, 425 bp, Homo sapiens
ggttcatggtgtgtatataaagaccatatacttttgacctcagcacaagtgagcagctcagtgcaagtcaactcatcttgtggacttataggaagaccctctctcctgtccttcttcacaaacctatgaaaggccattctctaaattttaacaagtctcttcccttaccaataggtgaaagatttgtctcaatgtaatgtaatcccatgagattccagagtgaggaacatgctagtaaattccaaaagacttttaagttcttcgagaatgttaaaggaagaaattagcttcaagtgttaaaattatttgcaatgccagctttataaatttgtttttacatgctgccactctaaatmccccagtacattgttatttgggcagtagatactttatttgtgtgatgacctgtagtatgtcagatttta

SEQ ID NO: 220621 - DNA, 581 bp, Homo sapiens
ttgacttatctgatcctttactttctacattttaaattttcttccacccagccaactagcraatttggagctgcttagacaaccattctgctctaatacgaattatttgtatagaaagttaagatacctcagaaatccaagcctgactgttggatgtcgggcacacagccactgtgccactgtccatcaaaagcacacaaaaccagcaagaagccccacaggctttgatttcgaggtccttaggcaaatggtctcaattttgaaattatctcttcttaataggaagtactcacatagtgctgttatatgtcaggcatttgaatttatgtaatcctcacatcagtcctatctcatgtgtatcagttagctttgtgctgcataaaaaagggccttaaaatttagtagcttcaaactaactagatcatatgcctagaagacaatagcactgcatattattcactagtctgtgggtcagctggacagttctgcttatccagctagtgtattttctgcctgctaatcttggctgagctctgttataatttgtggggccttggctgggaccaatggaccgactcact

SEQ ID NO: 220622 - DNA, 581 bp, Homo sapiens
ttgacttatctgatcctttactttctacattttaaattttcttccacccagccaactagcaaatttggagctgcttagacaaccattctgctctaatacgaattatttgtatagaaagttaagatacctcagaaatccaagcctgactgttggatgtcgggcacacagccactgtgccactgtccatcaaaagcacacaaaaccagcaagaagccccacaggctttgatttcgaggtccttaggcaaatggtctcaattttgaaattatctcttcttaataggaagtactcacatagtgctrttatatgtcaggcatttgaatttatgtaatcctcacatcagtcctatctcatgtgtatcagttagctttgtgctgcataaaaaagggccttaaaatttagtagcttcaaactaactagatcatatgcctagaagacaatagcactgcatattattcactagtctgtgggtcagctggacagttctgcttatccagctagtgtattttctgcctgctaatcttggctgagctctgttataatttgtggggccttggctgggaccaatggaccgactcact

SEQ ID NO: 220623 - DNA, 573 bp, Homo sapiens
ctactgttgttgtcattttacctagtgaacgctgatgctctgggtcctcctaattggaggaaataatacatataaatgatatagagaagtttcaagggaaaataagataaaggaaaggaaactctgacaggttgggaaagggctgaggcagtctaggttagagagatgggctagattgatcctatgtagagagaggacctaaatagatcctaggcaacagaacaatsaattctgttcacatacatgctccaagtttttgttttgccttcccgcttactccccttatgggaataagggacttggctcgtttgccttgataaaaaatgtttttgtaggaactaagacatgatgcggtttaactggtcaataatattattttcattttctaaaattttcattttggatgtgctgataaagacgatgttattgctttgcatgaacagggccatcagaaaggcaaatatgtgtagttctcataacatcaaatttattcatttactatttattgagcactaactctgtggtaggcactgttttaaacacaaaggatatatcagtgagtacaagagtagg

SEQ ID NO: 220624 - DNA, 573 bp, Homo sapiens
ctactgttgttgtcattttacctagtgaacgctgatgctctgggtcctcctaattggaggaaataatacatataaatgatatagagaagtttcaagggaaaataagataaaggaaaggaaactctgacaggttgggaaagggctgaggcagtctaggttagagagatgggctagattgatcctatgtagagagaggacctaaatagatcctaggcaacagaacaatgaattctgttcacatacatgctccaagtttttgttttgccttcccgcttactccccttatgggaataagggacttggctcrtttgccttgataaaaaatgtttttgtaggaactaagacatgatgcggtttaactggtcaataatattattttcattttctaaaattttcattttggatgtgctgataaagacgatgttattgctttgcatgaacagggccatcagaaaggcaaatatgtgtagttctcataacatcaaatttattcatttactatttattgagcactaactctgtggtaggcactgttttaaacacaaaggatatatcagtgagtacaagagtagg

SEQ ID NO: 220625 - DNA, 582 bp, Homo sapiens
tgtgtattttattcaccactggatttagcaaagtgacaatcattggtgaaaaccatgagagcaatttaagtggactagtgctataaatagcaggattagtgtagattcaggagagaataagagtggtgaaatgagagagaaaatgaatgtgtgttgcaggaggcagggggttcttacttttgaaactttctctaacacacaacccaaacattcatactcttctgcaatctcagtttctataccccagtcaatgaagcaaaggcccaatactttagacaaaccagactactgacagctccccaaagccccatggttcttaatgcatctagccacagataagattttttttgctttcatttttcatgttagaaaggaaggaggaaaggagggagggaaagaaggaaaaaacaaaggagggaagtaaggaaggaaggaagataggaaagaaagaagataggaaggaaggaagaagaaagagaaataataactatatatttttggcaaatttctttttcacctacttccttccttaatctcatttaatgtttataacmgtcctttgaaatgggtattatttcttct

SEQ ID NO: 220626 - DNA, 686 bp, Homo sapiens
tggggcatgcttaagtaggagtcagaatattggtatgggtcagctctgccactaattagttaagagggtcacaccacctaatccctgagctcaagttctttgtcygtagagtatgaggcaggatgaatgaattctgaagtttttagtggggtgggaaatgaccttcttttctctacctttatgtacggttattcatttatatgtttttttcactgactttgtggtcaataaagtctattagagaagcttcctggaaattaggagggttagagtatctgccactccagagaaccaaattttgaaattctccctattctgagcatcctcttctttgaaggaaccaatcaaaaagttccagggacagctattagattgtaagccagcttgcaggagtttatgatagacattccaatcttcaacactggaaaggaatagcctttatgaatgtttagcaatagcaatttaattgcaccccaaaggaagttgcatttagcatctatacgcaatgacacgatgctgactgaaatggaattttactgtctcatcactttagtttaatatagtttgttttccctgccatgtcttcttatttcaagcttcaaaataaggtgggtagacagttctataggcagttttcaatcatgttgtctaggccatccattttccatttaacagagaacagttca

SEQ ID NO: 220627 - DNA, 622 bp, Homo sapiens
ctggcctcctgtgactaaacgtcttcacatagcagacagttcattcaaaaaattggacctagaattgctgatatgcctttctctttcaatgcccaaagtccccttaaatttttgactgaaatgttgtattgagatagagaaatggatctttattccagatgtttaaacagtctttttaggccttcatagggtttttcatagacatttattgttacttttataagtgccatttaggctgcttatgattgagaatgtaaattctcccagcccaaatttaagaccaaatataaggacttttattgaagaattattgattcttcttgtttctgtctccagcccacttctctgccacctcaaaatagtttttatttcagagagttaatcgtgaaatgtattaatcatgaattgaatcaagccatgtgatctccatgctgatatgaaggagtataaaaagcctatcraacacagtattaagtcaatcaagggacagggtaataaagtgtgtaagaggtgaagctggagagtaagacaaatgtgcgttggactgagttgcaaattggtcactttttagttgtgtgatcttgattaaggtatttcattccttcaagtccacttaccacac

SEQ ID NO: 220628 - DNA, 558 bp, Homo sapiens
aatcgcacccctttttatgggaggaagtacagatttttgattcctgagtcctgttaatacaagtagcacctcagactttacctagattgatatccctctttctccatttctcagcttgcaaaatggagtgggcaattgtttaaggggaaaagtgtatgtgctttcaaattccagttcacttctcattagtgaaawctgtggattggtgaatacaattaatctcctgaattatactttgcaaaaacaaccaacactttttcttagacacaatacaatgcaatttcatactaaagaaagaatgttacctattagcataatcatgcccattattttaataacaataaatggatattcattatccatttttgtgctgagaatcatttggtgttttattcctttcctatagacctgaaggtatcaaaatgctacagcagtagtaaatagtaatctttgttgttagagaaagaggcaatggttttgattacattctggtttgaggtaatctgattgtgatagcatgtttggtgagaaatttgtgatcaatttctttctaacatt

SEQ ID NO: 220629 - DNA, 558 bp, Homo sapiens
aatcgcacccctttttatgggaggaagtacagatttttgattcctgagtcctgttaatacaagtagcacctcagactttacctagattgatatccctctttctccatttctcagcttgcaaaatggagtgggcaattgtttaaggggaaaagtgtatgtgctttcaaattccagttcacttctcattagtgaaaactgtggattggtgaatacaattaatctcctgaattatactttgcaaaaacaaccaacactttttcttagacacaatacaatgcaatttcatactaaagaaagaatrttacctattagcataatcatgcccattattttaataacaataaatggatattcattatccatttttgtgctgagaatcatttggtgttttattcctttcctatagacctgaaggtatcaaaatgctacagcagtagtaaatagtaatctttgttgttagagaaagaggcaatggttttgattacattctggtttgaggtaatctgattgtgatagcatgtttggtgagaaatttgtgatcaatttctttctaacatt

SEQ ID NO: 220630 - DNA, 485 bp, Homo sapiens
ctgaacttccacaaatgttagggacaggcctgaatagctaacttttttcttttatttcaagttgacttaatattataaaaaacattttattttttcctttaatagagtcaagtatacagtttctgttttcatccagtaactttagcagagactttttctctctgctagtgaaagagaggactcaggtttagaggaaatttgctttttcagaacatttgatcttcgtaacacatcaagatgtatttagagaaaagaamacacggacttagtactatttataaatagcttctttacccttactcctaaattaaaacaaaactaaaacctaggaaaagcacttgcattatacaaaatttatactttagctatttctacatttaaaaataaaataatataaatcaccaattttacgttttaagcaaaagtgtattctcaaactttatattattcagcaatacctattactctccaagtatatgcatgta

SEQ ID NO: 220631 - DNA, 594 bp, Homo sapiens
atgtgttatcactgtgttggcatgtgttatctcattcaagatgagattttttttctggtgcttgatatgctgagtaattttcaacgtatctagggtaatttggatattatgctatgaggctctgtattttaactcttggaaataaacctcctgtgacaccacacatggtgaaagtgggggtgccttgttattgctaggtggtgataaaaatttatccctgctcaaccacctttggagagtgggggatttttttcttgtttctgctcccactatggcctacactgaagggaaggcaaacatcaggaggccttggacctttttaccactagatgatggtgaaagttccaacttctcacttagtttactttgacacctaaggaatctggtggagaaggacggggcacattgtaactacctggcagagaagaaagttctagattcccacayggccttctctgatatcacccagacattgataggcggcagggcctgttagtttgtgtgtgtgtttaaattacacattaccaatagtatcactttgcataaacctatactaaactaaaagcacggaccccacagaagatatgtaattaa

SEQ ID NO: 220632 - DNA, 449 bp, Homo sapiens
attaggattattttctctcttctttccatgtaatgtacaattcatgtatccatcaaaaatagatgagtggtcattgtgtgacatctttcacttaatagaaaagactaggtcagaaaagagaaaatgtccttcacaagaccaakactaagttggctcaattttcctgatagcttatttgctacaagaattctgatataattctgtatttacaggctcattctctctctcacacaatccacaggcatacaaagtgtgtgtgtgtgtgtgtgtgcacatgcgtttgacaaagagagagagaaaaagacttgaataactgtttcttatgagaattcatttgtggtaatggttgctacttgtatttctataaagattactcctagtaatgattgaaaaacaggacatatgttaattaaatgttcagtgactttatagttaaatatacatataat

SEQ ID NO: 220633 - DNA, 449 bp, Homo sapiens
attaggattattttctctcttctttccatgtaatgtacaattcatgtatccatcaaaaatagatgagtggtcattgtgtgacatctttcacttaatagaaaagactaggtcagaaaagagaaaatgtccttcacaagaccaagactaagttggctcaattttcctgatagcttatttgctacaagaattctgatataattctgtatttacaggctcattctcwctctcacacaatccacaggcatacaaagtgtgtgtgtgtgtgtgtgtgcacatgcgtttgacaaagagagagagaaaaagacttgaataactgtttcttatgagaattcatttgtggtaatggttgctacttgtatttctataaagattactcctagtaatgattgaaaaacaggacatatgttaattaaatgttcagtgactttatagttaaatatacatataat

SEQ ID NO: 220634 - DNA, 449 bp, Homo sapiens
attaggattattttctctcttctttccatgtaatgtacaattcatgtatccatcaaaaatagatgagtggtcattgtgtgacatctttcacttaatagaaaagactaggtcagaaaagagaaaatgtccttcacaagaccaagactaagttggctcaattttcctgatagcttatttgctacaagaattctgatataattctgtatttacaggctcattctctctctcwcacaatccacaggcatacaaagtgtgtgtgtgtgtgtgtgtgcacatgcgtttgacaaagagagagagaaaaagacttgaataactgtttcttatgagaattcatttgtggtaatggttgctacttgtatttctataaagattactcctagtaatgattgaaaaacaggacatatgttaattaaatgttcagtgactttatagttaaatatacatataat

SEQ ID NO: 220635 - DNA, 449 bp, Homo sapiens
attaggattattttctctcttctttccatgtaatgtacaattcatgtatccatcaaaaatagatgagtggtcattgtgtgacatctttcacttaatagaaaagactaggtcagaaaagagaaaatgtccttcacaagaccaagactaagttggctcaattttcctgatagcttatttgctacaagaattctgatataattctgtatttacaggctcattctctctctcacacaatccacaggcatacaaagtgtgtgtgtgtgtgtgtgtgcacatgcgtttgacaaagasagagagaaaaagacttgaataactgtttcttatgagaattcatttgtggtaatggttgctacttgtatttctataaagattactcctagtaatgattgaaaaacaggacatatgttaattaaatgttcagtgactttatagttaaatatacatataat

SEQ ID NO: 220636 - DNA, 525 bp, Homo sapiens
ttaattaaatgttcagtgactttatagttaaatatacatataatgcacattccaagtttttaaaaaaataacaatcaataaatagctaaatgttttaaatcataactggtcagaatttagttgttaatattcagataccatttcagtatcgtgtagagtcattatgaatatcatttgtctgcagtactctgaagataaaggtggtaaaacatgtgttwgtcaatggtctacctgttatacagccttttaaaacaaatccttggcatgagattgtcatttgtctgtttctcataaaagctgagtgtagaacatcctaaaaatccagttcagcttttttattcttgttacatttctgcagaattttaatataactttccttttgtgtatttatgcctactgtttctatttacttacgggtggcctgaattttttatccagagataaagttaatgcaagaaagaatttaaaaatgtatggtagattatcaaaattcttaacttaaaaaaaggtcaaatccacctttgc

SEQ ID NO: 220637 - DNA, 527 bp, Homo sapiens
aaaacattggcataggaatcattctcttttacacagtttgaaaatgaattttaatgacactcatatctgataaataatataatgtcatggagtaaaagttattttcttgatataaatattttatcatttgagtatattctccctgaaatctargtgtcagtttaacaaaatgcatttctcacttcactgaatatgactccaggataaataaaaaagaacattcatattcaaaaaaagtaatttatttacctagtttatcccaagatttatactgtcaatgccttcattacaaattaagggctaaaatatatagtaagttcctgaagctctaccaaatgttatctatactaagtagaactaaattaaatcattgtgttaactttttattcctattaaaggatttagtcttcttctagtttagctataataacaaaagcaaatgtacatccctggtttcttgccaattatagcttggtcacacctgcctaagtagtgttttataataaatacatggtaagtaaattagt

SEQ ID NO: 220638 - DNA, 581 bp, Homo sapiens
accaggaacccactgagaggaatgaataactccagacgtgctgccttaagagctgtaacactcaccgcgaaggtctgcagcttcactcctgaagccagcaagaccacaaacccaccagaaggaagaaactccgaacacgtctgaacgtcagaacaaattccggacacaccatctttaagaactgtaacactcaccactagggtctgcagcttcattcttgaagtcagtgagaccaagaacccaccaattctggacacgttaatagaatagtcccagttcatccttcatatcttttgtaacataaccatcaggcatttcacttacccacatsctgtaattgcccaaaacatttactaatattactttaaacaaacatgtagtttaaaaagatttacaataagaaaaataaaaaattttttttcctttttcaacatacttgctttcttattgtaaatacaggtttctgatctatatcactcttctcctccatgaataacctcttttaacacatttgcaggaaagttttctggcaatatattccgttagtgttttattgtctggtaaattctgatttcccctct

SEQ ID NO: 220639 - DNA, 563 bp, Homo sapiens
gggcctatgtcttaggttatgacttttacgagtgttttgccagtagtttatcttttgtccctattacaggactgccagattcatatgcccactgagcagcaatagaccaatacactgagacatcataatttgcagcagaaaaagagtttaataatcacaatgccattgggcaaagagatgaaggaatcctcaagcttcacatctgtctgcttgaggggttctgggccagggtttttaaggggattgtggcgggtgaggttctggagaattggggttgtcaattgctcaggtcaaggaagattaaatcatcatgatgtgaaaactgcattcttctgtgagtcggctccttgctgggaccttcagatcaactggcatcaacaattttatcagtatgcgtaacataaaggagaaactcaaacagaaagcatatcatctcatgtgccttagatcttatctatagaaaagaaaaggaacacaktcttgtgacaagggctacactatcttgggggagtaagaagtaactagctacaaggaagtaggccaaattgggaagtggatttcat

SEQ ID NO: 220640 - DNA, 509 bp, Homo sapiens
aaccagtttatagaggaacataaatgacctgatggacctgaaaaacacaacaccagaacttcacaatgcaaccacaagcataaataactgaatagaccaagcagaggaaagaatctcagagctcaaagactatcttgctgraataagacaggcagataagattagagaaaaaactgaaaaggaatgaaaaataatcagagaactatggaattatgtaaaaagaccaaacctacaactgattggggtacctgaaagaaatgaggagaatgaaaccaagttggaaaacatacttcaggaaatcattcaggagaatttccccaacccagcaagacaggccaacattcaaattcaggaaattcagaggacttcagtaagatccatgagaagatcaacccaaaacacataattgtcagtatctccaaggtcaaaatgaaggaaaattgttaagagccacgtcacctagaaaaggaagtccatcagaataacagtggactcctcagcagaaaccc

SEQ ID NO: 220641 - DNA, 615 bp, Homo sapiens
ttttaaaagtgacttacgtatttttctcacaagggaggatgattgtagaggagwttagagcctgcatcgtggttccaagttagcatcaccgttcctggtccttccatctttctgcttagtcatatttaacttgtgtttatttcttcatgatcagaatatgtgtctttctcaactatcatatgtatgttctaggtagaaaggagaaaaacaagaatttatgttgttctgtcaaattatagaaagtttatttgataataaatcaactgttaaaaagtaccccttaaaagtatagtaagtatacaatattaaaagaaagcatgggactttgcacaattgtgaaatctattgagaattttgtaagtttttaaattttgatctgtgctgtcatttattaattcagtcaaaatttgcttcaaaaacacatagttgtcagaatatgtaagtgccttacaagagtgcaatctataagtaaaataattctgaatattcatctgaaatagtttgaaaaggttttgaaaatctactgtctctcttatttcttgtaatcaacatatttctcaataggaaaattcaccatttgccatcaaaatgtattgtctgaaacttccactggaa

SEQ ID NO: 220642 - DNA, 615 bp, Homo sapiens
ttttaaaagtgacttacgtatttttctcacaagggaggatgattgtagaggagtttagagcctgcatcgtggttccaagttagcatcaccgttcctggtccttccatctttctgcttagtcatatttaacttgtgtttatttcttcatgatcagaatatgtgtctttctcaactatcatatgtatgttctaggtagaaaggagaaaaacaagaatttatgttgttctgtcaaattatagaaagtttatttgataataaatcaactgttaaaaagtaccccttaaaagtatagtaagtatacaatattaaaagaaagcatgggactttgcacaatkgtgaaatctattgagaattttgtaagtttttaaattttgatctgtgctgtcatttattaattcagtcaaaatttgcttcaaaaacacatagttgtcagaatatgtaagtgccttacaagagtgcaatctataagtaaaataattctgaatattcatctgaaatagtttgaaaaggttttgaaaatctactgtctctcttatttcttgtaatcaacatatttctcaataggaaaattcaccatttgccatcaaaatgtattgtctgaaacttccactggaa

SEQ ID NO: 220643 - DNA, 582 bp, Homo sapiens
ccgttcctggtccttccatctttctgcttagtcatatttaacttgtgtttatttcttcatgatcagaatatgtgtctttctcaactatcatatgtatgttctaggtagaaaggagaaaaacaagaatttatgttgttctgtcaaattatagaaagtttatttgataataaatcaactgttaaaaagtaccccttaaaagtatagtaagtatacaatattaaaagaaagcatgggactttgcacaattgtgaaatctattgagaattttgtaartttttaaattttgatctgtgctgtcatttattaattcagtcaaaatttgcttcaaaaacacatagttgtcagaatatgtaagtgccttacaagagtgcaatctataagtaaaataattctgaatattcatctgaaatagtttgaaaaggttttgaaaatctactgtctctcttatttcttgtaatcaacatatttctcaataggaaaattcaccatttgccatcaaaatgtattgtctgaaacttccactggaaccttcatatggcaaaatatttaggcattctgaggagatgcaaagtttgctaagca

SEQ ID NO: 220644 - DNA, 609 bp, Homo sapiens
taatggaacttgttccaaaaratcaaatgtggttatgcattggtatgacaattctgaatcctgcactcaggcagcatctgaacactgttttattagctatcaataaattgtctgcactgcaggccgatgatggtttaaggacagcagtgttaataataatgttcaaagtgtcagtctggaggggaggcaataattgactgtatgagactattaagctataaaaacaatgttttattttgagcatcaaaatatgatagacagagcttcaaatgctcttggtgaagtcattattaacacatacaaaactgattttcattcaacatttactgtagagaaaattatattccatcaggctttaaaattgagaagaaaacagaaagagtaagtcttaaattcctttcttcctcaccttcctccttcacctagtttgcctgcggacctacactgttacattcccacatacctcctgtgtgtatttctttgcagatcatttaccttacatttctacatttccccttaattttttcctcatcaatagatgagaaaaaaaatttgttaaatcatggtagatgaatatggaccagatcatcccatgaactacgttcaatc

SEQ ID NO: 220645 - DNA, 609 bp, Homo sapiens
taatggaacttgttccaaaagatcaaatgtggttatgcattggtatgacaattctgaatcctgcactcaggcagcatctgaacactgttttattagctatcaataaattgtctgcactgcaggccgatgatggtttaaggacagcagtgttaataataatgttcaaagtgtcagtctggaggggaggcaataattgactgtatgagactattaagctataaaaacaatgttttattttgagcatcaaaatatgatagacagagcttcaaatgctcttggtgaagtcattattaacacatacaaaactgattttcattcaacatttactgtagagaaaattatattccatcaggctttaaaattgagaagaaaacagaaagagtaagtcttaaatkcctttcttcctcaccttcctccttcacctagtttgcctgcggacctacactgttacattcccacatacctcctgtgtgtatttctttgcagatcatttaccttacatttctacatttccccttaattttttcctcatcaatagatgagaaaaaaaatttgttaaatcatggtagatgaatatggaccagatcatcccatgaactacgttcaatc

SEQ ID NO: 220646 - DNA, 570 bp, Homo sapiens
gtgtgtatttctttgcagatcatttaccttacatttctacatttccccttaattttttcctcatcaatagatgagaaaaaaaatttgttaaatcatggtagatgaatatggaccagatcatcccatgaactacgttcaatcattggtttttacctttcaaaaaattctgaatgaaatatgtaataatttaatattctaaaactttattttttcaggaatatttacatatattcacccttccttctaaaacagtggccagagcagttagaaaacaaaagcatgagaaacagtaactcttacagttgtattatgcctgtatgcctycccagttctgcaaagattatgaggatttttttaggtctgtacatagttttaaaatatcctaaaacaatccacataaataaactcattaccataataatctgcaagatagacattgtcatcctcaagtaatatcaaataaatcttatttgcctgcaagatctgaatctgaaaatcccaaagctcaagtttacctagctaataggtagtaagactggggcctcaatctggtttatctaattctgaaaa

SEQ ID NO: 220647 - DNA, 404 bp, Homo sapiens
ttgcttcactgcagtgcctgaacatagtargcatagtagattcaataaatctttggttccttggctggttgttgcctgctctgtgctgatgagaaaggagccaggcttccaggattcccttggtgttcttggctccctgctctgtctacctctcccctgcctctatggtaccttcccaggactgtctttgggctgctgcttgcattgatagggtctcttcttcagggctgaggaggctggtcatgggataatgagacccctatacgatgctgcatgggagctggagttggatgggggccagtggaatatccgcgcaactctgcatccccctccatctactcatccctggttttgtttctctggagtaaggaatagagcaaggactgggatgggtgagccatgaa

SEQ ID NO: 220648 - DNA, 404 bp, Homo sapiens
ttgcttcactgcagtgcctgaacatagtaggcatagtagattcaataaatctttggttccttggctggttgttgcctgctctgtgctgatgagaaaggagccaggcttccaggattcccttggtgttcttggctccctgctctgtctacctctcccctgcctctatggtaccttcccaggactgtctttgggctgctgcttgcattgatagggtctcttcttcagggctgaggaggctggtcatgggataatgagayccctatacgatgctgcatgggagctggagttggatgggggccagtggaatatccgcgcaactctgcatccccctccatctactcatccctggttttgtttctctggagtaaggaatagagcaaggactgggatgggtgagccatgaa

SEQ ID NO: 220649 - DNA, 469 bp, Homo sapiens
aacaaggactacataggcagggccttggccattgcaaggactggctctttttcaccccaaagacagctgagcctgagagggtgagaggtgctgagtgcagttgagttgaaggccacctgcatgccttgaccctcatccaagtatttctgagcctcccctcaccccaggacccagcccaggcaacaggtggaagatgcttttcttctgggacctcagaggygagtgggtgggtggggaggaggaggtcgaggggggacagctgccccaagggagaggctgaggatggagcagggagggcactgaagtgggctgggtggaggacagggggctggagggtgagaagagggtggggtacttaccgcctgtgcccagatgcttgaaccatgttttgtccttcagatttgtagatgctgaggagccaaagagaggtcactagggctggaggacacagaacttggccccacacttc

SEQ ID NO: 220650 - DNA, 570 bp, Homo sapiens
tctcaaaaaaaaaaaaaaagaaaagaaaaaaaaaaaccagaaaagaaactcagtgtggctggaggagggagagcagggggctggagtggggaggccagaaagctaacaaggactacataggcagggccttggccattgcaaggactggctctttttcaccccaaagacagctgagcctgagagggtgagaggtgctgagtgcagttgagttgaaggccacctgcatgccttgaccctcatccaagtatttctgagcctcccctcaccccaggacccagcccaggcaacaggtggaagatgcttttcttctgggacctcagaggcgagtgggtgggtggggaggaggaggtcgaggggggacagctgccccaagggagaggctgaggatggagcagggagggcactgaagtgggctgggtggaggacagggggctggagggtgagaagagggtggggtacttrccgcctgtgcccagatgcttgaaccatgttttgtccttcagatttgtagatgctgaggagccaaagagaggtcactagggctggaggacacagaacttggccccacac

SEQ ID NO: 220651 - DNA, 564 bp, Homo sapiens
tccccaggggagaagccctggggcagctcctgctagtgccactcccttaacccagccaaggaacagggagggaggagcggtgctcagccaatgaggcgacgccctggagccccaccccacccatgctggccccaggaccccaaccccaggccagaccctccagtgctcctgctgaccttccctgtctgcagcccagctttggactgtggagatgccctcagcctctactcagtggctccagcctcatatttgcgtgctatacctttaacctcaagttctcttgctgctaacttaagctgtgactgtccaggacckgcacacacacatacatgcacgcatgcacacacacacacacacacacacacacacagaaggtgaacacacaggatgaggccctgaaaactcatttcacccgtgtacctcacccaaaaattcccctttgtactcctatctttatctctaacagacagcatgaaggtagcccgaagtcccctcaccctgtctgtcctcctgattctctagcccagttccctctagctccagcacagactcttatctccagcc

SEQ ID NO: 220652 - DNA, 589 bp, Homo sapiens
gctggccccttttctattacattcttacccagtaactcatactttccctagagctcttgcaagaaagaactattgagaaagtagcccatctgaaagtacatttcctgctgtttatctgcytccagaactggctgaagtttactttttggttctccagagacctagcttcttccaatgtggtctatttaatctcctgtcatgtgggaaattatattcaaaatctccatgatcctctgtccatagtaagttatgcatgtagtgagaagtacatgccacaaggtcttgagattatatctgcaatgtgttgctgctggctgttgatcaagataggctgggagaagatcattttcaggtgtgaaaaactgtcacctttatcaaataattcttcttgcatatttcccaagacgttgtagcctgtctaaacttgggaggttaattttgtagcattcattatgaccgaaaatgtagttcacacaatcatgatgctctctttattaggtgttactgttaaacaatattaaaatacacacaatgtggctggtcttttgtaagctacatggcatgtttacttctttgccaggtttcttaa

SEQ ID NO: 220653 - DNA, 624 bp, Homo sapiens
gtaattacttttaataaaataaatcattattagctaatgttccacccctaccactccaatctcattctccttctaggtcccccaggcccaattgctaaaataaatttgttgtacactttaaagtcaattttctatacgtttgcacataaatatgtgcattcgtagaaastatttttgtgccgagaaggtagaataagcccttcaaagttgttgatgttcagattccagttggcaaaagtcttacacatgtggcattaaatattttcagtattaaacatgcacattccacaagttcagcagttctgtaatatacatccagagtctgccctgagggatgcttacaaccttagtataaactctcactcaccccttttagagaataaaacttacacctatgtaatgaccagtccaggtacaagggtgtcctctgagaacattcaggagaaagagtggtggcatcggcaggaaagtgcagtggaaaggaggagctgactttggcaggaaaaagaacgatattactttgaatttatcaacactgacgtaacatcctgataaaaagtgccatatccaaatcacgttgaagattctcaaaggacagtaccaaagttgaataaaaacacagtg

SEQ ID NO: 220654 - DNA, 514 bp, Homo sapiens
tcatatatggttgtttcactagctctaatcttatgtacagtttttagtcagttgacagccatataattcttagttttatatactgatagtcattagaaattacaaattttaaaaaatattcatgtctcattctacgaatcaatstaaaaatttcattcacttggttatatttcttcattttacctggccttgactacttctttcctgcccagcattaaatttaattaatgtctaatttgtttacttggtttagttattttggccatgttcagtacacttgttatgaagcaggcatgtaggaatgttgacaagtttatggtcctcactcttccaaatccctaatggcggcaccccaacagacacataccacaatgtaaatacatacacatacacacaatccacacccacccatactcacccacgtacacacagacacacacacacactccagtggatcaacacataaaacactccacaggcaggcatcgtacagcagggatctcttagtgcacta

SEQ ID NO: 220655 - DNA, 553 bp, Homo sapiens
aatttcgctgtttacactgtgccttggtccagtaaccctgcactgcacatatacactttaaattggtgccttggggaaccacttcggtatttcttttttttttttcttttatgttgtaaacctttcttgtaaaaataaacaaaaaacaaaaaaaagacaaacaaacacattagactatgtcaacatgaggtcaggataatcaatattactgtctgaacctccacatcttgtcccactgaaaaggcttcagagataattacactcatggagttgttatttcctatggtaatgatgcttctttctgtaatacttcctgaaagatttgcttgaggctattgtacagatttaactgtttttccataagtagaaggggtaattctaatgataaaaattgtartatataaaacaaataaaccagtaacagagtttatcattatctaatactatgtactgcacacaattgtatgtgtactttagtatcactgaaagaagagcaaatttgtttacaccatcatcaccacaaacagtagcaatacattttgctacaatgtta

SEQ ID NO: 220656 - DNA, 553 bp, Homo sapiens
aatttcgctgtttacactgtgccttggtccagtaaccctgcactgcacatatacactttaaattggtgccttggggaaccacttcggtatttcttttttttttttcttttatgttgtaaacctttcttgtaaaaataaacaaaaaacaaaaaaaagacaaacaaacacattagactatgtcaacatgaggtcaggataatcaatattactgtctgaacctccacatcttgtcccactgaaaaggcttcagagataattacactcatggagttgttatttcctatggtaatgatgcttctttctgtaatacttcctgaaagatttgcttgaggctattgtacagatttaactgtttttccataagtagaaggggtaattctaatgataaaaattgtagtatataaaacaaataaaccagtaacagagtttatcattatctaatactatgtactgcacacaattgyatgtgtactttagtatcactgaaagaagagcaaatttgtttacaccatcatcaccacaaacagtagcaatacattttgctacaatgtta

SEQ ID NO: 220657 - DNA, 534 bp, Homo sapiens
tgtgtctctttacagaaggtcacttttgttctccaggtggtctgatcttctactccttctttttccakgttttgtttttatcctcactgagcgccagttccagatttattgcttacaattctttcatgctccttcctttgtatggaagcattcctcaaattattcttagttgtatttaccaactgttttctgttgaaattctgactaatccagaatataaaactttttagagtccagtcattctttgccatgttctgtttccccccatctctgtggctatgaaaacatgtatcaaatattttacctgactcgcaggaaggggaagtcccactgctttgcctgttttggataggtagcatcagttaaactaaacctttcataaactactgatacatcagtggtttcttgttacatagaatgaacagtattcaccagaataacatcctgactagcaaacacatcaattgccactcgatgttctaagtgttatgagtaaaataaaaactgaataaagattttgccctcaggatgttt

SEQ ID NO: 220658 - DNA, 534 bp, Homo sapiens
tgtgtctctttacagaaggtcacttttgttctccaggtggtctgatcttctactccttctttttccatgttttgtttttatcctcactgagcgccagttccagatttattgcttacaattctttcatgctccttcctttgtatggaagcattcctcaaattattcttagttgtatttaccaactgttttctgttgaaattctgactaatccagaatataaaactttttagagtccagtcattctttgccatgttctgtttccccccatctctgtggctatgaaaacatgtatcaaatattttacctgactcgmaggaaggggaagtcccactgctttgcctgttttggataggtagcatcagttaaactaaacctttcataaactactgatacatcagtggtttcttgttacatagaatgaacagtattcaccagaataacatcctgactagcaaacacatcaattgccactcgatgttctaagtgttatgagtaaaataaaaactgaataaagattttgccctcaggatgttt

SEQ ID NO: 220659 - DNA, 534 bp, Homo sapiens
tgtgtctctttacagaaggtcacttttgttctccaggtggtctgatcttctactccttctttttccatgttttgtttttatcctcactgagcgccagttccagatttattgcttacaattctttcatgctccttcctttgtatggaagcattcctcaaattattcttagttgtatttaccaactgttttctgttgaaattctgactaatccagaatataaaactttttagagtccagtcattctttgccatgttctgtttccccccatctctgtggctatgaaaacatgtatcaaatattttacctgactcgcaggaaggggaagtcccactgctttgcctgttttggataggtrgcatcagttaaactaaacctttcataaactactgatacatcagtggtttcttgttacatagaatgaacagtattcaccagaataacatcctgactagcaaacacatcaattgccactcgatgttctaagtgttatgagtaaaataaaaactgaataaagattttgccctcaggatgttt

SEQ ID NO: 220660 - DNA, 534 bp, Homo sapiens
tgtgtctctttacagaaggtcacttttgttctccaggtggtctgatcttctactccttctttttccatgttttgtttttatcctcactgagcgccagttccagatttattgcttacaattctttcatgctccttcctttgtatggaagcattcctcaaattattcttagttgtatttaccaactgttttctgttgaaattctgactaatccagaatataaaactttttagagtccagtcattctttgccatgttctgtttccccccatctctgtggctatgaaaacatgtatcaaatattttacctgactcgcaggaaggggaagtcccactgctttgcctgttttggataggtagcatcagttaaactaaacctttcataaactactgatacatcagtggtttcttgttacatagaatgaacagtattcaccagaataacatcctgactagcaaacacatcaattgccactcratgttctaagtgttatgagtaaaataaaaactgaataaagattttgccctcaggatgttt

SEQ ID NO: 220661 - DNA, 593 bp, Homo sapiens
tatttgaactgagtatccctgtgattgacaggatgaaatgtttatgaaatagatcaatattgctcattgtgatattcatcattgaataattatatttttattttgtcaattctgagttatttggaaacaaaaatccacagaatgttaccttatataaatatgttaatacattcttgattattaataaatctgttactacaatgtcatatcctctcagtaataaaagcatatttaatttatgcttttatccattagaaaacagtgaagctagaaattatttaaaattttcccctaagaaatatgtggaaaaaataagaaaatttatattttaaaatgaaattgcattaagaagccaacattgatgcatttattgactaaagaccagagtttacattagggttcactctttgtattatacagttcyatgggttttgctaaatgcatgatgtcatgtatccaccattacagaatcatagataataatttcactgccctaaaaattccctgtgctccacctacttatcccccacatgcccaactcctggtaatgactaaactttgcactagctctatagtttcgccttttctagaag

SEQ ID NO: 220662 - DNA, 593 bp, Homo sapiens
tatttgaactgagtatccctgtgattgacaggatgaaatgtttatgaaatagatcaatattgctcattgtgatattcatcattgaataattatatttttattttgtcaattctgagttatttggaaacaaaaatccacagaatgttaccttatataaatatgttaatacattcttgattattaataaatctgttactacaatgtcatatcctctcagtaataaaagcatatttaatttatgcttttatccattagaaaacagtgaagctagaaattatttaaaattttcccctaagaaatatgtggaaaaaataagaaaatttatattttaaaatgaaattgcattaagaagccaacattgatgcatttattgactaaagaccagagtttacattagggttcactctttgtattatacagttccatgggktttgctaaatgcatgatgtcatgtatccaccattacagaatcatagataataatttcactgccctaaaaattccctgtgctccacctacttatcccccacatgcccaactcctggtaatgactaaactttgcactagctctatagtttcgccttttctagaag

SEQ ID NO: 220663 - DNA, 593 bp, Homo sapiens
tatttgaactgagtatccctgtgattgacaggatgaaatgtttatgaaatagatcaatattgctcattgtgatattcatcattgaataattatatttttattttgtcaattctgagttatttggaaacaaaaatccacagaatgttaccttatataaatatgttaatacattcttgattattaataaatctgttactacaatgtcatatcctctcagtaataaaagcatatttaatttatgcttttatccattagaaaacagtgaagctagaaattatttaaaattttcccctaagaaatatgtggaaaaaataagaaaatttatattttaaaatgaaattgcattaagaagccaacattgatgcatttattgactaaagaccagagtttacattagggttcactctttgtattatacagttccatgggttttgctaawtgcatgatgtcatgtatccaccattacagaatcatagataataatttcactgccctaaaaattccctgtgctccacctacttatcccccacatgcccaactcctggtaatgactaaactttgcactagctctatagtttcgccttttctagaag

SEQ ID NO: 220664 - DNA, 467 bp, Homo sapiens
ctcatacaatatgtagacttttcagactggcttctttcacatagaaatatgcattcaaatttcctccatgtctaatcatgactggatggcttatttttttacccctgataattatgtcattgyatggatatagcagagtttgtttatctaattaaggaatgattacctattaaaggataagctgggtgcttctaagttttagtaagtaagaatatagctgcacatgcaataaacatttgcatgcaagtttctgtgtggtacagtataccatttctttgttcttaaatacttttcactggtgtgaaccaatgagatgctaacattgcattgctcgtacttggttggtttctaaactttacttacttttacaatttttaaagagaagtttctattgccagttttttaaagtgatatgctctgctggccttgacataacaatacaccatcattagcttttaagtccttaa

SEQ ID NO: 220665 - DNA, 467 bp, Homo sapiens
ctcatacaatatgtagacttttcagactggcttctttcacatagaaatatgcattcaaatttcctccatgtctaatcatgactggatggcttatttttttacccctgataattatgtcattgtatggatatagcagagtttgtttatctaattaaggaatgattacctattaaaggataagctgggtgcttctaagttttagtaagtaagaatatagctgcacatgcaataaacatttgcatgcaagtttctgtgtggtacagtatacyatttctttgttcttaaatacttttcactggtgtgaaccaatgagatgctaacattgcattgctcgtacttggttggtttctaaactttacttacttttacaatttttaaagagaagtttctattgccagttttttaaagtgatatgctctgctggccttgacataacaatacaccatcattagcttttaagtccttaa

SEQ ID NO: 220666 - DNA, 484 bp, Homo sapiens
tggactcatacaatatgtagacttttcagactggcttctttcacatagaaatatgcattcaaatttcctccatgtctaatcatgactggatggcttatttttttacccctgataattatgtcattgtatggatatagcagagtttgtttatctaattaaggaatgattacctattaaaggataagctgggtgcttctaagttttagtaagtaagaatatagctgcacatgcaataaacatttgcatgcaagtttctgtgtggtacagtataccatttctttgttcttaaatacttttcactggtgtgaaccaatgagatgctaacattgcattgctcgtacttggttggtttctaaactttacttacttttacaatttttaaagagaagtttctattgccagttttttaaagtgatatgctctgctgrccttgacataacaatacaccatcattagcttttaagtccttaatatgctcaaaaaa

SEQ ID NO: 220667 - DNA, 467 bp, Homo sapiens
ctcatacaatatgtagacttttcagactggcttctttcacatagaaatatgcattcaaatttcctccatgtctaatcatgactggatggcttatttttttacccctgataattatgtcattgtatggatatagcagagtttgtttatctaattaaggaatgattacctattaaaggataagctgggtgcttctaagttttagtaagtaagaatatagctgcacatgcaataaacatttgcatgcaagtttctgtgtggtacagtataccatttctttgttcttaaatacttttcactggtgtgaaccaatgagatgctaacattgcattgctcgtacttggttggtttctaaactttacttacttttacaatttttaaagagaagtttctattgccagttttttaaagtgatatgctctgctggccttgacataacaayacaccatcattagcttttaagtccttaa

SEQ ID NO: 220668 - DNA, 485 bp, Homo sapiens
ttggactcatacaatatgtagacttttcagactggcttctttcacatagaaatatgcattcaaatttcctccatgtctaatcatgactggatggcttatttttttacccctgataattatgtcattgtatggatatagcagagtttgtttatctaattaaggaatgattacctattaaaggataagctgggtgcttctaagttttagtaagtaagaatatagctgcacatgcaataaacatttgcatgcaagtttctgtgtggtacagtataccatttctttgttcttaaatacttttcactggtgtgaaccaatgagatgctaacattgcattgctcgtacttggttggtttctaaactttacttacttttacaatttttaaagagaagtttctattgccagttttttaaagtgatatgctctgctggccttgacataacaatacaccatyattagcttttaagtccttaatatgctcaaaaaa

SEQ ID NO: 220669 - DNA, 484 bp, Homo sapiens
tggactcatacaatatgtagacttttcagactggcttctttcacatagaaatatgcattcaaatttcctccatgtctaatcatgactggatggcttatttttttacccctgataattatgtcattgtatggatatagcagagtttgtttatctaattaaggaatgattacctattaaaggataagctgggtgcttctaagttttagtaagtaagaatatagctgcacatgcaataaacatttgcatgcaagtttctgtgtggtacagtataccatttctttgttcttaaatacttttcactggtgtgaaccaatgagatgctaacattgcattgctcgtacttggttggtttctaaactttacttacttttacaatttttaaagagaagtttctattgccagttttttaaagtgatatgctctgctggccttgacataacaatacaccatcattagsttttaagtccttaatatgctcaaaaaa

SEQ ID NO: 220670 - DNA, 526 bp, Homo sapiens
tgcatactaactgtaaaccacatcattgttcagattgatttttttaacagatcaaaacatatttaatccgttgcattgaatttaatgcattgtgttgctactccttattttattttgttttattttactcaattttatattttattttctttctagtagamtattagcaggtacatctgaataccagaatgtaaagaaaggaagaacagatccaaataaatatttaaagtaataatggctaagaattttccaaaattaacagcagatactgaatacagattcaagaagtgcagagaataccaagcagaataaatgtcaaaaatctatacttaggtatatattttttaaaccaaagaaaatcaaagacagagagacatactgaaaggagccaagggtaaacaagaaaacttacctgtaaataaataaggctaagaattacagttggtttttcattagatgaaaggaagaagagagtggggggaaatacttaaagtgttgaaagtgaaacacacagagacacacacac

SEQ ID NO: 220671 - DNA, 526 bp, Homo sapiens
tgcatactaactgtaaaccacatcattgttcagattgatttttttaacagatcaaaacatatttaatccgttgcattgaatttaatgcattgtgttgctactccttattttattttgttttattttactcaattttatattttattttctttctagtagactattagcaggtacatctgaataccagaatgtaaagaaaggaagaacagatccaaataaatatttaaagtaataatggctaagaattttccaaaattaacagcagatactgaatacagattcaagaagtgcagagaataccaagcagaataaatgtcaaaaatctatacttaggtatatattttttaaaccaaagaaaatcaaagacagagagacatactgaaaggagccaagggtaaacaagaaaacttacctgtaaataaataaggctaagaattacagttggtttttcattagatgaaagsaagaagagagtggggggaaatacttaaagtgttgaaagtgaaacacacagagacacacacac

SEQ ID NO: 220672 - DNA, 502 bp, Homo sapiens
actgctattggagttctaaaatacatacgtatgtctcttagctctcaaaattattttgtaatatcatatgcccaaatacaaaaatataagtgcccaaatatttagacttgtatagtcaatgagtataattaagtcttgacactaagtaatattcaaagagggaagtttgctctttattttcctaattgccatgggcaaccatcagttatttacttcatttcctttcaatagttcttgctctcagcaagtcgggatctctcagagagaaagattcatagaggcctgagraaaacagaagaatctagggacaaatgtaaaaccatcttcctaattacaatccatttattagatacaccatcctaaattttgtcctaaagaataagcagggctcatattctatttcttatattttttgagggacgatttcagtgtaagcaacaaagcagtggaaataatttcaaatgctagaatagttttttgagtaaaatctggtcctactaat

SEQ ID NO: 220673 - DNA, 570 bp, Homo sapiens
tggtggtgagtagttctgcttaggaaaatttttgacatttcaggataaatgacaaatattacactttttctgagactatcttaaaaattcatttayatatctaattctcattattttgctaaactttctatacttgctattcacttattcacatttaaatttttattgtgacaattatataaatggaaatagctgtatcttttaagtatagaatccctatatttttcttcttgctagccatatctatcttatttatagtgagtatccaactttcatgaattctgaaagtgttcagtgacctcagaaagcaatacaattgtgtggtatacagaatattagatggtcatgaccttagcctcccagtgttactttgatgattatattgtattacatggcaaaatggattgcgcagatgtaattaatgttaataatcagttgatgtgaagacaggaagattatccaagtgtacctaatctaatacaatgagctctgtaaaattttatttatttttgcccgactgtcttatttctgagagccagttttcaagctctgaggtcctttcctcaactt

SEQ ID NO: 220674 - DNA, 570 bp, Homo sapiens
tggtggtgagtagttctgcttaggaaaatttttgacatttcaggataaatgacaaatattacactttttctgagactatcttaaaaattcatttacatatctaattctcattattttgctaaactttctatacttgctattcacttattcacatttaaatttttattgtgacaattatataaatggaaatagctgtatcttttaagtatagaatccctatatttttcttcttgctagccatatctatcttatttatagtgagtatccaactttcatgaattctgaaagtgttcartgacctcagaaagcaatacaattgtgtggtatacagaatattagatggtcatgaccttagcctcccagtgttactttgatgattatattgtattacatggcaaaatggattgcgcagatgtaattaatgttaataatcagttgatgtgaagacaggaagattatccaagtgtacctaatctaatacaatgagctctgtaaaattttatttatttttgcccgactgtcttatttctgagagccagttttcaagctctgaggtcctttcctcaactt

SEQ ID NO: 220675 - DNA, 570 bp, Homo sapiens
tggtggtgagtagttctgcttaggaaaatttttgacatttcaggataaatgacaaatattacactttttctgagactatcttaaaaattcatttacatatctaattctcattattttgctaaactttctatacttgctattcacttattcacatttaaatttttattgtgacaattatataaatggaaatagctgtatcttttaagtatagaatccctatatttttcttcttgctagccatatctatcttatttatagtgagtatccaactttcatgaattctgaaagtgttcagtgacctcagaaagcaatacaattgtgtggtatacagaatattagatggtcatgaccttagcctcccagtgttactttgatgattatattgtaytacatggcaaaatggattgcgcagatgtaattaatgttaataatcagttgatgtgaagacaggaagattatccaagtgtacctaatctaatacaatgagctctgtaaaattttatttatttttgcccgactgtcttatttctgagagccagttttcaagctctgaggtcctttcctcaactt

SEQ ID NO: 220676 - DNA, 570 bp, Homo sapiens
tggtggtgagtagttctgcttaggaaaatttttgacatttcaggataaatgacaaatattacactttttctgagactatcttaaaaattcatttacatatctaattctcattattttgctaaactttctatacttgctattcacttattcacatttaaatttttattgtgacaattatataaatggaaatagctgtatcttttaagtatagaatccctatatttttcttcttgctagccatatctatcttatttatagtgagtatccaactttcatgaattctgaaagtgttcagtgacctcagaaagcaatacaattgtgtggtatacagaatattagatggtcatgaccttagcctcccagtgttactttgatgattatattgtattacatggcaaaatggattgcgcagatgtaattaatgttaataatcagttgatgtgaaracaggaagattatccaagtgtacctaatctaatacaatgagctctgtaaaattttatttatttttgcccgactgtcttatttctgagagccagttttcaagctctgaggtcctttcctcaactt

SEQ ID NO: 220677 - DNA, 593 bp, Homo sapiens
gctaaaagcagaaatttcagcagaaatcctacaagccagaagagattgggggtctatattcaacattattaaagaaaaaaaatcttcatccaagaatttcagatggagccaaactaagcttcataagtgaaggagaaataagatcttttcaaacaaacacattcagagggaattcattaccaccagactgccttacaagagttcctgaaaggagtagtaaatatggaaaggaaagactgttatcagccactacaaaaacacctttaagtacacagaccagtgacactataaagcaaccacacaaaccagtctgcataataatcagctaagaacaggatgagaggatcaaatccacatatatcaataataacyttgaatgtaaatggcctaaatgcctcaaagaaaaggcagagtggcaagctggataaagaaaaagacccaatggtatactgaatttaagagccccatcctacatgcaatgacacccataggctcaaaatgaatggatggaaaaaaaatctaccatgcgaaaggagaacataaaaaagcagaggtggcaatcctaatttcagacaaaacacactttgaaccaa

SEQ ID NO: 220678 - DNA, 593 bp, Homo sapiens
gctaaaagcagaaatttcagcagaaatcctacaagccagaagagattgggggtctatattcaacattattaaagaaaaaaaatcttcatccaagaatttcagatggagccaaactaagcttcataagtgaaggagaaataagatcttttcaaacaaacacattcagagggaattcattaccaccagactgccttacaagagttcctgaaaggagtagtaaatatggaaaggaaagactgttatcagccactacaaaaacacctttaagtacacagaccagtgacactataaagcaaccacacaaaccagtctgcataataatcagctaagaacaggatgagaggatcaaatccacatatatcaataataactttgaatgtaaatggcctaaatgcctcaaagaaaaggcagagtggcaagctggataaagaaaaagacccaatggtatactgaatttaagagccccatcctacatgcaatgacamccataggctcaaaatgaatggatggaaaaaaaatctaccatgcgaaaggagaacataaaaaagcagaggtggcaatcctaatttcagacaaaacacactttgaaccaa

SEQ ID NO: 220679 - DNA, 551 bp, Homo sapiens
acagacacttttcaaaagaagacatacatgctgccaacgagcatatgtaaaaaccttaacatccactcattagataaatgcaaatcaaaaccacagcaagataccatttcacaccwgtcagaatggctattattaaaaaatcagaaagcaacagattttggcaatgtggtggagaaaagggaacacttacacactgctggtgggtgtgtaaattagttcagctattgtggaacgcagtgtagtgattcctcagagaactaaaaacacaattaccatttgacccaacaccattactggatatatattcaaaagaaaacaaattgttctaccataaagatacatgcacacatatgtccattgcagcactattcaaaataacaaatacatggatcaacctaaaggcccatcaacagtatattggataaggaaaatgtggtacatatacaccacggaatatatgcagccataaaaagaatggaatcatgtcctttgcagcaagatggatggaactggagaccattattcttagcaaactaatgcgggaacagaaa

SEQ ID NO: 220680 - DNA, 551 bp, Homo sapiens
acagacacttttcaaaagaagacatacatgctgccaacgagcatatgtaaaaaccttaacatccactcattagataaatgcaaatcaaaaccacagcaagataccatttcacacctgtcagaatggctattattaaaaaatcagaaagcaacagattttggcaatgtggtggagaaaagggaacacttacacactgctggtgggtgtgtaaattagttcagctattgtggaacgcagtgtagtgattcctcagagaactaaaaacacaattaccatttgacccaacaccattactggatatatattcaaaagaaaacaaattgttctaccataaagatacatgcacacatatgtccattgcagcactattcaaaataacaaatayatggatcaacctaaaggcccatcaacagtatattggataaggaaaatgtggtacatatacaccacggaatatatgcagccataaaaagaatggaatcatgtcctttgcagcaagatggatggaactggagaccattattcttagcaaactaatgcgggaacagaaa

SEQ ID NO: 220681 - DNA, 627 bp, Homo sapiens
gatccagaaatcctactcctggatatctacccagaggaaaataagtcattacacgaaaaagatacttgcacatgcgtgtttatagcagcgcaattcgcaattacaaaaacctggaacctacccaaatgaccataaatcaacaagtggataaagacactgtggtgtgtgtgtgtgtgtatacacacacgatagaatattactcagccataaaaaggaatgaattcatggcatttgcagcaacctggatgagattggagactattattctaagtgaagtaactcaggaatggaaaatcaaacattgtatgttttcactsataaatgggagctaagctatgaggatgaaaatgcataagaattatacaatggactttagggactcaaggggaaaaggtgggaagggggtgagggataaaagactacaaatagggtgcagtgtatactgctcgggtgatgggtgcaccaaaatctcacaaatcaccactaaagaacttactcatgtaaccaaacaccatctgttccccaataacctatggaaatatattttataaaaaaattatagaaggaaaacagctataatgtagaattttatatccaaatgaaatgctgttgaacattgagagcatt

SEQ ID NO: 220682 - DNA, 446 bp, Homo sapiens
atttcatctgatgttagtacatctatctcagctttcttttggttatgtcagcctaacagaccatttttacattttttttttcagacttcctcagttcttatttttaataaaacacattcaattacttttaaaattcattttagatatttttattagcygaagtatgaaaatcatttatatttaactcaagatattttgattgtggtctaccactttgctatttttccatctgttgtattttcgacttgctctttcttgccttttttctcaattaagcatttttttctccaatatgcccttataatctcctataagtttaagtatcttttgattttgccctagatattatttcatgattccttgacttattagtgtctgagtataaagtaaaattttcattacttttcttagactatgaagatcttataatacttttgatattttgt

SEQ ID NO: 220683 - DNA, 446 bp, Homo sapiens
atttcatctgatgttagtacatctatctcagctttcttttggttatgtcagcctaacagaccatttttacattttttttttcagacttcctcagttcttatttttaataaaacacattcaattacttttaaaattcattttagatatttttattagccgaagtatgaaaatcatttatatttarctcaagatattttgattgtggtctaccactttgctatttttccatctgttgtattttcgacttgctctttcttgccttttttctcaattaagcatttttttctccaatatgcccttataatctcctataagtttaagtatcttttgattttgccctagatattatttcatgattccttgacttattagtgtctgagtataaagtaaaattttcattacttttcttagactatgaagatcttataatacttttgatattttgt

SEQ ID NO: 220684 - DNA, 451 bp, Homo sapiens
gcttcttcttgttattggtatagaatcttagccacaactgtttcctagcactcttccaaagatataggatgcattcttccacttgttcccaagcctcagtgcatctttgcctgtgattagtggaaatgacagttgtgctgtctcttctatagtggcttaaagctttgcttcctaagaaagaatgttctggggtagtgggcaaggctttttgccwgtcccccagcagcaactgattattacccgaagcctgcactatgcagcagggtctctctcatcttctgcccagttcccagtctttcccttcaacagacaaagttccgtgtaaaagagtttaagaaatgaccatttcttgtgcctgaggcctcctgctattctaaacttacaatttacccacatttagcctttaagaatttattaaagtttagctgatttcttatatgattatatggtg

SEQ ID NO: 220685 - DNA, 451 bp, Homo sapiens
gcttcttcttgttattggtatagaatcttagccacaactgtttcctagcactcttccaaagatataggatgcattcttccacttgttcccaagcctcagtgcatctttgcctgtgattagtggaaatgacagttgtgctgtctcttctatagtggcttaaagctttgcttcctaagaaagaatgttctggggtagtgggcaaggctttttgccagtcccccagcagcaactgattattacccgaagcctgcactaygcagcagggtctctctcatcttctgcccagttcccagtctttcccttcaacagacaaagttccgtgtaaaagagtttaagaaatgaccatttcttgtgcctgaggcctcctgctattctaaacttacaatttacccacatttagcctttaagaatttattaaagtttagctgatttcttatatgattatatggtg

SEQ ID NO: 220686 - DNA, 451 bp, Homo sapiens
gcttcttcttgttattggtatagaatcttagccacaactgtttcctagcactcttccaaagatataggatgcattcttccacttgttcccaagcctcagtgcatctttgcctgtgattagtggaaatgacagttgtgctgtctcttctatagtggcttaaagctttgcttcctaagaaagaatgttctggggtagtgggcaaggctttttgccagtcccccagcagcaactgattattacccgaagcctgcactatgcagcagggtctctctcatcttctgcccagttcccagtctttcccttcaacagacaaagktccgtgtaaaagagtttaagaaatgaccatttcttgtgcctgaggcctcctgctattctaaacttacaatttacccacatttagcctttaagaatttattaaagtttagctgatttcttatatgattatatggtg

SEQ ID NO: 220687 - DNA, 451 bp, Homo sapiens
gcttcttcttgttattggtatagaatcttagccacaactgtttcctagcactcttccaaagatataggatgcattcttccacttgttcccaagcctcagtgcatctttgcctgtgattagtggaaatgacagttgtgctgtctcttctatagtggcttaaagctttgcttcctaagaaagaatgttctggggtagtgggcaaggctttttgccagtcccccagcagcaactgattattacccgaagcctgcactatgcagcagggtctctctcatcttctgcccagttcccagtctttcccttcaacagacaaagttccgtgtaaaagagtttaagaaatgaccatttcttgtgcctgaggcctcctgctattctaaactyacaatttacccacatttagcctttaagaatttattaaagtttagctgatttcttatatgattatatggtg

SEQ ID NO: 220688 - DNA, 554 bp, Homo sapiens
tattaataccagaaatgaaagagaggacatcattagtgatcccatgtacattaaaggatagtaaaggaatattatgaacaactttatgcacaaaaatttaatgacgagggtgaaatgtaccaattccttgaaggacacaatcaaccaaaactcacatgaggagaaayagataatctgaacaggcctttatctattaaagaaactgaattaataattaataccctgctaaatagaaagcaccagggctagataagttcactgctaaatcttaccaaacatttaatcaggaaattatatcgattctgcacaatcacttccaataataaaagtaaaaacaagttattctggaaagagggaccatggcacaagaaatgtttggcacagcacaaccagtccccagagaccaaagctaggccatatcttcaaagcccagagtgtgcatagcctgagtcaagctgaaggaaggaataaaaaaaaatgaggagaaagtcagggaatatatgatgaagcaaaatctttatgtctgatgttctcagaatgaataaaattataaa

SEQ ID NO: 220689 - DNA, 563 bp, Homo sapiens
caaagcccagagtgtgcatagcctgagtcaagctgaaggaaggaataaaaaaaaatgaggasaaagtcagggaatatatgatgaagcaaaatctttatgtctgatgttctcagaatgaataaaattataaaatgcaaagtgcatatatcacagtttcagaagcaatattggtccaactgctgattttctaaaatggagaacagatcaacctctacacaaactgatagtgaggcagaatatcctggtcttcttattgtaagagaagaaaacgtctttcatggaagtaacagtgaaagaatccgttatcagaacataggacagaacgtttaggggtattttccctgcaggcactaattagatatatatcataagagctatgagcacacaggtttactatcagtgaggctgaagcagtgtaatttctgggaattataggcatgacacacatttgtgacaaataaaagacaatacagattaaactgctagatctaatgtcaacctgttttttgtagaaagcctagggataactgcccaaggtaaatttttacaatatgagcacctag

SEQ ID NO: 220690 - DNA, 554 bp, Homo sapiens
tattaataccagaaatgaaagagaggacatcattagtgatcccatgtacattaaaggatagtaaaggaatattatgaacaactttatgcacaaaaatttaatgacgagggtgaaatgtaccaattccttgaaggacacaatcaaccaaaactcacatgaggagaaatagataatctgaacaggcctttatctattaaagaaactgaattaataattaataccctgctaaatagaaagcaccagggctagataagttcactgctaaatcttaccaaacatttaatcaggaaattatatcgattctgcacaatcacttccaataataaaagtaaaaacaagttattctggaaagagggaccatggcacaagaaatgtttggcacagcacaaccagtccccagagaccaaagctaggccatatcttcaaagcccagagtgtgcatagcctgagtcaagctgaaggaaggaataaaaaaaaatgaggagaaagtcagggaatatatgatgaagcaaaatcttyatgtctgatgttctcagaatgaataaaattataaa

SEQ ID NO: 220691 - DNA, 615 bp, Homo sapiens
gcatatatcacagtttcagaagcaatattggtccaactgctgattttctaaaatggagaacagatcaacctctacacaaactgatagtgaggcagaatatcctggtcttcttattgtaagagaagaaaacgtctttcatggaagtaacagtgaaagaatccrttatcagaacataggacagaacgtttaggggtattttccctgcaggcactaattagatatatatcataagagctatgagcacacaggtttactatcagtgaggctgaagcagtgtaatttctgggaattataggcatgacacacatttgtgacaaataaaagacaatacagattaaactgctagatctaatgtcaacctgttttttgtagaaagcctagggataactgcccaaggtaaatttttacaatatgagcacctagtatttccagggacttctttactcctttccacattgcttttttgatgtatgacactttgattttgtctccgatacaatgaccacagcataaagaattagtgccagtaaagttagattataaaatcaaaaatttgactaagaccataggaaataaatcaatagaattacaagatgtagattttaaaattacttg

SEQ ID NO: 220692 - DNA, 206 bp, Homo sapiens
tcaatcgtttagcttctctgggccacactgcaagaagacgaattgtcttgggccacatataaaatgcackaacactaacgatagctgacaagctaaagaaaaaaaaatcaccaaaaaaaatcccataatgtttttaaaagtttaccaatttctattgggcctcattcaaagctgtcctggactgtgtgtggcctttgggctgtggg

SEQ ID NO: 220693 - DNA, 614 bp, Homo sapiens
tttaaaagtttaccaatttctattgggcctcattcaaagctgtcctggactgtgtgtggcctttgggctgtgggttggacaagcttattctagaaagtgaaaagtttcatgggaattgacagttgtagattaaatgatcacttactatcagttaagaaagaaatttctctcttcattaccactcctatttccagacttcagtcctagagtggtcagtagaagcagttatccaataggagagggggtaagtaaggtgaaractgctgaaaaggaaaagaaaccaagaatgaccccttcccacagcctacagatgaaagaggtaggggagaaaacatatctgaattatattttaattaaaatatagaaattcatattataatttctgaaataaaattgtggtttacaacataatataactatctgttaaataccaataaccaaaagaagtcatgaaagctgctagatttttttacagatctggaaacttttcctgaatacatatttaaagaactacagaagacaaaaatgaaattgcattgaatgacaattagagacaagtttgttctttcgaaaaaattggatatttgctttgtaattttcaccaattttatttt

SEQ ID NO: 220694 - DNA, 316 bp, Homo sapiens
taggcacttgaaaatatactagtctgtgacacagtaaaagaaaaatcatgyggataggcaacagatagttttggaaatttaaaactcaggttttgttttatgtcttcatatatgatgctgaggtaacagatataaaattaggaatttgtcagcaatagctcctcctgcctttatcatatgttttaaatgatttaacagtgacattttattgtattttcttttttattgagattcatttcctatcttgtctaatattctcctattctcctgatagtttacacacaattatcacaaaacactagcagttccattaatt

SEQ ID NO: 220695 - DNA, 316 bp, Homo sapiens
taggcacttgaaaatatactagtctgtgacacagtaaaagaaaaatcatgtggataggcaacagatagttttggaaatttaaaactcaggttttgttttatgtcttcatatatgatgctgaggtaacagatataaaattaggaatttgtcagcaatagctcctcctgcctttatcatatgttttaaaygatttaacagtgacattttattgtattttcttttttattgagattcatttcctatcttgtctaatattctcctattctcctgatagtttacacacaattatcacaaaacactagcagttccattaatt

SEQ ID NO: 220696 - DNA, 322 bp, Homo sapiens
agggtaccttgcccattgtagttgagaaatgataaatargaatgactgaaaaaaaatacatttgaaagcagcttgaacataagaagaagcttgagatatttataatatggacacttgtttttttcctaaagcaaagctattactattagttagagattatgtagattttaatttctttatagaagacaaaataaaactagtagattaaaaaagttagttcctgccactattcttcccccaacaagatatctggggactgagtgccaaaatgagcaaagaaagattcaaggaccaagactggtggaatcctctcactccagta

SEQ ID NO: 220697 - DNA, 322 bp, Homo sapiens
agggtaccttgcccattgtagttgagaaatgataaataggaatgactgaaaaaaaatacatttgaaagcagcttgaacataagaagaagcttgagatatttataatatggacacttgtttttttcctaaagcaaagctattactattagttagagattatgtagattttaatttctttatagaagacaaaataaaactagtagattaaaaaagttagttcctgccactatycttcccccaacaagatatctggggactgagtgccaaaatgagcaaagaaagattcaaggaccaagactggtggaatcctctcactccagta

SEQ ID NO: 220698 - DNA, 322 bp, Homo sapiens
agggtaccttgcccattgtagttgagaaatgataaataggaatgactgaaaaaaaatacatttgaaagcagcttgaacataagaagaagcttgagatatttataatatggacacttgtttttttcctaaagcaaagctattactattagttagagattatgtagattttaatttctttatagaagacaaaataaaactagtagattaaaaaagttagttcctgccactattcttcccccaacaagatatctggrgactgagtgccaaaatgagcaaagaaagattcaaggaccaagactggtggaatcctctcactccagta

SEQ ID NO: 220699 - DNA, 626 bp, Homo sapiens
tttaatttctttatagaagacaaaataaaactagtagattaaaaaagttagttcctgccactattcttcccccaacaagatatctggggactgagtgccaaaatgagcaaagaaagattcaaggaccaagactggtggaatcctctcactccagtattcttagagtcttgcttaggcttgaagcataacactgttgtcacatcacttgacaatgcatttacggaataagattcagtgagaaagaacaaacaagaaktgattatatcctttaaagagctttctcagaggcatcggctagtatcttgtttgcttctcatttgccagagttgcatcaagtagcttctcccaactgctcaggaaattgggaagtatagttttctcaacattttcataccaccacaaacactcccaagaatgttcataagcagtctgtaatacacaggacacgtcccaatgaccaagaattatctggtctgaaatatcaatagtggtgaggttgagaaaacttcctctgaagcacccggcattgggataaggtctcaaaggaaacgttaaaagacaatgcaaaatgaagaagaatatggggtaccaaaattatagttatcaatcaaccacagaacttagtt

SEQ ID NO: 220700 - DNA, 626 bp, Homo sapiens
tttaatttctttatagaagacaaaataaaactagtagattaaaaaagttagttcctgccactattcttcccccaacaagatatctggggactgagtgccaaaatgagcaaagaaagattcaaggaccaagactggtggaatcctctcactccagtattcttagagtcttgcttaggcttgaagcataacactgttgtcacatcacttgacaatgcatttacggaataagattcagtgagaaagaacaaacaagaagtgattatatcctttaaagagctttctcagaggcatcrgctagtatcttgtttgcttctcatttgccagagttgcatcaagtagcttctcccaactgctcaggaaattgggaagtatagttttctcaacattttcataccaccacaaacactcccaagaatgttcataagcagtctgtaatacacaggacacgtcccaatgaccaagaattatctggtctgaaatatcaatagtggtgaggttgagaaaacttcctctgaagcacccggcattgggataaggtctcaaaggaaacgttaaaagacaatgcaaaatgaagaagaatatggggtaccaaaattatagttatcaatcaaccacagaacttagtt

SEQ ID NO: 220701 - DNA, 626 bp, Homo sapiens
tttaatttctttatagaagacaaaataaaactagtagattaaaaaagttagttcctgccactattcttcccccaacaagatatctggggactgagtgccaaaatgagcaaagaaagattcaaggaccaagactggtggaatcctctcactccagtattcttagagtcttgcttaggcttgaagcataacactgttgtcacatcacttgacaatgcatttacggaataagattcagtgagaaagaacaaacaagaagtgattatatcctttaaagagctttctcagaggcatcggctagtatcttgtttgcttctcatttgccagagttgcatcaagtagcttctcccaactgctcaggaaattgggaagtatagttttctcaacattttcataccaccacaaacactcccaagaatgttcataagcagtctgtaatacacaggacacgtcccaaygaccaagaattatctggtctgaaatatcaatagtggtgaggttgagaaaacttcctctgaagcacccggcattgggataaggtctcaaaggaaacgttaaaagacaatgcaaaatgaagaagaatatggggtaccaaaattatagttatcaatcaaccacagaacttagtt

SEQ ID NO: 220702 - DNA, 598 bp, Homo sapiens
agaaatatctataatgcatacctaatagcactgctgaattatatacttgcttgagttgcataatgttgcagccctacaggtacatatttttatttacacaacttggatgattttcattcagtgaaacaatttattaatttattccttccatgtcaatgtacgtagagctttattattattttccatggttttcagggtattccataacacagacacatcaccatttattctttctgtagtagacatttaggggatttaaaatgtttacattataaatactgacaatttagtaattagtgtcttagagaatttattccaagttaaaaacaaaaatagagatttaatgtaagtccaactgagaaatctataaagtaggcaaaattttaaagttatcatacacataaaaattcaaatgtattcttatctactcrtagttttagtaactcctctgataaaaaagagatcatagtagaaataatcagatatgaaaaaaattaaagatttaaaaatttggtatgtattactctccactgaagacatgatcttattggtaattattggaacatcatgctatctacatacctattattttagatat

SEQ ID NO: 220703 - DNA, 367 bp, Homo sapiens
ccactttgaacctgagattaattttcatttgatttttatcagaggatacagaaggtagatgcatcaggaggaggggcaggtgcctttaatcattacctctagcattatcactyacaacctcaaagcagcttttatttaatttagtaaaagtttataaaaatttaaattattgtatgcatcaaattaagatttaagatgtccttcataaacattaaccttttgttggtgatgtttaccaagaaaggtaaactctgaaaacatgatgtcatcgtttcaattggtggaattaagtaaaagattttcaaatgaaacacttgaacctattttctatctatgcatgcagtagaaaaaagcacacaaaacaggc

SEQ ID NO: 220704 - DNA, 367 bp, Homo sapiens
ccactttgaacctgagattaattttcatttgatttttatcagaggatacagaaggtagatgcatcaggaggaggggcaggtgcctttaatcattacctctagcattatcacttacaacctcaaagcagcttttatttaatttagtaaaagtttataaaaatttaaattattgtatgcatcaaattaagatttaagatgtccttcataaacattaaccttttgttggtgatgtttaccaagaaaggtaaactctgaaaacatgatgtcatcgtttcarttggtggaattaagtaaaagattttcaaatgaaacacttgaacctattttctatctatgcatgcagtagaaaaaagcacacaaaacaggc

SEQ ID NO: 220705 - DNA, 620 bp, Homo sapiens
tgttggattatgtggttagcatttcttctcttctctggtgagataattcgttacttaggacagctgtggtataaaaactcaaacattgtcttttgcagaatggatttgaaaagtgggcccccattctatttttgttagaaaataataaaatcacaaattttatcatgtatcaaaaatgwaaagtgaaatataaatgtgaaaggtctgatatttacttaatgaatatttaccaaatacttagcatttgcatattaagtacaagcctcagggaaaaaaatgtagccgtgtttaaatctcaactttatttcttccccttgctttattttttgaaaaataagaaatattcacattaaagaaaaaagagaacatatttaaaaatattttcatctatattctagtctaaccagagtatctataatttatattagttaccaaatgtattagacaaattaaaacacaagagtttttattattataatgcttttttaaaatatggacattcacaattttatgcttacaagagaatatataattcaagtactcccatgaaataaagtaccagttctctacaatcaaacctacagtgctaaacgtcagctgaaaattacttataaaacttt

SEQ ID NO: 220706 - DNA, 444 bp, Homo sapiens
catttgcatattaagtacaagcctcagggaaaaaaatgtagccgtgtttaaatctcaactttatttcttccccttgctttattttttgaaaaataagaaatattcacattaaagaaaaaagagaacatatttaaaaatattttcatctatattctagtctaaccagagtatctataatttatattagttaccaaatgtattagacaaattaaaacacaagagtttttattattataatgcttttttaaaatatggacattcacaattttatgcttacaagagaatatataattcaagtactcccatgaaataaagtaccagttctctayaatcaaacctacagtgctaaacgtcagctgaaaattacttataaaactttcaattaaacttttactagtttaggtattctcttcatagttgagaatataatgcaaataaaagttg

SEQ ID NO: 220707 - DNA, 462 bp, Homo sapiens
ccctcacaatacatttttattgcaaaaatgattttgtatttatccattttggaaaagaaattttatctcttgagcccctaaaaatggaattgtacacattaagacccttacacatatcacataataatcttcagggtcaaacattatagttttcacctgctgctattcctttgcagtagactagaatagagaattatataaaacttctatgactgtcaaaaaaatgatataktttttgaaatcatgtaaaatcaaccttctttattttacagatatagaaatttagatctgtaaggaccatcagtgtggtgaaggtcacatggtaagttaattacagaatcaaatttttccctttcatttcaatctgtttttaagttttacatgattccactttcaggaaaaagcaattaaaatacagactggctttggtaagagtgatatatatttttatgtttcagacca

SEQ ID NO: 220708 - DNA, 554 bp, Homo sapiens
tgtacacattaagacccttacacatatcacataataatcttcagggtcaaacattatagttttcacctgctgctattcctttgcagtagactagaatagagaattatataaaacttctatgactgtcaaaaaaatgatatattttttgaaatcatgtaaaatcaaccttctttattttacagatatagaaatttagatctgtaaggaccatcagtgtggtgaaggtcacatggtaagttaattacagaatcaaatttttccctttcatttcaatctgtttttaagttttacatgattccactttcaggaaaaagcaattaaaatacagactggctttggtaagagtgatatatatttttatgtttcagaccagcatgttgtttcatgctgatgttaaaagataatggttgatatcagataaatacccacacatacacacaaacacaaactaacttggggtccaataaaataagactgggtggttcacatatttttccattagtgcaaatattttamagagataattttctttgataaaatctgtgttcttaaaa

SEQ ID NO: 220709 - DNA, 523 bp, Homo sapiens
aagttctcccataactgaaattcattgtacctgtacattaatcaaagaacaaaattgactgtcatgtgatttgactcatgctaaaatgtccctcacaatgaaaataatctcttttattggcccctcacagtgtttaaaatttttcaccatttaaaaaaaaattgacttaaaatacttcatcttctgacatttttgttcacaaaaatagtaaaagtaaaggawaaaggtagataatataccaactttgcagggtattgcaggaagttcagagagggaaagaaagaggaactataaatagttatcataaattacagctaaatattttagtttagcataaagagggtatgatgaatgtaaacaacatcacatatagttcaaagtagagttgtggaattacttttccatgacaatgtttaagaattgtacagctttgctgttatctagtgatgtgtccccacccaaatctcaccatgaattcccatgtgttgtcagagggacctggtgggaggtaattaaatcatgg

SEQ ID NO: 220710 - DNA, 523 bp, Homo sapiens
aagttctcccataactgaaattcattgtacctgtacattaatcaaagaacaaaattgactgtcatgtgatttgactcatgctaaaatgtccctcacaatgaaaataatctcttttattggcccctcacagtgtttaaaatttttcaccatttaaaaaaaaattgacttaaaatacttcatcttctgacatttttgttcacaaaaatagtaaaagtaaaggaaaaaggtagataatataccaactytgcagggtattgcaggaagttcagagagggaaagaaagaggaactataaatagttatcataaattacagctaaatattttagtttagcataaagagggtatgatgaatgtaaacaacatcacatatagttcaaagtagagttgtggaattacttttccatgacaatgtttaagaattgtacagctttgctgttatctagtgatgtgtccccacccaaatctcaccatgaattcccatgtgttgtcagagggacctggtgggaggtaattaaatcatgg

SEQ ID NO: 220711 - DNA, 375 bp, Homo sapiens
ctaaggtgagaggttgagtattcactggatctcttcctactacrataaataagttctggcacattacttacacaaaagataaaaagtatcagtaataaacacttccattttataatcaaataggcacaaaggatgcataatattttccaggaagcgatgccccatatatccatagattctagggttgctttttttttttttttaacacaggagatgctaaacaaccaagtacatgctgctaaaaacaccttgcagataaaaaccctcccactagctaacgtaactagcttgtttgcaaaaagtctgcttttagcatgtttacaaatgtattagtctgctagggctattataacaaagtatcatcaaccaggtggc

SEQ ID NO: 220712 - DNA, 375 bp, Homo sapiens
ctaaggtgagaggttgagtattcactggatctcttcctactacgataaataagttctggcacattacttacacaaaagataaaaagtatcagtaataaacacttccattttataatcaaataggcacaaaggatgcataatattttccaggaagcgatgccccatatatccatagattctagggttgctttttttttttttttaacacaggagatgctaaacaaccaagtacatgctkctaaaaacaccttgcagataaaaaccctcccactagctaacgtaactagcttgtttgcaaaaagtctgcttttagcatgtttacaaatgtattagtctgctagggctattataacaaagtatcatcaaccaggtggc

SEQ ID NO: 220713 - DNA, 367 bp, Homo sapiens
tctcaacgaagaaggatttatgttttccaaaaacaaaaaaaaacaaaaaactcttgaattttatctcacgagagcaaataaattcaatcattcagcccctaaatgsctcaaaagtctgtagaatagagcagcttcaaaagaacaagtgggaagtaatgaggaagagtaagagacaaagcttcacaaaggctgtgttaaagaagaactcttactcctagtgaattctgagatgatatcacagactcaatttatatgcaaacctgaatttaagtgtactaaaaatataaaattcactttggagctaatgaagtaacttttcatccaaaaaaaatatattactttaagtatttctcctgtagtaaaagta

SEQ ID NO: 220714 - DNA, 449 bp, Homo sapiens
gaattctgagatgatatcacagactcaatttatatgcaaacctgaatttaagtgtactaaaaatataaaattcactttggagctaatgaagtaacttttcatccaaaaaaaatatattactttaagtatttctcctgtagtaaaagtatttaccgttttattcatagctttggattgagcaaatatatcttaagatatatgtgtcataatatagactataacataaaatgygggtgaacacagtaactcacttttacatcataatcaagtcattagcttctcatttccgcaattaaaagaaatatgtcttatgagctattcaaaatcttaggttagagaaagttaccaagtaattagctgccattctggacacacagaaattagagtaacaaaaccagttcacacatagatacattctttgagagacagaatagtggattaaccacaaa

SEQ ID NO: 220715 - DNA, 449 bp, Homo sapiens
gaattctgagatgatatcacagactcaatttatatgcaaacctgaatttaagtgtactaaaaatataaaattcactttggagctaatgaagtaacttttcatccaaaaaaaatatattactttaagtatttctcctgtagtaaaagtatttaccgttttattcatagctttggattgagcaaatatatcttaagatatatgtgtcataatatagactataacataaaatgcgggtgaacacagtaactcacttttacatcataatcaagtcattagcttctcatttccrcaattaaaagaaatatgtcttatgagctattcaaaatcttaggttagagaaagttaccaagtaattagctgccattctggacacacagaaattagagtaacaaaaccagttcacacatagatacattctttgagagacagaatagtggattaaccacaaa

SEQ ID NO: 220716 - DNA, 595 bp, Homo sapiens
ttggaaacagaaaaatggatacgaagagaagcaagtattctcctgtatttataattgtggtactttacaatatatgtaatatatctttagaaagattaattgtcttttattctcacagaaattctatgagccaggcagaggaactgtttttgttcccattttacttctgtaaaaactgagtctcaaaataactgctccccagaagtatagaatgattaaaggtcagaaacagagcctgcatattttcatatttgttacacttttttagctattgttgtccaagagtactcttacttttgagatactttctttatttcactgttcagaatttttatatttgtatgatttaacaaaataatyggtaaatttcatttttggggattaaaaattaggttgtggaagctacattaggttgtggaagttgtgccccatctgagacaaatcttggattaatcagtgattgattaaattattgaaagtttagttattcaaagaaattggcatagaagtacattaagctaagctttatctggtaagatggagaactaacatgatgtgggcttctttctgtgaccacaaccctggaaatgacaca

SEQ ID NO: 220717 - DNA, 452 bp, Homo sapiens
agatctggatttgaagcacctaaacaattcctaccctatcagttcaggacaagaaggatttgtatctaagctcaaaaatatgtttagtaccacaaaagcattaatgctccctatractatattgaaggagatttctgcagtaattcttaaggtccatgggtctggatgtttgagaacttttcccaaactcatcaaatctaaatgtgatgctcagtcccctgattaaagcaatatggcatagggcaagttatatacttaacttaatatttaaaatatgcattcagtatacacagttaatatttcattgcctgggataaaatactctatgttaatatcagtaaaaactaaatggtggtcatgggttgcacaggttatggaaaaagtatacattaaaagccagaagatttgagatattattataccacttatcagctatgaaatcctaaggtaat

SEQ ID NO: 220718 - DNA, 523 bp, Homo sapiens
aatctatgatcagtgattttttatatttactgttgtaatttttgcgggtacatgaactgcacctatgtaaaatggagaatttaactgataaatgttgtgtgtgttttgactgctccacagaccagcctttcctctgtctctctccctcttcttgggcctgcttcttccttgagacacagcaatattgaaattaggccaaccctacaatggcctgtaagtgtttaggtgaaagatagaaccacatctctcattttaaatttaaagctagaaatgattaaactgggtgaggaatgcatgtggcaagctgtgayagaccaagagctaggcctcttgtgctagttagccaagttgtgaatgcaaaggaaaagttctccaggaaattaaaagggctacttcactgaacacacaaatgataagaaagcaaaacagccttattgctgatttggagaaagtctgagtggtctggataggagatcaaaccagccacaacattcccataagccaaagcgtaatccagagcaat

SEQ ID NO: 220719 - DNA, 651 bp, Homo sapiens
ctataagttccatcccttatgcttactattaatggaacttcattatgtgtacatcgtagttataaaccaatttaaacctaaagcatagtctgaattagcaagagaatttataacttattatcatttattcagaaataagaaatctgagttaagtttgcaatgayaaaattcagggtaaaagtgttggcaacagtcactcaatgatcaactttcctataataaaaaataatggtagtgctaacttaaaacataataaatttgataatactctgaggacatccattttgtaactcttagtattaatgtctaaatcagcagttggaaactccccacagtcatatcatgtggtttcagtaataatagctaaaatgtatcctgcagtgaatcttttctttttttgagctacccaatggttccatattattacagaatttgcagagaataatttctaccccaaaagaatctttacaaataagtgcccatgctgtttcctgactttacttggcttatctgtaaaatgcattatcagaattgaataagatccttttaagctatgtgattttacaagtgatacttcataaagaaaatcagcggattctggtgaagaatgcttttcagaagacacagataggaaccaaagttcatatacaa

SEQ ID NO: 220720 - DNA, 600 bp, Homo sapiens
attgaatatatatatacacacacatatatataaaagatgatctcagatatttaaattttccatgttcataaagaatttacttcatattttggtggcttagaacatgtctttatatttgtgaatcccatgaacaaatacagttcagttttctctgaaattttgatttaaaaaaattataattgatcttatcattcataagacttgcacttttcaaacaattgaaaaaacatggcttttgatgattaggcagcacatatttttggacaactaatagatttgcttgagatataaagtacctgatgaagaatgagcaaagaacacccaatcagatagagtgttgccctgagaccacttcaaaaaccctgataattaatttggagtttttcytaactctattatatatttttaaagtatacacctttggtttatggttttttctatctttattaggcaaacaaatgtcaatatgtctggataacttgttttcatctaatattttcaccattcgaataataaatgtcttttaaaaaaatctttgactctttgcagtaattaattaagataattatttgagtcaagaatttttcaaaaagaaaaaaa

SEQ ID NO: 220721 - DNA, 610 bp, Homo sapiens
taacaattatttacacagcatttacattgtattaaatattataagtaatctagagacgatttaaagtgtatgaaaggatgtatgtgggttatatgcaattgctacgtcattttatatcagagacttgtgtatctgcaaatttttgtatctgacagggttcctggaacaaattctccatggatcatcaataatgatggttttgtagactacaatttgactttgtttagcatgtctatggtcagatgaccttacttaccttgatgaggccactacattttgttcagttttcataaaaatgctactgtactcaactgcattattgattctacttgtttcttgctgtggttayaaaatggttgtgtttcctgcttccactgatttcaggcttgtctgggtgacttgcttcagctgataaaatgaaaatgggggtgaaacatgcctcttctcagcagcagcttaagagcactcatgtgattttattgtagcctttgattcaagaatggtatatcctggtggaggttgctctgtaagcctgggcccagaagtgactaaatatgaagcagaggcaagaccaaaccatactggatatgaaatgtgaatttaaaacaaa

SEQ ID NO: 220722 - DNA, 624 bp, Homo sapiens
gtatggtactggtacaaaaacagacacatagactgatggaacaggttagagaacccagaaataaagccatacacctacaaccatctgatctttgacaaagctggtaataacaagcaatggggaaaggaccctctattcaataaatcatgctgcaataactagccagccatatgcagaagattgaagctggacctgttcctttcaccatatrcaaaaaatcaactcaacatctattaaatattcaaatgtaaacataaaactataaaaatcctagaagaaaactaagaaataccattctggatattggtcctagcaaagactttatgacaaagactccaaaagcaattgccacaaaaacaaaaattgaagtgtgggacctaattaaacaaacaacttttgcatactgaaagaaactatcagcagaataaacagacaacatacagaatgggagaaaatgtttgaaaacaatgcatctgacaaaggtctaatatccagaatctataaggaacttaagcaaatcaacaagcataaaacaaccccatttaaaaatggacaaaggacatgaacagatagttctcaaaagaaaacatacacatagccaataagcatatgaaaaaatgttca

SEQ ID NO: 220723 - DNA, 559 bp, Homo sapiens
cactggtgcaattccttgagtaggcagatgggagggatacctaatgcaaggaaggcagattcacctttgacaggaggatggacagttcatctctggtaaaaggagcaaagagaacagatgcagtcagtgggaagatgtggtggtgggagtttgtgaaattttcttctaattgattctgtttcctagatcatatgaaaaagtcatcaaaagagtagagaaaggtgtgctggacccctattgactccaatagggatggcaccatcatgtctgagaggctgaagaagagacctggggacagtgaacaagacatagggtttatcgggggagcttatacacaggaacgttccagtggtgacaggctgcacaggagaaccactgctgctgstggtgttgttaatttagtgcaagtccataggcatgaaaaccaggagagccaatgatataaatccaaatctaaggacaagagaagatgagaagagatgttctagctcaaacagtgaggcagggaaaatgggggctaattccttcttcttctaccttttgttgtattcaggccctc

SEQ ID NO: 220724 - DNA, 412 bp, Homo sapiens
tcaggccttttttccattgtctcagatattagcacatggctactttttagtcacgctaatatctctagaaagtgattgctccacagactgcttgaattctttctctaccagaagattaaactgcaaattttccaaacttttacactctgcttcccatttaaatataagttccagcrttaagtcattcctttgcttctctatctgattataagttgttagaagtagtcatgccatttcttaaatgctttgctgcttagagatttcttctgcaagataccctaggccatcacttttaaattcaaatttccacagatgcctgggtcatgaacacaatgcagccaagttatttgctaggtcataacatggatgactttcacaccagctcccattaacttcctcatttccatctgaa

SEQ ID NO: 220725 - DNA, 564 bp, Homo sapiens
tcaggagtttgagactagcctggccaacatggtgaaaacccgtctctactaaaaatacaaaaattagccgggtttggtgccacacgcctgtaatcccagctactcaggaggctgaggcaagagaattgcttgaacctgggaggcggaggttgcaataagccgagatcgcaccactgyactccagcctgggtgacagagcgagcctccgtctcaaacaaacaaacaaacaaacaaaaaacctgcactagcaacaattcttgggcaatgagcctgtttggagcctaggaaaactgcattagtaacaagcaccttcattctaccaggtaaggtacaaccactacctttgtcttacttccaccccacctggattgctatctctggatgccctcccacttccccattgttacagacgagggaaaaaagaaaatctttgctgtcacttgctccctacagaagggttttttttgtttttgtttttgttttctttcatggcatgttgtcacttcttacattataaagcaaaacattagaaggagttaaggtcatacttatctatcataaata

SEQ ID NO: 220726 - DNA, 622 bp, Homo sapiens
ttaaaatagttctttgtagcacctgcctgggattttgacagatgcttcaggctattggtaaacttaaagagatttaacaagaaactgcattgcaccattttcttctaatctgtgtacatagttacttagttatggctggctttaaaccatccagaagctggaagcattttaaatcctatttgttccttgagtggactattcattaatgagcttatttgcctggttgcttctgaagttaaatcttatttctacatctactttttctaatgacttatactttttgctttgatttgttgggcacaatttgatttgttggcttcttaactgtacactgcccagactttgcagtttgttttttaaaacatgtttcaaatgtccaaggctcaagacacctttaacttgcctcttttatgaggtagatgctctaagcttagagttatttttccttcaagataccattaagggctaatcacatgcacccagccttacccctagttctccctatcrctgtatgcccctctccatatccacaaaaatgggcctgttctttttattgtgattaaaaaaactctaaaagtctttgagagcccattcattagaccattcctcaccaagaattctt

SEQ ID NO: 220727 - DNA, 398 bp, Homo sapiens
cctttttaacagatgagaagctggaatggagacwtgttatagcttcattaaagatacacagcacaataggaccgctgccaggacccacacccggcgcacaagcgactccattcatttcttttgggaaactttcggtaaatgtctactctctcgaggccctgaggttgtaaaaataaataagacatgggttcttctctagaggagttaacaaggtaatggaatagatagagaagaaaataaataattgtcgcacgttgtgaaaggcagggcaagccaggtaagctcaaagtgtcacggggatgtttccacgactgagcctgcctgtgggttggggaaagactaacagagatggttaggtagggaagggagggggacctccgcctgcagacagatagagc

SEQ ID NO: 220728 - DNA, 376 bp, Homo sapiens
agaattcttctcaagaatcacagcccagaactgaccaccaaggaagctcctgccagagcaactcactcctaaatcatgtaggctcggccatgatctgtgacagcaaatagatgtgttccaaatgaaagtgtcccatgcatgcayctgattagtggaacctcatcatgtacacagtcccagctgcaagtgagcctaggaaatgtgttcggtttccattatcttaaggacaaagagacagttctaggaggtggatggaacaatgcatagtgttctcaactgaaccattgcaaaaatacaaaagatgggtaattggaattaacagaaagtcataccatggattgtatctcatttgctgtattatgtatgtttgctcaaa

SEQ ID NO: 220729 - DNA, 643 bp, Homo sapiens
gcttgtaaacacttgacagaaatgaccatctatgtgaattgcagctttttagaatgaagtggcattttctgaagtatgtgaaggtgatccatccactgaaggatgatttaattcatcattctgtccaacaatggggaagtggcattgctggtctgcagttttgaactctgtcatagacacttggcagcccttcacttgggaggcacagacttgaaaagaacatcaattgagttctgagtgttctggttggaaatttgtatttttcatctgggaaatgtgagggtaaagggtacttgaagaaagttcaaccctgtagctattttcatgacgtgatgaacaatttttgctggtttgagattcctggtttaatttttcaggatccttgaatgtttttcatcctgaataatctgaaaaaaaaacttggaaaaaagagaatagtttaaaaytgaatgctacatagaaatatactttaaaatgtaaacaatattcagttgttcccgggctggttttctagctgtttgcttttttcttcctctggattttctgccaatgacttgcacctccacctgctggtgtactgaggaaatgaagtggaaataaaattcaagcaagtcaattaaactatttgctgtaatctttaata

SEQ ID NO: 220730 - DNA, 643 bp, Homo sapiens
gcttgtaaacacttgacagaaatgaccatctatgtgaattgcagctttttagaatgaagtggcattttctgaagtatgtgaaggtgatccatccactgaaggatgatttaattcatcattctgtccaacaatggggaagtggcattgctggtctgcagttttgaactctgtcatagacacttggcagcccttcacttgggaggcacagacttgaaaagaacatcaattgagttctgagtgttctggttggaaatttgtatttttcatctgggaaatgtgagggtaaagggtacttgaagaaagttcaaccctgtagctattttcatgacgtgatgaacaatttttgctggtttgagattcctggtttaatttttcaggatccttgaatgtttttcatcctgaataatctgaaaaaaaaacttggaaaaaagagaatagtttaaaactgaatgctacatagaaatatactttaaaatgtaaacaatattcagttgttccmgggctggttttctagctgtttgcttttttcttcctctggattttctgccaatgacttgcacctccacctgctggtgtactgaggaaatgaagtggaaataaaattcaagcaagtcaattaaactatttgctgtaatctttaata

SEQ ID NO: 220731 - DNA, 613 bp, Homo sapiens
ttttaccactttggtcaggctggtctcgaactcctgacctcatgattctccctcctcagcctcccaaagtgctgggattacagrcgagagccaccgtgcctggctctaagatgctttttatagagttatagttatcatatatccagattttaaaattattcattaagtaaaacaaaatttaatttgggtcttgagaaggacaacttgagtttgatatcatgtttaacacaacccaaaatgatggtaaaacacatttttagaggtcttttgaactctgttaatgcagctttaagaaacagtgctgtgtaaagaaactgtatatttaaaatatgtagttttttactttgcagtttacatgactatttgaaaattcccctcatatttaaaataaagtgctatatttttttctgtagtctaaaaaatgcagagaaagttctcaaagtcataaattccttaaagttgtaattttgtagttcactccaatttatttctggggtttattttgtattgtttttaaggaagcacacatcttaagttttaggtgcagcattcaaggtggaaatgctcttctcttaaccagtagggtgagccaagataccattacagtaggatt

SEQ ID NO: 220732 - DNA, 613 bp, Homo sapiens
ttttaccactttggtcaggctggtctcgaactcctgacctcatgattctccctcctcagcctcccaaagtgctgggattacaggcgagagccaccgtgcctggctctaagatgctttttatagagttatagttatcatatatccagattttaaaattattcattaagtaaaacaaaatttaatttgggtcttgagaaggacaacttgagtttgatatcatgtttaacacaacccaaaatgatggtaaaacacatttttagaggtcttttgaactytgttaatgcagctttaagaaacagtgctgtgtaaagaaactgtatatttaaaatatgtagttttttactttgcagtttacatgactatttgaaaattcccctcatatttaaaataaagtgctatatttttttctgtagtctaaaaaatgcagagaaagttctcaaagtcataaattccttaaagttgtaattttgtagttcactccaatttatttctggggtttattttgtattgtttttaaggaagcacacatcttaagttttaggtgcagcattcaaggtggaaatgctcttctcttaaccagtagggtgagccaagataccattacagtaggatt

SEQ ID NO: 220733 - DNA, 613 bp, Homo sapiens
ttttaccactttggtcaggctggtctcgaactcctgacctcatgattctccctcctcagcctcccaaagtgctgggattacaggcgagagccaccgtgcctggctctaagatgctttttatagagttatagttatcatatatccagattttaaaattattcattaagtaaaacaaaatttaatttgggtcttgagaaggacaacttgagtttgatatcatgtttaacacaacccaaaatgatggtaaaacacatttttagaggtcttttgaactctgttaatgcagctttaagaaacagtgctgtgtaaagaaactgtatatttaaaatatgtagttttttactttgcagtttacatgactatttgaaaattcccctcatatttaaaataaagtgctatawttttttctgtagtctaaaaaatgcagagaaagttctcaaagtcataaattccttaaagttgtaattttgtagttcactccaatttatttctggggtttattttgtattgtttttaaggaagcacacatcttaagttttaggtgcagcattcaaggtggaaatgctcttctcttaaccagtagggtgagccaagataccattacagtaggatt

SEQ ID NO: 220734 - DNA, 613 bp, Homo sapiens
ttttaccactttggtcaggctggtctcgaactcctgacctcatgattctccctcctcagcctcccaaagtgctgggattacaggcgagagccaccgtgcctggctctaagatgctttttatagagttatagttatcatatatccagattttaaaattattcattaagtaaaacaaaatttaatttgggtcttgagaaggacaacttgagtttgatatcatgtttaacacaacccaaaatgatggtaaaacacatttttagaggtcttttgaactctgttaatgcagctttaagaaacagtgctgtgtaaagaaactgtatatttaaaatatgtagttttttactttgcagtttacatgactatttgaaaattcccctcatatttaaaataaagtgctatatttttttctgtagtctaaaaaatgcagagaaagttctcaaagtcataaattccttaaagttgtaattttgtagttcactccaatttatttctggggtttatkttgtattgtttttaaggaagcacacatcttaagttttaggtgcagcattcaaggtggaaatgctcttctcttaaccagtagggtgagccaagataccattacagtaggatt

SEQ ID NO: 220735 - DNA, 471 bp, Homo sapiens
tgcaaagatgactccacatacacaaatcaatgtgatgtgtcatatcgacagaattaaggacaaaaaccatatggttatctcaattgatgctaaaaagcatttgataaaattaaacacctcttcctgataaaaaccctcaaaaactaggtatagaaggaacgtatctcaacataataatagcaataaatgacagacctaagtctaatattatagttaatggggaaaaactgaaagccttacttcttatatttggaacatgacaaggatgcccactttcaccactattattcaacatagcatgagaagtgytagctagagcaatcagaaaagagaaggaaataaaggacatccaaatttatttttacttttaattatctgtttatttatttagacagagctcactctgtcacccaggctagagtgcagtggcaagagcctggctcactgcaacctccatctcccaggttcaag

SEQ ID NO: 220736 - DNA, 580 bp, Homo sapiens
aattatgacccagcaagctaaaaatggaattcattttatatcatgtcggatatcattttgccctccaaatatgtactcgtaatggcaaataatgagttatgctgaatgattaatgtgagttaaaaaatgctgattttacttagtttgaaaattgcttatatatttatataagatatattgcttatatatatawgatatatatataagaaatatatataagaaatatatataagaaatatatataagcaatttaactgcatataaggccttgatcactttcgttatcttaaagtcccaattattttgagtgtgagacttccagttatactacattcttggaaattaaagttattacagctatatccagtagaattaagtagggaaatatgtaatcattataaaaattgcatttaaaatgaagagattatatagatttaataaatttacagtgataggatctttaggatatataactctgagcaacacatttttgctcttgaatattttttcaattgctttaatagctgtagcagtttattctcatttttgttaacaaataaaaataaacacaccataacaa

SEQ ID NO: 220737 - DNA, 580 bp, Homo sapiens
aattatgacccagcaagctaaaaatggaattcattttatatcatgtcggatatcattttgccctccaaatatgtactcgtaatggcaaataatgagttatgctgaatgattaatgtgagttaaaaaatgctgattttacttagtttgaaaattgcttatatatttatataagatatattgcttatatatatatgawatatatataagaaatatatataagaaatatatataagaaatatatataagcaatttaactgcatataaggccttgatcactttcgttatcttaaagtcccaattattttgagtgtgagacttccagttatactacattcttggaaattaaagttattacagctatatccagtagaattaagtagggaaatatgtaatcattataaaaattgcatttaaaatgaagagattatatagatttaataaatttacagtgataggatctttaggatatataactctgagcaacacatttttgctcttgaatattttttcaattgctttaatagctgtagcagtttattctcatttttgttaacaaataaaaataaacacaccataacaa

SEQ ID NO: 220738 - DNA, 546 bp, Homo sapiens
tgtcatcagttaaggtggggcagggcatattcacttcttttgtgattcttcagttacttccggccatctggtcgtatccgtgcaagtcacaggggatgcgatggcttggcttgggctcagaggcctgacattcctgccttcttaataagaaaaataaaacaaaatagtgttgaagtgttgggacggtgaaaatttttgggggggtggtatggagagagaatggacgatgtttctcagggctgcttcaagcgggatcaggggcagtgtggraacctagagtgggagagattaagctgaaggaagatttgtggtaaggggtgatattgttgggttgttagaagaaacatttgttgtatagaatgattggtgatggcctggatacggttttgtatgaactgaaaaactaaatggaataagaaggagaaaaacaggtataaaaggtctaagaattgggaggacctaggacatctgattagagagtgcctaaggagattcagcatagtcctgccagcaaagattatttatttacttcaagagttaagagta

SEQ ID NO: 220739 - DNA, 515 bp, Homo sapiens
ctcaatgtccatgagttcaattgttttcatttatagatcccacaaagaagtgaaaacatgaaaagtttgtctttctgtgcctggcttatttcacttaacccaatgatcttcaattccatccatgctgttgcaaatgacaggatctcagcctttctatgattgaawatcattgtgtatatgtatgactttcttttatccattcgtctgttgatggacacttagattgctttcaagtcttggctatggtgaacagtgctgcaacaaacatgggggtgcagatatcacttcattatactggtttcctttctttggggtatatatgcagcagtgggatggcgggattgtatggtagctttatttctagttttttgaggaacctccaaacttttctccatagtggttgtactaatttacattcccactaacagggtacaagagttccctatactccacatcctaaccaacatttgttattgcctgactttagatatttccttttaattggggtgacatta

SEQ ID NO: 220740 - DNA, 515 bp, Homo sapiens
ctcaatgtccatgagttcaattgttttcatttatagatcccacaaagaagtgaaaacatgaaaagtttgtctttctgtgcctggcttatttcacttaacccaatgatcttcaattccatccatgctgttgcaaatgacaggatctcagcctttctatgattgaaaatcattgtgtatatgtatgactttcttttatccattcgtctgttgatggacacttagattgctttcaagtcttggctatggtgaacagtgctgcaacaaacatgggggtgcagatwtcacttcattatactggtttcctttctttggggtatatatgcagcagtgggatggcgggattgtatggtagctttatttctagttttttgaggaacctccaaacttttctccatagtggttgtactaatttacattcccactaacagggtacaagagttccctatactccacatcctaaccaacatttgttattgcctgactttagatatttccttttaattggggtgacatta

SEQ ID NO: 220741 - DNA, 398 bp, Homo sapiens
gataaaaaacagtgactgttgccttttttttttttttttttttgagacggagtcatctctctctcccaggctgcagtgcagtggtgcgatcttggctcactgcaacctccgcctcctgggttcaagtgattctcctccctcagcctcccaagtagctgggattataggtatgcaccaccatgcccggctaatttttttgtatttttagtacagayggggtttcaccatgctggtcaggctgggctggaactcctgacctcaaatgatctgcctgcctcggcctcccaaagggctgggattacaggtgtgtgccacctcgcctggcctgttgcattttcactaacttatgacttctctagtatttatctaaaaaacagagacaatatctctacaaatca

SEQ ID NO: 220742 - DNA, 621 bp, Homo sapiens
tggttgctatatttatatatgcatatgcgtgcttttttgttatgaaatactacttaatgactccctttaaattaaaaaaaaatattttcctatattttaaagcttacaaacttatcctttgctttttatttaccttattaaagactaaacaaatctatcaatataaaaagtaaccacttgtcaggaaattgcctaaattgtttttcaaatttattcacttactgaattttcagatcatctctttccttcttggatattgaggtagctgtacaaaactatccatttgtctatctgtctacccatatgtcacactggaagaagggggccttctgaaagaatgtggtccagtggagtggttaagggcctgcttcttaaatcctagctctgttcttttatttctgtgtggtwccactagctgcagcaaaccttttccaaacccgtaacgagtgtaaatagtgttcagttgtaaaaaggtctcttttcagcatggtaatataccttattaaattccaaacataataagtattgatggcaaacacatcaggacccagtgcagcttctactatgatttagttctctacaaatgacttcagcactcagctcccaatgcattttgctaat

SEQ ID NO: 220743 - DNA, 509 bp, Homo sapiens
taaaagacagaatgttttacatgttgtattttgaggagattttttttaaataacaagtttttacttactcatctttaaaataaaagagaaagtaactgcccaagaaacagccttatcttttgctttctacaattcagaattttgaaagaaaatcctcaaatcctccaaacaagtgtaatacacatggttttgctggcagaatttattccaagcatctccaggcaatatgcatgtgcacccgcgcacacacgtgcacgcacacacagacacacacacacacacacacacacatttttgaatcattaagtcatttggaagaatctccagaagtgtgccgaggcatgtttttggtgttttgccaaattatgtgcttctgtttgtggctttcaaatatggattagacagacgcacaagcatgtactgtttggcaagtagmgacaatggtctagtctgaatttagtaatttaagcttttcattagtcctcgtaggtgaaagaaagaattaacaa

SEQ ID NO: 220744 - DNA, 485 bp, Homo sapiens
cctttccctggtaccagctctgaccaactattaatttagagagacagtttaagaaccacctgatcatcacctaatggtcacctgacattcctggaagckggcggggggtggggggggggcatctcctgcactggtcttgtctgcctaactacctaccctaacaagaccacagagataaagtgtccatcacatcatataaaggattcctgctaccatcatgatttatcactgataatattgagtttgaaccaatgacaaggtagtatttgtcaggtttctccgctaaaaagttactctcctgctgtcttctctctatactttactctttaaaagaaaatgtctaagcacagcccatgcttaaggggtagggagttatattccacctttttgaggggaaagtatctgtacaaattgatattcttctgtatgtgaaatgtgtctattccaccccccatttctttatatatgcaatcattttgttatat

SEQ ID NO: 220745 - DNA, 487 bp, Homo sapiens
atttcgagaccaccgtttatgtttgtcatctctaaaataagatgattatttcagatgtaatggtttyacattttatttgtttcctgcttcccagtccaatggtcgttttcagaccctctcattcttggaccccagtccaattttgctgagaatgctaaaggctctgaggataatgtgtcttcccacaccccaggagactccactcaccaccaagtgtggccagaccatggctattctgtctgtgttcctgttgatttgtagaagaaagatggtagtacaaaagttttccctgccctgtgggataagatccctgcaggtagaccaggaggaataagcatgacagttgtaaaatcttagaaatattacttagcttccatcttttccataatgatgagttcatctgaaggagttcagaaatagattcttataccttctaagactggctggattttctattcttggccagacgtttgttctaggaagaatt

SEQ ID NO: 220746 - DNA, 413 bp, Homo sapiens
gattatttcagatgtaatggttttacattttatttgtttcctgcttcccagtccaatggtcrttttcagaccctctcattcttggaccccagtccaattttgctgagaatgctaaaggctctgaggataatgtgtcttcccacaccccaggagactccactcaccaccaagtgtggccagaccatggctattctgtctgtgttcctgttgatttgtagaagaaagatggtagtacaaaagttttccctgccctgtgggataagatccctgcaggtagaccaggaggaataagcatgacagttgtaaaatcttagaaatattacttagcttccatcttttccataatgatgagttcatctgaaggagttcagaaatagattcttataccttctaagactggctggattttctat

SEQ ID NO: 220747 - DNA, 622 bp, Homo sapiens
cacagtaggaaacaattttgaagtcaatcacattctgtactcagcttatcattttaattttggttttcttaaagtcagctcaataggggttatggaactccaacagttaggtgagtatgagtaacaaaatataaagcaattaatacaaacatgggttaaaaatgataaggtcaaatatataaattatackgagagaatgtttactgctgcagagacacaaacatacttgaaaggatgttaaaattgttgaagaaaagaaaactcgattatgggaaatagatgtatttaaattgaatactccaagggacagtttaagacattttattatagttctgactcctgtgtcttctggaccagttttgtggttcaccttaatggcacaatgatgaaagcactatgttacaggtagatgtttaatgtttttctcaaccatccactcttacacgaaaatgtcatctaatttatgtgatcctgatctttctgtccccttccacttaatcatttttgtttatctctctttacattcacgcccttgttcgtctctttagctgtcaatactctgctgtattctagttttgtattttctgtagttatatgggattaaaaatgtgggtttgaattc

SEQ ID NO: 220748 - DNA, 541 bp, Homo sapiens
cacaaaaagacataggcatttaactaaacaataggctattaataagtgaacacttayaaatgtattaaattatctaaatatgagtaaaggaataacttgcaggtatgttcaatttagtgccatttaaatacctttttttaaaaataaaaacagtaatagtataaattgtttatggatacatgcacatttaatacagttataaaaatccccacgataaaagcgcacacaaacagcaggtcagaagttccttgggaaggagagtggggaaggatgtgggttggaattgtttgtgtcaaagtgaaaacatgttaaaccctgaaggtgggacatacatttctttagatattttttctatgcttaaaacatttcacaacttaattatttatttattaattattttcccaactttattgagatgtagttgacagtttaaaatggtatatatttaagtcgtacaacttgatgatttgctatatacatacattgtgaaatattcaccacaatcaagctaattaacatgttcacctcacagttacaattt

SEQ ID NO: 220749 - DNA, 555 bp, Homo sapiens
ttgttttgaaaataactttttaattaatttttaaactttttaaaaaatgagggcatacagtcagcatttaaaatgcattataatttactcatttactcagttttttctagtctctctaataataagctaaaattatttttattttcaaaacttagtgataatctgagataagtggaaattaaaacgtggtaaaataaagcaatatattcattaagtcaatataaagcattatttattatattttatattactctgtgtcctgagaaaatggaagccaaatgttattcttggctttaactattggttttgatggttgcttgtcattaggaacacagcagccacttttgaatgcttgcttacatagattttgggtgtttagaaaagcttgtggccagcttctcygtcatctaaaccttatttatctgaatgtttcagctgtgcctggagactttcaatgagacaaggttgcatccatctgcaattctaagcagctatttaggtgtgttctgtattatttactcactattgtttattacaattttgtgttatcgagac

SEQ ID NO: 220750 - DNA, 543 bp, Homo sapiens
gttacaaaaccacagaatgtattcaatacaacggcaaatattgatttgaggacattggtatttgaacatttattagaaataaatatgagtctatttgggcaacattaaacaaacattactctgtgctgaataggtgccaggctggttcctatgtgctaagrcagtgtgaataagagagactgtcctcaaaatgagaaaagaacatgcactgaaattgaataatatcataggagaaaataaggcaaagactcctgtttttctcatttgaattgtccaccttttaggtaaatgtgcattcattaactatattcaaacagtttagtaattcagaatgtgattaactgaaatgcagcactaatctacttgcaaatctggttctctgggaaacaaggaaagatggaaaggctgtttgaaaatggtagcatctgacctattacaagcctgggtgaaaaaaagaaatactaagactgctgcaacaaaacaaacccataaaagcacaaaatgggagtgcaagccatttacctttacaacagctgcatggtg

SEQ ID NO: 220751 - DNA, 376 bp, Homo sapiens
tgagaaaagaacatgcactgaaattgaataatatcataggagaaaataaggcaaagactcctgtttttctcatttgaattktccaccttttaggtaaatgtgcattcattaactatattcaaacagtttagtaattcagaatgtgattaactgaaatgcagcactaatctacttgcaaatctggttctctgggaaacaaggaaagatggaaaggctgtttgaaaatggtagcatctgacctattacaagcctgggtgaaaaaaagaaatactaagactgctgcaacaaaacaaacccataaaagcacaaaatgggagtgcaagccatttacctttacaacagctgcatggtgcagatgaatcaaagcactgccagc

SEQ ID NO: 220752 - DNA, 578 bp, Homo sapiens
aattgaataatatcataggagaaaataaggcaaagactcctgtttttctcatttgaattgtccaccttttaggtaaatgtgcattcattaactatattcaaacagtttagtaattcagaatgtgattaactgaaatgcagcactaatctacttgcaaatctggttctctgggaaacaaggaaagatggaaaggctgtttgaaaatggtagcatctgacctattacaagcctgggtgaaaaaaagaaatactaagactgctgcaacaaaacaaacccataaaagcacaaaatgggagtgcaagccatttacctttayaacagctgcatggtgcagatgaatcaaagcactgccagcaataaacagatctggtcaatgtcaattttccccaggcatctggtattgtcactagtgattttactgaagattacccatcagttagtgcagatttgttttttaattggcccttaccgcacctgccacatttttcttgttcttggtcccagaagctttctgcagagatgaagaaggtggctatctggagaatatattcttaaagcacaccgtgaaggacattcat

SEQ ID NO: 220753 - DNA, 591 bp, Homo sapiens
ttcaagaaacataagaatgtgtgtaataagttccttaagaaaaactgctctaagaagcaatctgttaaaaaagacagccagaatatcttgcacaaaatatgatgcatattttctaataaaaattccatcctttcaaatgttaacaatcatatacatactctgagctcaagatcagggatttccatatttgtagtttayagatataaaatcagaattctatcaagcctggaaatcttgttttctgattgcccaatataaagtttactaaaatcaaagtactgataccaatcatttcaaaactcatgtcaaacttagaaaaaataaattttactactgaaaatgaaaactttagcaattagtataataattattataatagcattcatagtactgaaagtttttacatacatgcactccatactttacttcatattttatgtacagtaatttatctgtatgtaatttataacctgcttcagaaataagcgctaatatgccccattttacacacatagcctcatgtgtgcaaaaattaaatgatttgcccgaggttacacgcactgtatgcagcagagctgagatttacaccca

SEQ ID NO: 220754 - DNA, 513 bp, Homo sapiens
ttctagtttatttgcgtagaggtgtttgtagtattctctgatggtagttatcctatcattttatatgtaaaacaacttacttttgttgctcaagctatagcaattattcatgcaccttcttttgtataactaagctgttctatctgccatctgtgtatatgcataattatatctggaaagtaattaaaagcatktggcctcatataaattttgacttattgttgctgttttagttgtgtgtataaaattcactagagtagttctatggaattgctctgaatgatttttaaatattttatttacctatactgaaatttgatgaagtgctctagtaaactaaaaaaaatgcaaaaattgtaaggattcaagatttttacttcttttatactatcaaaaaaggactaaaaataaaataacagactcaagggttgcataaagtgcatatagataaaaaataaaggaaaacataatttctgaaatagaaaggttctataaataaatctgaaaaatact

SEQ ID NO: 220755 - DNA, 512 bp, Homo sapiens
aaatacattaaaacacttagaatatgatcattttgcaatcatctccagtgaattaatgaatctaggcactgagcaacaacttataactcacagaaaaatgggaaaaccagatgttacaaatatctcawtagaagaaaatgccatttatactcttgccaaaggataaaatctacatttgatttgattgagcctctgatcaaatatgatctagcctctgaacccagttgacaaattgtaggaaatgcagtagacgcaggaacatgccaagctactccaagattttgcaattgactaagtgatagtgtacaggccaaacctcccaggttcttcaacagaaagaaaaggaaatagtcaaatgggaaacctatgaatgaaagtgatttaacttgtatgtcaacttttttaaatgagcaagacgaagttctgttgtctatgggcacacacttaggtgatactactaaagaaacaaaaggaatagagtggtgtttacttttggaggaagacaggaattt

SEQ ID NO: 220756 - DNA, 629 bp, Homo sapiens
ttccaatttttttaggtagcttttgtgtagggggactttttcctgaagatatatatgtttatggttgggtagggcattctggctttgattttagttggttgcagcagtgtgatctctgtagaatttcttcagatgtaaattgcatcagtgttatctgtgatttcctcagttgcttagagtgcagttatcagtagatgctgtggtgaagttttgctgggaagtaaaatgctatgtgygccagatgttgtgttcccatggtggcagcagtgagctgagtttgtctgtccttgggcctcacagtggcttatcctggtactggtatttttgggcccaggcagttctgtgttaggtcttcttatggtttgcccagatgttgttggtggcagcagtgggctgggtctgtggcaggttcttgaacccctaggcagctggtgtgatgttggcaatggcattattagtggtggagcaaaccagtggaacccaagcagttcatgccagtgtttgtggtggctgccacaggtggtggtacttgtgggtggttgccaactacattgggcaacctgcagaggcaggttgtttctgcccctgagaggagtgttcaggtaccaacagtgatagtctgggctgtg

SEQ ID NO: 220757 - DNA, 580 bp, Homo sapiens
tgtctccttactcgcttttggtgctctctgtcacttctctgtttaatcttattgtttgctcttagatgatttattcaaattgtgactatttacttgctgttacgctttttctctgtggagtaggaattcactggttgcatcattcagccatattgaactcaagtctcccatatttgctttttaaaacaggaacctyagtgtttcatatcattcataatgatcttttgcataaatcatatcccatacaaatttttgaataaagaattaaagagtaagttgttcaattaacctattttctgggataggtcttctctcaatgtatttgagagagaattttagcaaaatacagctataatttgggctgctaattgaatttaggtaaacaagcaccctcgtcttgaatactctatctaccatcaaaagaatattaaacaaacaaacatgaaaacatctcaggtctaataacacattaatcaacaaaactatcttcatcaatgtttgagctaatacaggaattggtaaactgttgccagcagaccattttttgtaaataaggtttgttttggaacacagccgatct

SEQ ID NO: 220758 - DNA, 580 bp, Homo sapiens
tgtctccttactcgcttttggtgctctctgtcacttctctgtttaatcttattgtttgctcttagatgatttattcaaattgtgactatttacttgctgttacgctttttctctgtggagtaggaattcactggttgcatcattcagccatattgaactcaagtctcccatatttgctttttaaaacaggaacctcagtgtttcatatcattcataatgatcttttgcataaatcatatcccatacaaatttttgaataaagaattaaagagtaarttgttcaattaacctattttctgggataggtcttctctcaatgtatttgagagagaattttagcaaaatacagctataatttgggctgctaattgaatttaggtaaacaagcaccctcgtcttgaatactctatctaccatcaaaagaatattaaacaaacaaacatgaaaacatctcaggtctaataacacattaatcaacaaaactatcttcatcaatgtttgagctaatacaggaattggtaaactgttgccagcagaccattttttgtaaataaggtttgttttggaacacagccgatct

SEQ ID NO: 220759 - DNA, 580 bp, Homo sapiens
tgtctccttactcgcttttggtgctctctgtcacttctctgtttaatcttattgtttgctcttagatgatttattcaaattgtgactatttacttgctgttacgctttttctctgtggagtaggaattcactggttgcatcattcagccatattgaactcaagtctcccatatttgctttttaaaacaggaacctcagtgtttcatatcattcataatgatcttttgcataaatcatatcccatacaaatttttgaataaagaattaaagagtaagttgttcaattaacctattttctgggataggtcttctctcaatgtatttgagagagaattttagcaaaatayagctataatttgggctgctaattgaatttaggtaaacaagcaccctcgtcttgaatactctatctaccatcaaaagaatattaaacaaacaaacatgaaaacatctcaggtctaataacacattaatcaacaaaactatcttcatcaatgtttgagctaatacaggaattggtaaactgttgccagcagaccattttttgtaaataaggtttgttttggaacacagccgatct

SEQ ID NO: 220760 - DNA, 601 bp, Homo sapiens
tcttatctattcttttgaaaatattaattagaattattttaaaatccaatttagataattctaatatagaggtcactagggttgtaattatattggtatgttttatttttcagtagtgctgtttcttgatgttctctttctttttttgtttttttggtttttttttgtttaatatgggatctcatgtttgaaaacgtatagcagttttggatgatatcatcattcctcaaagacaattcaccctatcctcagtcaatatgaagataaaacatgtctcccctttacctgtggttgacatcacattctccagcagtatttatgtcttcctctggtctcagtttccaccaaatagctgcttcctccawgatttctgttcctgctgggaatctaaacttcaatgttttcagttctcactaggctcctgtcttcttaaaatcagcccctttctctatcgccccagtcccagaagtggtagaacctgcttgctatggctaatcttagggttgccttacttcttcagttttctgtttctattattttattacactattttaaaagttcttctgtagattctcatcagacagctactaccaggaacata

SEQ ID NO: 220761 - DNA, 458 bp, Homo sapiens
attctttctcatccctctagtgatagatagagatgaagatttagagagagttttatatctctatctgtatctctatctctatgtatgtatgtatgtatgtatgtatstatctatctatctatctatctatctatctatctatcattgcatctttgtcgtatgacagcctacttcttttagcatcagaaggaattcctaacctttccttttcatgtctgggagagattatctcatggggtaatgttctcctcaccagataattttcaataaaagcagaaatggctcccaaagatattcatgctcgaatccctggaacttgtgaatatgtcaccttatatggcaaagggaactttgtataggtatgtgattgaggttacagactctgacgtaagattttctggattataatagtgagcccactctaagcacatgagtcatctggggtcagggagggagag

SEQ ID NO: 220762 - DNA, 458 bp, Homo sapiens
attctttctcatccctctagtgatagatagagatgaagatttagagagagttttatatctctatctgtatctctatctctatgtatgtatgtatgtatgtatgtatgtatctatctatctatctatctatctatctatctatcattgcatytttgtcgtatgacagcctacttcttttagcatcagaaggaattcctaacctttccttttcatgtctgggagagattatctcatggggtaatgttctcctcaccagataattttcaataaaagcagaaatggctcccaaagatattcatgctcgaatccctggaacttgtgaatatgtcaccttatatggcaaagggaactttgtataggtatgtgattgaggttacagactctgacgtaagattttctggattataatagtgagcccactctaagcacatgagtcatctggggtcagggagggagag

SEQ ID NO: 220763 - DNA, 533 bp, Homo sapiens
ggttaagggaacagattgataatatttactaaacagatccygaataaagggtatgctgatagcctggtatcttgagaatagaagcattcctaataataatatggattcttgcacaagatagtaattcataaaataatcctttattaacaaatctttgtagcagagcacatctcccatgaatttttttaatcctatatataaacaacattgtacctagtgtggacacattgctcctcttacttttgagaacaccctactctacctatggagtagctctcctttcaccccttaactttcttaataaacttgcttttgctttgcactgtggactcgccctaaattctttcttgagcaagatccaagaaccctctcttagggtctggatcgggacccctttctagtaacagaatgttcctagtttaaacttgcttattgtccaagaaactaaaaactaaatattttgtgagctatgactctggaaaatctcataagctgtataataatctagggtattatagctgtaattcatatat

SEQ ID NO: 220764 - DNA, 533 bp, Homo sapiens
ggttaagggaacagattgataatatttactaaacagatcctgaataaagggtatgctgatagcctggtatcttgagaatagaagcattcctaataataatatggattcttgcamaagatagtaattcataaaataatcctttattaacaaatctttgtagcagagcacatctcccatgaatttttttaatcctatatataaacaacattgtacctagtgtggacacattgctcctcttacttttgagaacaccctactctacctatggagtagctctcctttcaccccttaactttcttaataaacttgcttttgctttgcactgtggactcgccctaaattctttcttgagcaagatccaagaaccctctcttagggtctggatcgggacccctttctagtaacagaatgttcctagtttaaacttgcttattgtccaagaaactaaaaactaaatattttgtgagctatgactctggaaaatctcataagctgtataataatctagggtattatagctgtaattcatatat

SEQ ID NO: 220765 - DNA, 536 bp, Homo sapiens
agattgataatatttactaaacagatcctgaataaagggtatgctgatagcctggtatcttgagaatagaagcattcctaataataatatggattcttgcacaagatagtaattcataaaataatcctttattaacaaatctttgtagcagagcacatctcccatgaatttttttaatcctatatataaacaacattgtacctagtgtggacacattgctcctcttacttttgagaacaccctactctacctatggagtagctctcctttcaccccttaactttcttaataaacttgcttttgctttgcactgtggactcgccctaaattctttcttgagcaagatccaagaaccctctcttagggtctggatcgggacccctttctagtaacagaatgttcctagtttaaacttgcttattgtccaagaaactaaaaactaaatattttgtgagctaygactctggaaaatctcataagctgtataataatctagggtattatagctgtaattcatatatctccccagaggcctc

SEQ ID NO: 220766 - DNA, 351 bp, Homo sapiens
aatagaaacctagggttaaatgatatgtaactcccttgaaccttctagaatttagacaaaagtcaccattttcaaacaatgtgttccacagactccttctgttctttgaaaatgtctcaaagataaggagagggatgaagggaaatcagctatgtaggctccacatttgtatcctcgtcaaccaaagtgttttcttttgtctgatttataaactcagaatccctcaagaattcagttaggaaatctttcggaaactrtactatattatggtatcttagctttacaaattagattatcctctataaaaaattctaatggcctattacttaatacctttgcactgaaaatgtt

SEQ ID NO: 220767 - DNA, 522 bp, Homo sapiens
gcctgttcagaggaaaatatcagcattaaaaggagcccacattgatatatcaggaagaattattgttgatactgttagagaacagaacattctgtgtccaaatatttgaaagctgggtaagggtgtgtggaagaggaagaggttctaattcctgttctctccatgagaactaggatcaggccaggcggggtggctcacatctgtaatcccaacactttgggaagctgaggctggaggatcccttgaacacagcagttcaagatcagcctgggcaacatagtgagtaagaccctgactctattttttaaaaattattttaaaaaataaaaaaaggagtaggatcaaaaagtgaaaatgtggtggggctgatctatcatgaacatatttgatttcakgcattcattcaacagatttttggggggcacctcctgcaagtgaggcacaattgaaggtgtctaaagaagaaatcttatctaaattgcgatgcctctaagaaaaattacacaaaatttactaggggct

SEQ ID NO: 220768 - DNA, 415 bp, Homo sapiens
ttttgttatttttttttcttcccagtaactgagagaaaattaccattcattcacataagattcattctcttccctcctcctgctccttcctcyggcttcccatctctctcctgtttggaaatgtctgatttccttccagttctggaatgaatcagggtcccaccttccagtctgcataccccacactcctctccacctgtaggggttctttctcagtgagatttgtggggccctacaagaatatttttgtcagtgttgcttgtattctggaaatatttcaggccactaagcgatctcacagatcagtagtcaacccaggcgagacattccgagccaataaggagttaacccaaacatggggagacgggctggttgatttgaggtggctgaggagattgggggagatggggaattc

SEQ ID NO: 220769 - DNA, 415 bp, Homo sapiens
ttttgttatttttttttcttcccagtaactgagagaaaattaccattcattcacataagattcattctcttccctcctcctgctccttcctccggcttcccatctctctcctgtttggaaatgtctgatttccttccagttctggaatgaatcagggtcccaccttccagtctgcataccccacactcctctccacctgtaggggttctttctcagtgagatttgtggggccctacaagaatatttttgtcagtgttgcttgtattctggaaatatttcaggccactaagygatctcacagatcagtagtcaacccaggcgagacattccgagccaataaggagttaacccaaacatggggagacgggctggttgatttgaggtggctgaggagattgggggagatggggaattc

SEQ ID NO: 220770 - DNA, 621 bp, Homo sapiens
agcatctccactcctacagtgcaactcccccttatgctcctcccagaagaggcagaaagagcctgccctccaggtctttttgagaagacacctgtgcactgagatgttgaatgctaggtccccaccctacaaggtagagggagagcactggccgctgcagaagccaagcctggagagatgggcttcctgacctctgcacagagcagagtcctggaccttcagacccagaggctttaagatcaggggccaatctggaatcatctctgcagtgaaayaactgggtgtcagtgatggcagcggctccctgcctctgtcatcacacctgccagattgctttcagggcaaggggctccctttggcctcctagttcctcagcattcaccttcccgccctgcttgtgtctctctctctgttccacattagaactggttgcatttcagagattcagagacatctagcctcaaacagacctagggaatctgacctatgaacttctgcgtgactggcctggcccaggttctgctgattaccctcagtgaataataaactttagccaagtctgatacagttgctaaagatcacttactccactgaagatctaacttggcttgtgggtcccta

SEQ ID NO: 220771 - DNA, 444 bp, Homo sapiens
aggtgaaaatcaatcagctgggctacggctctgacgttttagtggacttattttcctggtcctcgcctgaagtttggtaataaccagaccagttcagacaggtggagtgctgactgacctctaccacccaactkggtgcacttggctggctgtgtctcagtagactggttctttgttggataaaggagattgacgtgggaaaaggtgagccagcataaagtaaattctgttctcattctctcctcctgtagacaaattttgtagctgccttcattcttccttggaccttatatctcccaggctaagtaggaatttggaatcaagacgagataattgcttaccctctttgaacagttactacatggcaggcaatgttctagtgctttaagtatatcatgtcaattgtttctcatagcagcccactggtagagttactaagttaga

SEQ ID NO: 220772 - DNA, 465 bp, Homo sapiens
actggagttagaaaagctacctgaaagtcttgccactattcttggaatattcaataccaattactccctgggcctcagtttyttcatcataaaatgagggagcttgatgtttcatctataaggtttcatttcattcagaagccactcttccaagggaagaaaagaaggcttttttttaaaaaaaaaaaaaaaaaaggacttttcctcctttgcttacccattttccaaggtgtctctctcatatctgagatttccttctgcgcctcagacttggtcatgccttacctttttctttacctcaaagacttgtgagaattcaagggcactgtgcatctgaaattactgtgtggcatcaaaagcaaaatacagatttaagataatgtttcttatattttttgccctttcttcacaccggaacacagctagaactctgggatcctcctgaaaggaccttcagcaattttc

SEQ ID NO: 220773 - DNA, 465 bp, Homo sapiens
gtcccctgcactggagttagaaaagctacctgaaagtcttgccactattcttggaatattcaataccaattactccctgggcctcagtttcttcatcataaaatgagggagcttgatgtttcatctataaggtttcatttcattcagaagccactcttccaagggaagaaaagaaggctttttyttaaaaaaaaaaaaaaaaaaggacttttcctcctttgcttacccattttccaaggtgtctctctcatatctgagatttccttctgcgcctcagacttggtcatgccttacctttttctttacctcaaagacttgtgagaattcaagggcactgtgcatctgaaattactgtgtggcatcaaaagcaaaatacagatttaagataatgtttcttatattttttgccctttcttcacaccggaacacagctagaactctgggatcctcctgaaaggaccttca

SEQ ID NO: 220774 - DNA, 465 bp, Homo sapiens
gtcccctgcactggagttagaaaagctacctgaaagtcttgccactattcttggaatattcaataccaattactccctgggcctcagtttcttcatcataaaatgagggagcttgatgtttcatctataaggtttcatttcattcagaagccactcttccaagggaagaaaagaaggcttttttttaaaaaaaaaaaaaaaaaaggacttttcctcctttgcttacccattttccaaggtgtctctctcatatctgagatttcyttctgcgcctcagacttggtcatgccttacctttttctttacctcaaagacttgtgagaattcaagggcactgtgcatctgaaattactgtgtggcatcaaaagcaaaatacagatttaagataatgtttcttatattttttgccctttcttcacaccggaacacagctagaactctgggatcctcctgaaaggaccttca

SEQ ID NO: 220775 - DNA, 466 bp, Homo sapiens
tgtcccctgcactggagttagaaaagctacctgaaagtcttgccactattcttggaatattcaataccaattactccctgggcctcagtttcttcatcataaaatgagggagcttgatgtttcatctataaggtttcatttcattcagaagccactcttccaagggaagaaaagaaggcttttttttaaaaaaaaaaaaaaaaaaggacttttcctcctttgcttacccattttccaaggtgtctctctcatatctgagatttccttctgcgcctcagacttggtcatgccttacctttttctttacctcaaagacttgtgagaattcaagggcactgtgcatctgaaattactgtgtggcatcaaaagcaaaatacagatttaagataatgtttcttayattttttgccctttcttcacaccggaacacagctagaactctgggatcctcctgaaaggaccttca

SEQ ID NO: 220776 - DNA, 398 bp, Homo sapiens
aagattaaatcccaggaacagcaaacatttgaagggctgatgcggaagtaaaatccttaaagaagttcggattctcagtagggaggaagcaatgaatagtgtcaaatgtaacgagaggccaaacaagtttaaaaggacagcattgtttttttgaggtttagcattctggaagtgaagagcaattatagtagattcatggtcctaattctgaaaacctgattttaattataatagttctattatgattttcactttgtttcactttgaggttgatggtttttttccctctgttacattattatctgtttatgacagtttctgtcttcttgttatccttctttctttgatttctctacakctcacctttttgggacttcctgtgatgaccagttacttta

SEQ ID NO: 220777 - DNA, 577 bp, Homo sapiens
cctctgactatgtattttcatatagcctgtcttcaagctcactgattcttctgcttgatcatctactgttgagagactgatacatttttaagtttgtcagttgaattttttagcttcagaatttctgcttaattattttttattatttcagtctttttgttaactttatctgataggattctgaattttttctctgtattgtcttgaagtcattgagcttcctcaaagtagctattctgaattctcttaaatgtcacatatctctcactccaggattggtccctggtaccttgtttagttcatttgatgaggtcatgttttcctgggtattcttgatgcttgtggatgtttattgatatctgggcattgaaaagttaagtatttattccartcttcatagtctgaacttatttttacccgtccttcttgagaaggctttccaaagggaattaagtgttgtgatctaagtctttagtcactgaagccatatctgctttaggggatgccccaagccaaataatgctgcaatttttgcagactcgcagagatatagccttggtgggcttgggtaagatct

SEQ ID NO: 220778 - DNA, 577 bp, Homo sapiens
cctctgactatgtattttcatatagcctgtcttcaagctcactgattcttctgcttgatcatctactgttgagagactgatacatttttaagtttgtcagttgaattttttagcttcagaatttctgcttaattattttttattatttcagtctttttgttaactttatctgataggattctgaattttttctctgtattgtcttgaagtcattgagcttcctcaaagtagctattctgaattctcttaaatgtcacatatctctcactccaggattggtccctggtaccttgtttagttcatttgatgaggtcatgttttcctgggtattcttgatgcttgtggatgtttattgatatctgggcattgaaaagttaagtatttattccagtcttcatagtctgaacttatttttacccrtccttcttgagaaggctttccaaagggaattaagtgttgtgatctaagtctttagtcactgaagccatatctgctttaggggatgccccaagccaaataatgctgcaatttttgcagactcgcagagatatagccttggtgggcttgggtaagatct

SEQ ID NO: 220779 - DNA, 593 bp, Homo sapiens
gagagggaaaaaaataacttcatcattactgaattatcaaaatgaggtcttttaatttatctattactattataaggctagttagaaaatttaagtcattttctaagagatagaaattttgttagcttgatttttctgactttttgtcattccttctcttatgtatggtgccatctgctgtttgtgggaagtattttatattttgaagcactacacataatagaaatacagtgtctaaaagaaaaatgycaaaatacatgaaatgaaaaaagcagtagtgtggcccgtttgaaactttgtggcctgtggcttgtttctttttatgtaaaaattatttttatatctgattatttttagtacttacatgaatcacaagattttggtactcatcgtgttctgtcttaattttgtttttgctcagaatagaagtaatcggtaaacatttgttagttgactcatttggtttgttttttgtgactcctcaggcacctttcttgtaagcttctgcttacagtctatgcaaccttaggcaaataatttcagcccttagcacctctgtttccttctccataagaagaagataataatatcaa

SEQ ID NO: 220780 - DNA, 552 bp, Homo sapiens
actctcctgtatgaggtgtctgtcaacccctgctgggaggtgtctccccatcaggaggcacaggggtcagggacccacttgaggaggcaggctgtcccttagcagagctcaagcactgtgctgggagatctgctggtctcttcagagctagcaggcaggaacgtttaagtctgctgatgttgtgccacagccgccccttcccccaggtgctctgtcccagagatgtgggagttttatctagaaacccctcactggggctgctgcctttctttcagagatgtcctgcccagagaggaggaatctagagaggcagtctggctacagcagctytgtggtgctgcggtgggctccgcccagtttgaacttcctggaggctttgtttacactgttaggggacgaccactactcaagcctcagtaatggcggacacccctccccacatcaagctcaagtgtcccaggtctatttcagactgctgtgctggacagcacagcagtctggtgtttttgaagtgctttcatgaagagataaaaaaatgttaactttgaactt

SEQ ID NO: 220781 - DNA, 634 bp, Homo sapiens
tggtttattcattatgatacaagaaaaacaataaatgattagttcaattgatgaataagatgccttcataaaaattcaaccaactactcataattgtaggaactcatgaaaactagaaatagaagatagcttccttcatacatatagatgaaatgtttaaagcatttttggctgggaacaattcaagtatgcctagcatattcagatataacagaccatcatactttaagttttagactgtgaaatagataaaggtataaaatttatgattatgcagttaawataatctacagataatttgcagaatggctaaatgagaataaaagcttactaaatgtaggtcaatattttaaaaatcaactttatgtcttgatatcagggcagagaacccaaaataaatacattgaggaatctacagtatattgaaagaagaatacaatatagccatgacattaaagataggcacctggtgaggataaacatctcagtcaaagcctgccttacagtgaagggtcacaagaggttgggcatgggctctagtttttctttcttcagggttgtgctggcatgcacttcctctcttagatctggaactatcagtgtgtgcacagaacacctcagatccaatcctgta

SEQ ID NO: 220782 - DNA, 432 bp, Homo sapiens
actccggccgggccccagcctcagcccggcccgtctgcgtccgcccccggcccggccctgtcgccgccgccgccgcgggggtcgacgtgcccttcgcgaacctcaagtcgccccgaggccagtccccagcccccgccggctccaacgtctctgcggcccacaccggcccgcgcccctcgccctcacctcagaggctgctgctccgagccaggcgttggttttgctcccacaagatggcggctctgacggcggccacgtcagcgcctccgggcgcggggcacgccgggtaaggggcggagacgccgggaactccgcccaccgtgcgcccgcgacgcaggcgcgctggctccggtagggctgcagggggcggggccggggacacccygccccgggccgcggtcttagctcgcgcgcaccctaggggcgcgcacc

SEQ ID NO: 220783 - DNA, 488 bp, Homo sapiens
cctccttgttcaataagcctatcatgtatattaggcattatgctaatgcatttaggataaaaattgaaaaagtcaaacatggtcctgcgcctcaagaattattctctctcracccaggttttttgagatccaaacctgcatacccagcttttacatatcatcacctgccccacagacaaagtcaacctgtcaaatgccaaacttagttttgtcacacaaccttggctacctctatgtttctttatctgttcattctaagatggaaaccttgaaagttacctttagttcttcccacttccttatcctgtaatgggataccaccttctgtcatgctaatttttaagtttttgtgaatctgtctctctgttgccactacagtggatgttctcatgatcttttcatctataatatgataaaagccttatctgttcttttttcctctggatctctacctacttctccatccttcgcattgctaccagaaaact

SEQ ID NO: 220784 - DNA, 617 bp, Homo sapiens
ggcctttcattaattttatcacttaagctataaaaatggatatatatttatatataacctttacatattctttcaacttatcgttctcrgcttcccttttatgaatttggatctgtagtcgttcatgtactacttttactgattgggaaaaacggtttgctttcaaagtatttgcctgtaacaaagagaaagagaaaaccaaaaaaatccatattatttgctgtatccccagcccaatatctttaattttaccctgatttaggcacaatctaaacagctgataaaaagcaaagcactactttacataaactgccgcccctattacaaatgtatttcatgcccaaccagggctaagttttatcccccaacattttttatttaatggctttcttttttaaaattcccatctatctttctaaataaaggtatgggtatacctaaaatgctcctacaaacactaaaattccttaatttgttccccaactgaaacacaatacaaatttaaaacagttcctatatgaagtgatttatgccaagtatcctgacaaacaccataaaaaccctaaaaaaacttaataaaattaagatgttatatttgataggtaaaacctgtaaaa

SEQ ID NO: 220785 - DNA, 570 bp, Homo sapiens
ttcaggaaaagaactgtagttaatgacacaggaataaagaattctgataaaccctcatttttggtatgaaatactcataagtgagcatacctatataagatatgagacctcagttaatgcattctgagtattatactagcttttcattttattatatattcataagtcactcacattttcaaaattaatcttttcaatggtgtccttaaatagtggcaaaagcaattctacagaatgagttaccaactccgcttccttaagtgttgcttccaattcagtcttttcatttagaatgtcctgcttcaggctaattacaaatgcacatacaaaatttaagttaaatccatttcatttaaagatgctcctcagaaatgccatatcacctatacagtactcttaatagcaaggacaacttttagttcaaaagtagctcgaaacttggactttgagtgtragcaaattttaagaatactttattttacttatattttacttgtacgtaatcacaaaagttatttggattaaagatgtacgtatagttaagtttgaaggagcattttcaatatttat

SEQ ID NO: 220786 - DNA, 493 bp, Homo sapiens
caagtgtgattatagatgataaaatattattttcattcataacaaattcaaccagaagctggactaagctatccatactgacagtaatggtatatactaagattgccatttgacggggggcaatatttcatgtaaataacaagtgtattccccactctaaagaagtatgacaagtatttgctatatagtaatataccaaatgacagtgatttcacattcattaactacatttctgatatcacatattatattttcatttatcttaaatagctttattttacaaattcttaacagrtgaggttttcatttttttttgtctttttcttttttgagatggagtctcgctctgtcacccaggctctgtcacccaggagtgcagtggcattatctcggctcactgtgaccttcgcctcccaggttcaagtgattcttctaccacagccttccaagtagctgggacaacaggcacacgctaccacatctggctaatttt

SEQ ID NO: 220787 - DNA, 335 bp, Homo sapiens
gtgtgatagatatttggttaaacattgttctgggtgtgtctgtgagggtgtttctggatgagatgaacatctgaatcagtagactaagcaaagcagactgccctcctaatgtgggtgggcctcatccaagcctgaatagaacataaagaaagagaaaagagcatttacactctctgcctgactgtgtgtgagctggaacattggtcttttcctgccttcagacttgtactcagactgaatcttataccattagctctcttggttcttaggcctttggactcasactggaactaacaccattggctttcctcagtctccggcctttgcacttggac

SEQ ID NO: 220788 - DNA, 658 bp, Homo sapiens
atctattgatatctaccaattagtaggcataaggaagagaatcatatgatcacccttaccttcatatatgctaaaaagatctttgacaaaatttaataaccattcttgatgaaattcttaagaaagtatttattaatggatacatctttgaatgctgaaatatagttatttcacctcccaaatcagtagtacatttcagggagaaacactagggcatccccactcaggaacaaggcaagaatggtcctatcatcactattatttaacactgtaccagaagtgctagccaatgtgattatgcaagataaagaaattagagatgtgagaattaacaaagcaataaaactatcactatatgtaaatcatataacatatctagaaaattcaaggaggtcaaataaaaactactacaaacaaacaaaacatttagaaaattagcaaggtacaaaattcatatgcaaattttttcatgtatacaatcaatattcattgaaaatataatagaagaagaaaagaccccatagcgaggtgatgagcctaaaaagaaatgttcaaggctgagtattctacagackaaaacattaaaacattctttgaaagataaaaggaagtcatgaacaaacggaaaggcattttggataggaagagtcaatattat

SEQ ID NO: 220789 - DNA, 489 bp, Homo sapiens
caggcatggcggctcatgcctgtaaatcccagaacttcgggaagctaaggtaggaggactggttgaggccaggagttcaagaccagcctggaaaacacagagagacgtctctacaaaaattaaaaaaaaaaattacctgggcgtggtagcatttgctcacagacctagctacttgagaggctgagaggggagaacagcttgagcccagaagtccaaggctgcagtgagctatgatcatgctactgcactccagcctaggtgacagtgagagacgctgtctctaaaaaattaaaataaaaattatataagagaacaattacagtattcttctgattatctaagaacttgctattttaatctagatgttttagatttaatctattttaytgatcaaactactcttgaatgatcacaaatcactatgtttttaccacattgccaatctgaaatatgaacaaacaagactggctgagaattgggtagaacaat

SEQ ID NO: 220790 - DNA, 619 bp, Homo sapiens
gtctcccactccatccaggttgctgtgaatgctgtgattttttttcctttttgtggctgagtagtattccacaatgtatatgtaccacattttctttatgcactcattggttgacaggcatttaggctggttccatatttttgcaattgcaaattgtgctgctataaacatgcaaatgcaagttatttttcacataatgacttcttttcctttgggtagatacccagtagtgggattgctggatcaaatggtagttttacttttagttctttaaggactctccatcctattttccatagtggttgtactagtttacattcccaccagcagtgtagaagtgttcccttttcactacatccatgccaacatctattcttytctgatttttttattaagaccattcttgcagtagtaaggtggtatctcactgtggttttaatttgcatttccctgaccattagtgatattgagcatttttttcatgtttgtcggtcacttgcatatcttcttttgagaatttgtctattcatatcctttgtccactttttaatgggattatttttatcttgctgatttgagtttgagtcagttccacaggcttaacaggaagcatgactgg

SEQ ID NO: 220791 - DNA, 553 bp, Homo sapiens
ccaaattattacatatttaacatgattaacttaataggttaacaactgtcataatttcacatgtaacatgatatattttcatactagtttttgccattttctgtctaaaaattcacattttattccaaaataattaaatgtcttaaaagttgatagaattctagttttgataatgtgaacattttcttagaatctcttaaaaaataaaaagaattcttcatattacastggttgaggaaaaaatttaaaaccacaatacattttttttaactaaggtgcatatgaattcctaagtaggtgagttcactgacaatgctttagataaagacaggttgcaaatatcatctagcctccaattaaaatatagacacctagatagaaaagagagaacttttacatccttcatatcaggtgttcaatgacacctgataccttctgaaactgagcaatgcccagctcaggaaatgaggcaggtaaaaaacaatgagctaggctgggcagtacaaagtcacaggatgaatacaatgagttttactcaacaatttggaaagaa

SEQ ID NO: 220792 - DNA, 553 bp, Homo sapiens
ccaaattattacatatttaacatgattaacttaataggttaacaactgtcataatttcacatgtaacatgatatattttcatactagtttttgccattttctgtctaaaaattcacattttattccaaaataattaaatgtcttaaaagttgatagaattctagttttgataatgtgaacattttcttagaatctcttaaaaaataaaaagaattcttcatattacactggttgaggaaaaaatttaaaaccacaatacattttttttaactaaggtgcatatgaattcctaagtaggtgagttcactgacaatgctttagataaagacaggttgcaaatatcatctagcctccaattaaaatatagacacctagatagaaaagagagaacttttacatccttcatatcaggtgttcaatgacacctgataccttctgaaactgagcaatgcccagctcaggaaatgaggcaggtaaaaaacaatgagctaggctgggcagtacaaagtcacaggatgaatacartgagttttactcaacaatttggaaagaa

SEQ ID NO: 220793 - DNA, 507 bp, Homo sapiens
cccaacctttttggcaccagggtctggtttatggaagacagtttttccacagactcggatggtttctggatgattcaagagcattacatttattgtgcattttatttctatcattattacactgatatacaatgaaataattatataactgaccataatatagaattactgggagccctgagcttgttttcctgcagctagacaggggtgatgggagacagtggcagatcttcaggcattagattctcattcggagtgcrtaacctagatcctctgcataggcagttcacaatagggttcatgctcctatgagaatctgatgccaccactgatttgacaggaggtagagctcaggcagtaatacaagcaatggggagcagctgtaaatacagatgaagctttgtttagttgcctgctgctcacctcctgctgtgaggccctgttccagtactgatccatggctgggggttgggggcccctgctttaaaacattaaaaactgtattat

SEQ ID NO: 220794 - DNA, 627 bp, Homo sapiens
tgtgttttgttttcaaacattgcttctaaaccacaggttgaccaattataatgattcttagtttaccatagtgggaacaagagagaaaatggaacagaaatctgtgtggttaataaaagatctttcatcagctctgatggtgaagtgtagttactattagaacctaaagttattcagaggagaggtcccgcttgacatcacgtaagttctttatttctctctttccctcaactcccagtaagactcaatgagacagagaaagagaaatcataaacatgattcacattactgtactactttcttctctgggtacaatatttactttcacaggggaatcatcttgcttagtttgtatggtaatagaaattgtgtctcagatgtggttgttagaatactgattttggggaaaaggtgccacatggagagaaaaaacttacgtcttccattaaaaatgtaaactcaaragaaaacgataatcatgctttccttgtgacactaaactataactgtatccttctcaatgttttaagcaatattatggtacattactcagtattctgtcagaaaagctgaaacaatgtttgaacaattacagtgttgggttccacttcaatggtttcttttgag

SEQ ID NO: 220795 - DNA, 594 bp, Homo sapiens
agcacatgtttaatgagtctgaaaagtccttaggaccccctgacctaaaggctgaattagggacattgtctttgggggtgagtagactgcttcaatgtgttcattgttgaactacagggttctaggtggccggagcattgtccagtattaaaagaactttaaaaaggcagtcccttattgatgaggtacttcctgacttcagggacaaagtcactgatggaaccaatccagaaaaagtgttctcattgtccagctcttcttcttgtacagccaaaagactggcagctggtgtttaccttttcccttcaaggcttgggagttagcagctgtataaaaagggcagycctaatcataaatccaattgcatttgtgcaaaacagtaggggtaacctatcccttccttccttaaatcctagtgcttgcttatcttccttactaagaaatgtcctatgtggattccctgccccctccagaatagagcacttttgtctgcattaaatacctgttcaggtagatatccttcttttctcaatgattttcttaatggtgtctgggaactcgtctgctgcttcttggttggcagatacagcttcc

SEQ ID NO: 220796 - DNA, 579 bp, Homo sapiens
tgcagtgaaacagcatagaacatagatactaagatccaagttggaaaaaaatccaatgacaaatcggtttaattccagcctttgccaaaggctcctgtgagacttccaatatttaagggagtcctcagggtcatgatactagagtatccattgcccctcttccagatattgcccccagccatgggttacatagcagaaagcaagaatctggcttatatcatctaagctcccagcagaaatgacttcccttaatcaggatttttattctctgtaacttttatatatgatttatacgaaaaatatccctttaaacaatgttcctgtgacttttgcaagacccragttagttactgcctgttaaattgtcccttctgtaaagagccagttgataaattacttcgtgattcagagcaagaaaagcttgagttcctgaaagtgtttgtctctgtcctgctgtcaaacaataaaaattacataactcaaagatttccttgtttgccttatctttaggaaactcagaaataattattgtgctctcctgcagtaattgatttatctcaaggacattgtgacattgat

SEQ ID NO: 220797 - DNA, 587 bp, Homo sapiens
cttttcagtttttgcttatatacaattcactctttgcagctaattaagctgaagaagcctgggaataaagtttgaaacaaaggttaataaagctctttgcctagtaaaatatgtgtgtgcctgtgtgtgtgtgtgtatgtgtacacacatatatacatgcatacacatatatgcatatattcacacacatatataaatacgtacacatatacacatacacacatatagtattcattaagtagaagtggatcaccacaaaggtcttcatcctcgtcatctttacattgagtaggctgaaaagtaggaggaagaggagggttggtcttgctgtgtcaggggtggcagaggcagaaggggtgaaggaggtagaaggggaggcaggagaggcagggacgttacatgtgtattagtccgttttcacrctaataaagacataactgagactgggtaatttataaagaggaagaggtttaactgactcacagttccacatggctggggaggcctcacaattatggtggagggcaaaggaggagcaagggcgtgtcttacatggcaataggcaagagagagcttatgcaggggaa

SEQ ID NO: 220798 - DNA, 587 bp, Homo sapiens
cttttcagtttttgcttatatacaattcactctttgcagctaattaagctgaagaagcctgggaataaagtttgaaacaaaggttaataaagctctttgcctagtaaaatatgtgtgtgcctgtgtgtgtgtgtgtatgtgtacacacatatatacatgcatacacatatatgcatatattcacacacatatataaatacgtacacatatacacatacacacatatagtattcattaagtagaagtggatcaccacaaaggtcttcatcctcgtcatctttacattgagtaggctgaaaagtaggaggaagaggagggttggtcttgctgtgtcaggggtggcagaggcagaaggggtgaaggaggtagaaggggaggcaggagaggcagggacgttacatgtgtattagtccgttttcacactaataaagacataactgagactgggtaatttataaagaggaagaggtttaactgactcacagtkccacatggctggggaggcctcacaattatggtggagggcaaaggaggagcaagggcgtgtcttacatggcaataggcaagagagagcttatgcaggggaa

SEQ ID NO: 220799 - DNA, 578 bp, Homo sapiens
acactgtgtttgggggcaagtagacacctttgacaccttccatgttgaactcatggggttcttagtggccagggacattgtcaaatatcaaaagtacttttaagttcagtcacttactagcaaggtgcttcctgacttcagggacaaaccatcaaagggaccaatccagaaaaagggttctcattgtccaggccttcttgttgtacaaccaaaagactggcagctggtgtttaacttttcccttcaagactcaagggttaacagtattatagttaagggcaatcctaatcataaacctaactgcatttgtataaaatggtagagtcagcctattccttcctgccttcagtcgtgttgttcgcttgtctttcttactaataaatgccctttgtggcattttttttccagaataaagcactttgatctgcattttaaaaacctsttcttgaagatatccattctcctcaatgattttcttaatggcatctggaaacttatctgctgcctcttcattggcagaagctgcttctcctgttatcttgacattttttaagccaaatctctttgtaaaattatca

SEQ ID NO: 220800 - DNA, 595 bp, Homo sapiens
catacattttaaaaacataaacctatccttatgtgctaaaataaaatattttttaagtagcagtaattttgacattaatttgctagtaatactaccttagatgtgaaaayactaatattagcaccagacttcaggagcaataacccttacaaacgtctctcgggttaaccgtattagcagtagaagaaaagagtgaattctcaaaacacccacagctcaaattaaaatgaatctcccctagccctttctctctctggggatttgtagatagatttaaacttacattttattcataatgtgtagcatgtctccaaagacagttatccaatatccatgcctcctggtattgatgcccttttggggtcccctctccttgaatcgaatctcacttttgatccattgaaagctgcagaagtgatgcagagagacttcttggctacattgtaagaggaaagcccaagtctcttgtgctaaaattcttaattgggaggacattaggttgagagagctcagcactctgggttcctacaaaagcaacctgaaacccaactcagagtgaacggtcacggtcatcccaggaaaacaacacttaagc

SEQ ID NO: 220801 - DNA, 612 bp, Homo sapiens
ttctggggctcataaaattgaacaagtgcattctacttgtggctttgcatatcaaactgaacacaaaaatagctggccctcatcacttgagtgattctggaacttctgactaagactaattattaacatcactgatgtttcataagaatttgaaagtcttggtttccaatcatgatattaaatttagagaggaactatatataagttatcacattctaatcacattctagtgtttttctgtttcgagtgttttcatattgtcaggttgacttaattatcacaattttgtgaggtgttaaccaacctgtgttccaaatgaagaaagaaactcaaaaaggttaggtgactcacacctcctctcaggtggctgggatgcagtgctgggatgcacrtggatgcttcctgatttcatatcccatgctctttgaactcttcagcagccatatcagctccatttaacacccaaatgaaggttgtcattcaaaataatcaccttgaagactatatactcctttgagggatgctggaatcactcaccatttttggtacatttgtttggaaattttcttcaaagccaatttacacaagaatatcaccctattattttatact

SEQ ID NO: 220802 - DNA, 601 bp, Homo sapiens
tcagctgtaaaaacagcaacccacttgggctcccgtctctgctgcagagagctttcctcttttgcttattaaacttttgctccaacctcaccctttgtgtccatgctccttaattttcttggttgtgagacaacgagctcggataacaccttagacaatgagaccattgatcctgacccatytcactttcactttactcctgaattctttcttgcatgaggtccaagaaccctcttttggggtctggatcagacccctttcgagtaacagaagcgcttagaacacagtaatattgtttgcattaaattgaacttgactcatctgtctactgctttaagaatggtattcgatatgggtgatattgcataacaaaaggttgaacatttgccacacactgcagctcacaaagctatccacatttggttttgtttctggagcagtttgtaatgtacacaattccttgtactttttatatttttgaagacagtgaagaacactgactatgggttgaaattatttgtaattaaatggattaaatggctcttaaatggatgccccagagttggactcattaatttacttttgccttagaccttacttg

SEQ ID NO: 220803 - DNA, 601 bp, Homo sapiens
tcagctgtaaaaacagcaacccacttgggctcccgtctctgctgcagagagctttcctcttttgcttattaaacttttgctccaacctcaccctttgtgtccatgctccttaattttcttggttgtgagacaacgagctcggataacaccttagacaatgagaccattgatcctgacccatttcactttcactttactcctgaattctttcttgcatgaggtccaagaaccctcttttggggtctggatcagacccctttcgagtaacagaagcgcttagaacacagtaatattgtttgcattaaattgaacttgactcatctgtctactgctttaagaatggtattygatatgggtgatattgcataacaaaaggttgaacatttgccacacactgcagctcacaaagctatccacatttggttttgtttctggagcagtttgtaatgtacacaattccttgtactttttatatttttgaagacagtgaagaacactgactatgggttgaaattatttgtaattaaatggattaaatggctcttaaatggatgccccagagttggactcattaatttacttttgccttagaccttacttg

SEQ ID NO: 220804 - DNA, 632 bp, Homo sapiens
ctgtgcactatgcaaaaacagagctagaagaaacaatactagtttttaaatttatgtcagaaatakcatagctattacctggcagttcccatttatcagaccttcagctctccatgaggtacaaggtagcctttttcctcaatgatgtctttatgtgctcagtctccagctgtctctgggaaaccagctagttcgagaacaaccagtatgattgcttcaactgtcttcaggatcaatgataaaacagtaaccaaattgatctctcaatttcctactgtgagtttcaaacttattatgagaaaaaaaagaattaaaagaggtgcccatattttaatatgcatgtgcacattcatggggcaacatacatcctggcacaaggatcctcaacggactgtcccagttcttagacttcactggaattttgctatggtgaacattgcttcaaataaatggtccttcagctgttattaggaattgtactaaataatttggtgcatagatttgcttatgataagatttagttagaaggaaggagttcattataaaagtgaaaaaggaatcccgtagtcagaattaactccaccctcattttattcttttaataagtgggtaaagtttattaagaaaacaca

SEQ ID NO: 220805 - DNA, 438 bp, Homo sapiens
ctctgaaatttctgtttaattgccttctggctattgaaaaagtattttttgaatatttcatttttatctcagttaaattttggagcaatcaagacaagagttgttgctcacacctgaatttatgcttgagatggagcattagttatttagttctagcattatggggtcagggcaaggtaggcaagggtagccatggaagatctccaggagtagaattatkcagattgatttagctttcctaggaaggctgttactcctcaccagagagttggcctttcaatatcaaccttctgaggtctaggtttcatttttattaagaagggcagcatgttttatcattctaattacattccatgtttagccttctaaaaccatcttttaccatctcccctaatagatgaaaatatatgtttatcctgcaaaatttagagcaacaac

SEQ ID NO: 220806 - DNA, 512 bp, Homo sapiens
agtcgaaaccagctgttcatggtttcctattgttcaacacaaaartttccctcctttaaagaagtgacaaaaatctggtggtgtttgaaatgtctgcattaaaagttttatgtggctggatatttgtgggcttcttctatccacttgggaaggattgctccatgaatcaagggctgtaaatttgtaccatttacatttttatttctctaagcaatctctgcaaaatgaaaaagaacataattttaaaagttggtgtttattattatttttatatgtagtcccataaatgtgaacactttaaaacctcattcatttggaataatgaaagaaaaatgtgagaaatctgcctgagaaaatatttgggaacaagtggagttttagtaatgtcaaggaaagttagtattattaactaagatataaatggattttaataagtaataaagctaagtttgtaaaaactacacttcacaaaatccctggttttatactatatcctaagaataagctacttt

SEQ ID NO: 220807 - DNA, 519 bp, Homo sapiens
actggtggagtagttctcatgggtaagtacaagggaatgggatctagtgacaacatggtggcctcaggtagaagcatgggtggttcacccagagtaatgaggagaagacagagaatgcaggcacaaaggcttggggccaaatggttctgctggtgaaatctttggaagytctcttctgatgcttctatttttaatgaaataagaggaaaggagatcagcggagagagacaatagagaagatatgtggagttttgagaagagaggctgatgacggactcaggaaatataccatggcttctgggcagcactaaggatcccttgaagttagtgatcaccaatgtaaagtgataatagtcagcacggttgtgtgtttttctctagaaaggttggtctgcaagggagcaggcctcacataaactaggagttgtgtttagttatggatggaactgaggttataaggaagaaactaatttgaatgacactcttaagctggtaggagtaaagtaaagataaaagagt

SEQ ID NO: 220808 - DNA, 530 bp, Homo sapiens
tacttacctttgatgaaggccacctgcgatgggctttgagggggcaggttagtgggagaaacaataggtgattaaacactgccactcatgactgacagctgcttcctgacattcgggttaagtcatgagggaggaaacccaaaaggggcaaaggagcaggtttacatgtgctcttcaattattcttatgcgatttatatagctccataaatgaacaccatgctgtaataaaaaataaatgtcaaaatcaatagaaatccttgctgttcaattcttctacttcttgaatttgaatgtaggcaatttaaagcattattctttttcttgtcattattattaatttttctgycttaaggttacattttctgcataattttgcttgcaaatttaacaattcttagaaggttagagtcaaaaagaacagaaaaatttctcccaaataaatagtgaagtccaacaaaataaaatgaaagtggaggagaatttagaaattaagagaaatgtgaggtcttttcatatttatttctaaaa

SEQ ID NO: 220809 - DNA, 531 bp, Homo sapiens
gtcaacaagcacatgagatgatgctcaacatcattagtaattagggaaatgcaatctcaaactacaatgagatatcacttcaccaccatcagaaaagctaaaacaaaaaagacagacaataataagtgytggtaagaatgtagagaaatttgaaccctcatacattgctggtgggattataaaacggcacaaccactttggaaaacaatttgtgaattcctcaacacacaaaacatagggttgccatatgacccagcaattccattcctagatacatatccaagaaaaataaaaacttatgtccacacacacaaacgtgtacatgaatgctcacagcagcattactcatgatagctagaaagtagaaacacaaatacttacaaactgatgaatgaataaaagatggtatattcatacaatagaatattactgtacagtaaaaaggaataaagtactgatgcatgctataacaagggtgaaccttgaaacattatgctgagtgaaaaaagccagtcacaaaagaccacatat

SEQ ID NO: 220810 - DNA, 586 bp, Homo sapiens
ctttaaaatctttgcataaaatcaccttgcagagtgatattctttactctctctcttcttgtctgagttgttgctaacagcttttaatttgggaagtgtatctctgagtttactgcgcctcactggtttcagctcaattgtttctctagccagcagagcatttcatttcttctgaaggtcaccacaagctgccaaggctttgaaaacataccatcttttcattcatgctgcaatctaaccctgcagtgccattaagagaagcggaagcaggcatgtgactttttctatcaacaattattgaatttattgtaatataaagtgaattaggccatcagtgagcaaggatcctccataatgccacctttgttcaagactgtagaaattattttttgtattttagtagtctgtctgtgtatagataattatttgtayaaattataccaaaatgtcatctgcttttggaagttactcttccaaccatatcactaccggttgcaataaaccaatgatgcaggaagctgtcccgatctaaggacactcataaaacaaacaccacattggccatctgttggaggagggatggcat

SEQ ID NO: 220811 - DNA, 596 bp, Homo sapiens
aacactgagtcagagggtgagtagctgtgctgtttccttctgttaacaaagacattttgagaagacccctgcagggtcttcttccccctgctgggggacactggcttcttcctgtcctttcttagattctgagagtataagattcaagaggaggaaggtgaagrtaaatacaacctaacagaaaaactgctatgtattgctatagttatttttgcacatataatgtaactacataaaaatgcttacccactgtggttcccttttagacaacagggctgccaggtgccattggcacccaatttagtgactggataagaaaaatcagaaagcttctaaattctagataatgtgagagaattaaaactgtgttccctttaatatcttttccaaaaactgtcatctctaacttggccttagagggacaagtagtttcttacgtgagcaggtttctagtttcagctcatcacttttcttcatcatttacacatggcttttgactttcaaacatggtaccatagaacaaaatccttggacctaaaacattttgatgcaacattagcttgatgactctgactctcagttttaaaaaatgaatg

SEQ ID NO: 220812 - DNA, 599 bp, Homo sapiens
atacatgcaactgaatataatttctaatcataagtaattaatttatgcaggttttctaccctttcttgagtcaattttagtagcattttccaagatgtcgtacatttcagatatatgagaatatttcaaatatagatttagcttaaatgttttattattttattttactaaaaatctgtagttaaccttgtgttttcattctcaagtttttatttttgtgctcttatttttctttttatgcttctctcttgctgtgaactcttattttcaacgaaggagattttgartttatgttattaattttttcatgctgttttcttttcccagtcacttttttcccccaattttcagttgaatacttagttaactgaatttaatttttaggaatagagtgtaagaatttagcttaatgtattttcctgagtttgtgttcactgtcaatcctttcccattttgtaccattaactttattttctaaagattttagtaaatgtaattttgattacttcttttattatgttttgttttacagttttcaacattgttgtgttgtctacaattttgtgattcttatattgcctcaaggtaagacagtgtaa

SEQ ID NO: 220813 - DNA, 599 bp, Homo sapiens
atacatgcaactgaatataatttctaatcataagtaattaatttatgcaggttttctaccctttcttgagtcaattttagtagcattttccaagatgtcgtacatttcagatatatgagaatatttcaaatatagatttagcttaaatgttttattattttattttactaaaaatctgtagttaaccttgtgttttcattctcaagtttttatttttgtgctcttatttttctttttatgcttctctcttgctgtgaactcttattttcaacgaaggagattttgaatttatgttattaattttttcatgctgttttcttttcccagtcacttttttcccccaattttcagttgaatacttagttaactgaatttaatttttaggaatagagtgtaagaatttagcttaatgtattttcctgagtttgtgttcactgtcaatcctttcccattttgtaccattaactttattttctaaagattttagtaaawgtaattttgattacttcttttattatgttttgttttacagttttcaacattgttgtgttgtctacaattttgtgattcttatattgcctcaaggtaagacagtgtaa

SEQ ID NO: 220814 - DNA, 556 bp, Homo sapiens
attccaaaatatataaatatgtattaattgctgtaaaataggttaagcaatttgccacgaaactgatactcataaagccaaaccaaaataaattttttcaggaatttttgcagaaggaaascacaaatcaggtcactttatgatgcactgataacaatgtgctttttctgaatttgttagaaatattccaccgtgtgtagttgcagtagatgctcaataactttgttaagaatttcctggcagccagatttttttagtatcacaccatattatagtcttccaagaactctttgaaataataagctaattctaatataagactataaaatacactgaccttgaataacttactcatagattactagtaaagagcctttaggcatatgtaaatcaagacatttctgaaatgtgtgccattcatgcgtaacaatctcagaaattatttgtcttttggagaacagaatcagctcagttcaccaagaagatacttgtgaattcttgttttttaaacatttttatttatttaattgtgtatttattttttttgagatagggc

SEQ ID NO: 220815 - DNA, 586 bp, Homo sapiens
agtttaaattttaaataaatgctctttattttaaggatttaatttctggtgattgcacaggcggctatcctttaaaatttttctttaatattttgaaagttttgctttttctgttaatgtttgtataaccatttaaccttagtatggatggaagagagaatagaaaaagtggagccaaatgtgtattgatactgctttaaagacaataaaagggaaacgtatactgttttgttgtatccatattaccacattacttacgttatctgtcctttttgtgcaataccaccttgtcttatcctaaaaacagaaacgtatctggtgggtttagacatataaagatcactcataataactttcatgaaataattataaagtactgcaattcagagaagaattcttcgtatatattttcagttttttttttctgaaatttaaaatacctagttttcaacaggtgtttaaaaccatgagctgaacrtagagctagcttttttaaaaaataaaactttgttgtatttacaattgcttagttcatagatatttaagaaatggatcaaataaatctatgttttgcctcagggaatac

SEQ ID NO: 220816 - DNA, 476 bp, Homo sapiens
attgcactgtaagtataaaatacacacccaattgtcaaagacttagtacaaaaaaagtcaagtatctcactaataattttcatattggctccatgatgaaataatttaggttaaataaaatacattataaaatttaatttatcctgtttctttttccattttgaatatggctaccagaaaaaaatgtaggttacatatgtggcttacatttgtggctcataccatatttctatttgacaatgccaaactagagaataaggccaaaaaatgaatcctattaaaatataattattaaatactaacttaaggagatgggatacaagaaaagacacagwttaagaagcaaaaaaaaaaagagctgtaccatatggaaataaatacaaatttaaaagataaaatataatatgggaataatcagaaatgtagatagtaagctgttctttctaactgcactttgctaaccagccaatatctaa

SEQ ID NO: 220817 - DNA, 343 bp, Homo sapiens
agaattttctaaggggaggatcacattgactgatctttgaaatattcttaaaagctttcaaaacattactcagagtataatgatagaaaacccttgtccttagctagttarcagaaacattgttattattttaagttgcaaatgtctttccagcccatcaatgtttaaatcagagtgcaaggtaattaaagcaagtagcagaatagcataatcagatagacattcaatgtacacaaaagagtcttaaagaaaagagtaaatcataacttgtcccccaccaaaaaaattttaagaactgtgcaatgatacattttactgaatgttccactagaaggaaaaacaa

SEQ ID NO: 220818 - DNA, 339 bp, Homo sapiens
ttcttgcagtcagctgataggtaataaaagaagtatttggctaggaagagaaggagagggtgctgaaaaattttgcaagccaaataaatacaagttgtatgcttaaataagttttgcacactatttaataggtgaatttaagcctattaaaaagtcaatacttggcataatacctcaatttaaaataaataataattgttgaaaatattagcatctgaaataatgataaacagtgatctggaggggatacttccagataaagagacctttgtgtttataatctttttattgtcattctgggtcataaatccaagttttaygagatgacaaaattagaag

SEQ ID NO: 220819 - DNA, 610 bp, Homo sapiens
aatgataaacagtgatctggaggggatacttccagataaagagacctttgtgtttataatctttttattgtcattctgggtcataaatccaagttttacgagatgacaaaattagaagtccaagaaacccsttaaggatctatccccataagtcagaaaagcaatataagacaaaaggaggctaataactgcaagatctagactaaataaaattgctttcatctgattacaaatgcaccaatttataagaggtgtgttacagagactctcaaaaaggttacaactaccatcaactaaggccatgtaaataacctagagaagagcataacatacacacagacttagaaaagtattttcatggcaattgtattactttgaacactagctgagggcatccctctcatgttccagccctgtatttctcatatattcctaagtaccacctactgctatcagtttgtctttgagaaatgagttgagtcctgagatgtgctttgttttcacctattgccaaaatcctgcaggaaaggttggacacacacaatttcaaaacactcccattgaaaagaatatctagtaaatagaatgaaaaactagctagaatgtcaga

SEQ ID NO: 220820 - DNA, 610 bp, Homo sapiens
aatgataaacagtgatctggaggggatacttccagataaagagacctttgtgtttataatctttttattgtcattctgggtcataaatccaagttttacgagatgacaaaattagaagtccaagaaaccccttaaggatctatccccataagtcagaaaagcaatataagacaaaaggaggctaataactgcaagatctagactaaataaaattgctttcatctgattacaaatgcaccaatttataagaggtgtgttacagagactctcaaaaaggttacaactaccatcaactaaggccatgtaaataacctagagaagagcataacatacacacagacttagaaaagtattttcatggcaattgtattastttgaacactagctgagggcatccctctcatgttccagccctgtatttctcatatattcctaagtaccacctactgctatcagtttgtctttgagaaatgagttgagtcctgagatgtgctttgttttcacctattgccaaaatcctgcaggaaaggttggacacacacaatttcaaaacactcccattgaaaagaatatctagtaaatagaatgaaaaactagctagaatgtcaga

SEQ ID NO: 220821 - DNA, 610 bp, Homo sapiens
aaccacagtgtgataccgcctcactcctgcaacaatggtcataataaaaaaataaataatcagtaaatgttggtgtggatgtggtgaacagggaacacttctacactgctggtgggaatgtaarctagtatggccgctttagaaaacagtgtagagattccttgtagagctaaaggtagaactaacatttgatccagcaatctcactactggatatctacccagtggaaaagaagtcattattcgaaaaagacacttgcacatgcttgtttatagcagcacaattcacaattgcaaaatcttggaaccaatccaaatgcccatcaatcaaagagtggataaagaaactgtggtatatatgcaatggagtactatgcagccataaaacaatgaattaacagcatttgcagtgacctggatgagattggagactattattctaagtgaagtgactcgggaatggaaaagtaaacacttattttctcactgattatttttttctgatagctctatatttattgagcactttttgtattccagaaactcatatattatttcatcagttcctcacaatagttctgtggtagataccattatcaccctcattttat

SEQ ID NO: 220822 - DNA, 610 bp, Homo sapiens
aaccacagtgtgataccgcctcactcctgcaacaatggtcataataaaaaaataaataatcagtaaatgttggtgtggatgtggtgaacagggaacacttctacactgctggtgggaatgtaagctagtatggccgctttagaaaacagtgtagagattccttgwagagctaaaggtagaactaacatttgatccagcaatctcactactggatatctacccagtggaaaagaagtcattattcgaaaaagacacttgcacatgcttgtttatagcagcacaattcacaattgcaaaatcttggaaccaatccaaatgcccatcaatcaaagagtggataaagaaactgtggtatatatgcaatggagtactatgcagccataaaacaatgaattaacagcatttgcagtgacctggatgagattggagactattattctaagtgaagtgactcgggaatggaaaagtaaacacttattttctcactgattatttttttctgatagctctatatttattgagcactttttgtattccagaaactcatatattatttcatcagttcctcacaatagttctgtggtagataccattatcaccctcattttat

SEQ ID NO: 220823 - DNA, 574 bp, Homo sapiens
aaatatcagcaaaaggaaatctggtgtagcaatattaagagtagacaaaatataaattcaaggcaaaactgattcagagacaaaaagagaaacatcactttaataaaaagaaagaacactccatcaagaagatataacagttatgaacctttgtacatttatgaacataggctctaaatatagaaaacataaactaataaatgtacaaaaagaaatggtgttttttataaatmacaatcacaatgggagaatttaacacatttctttaagaaattgagagatcaagtagagaaaaattaagaatacagacaatttgaataattcaatatacagaacttcgtattaaacaaataaagaatataccttctttttaaacatacacaaatattcatcaaaaaataatcatttactagaccataaggaaatactgaattccaaaaacataatgtcttttaggccacgttcacttttgacaaaattagaaatcaactacaaaaagatagttcctcataaactttacatctggaaatgtttaaagaacacaactctaaatactcttggactacaacttcaa

SEQ ID NO: 220824 - DNA, 574 bp, Homo sapiens
aaatatcagcaaaaggaaatctggtgtagcaatattaagagtagacaaaatataaattcaaggcaaaactgattcagagacaaaaagagaaacatcactttaataaaaagaaagaacactccatcaagaagatataacagttatgaacctttgtacatttatgaacataggctctaaatatagaaaacataaactaataaatgtacaaaaagaaatggtgttttttataaataacaatcacaatgggagaatttaacacatttctttaagaaattgagagatcaagtagagaaaaattaagaatacagacaatttgaataattcaatatacagaacttcgtattaaacaaataaagaatataccttctttttaaacatacacaaatattcatcaaaaaataatcatttactagaccataaggaaatactgaattccaaaaacataatgtctttyaggccacgttcacttttgacaaaattagaaatcaactacaaaaagatagttcctcataaactttacatctggaaatgtttaaagaacacaactctaaatactcttggactacaacttcaa

SEQ ID NO: 220825 - DNA, 541 bp, Homo sapiens
tatttcacaaaatttatgagaggagcccaagaggtcgccttgtgcaagaggtcaccttgctctttgctggctgttggcttcaactgaacagtaatctctagagcctgaggactaygctcgattcctgtgttcttggaaagctagatcattatgatgtttctggtttttttttttttttttttttttttttgagacaagtgtcttgctcttttacccaggctggagtgcagtggcgcgatctctgctcactgcaacctctgcctcccaggttcaagtgattctcctgcctcagcctcctgagtatccgggattaaaggtttgcaccagcatgactggctaatttttgtatttttggtagagacagggtttcaccattttggccagactggtcttgaactcctggcctcaagtgatctgtccgcctcggcctcccaaagtgccggggttacaagcatgagccaccacacctggcacattatgatgtttctaactcatgctttgaagcccaatgttgcttgtgtgatacattttattactaaca

SEQ ID NO: 220826 - DNA, 524 bp, Homo sapiens
cttgccagcctgcaaattaaaacactcttaatattttgatgtatttccttccagtattctactttttacatatagggtattttatatgctgcctcttgattttatagcacctgcattttccatataattacatattcctaatgaaaagtactttaatgactacctaatattctcgtagcaaggtgtygttttgttttactattattcaattcacaggtacatgtgttcccccacgggggttttggtttctttagtctaaagctctagaagtagaaataccaggttagagtatgaacatgtttgttgaagggtctctgagacctattgccacatcactttggcaagaggttattgcagtttactctgctattggagtgaagcctgaagcatcgactttgaaagacatcagagctcctacttctcagtcgaggggtatagtaagtcatccttgaaagtggaaaagagaaaaagatggggaaacggggactggggctgcttcataacagcccatcaggtgagtgctg

SEQ ID NO: 220827 - DNA, 476 bp, Homo sapiens
tgttcaagttcaaacagctagcaacagtgaacttgaacttatttcttctgtcccctgggctgtttatctttgatatctgacatggctgattcaggcttctagaattctagggcagctgcaggtgaccccagtaggctgaagttaggagacctaggtaaacgagtgtcatggtgaaatccccccygctcctgagaccccacaggctcctcccagacaggccggcctccttaggccttgggtataattagcctagaggtctccggccttgatacaataactggtaagaagctatccattctgccgttcattaagacaggtgacacaagatgaaatattttaggtaaatcatctggcctaatttagaaaggctctgtagggctagagcctttgatttatcggggagaggtatctgttatcagagcgtctcacacacggacttatttattatccagaatctgtttttaatttcagagatt

SEQ ID NO: 220828 - DNA, 478 bp, Homo sapiens
tttttgccccaaaaagattgtgctctagtgctgtggctttccacctcttcatttacttatttacttacgtattttagagataaggtcttgctctgttacccagggtagagggtagtggtgccatcatggctcattgcagccttgacctccaggsctcaagcaatcctccctcttcagccttcccagtagctgggactacaagctcatgctaccaccccaggtaattttttttttttttaagaaacaggggtctcactgtgttactggactccagctcctgggctcaagccatcctcccatcctggcctcccaaagtgctggcattataggtgtcagacaccatgccccacccttttccacctctttgggccatgacccacgttatatttgacatggtgacccagcatgtacacacatacaaacacgctcccatctgaaagaaaaacttcataaaacagcattcgccataccacatgca

SEQ ID NO: 220829 - DNA, 478 bp, Homo sapiens
tttttgccccaaaaagattgtgctctagtgctgtggctttccacctcttcatttacttatttacttacgtattttagagataaggtcttgctctgttacccagggtagagggtagtggtgccatcatggctcattgcagccttgacctccaggcctcaagcaatcctccctcttcagccttcccagtagctgggactacaagctcatgctaccaccccaggtaattttttttttttttaagaaacaggggtctcactgtgttactggactccagctcctgggctcaagccatcctcccatcctggcctcccaaagtgctggcattataggtgtcagacacyatgccccacccttttccacctctttgggccatgacccacgttatatttgacatggtgacccagcatgtacacacatacaaacacgctcccatctgaaagaaaaacttcataaaacagcattcgccataccacatgca

SEQ ID NO: 220830 - DNA, 388 bp, Homo sapiens
ctgatgattctcatagtcctgctttgtcaccatcttggctttcagctctggggctgtcaggaatgggcatggccattgccaggcctatgtgtgtgtgtgtgtgtgtgtgtgtgtgkgtgggtgggtgtgcatgtgtgtataccgaccaccatagcccgtgagccttccctgaaggatgctgctcctgcaagcaccaagtaccaaggaggctaagcagtgggtgcaggcaggacatgcagtgcctggcagcagagactgccaggcacacatggctattgctggctgggctcctcagagctctgggcctggcaagagagaggcagcaggggtgaggcagcccctacctggatgggatggctatttcccagcgcctcattccccaggaggt

SEQ ID NO: 220831 - DNA, 580 bp, Homo sapiens
aattgtatctcattcatttttgattttatttaactgggtcttctctctttttttattagtctagttaaaggattgtcaattttgcttatcttattgaaaaacaaacttttcattttattgatctatcttatttgtgttttttaaggtgtaaattttatttgtttctactctgacctttgttgtttctttttttaatactaattttgcattttgtttttgtttttatctagttccttgaggtgcatcattagattctttatttgatgtctttctacttttttattagaaacagtctcattctctcactcaggctggattacagtggaatgatcatagctcattccaccctggaactcctgggattaagtgattcacccatctcagcctccyaagtagttgagactataggcttgtgccatcacacctgaaggattttaaaagttttttgagagataggtctcactatattgctcaggctgtctcaaatgcctggcctcccacctcaaccagctgagcagctggaattacaggtgtgagccaccatgcccagctctttctactttctggatgcaaatgctta

SEQ ID NO: 220832 - DNA, 580 bp, Homo sapiens
aattgtatctcattcatttttgattttatttaactgggtcttctctctttttttattagtctagttaaaggattgtcaattttgcttatcttattgaaaaacaaacttttcattttattgatctatcttatttgtgttttttaaggtgtaaattttatttgtttctactctgacctttgttgtttctttttttaatactaattttgcattttgtttttgtttttatctagttccttgaggtgcatcattagattctttatttgatgtctttctacttttttattagaaacagtctcattctctcactcaggctggattacagtggaatgatcatagctcattccaccctggaactcctgggattaagtgattcacccatctcagcctcctaagtagttgagactataggcttgtgccatcacacctgaaggattttaaaagttttttgagagayaggtctcactatattgctcaggctgtctcaaatgcctggcctcccacctcaaccagctgagcagctggaattacaggtgtgagccaccatgcccagctctttctactttctggatgcaaatgctta

SEQ ID NO: 220833 - DNA, 549 bp, Homo sapiens
aagtaaatagtaacttgctctgctctagaaacctcatgttgacattcgggatattattattaaatatagacattaaaaacttaacaggacaaagtaacgtaactgtttttggaaggtgatgttaaaacacattaaatttagtggtctttcaaatatcacayattcaggtagaaatcatcaaccctttaaaaggatatagatcagttttccaaaaggctcaagtatagacaattgtaaaaaaaaaaaaaaaaaaaaaaaaaaaaaaaaagactagaaatgaattgcagattagaaactatcattttgaaaatataataaattatatctccttatactacttttaactatgctccaaatcttccacctgctgctttatttgaatgaaatttcttactgagtatttggcttaaactttcaaggagggagaaagaatgtctatagagagaatctgtgactgcccagattcacacagaaaattaagatttaatctaagaataagtagactttattcaggtctccataatcctgtttcttcctcctaatctaaga

SEQ ID NO: 220834 - DNA, 549 bp, Homo sapiens
aagtaaatagtaacttgctctgctctagaaacctcatgttgacattcgggatattattattaaatatagacattaaaaacttaacaggacaaagtaacgtaactgtttttggaaggtgatgttaaaacacattaaatttagtggtctttcaaatatcacacattcaggtagaaatcatcaaccctttaaaaggatatagatcagttttccaaaaggctcaagtatagacaattgtwaaaaaaaaaaaaaaaaaaaaaaaaaaaaaaaagactagaaatgaattgcagattagaaactatcattttgaaaatataataaattatatctccttatactacttttaactatgctccaaatcttccacctgctgctttatttgaatgaaatttcttactgagtatttggcttaaactttcaaggagggagaaagaatgtctatagagagaatctgtgactgcccagattcacacagaaaattaagatttaatctaagaataagtagactttattcaggtctccataatcctgtttcttcctcctaatctaaga

SEQ ID NO: 220835 - DNA, 586 bp, Homo sapiens
accactattaaaccaggaatgtcatcactgcagctgtggtcagggttgacgtaaaacagggtgactgtctttcttcaacagaaaccatcagtttcagcaccttggcagcactaacatggagattggcagcactgagtggggagggtttccaagatggcagcctgccagtcacgtgtgactccaagcctacacgcagcctgcaccatgcggtagcccctcagggagcaagrtgaccttgattccgggcagagttagaggagacttgcctaaatctaacacccagcagtcaggcagggccagcggcttggtgttagatggagatgatgctgctatctaaaggtggaaaatttgagtttactgtttgaattagaaaatgcctcttccagatttggaagtagcatgggtagcatactcacttataccaggtccctggcttctgatagtggctgtgaatctcattctctcaaaagtgattcatgttacaatactgaagaaaagtgaccagcactgacattgtaagccctttggagagtgggattttcccaagaagacttactctaaaaatatctgtttgtagttctaaaat

SEQ ID NO: 220836 - DNA, 483 bp, Homo sapiens
aatttgacaaatacattcaaacactgataaatgccaggaggaaaacaaaatgaggtaaacaaaatgagagtgtcttgaagctgggaggcctctcagtgaagctgacaatagattggggaccagaagagtagaaagggggctgccatttgcaaatctgaggtaagagcrctattgggagaagagaacgagatgttttaaaggagtaaaaatgacttgtttcagattattataatattaagaaaaaatattttgacataacgttaatttaaaattattgttcatatatttgatgaatagtatggtctcagctctattaattatttttaataaaaattcatatgcaaattagtagaataaactgaaagtttattaaagtatgatctttacaatacaaacatataataaaagcacctactgtacattagcttttgcaacaaactttccatctatatctatgtctaagccacatctatagggaagatc

SEQ ID NO: 220837 - DNA, 536 bp, Homo sapiens
atgttctcacttatttgtggggtataaaaatcaagacaaactcatggagatagagagtagaaggatggttaccagaggctgggaagggtagtgagagtgtggtaggggaggtggggatggytaacgggtacaaagaaaagtagaaagaatgaatgagacctactatttgatagcacagcagggtgactatagtcaataataactacattgtacattttaatataactaaaagagtgtaatcagattgtttgtaactcaagggataaatgcttgaggggatgcagacctcattctccatgatgtgcttatttcacattacataccagtatcaaaacatctcatgtaccccataaatatgtatacctaatatgtatccacaaaaattaaaaattaaaagaatttttaaaatttaaatgctatataaatagtttttgtactgtattttaaaatttgtattatttgtattgtttctttgacattttcaatctactgtttaagctacagatgtgaaacctgtggatacaaagggctgattg

SEQ ID NO: 220838 - DNA, 536 bp, Homo sapiens
atgttctcacttatttgtggggtataaaaatcaagacaaactcatggagatagagagtagaaggatggttaccagaggctgggaagggtagtgagagtgtggtaggggaggtggggatggttaacgggtacaaagaaaagtagaaagaatgaatgagacctactatttgatagcacagcaggktgactatagtcaataataactacattgtacattttaatataactaaaagagtgtaatcagattgtttgtaactcaagggataaatgcttgaggggatgcagacctcattctccatgatgtgcttatttcacattacataccagtatcaaaacatctcatgtaccccataaatatgtatacctaatatgtatccacaaaaattaaaaattaaaagaatttttaaaatttaaatgctatataaatagtttttgtactgtattttaaaatttgtattatttgtattgtttctttgacattttcaatctactgtttaagctacagatgtgaaacctgtggatacaaagggctgattg

SEQ ID NO: 220839 - DNA, 536 bp, Homo sapiens
atgttctcacttatttgtggggtataaaaatcaagacaaactcatggagatagagagtagaaggatggttaccagaggctgggaagggtagtgagagtgtggtaggggaggtggggatggttaacgggtacaaagaaaagtagaaagaatgaatgagacctactatttgatagcacagcagggtgactatagtcaataataactacattgtacattttaatataactaaaagagtgtaatcagattgtttgtaactcaagggataaatgcttgaggggatgcagacctcattctccaygatgtgcttatttcacattacataccagtatcaaaacatctcatgtaccccataaatatgtatacctaatatgtatccacaaaaattaaaaattaaaagaatttttaaaatttaaatgctatataaatagtttttgtactgtattttaaaatttgtattatttgtattgtttctttgacattttcaatctactgtttaagctacagatgtgaaacctgtggatacaaagggctgattg

SEQ ID NO: 220840 - DNA, 381 bp, Homo sapiens
aaattccatttcccaggagccaytgcaaatgatgatgatttaggcatctccatgaattagaggttactccgtgcaccagctccccaccctgatcttgttattatctacaggtttattctcctgagtgggagtattttctcattcctccacagctccagggaggctgaggctttctcctcaggcagaagcttcagcctcctgggaaggagatgaaacagggcagtggaggagtgagatgactattgcctcctttgggcccacaggtgaacttctttctgaccaggtgagaatctgcaaagaaggtaaggggctggagtcagtagccacaaatcaccaggcgttcttgtcctgtgagaggtggccatgtaaaggaggtgtcca

SEQ ID NO: 220841 - DNA, 559 bp, Homo sapiens
attcctgacctttgatccccagccttccaacagtggtgtacatcttcatttctctatgttaaagattttcttattaaaaaattgagtgtggtagaggactgacttggtaaaggatggggggacattatgtattttggttcatttagcagatatttttgagctcctactaactgctagacatggtgctagatcttgcataaacatgacgaacaaagtagcaaggtacttactagcctcatggggctagtgtggaagtgagttaagcaaataaactcatatgggatatatctttgtaaagagtgrccaatgctttgaaggcaaagaagagggtgcagtaggagagcatagtgtgggagatgggcttgacattagtggtcaaggaaggcctctccaagaagtaacactcttaggctgggaccggctggatgaggagacagctgagcaggggatgtgctggggagactgaggcagatggagtgaagggtttaacctgagaaaaaactggcacatttgaggaaccaaaataaggtcactgcagctggaatgttggagtgagtgg

SEQ ID NO: 220842 - DNA, 559 bp, Homo sapiens
attcctgacctttgatccccagccttccaacagtggtgtacatcttcatttctctatgttaaagattttcttattaaaaaattgagtgtggtagaggactgacttggtaaaggatggggggacattatgtattttggttcatttagcagatatttttgagctcctactaactgctagacatggtgctagatcttgcataaacatgacgaacaaagtagcaaggtacttactagcctcatggggctagtgtggaagtgagttaagcaaataaactcatatgggatatatctttgtaaagagtgaccaatgctttgaaggcaaagaagagggtgcagtaggagagcatagtgtgggagatgggcttgacattagtggtcaagkaaggcctctccaagaagtaacactcttaggctgggaccggctggatgaggagacagctgagcaggggatgtgctggggagactgaggcagatggagtgaagggtttaacctgagaaaaaactggcacatttgaggaaccaaaataaggtcactgcagctggaatgttggagtgagtgg

SEQ ID NO: 220843 - DNA, 559 bp, Homo sapiens
attcctgacctttgatccccagccttccaacagtggtgtacatcttcatttctctatgttaaagattttcttattaaaaaattgagtgtggtagaggactgacttggtaaaggatggggggacattatgtattttggttcatttagcagatatttttgagctcctactaactgctagacatggtgctagatcttgcataaacatgacgaacaaagtagcaaggtacttactagcctcatggggctagtgtggaagtgagttaagcaaataaactcatatgggatatatctttgtaaagagtgaccaatgctttgaaggcaaagaagagggtgcagtaggagagcatagtgtgggagatgggcttgacattagtggtcaaggaaggcctctccaagaagtaacactcttaggctgggaccggctggatgaggagacagctgagcaggggatgtgctggggagactgaggcagatggagtgaagggttyaacctgagaaaaaactggcacatttgaggaaccaaaataaggtcactgcagctggaatgttggagtgagtgg

SEQ ID NO: 220844 - DNA, 423 bp, Homo sapiens
gaattcaaaaatcagattggacaaatcagaatggatacaagaagataacaaatgcttgactggctattcaggttcccaagcggacagaagacttgaagtggcagccagggcaggcaatgccacctactggtcagccaaggtagaaaaaagaaatagcctagtgaattaacttcwgccatactaggccatttggtgttgtgacacagtgcaaaatctccttctaattagtgaaataaacatcagatcatctgcaataacctttctggaatatagctacttaattttaaaagaataaaccaaagtgattatgtttatcaaaaaagtcgaaaaggagaaccacagacacattccataggatttcagaatgagccctctttaaaatgccactgtctctatttcagtctatcttcctatttcagaatt

SEQ ID NO: 220845 - DNA, 649 bp, Homo sapiens
ataaatagggaaagggagaaaataagaatgaaccctatggaattagaattgtagatatcactggaaatatatatatatctccaattgaggtgttataaaaatacagacataaatgcatacatgcatgtgtatacacattcctcagtcctggaakcatgacatcccaactacaatgagtacacaaagcaccgaaatcttggttcttaaataccattctccattagaaagactaagacttcctcagaaaaatggcagattccagggctagagcaggcaaagtgcaatatgaaccaagactatcttgtaccagaaagtaagaaagtgtcacaaaatgatgggaacatgtgaaaaggatatagatgtcagagtgcaagagttcacactgaccaaatcagggataatttaaatatccaaataagtaatgatggtaatatattataactccagtgaatagaacaggaagccatgaatccataatacatacatacacacacacacacacacacacacacacacaatttttttttccttgtgtaaccaatgtttatctttaaaactaaaccctagtggcagtctaatctaaagaacccttggttctcactacactacactacattaatgctgtaccctcataaatctgaccactcaa

SEQ ID NO: 220846 - DNA, 608 bp, Homo sapiens
acaccattactgcatactttttcaagagctataacagacttcatatctgctccaaaagcaaagtagtaaaatttttaaaaagaaaaaaaaagaaaagattttatagaataaatgactttgaaacaatcattcaaatcttctttccacacatctcaggatctcaataaatttgaaaccctaaaattctgaagttgcttggatgatctcctaaattggtatcatcagaaaacattatagttctatacacaacttacacagtttctttaaacattcaagaagaaacttgtatgacacaactttccactgagttaggtcaagaccatgtgaggtcttataggactcagcatcttttagaaygcttactttttttcatggataacaacccaaggtgacccatgttgacactggctggtagaaaagtcatcgttcacaacttaactttacaatcaaatgaagcactttcatcttcaggattactctctacaaaaattcatttaaattattttccattttcaaataataaacacctcttaatctttttttgaggatagtgttttaagtcacgttgttgccatattactttttaaatttttaagatatatacttac

SEQ ID NO: 220847 - DNA, 608 bp, Homo sapiens
acaccattactgcatactttttcaagagctataacagacttcatatctgctccaaaagcaaagtagtaaaatttttaaaaagaaaaaaaaagaaaagattttatagaataaatgactttgaaacaatcattcaaatcttctttccacacatctcaggatctcaataaatttgaaaccctaaaattctgaagttgcttggatgatctcctaaattggtatcatcagaaaacattatagttctatacacaacttacacagtttctttaaacattcaagaagaaacttgtatgacacaactttccactgagttaggtcaagaccatgtgaggtcttataggactcagcatcttttagaatgcttamtttttttcatggataacaacccaaggtgacccatgttgacactggctggtagaaaagtcatcgttcacaacttaactttacaatcaaatgaagcactttcatcttcaggattactctctacaaaaattcatttaaattattttccattttcaaataataaacacctcttaatctttttttgaggatagtgttttaagtcacgttgttgccatattactttttaaatttttaagatatatacttac

SEQ ID NO: 220848 - DNA, 608 bp, Homo sapiens
acaccattactgcatactttttcaagagctataacagacttcatatctgctccaaaagcaaagtagtaaaatttttaaaaagaaaaaaaaagaaaagattttatagaataaatgactttgaaacaatcattcaaatcttctttccacacatctcaggatctcaataaatttgaaaccctaaaattctgaagttgcttggatgatctcctaaattggtatcatcagaaaacattatagttctatacacaacttacacagtttctttaaacattcaagaagaaacttgtatgacacaactttccactgagttaggtcaagaccatgtgaggtcttataggactcagcatcttttagaatgcttactttttttcatggataacawcccaaggtgacccatgttgacactggctggtagaaaagtcatcgttcacaacttaactttacaatcaaatgaagcactttcatcttcaggattactctctacaaaaattcatttaaattattttccattttcaaataataaacacctcttaatctttttttgaggatagtgttttaagtcacgttgttgccatattactttttaaatttttaagatatatacttac

SEQ ID NO: 220849 - DNA, 647 bp, Homo sapiens
atttcttcccaggaaatgtactatatgaaatggaaagatttttgtattgccataaatatatctacatgggaattcttgtggctttgaagagtgtccaacctctgattgcatcagaattcccataatgctatacataaagtaaagctgaccttgcatttctaattagaactgagaggaacagaaatcctagtgtgtgtgttttaaaaaaatatttttcaagttgaagacaaagcccaaatatttgaaggtggtagaaagaaatatcagaaaaggacaatttgaaatgaatattattttcccctaattaacctagaaaggttacacaactttttaggggaaaaaaaaatgccaggtgaatggggaatgtatrtagtaggggttcttaaatattcaatttttgatatattctattgccatagggaagaatttaagtatttcttgaactaaagaaacatcaggctttgatccaagataaaattttggagtctcagcttctgtgcctactaagcctgtaaccaagccacatgacatgcctggacatcacatgcctttcttttaccttctattcccttctgctaaattacctttctaaaagtatccattttttttcagcttcaaaacaatttaatgagcacttattatgtagg

SEQ ID NO: 220850 - DNA, 554 bp, Homo sapiens
tttagaaaagagaaggaaagacactcagcaattactggttgctggaacatatggaatcctgtcaagcaggcattatgaaggcagtctatcctgtgggtggggaagttccttgawtagattctgattctgctttctgggatggactccctagcccacggcccttggtccatcccctgggagggtcttcatgtcttgtcctccatggccacatctgaagaggctctttgagagtgtattcttgagggccttcctgtttatgtaagtgtggggttctgaggattgctttaatgctcaaatagtcaaagactttttcaggttgggatcatatttatttggtgtacaatttactcagaaacttgggaagtttctgacctgttggcttccagtcagttccccgtgctggtaaatatatccaaagtttggctagatgtccttctcaagtcccatttatttatttgcttccttacccccatgcccttctttctcaatttaatagtagttaccttgaggccagtaggtttgggtggaaaggccacatctttaatgtaatattt

SEQ ID NO: 220851 - DNA, 554 bp, Homo sapiens
tttagaaaagagaaggaaagacactcagcaattactggttgctggaacatatggaatcctgtcaagcaggcattatgaaggcagtctatcctgtgggtggggaagttccttgaatagattctgattctgctttctgggatggactccctagcccacggcccttggtccatcccctgggagggtcttcatgtcttgtcctccatggccacatctgaagaggcyctttgagagtgtattcttgagggccttcctgtttatgtaagtgtggggttctgaggattgctttaatgctcaaatagtcaaagactttttcaggttgggatcatatttatttggtgtacaatttactcagaaacttgggaagtttctgacctgttggcttccagtcagttccccgtgctggtaaatatatccaaagtttggctagatgtccttctcaagtcccatttatttatttgcttccttacccccatgcccttctttctcaatttaatagtagttaccttgaggccagtaggtttgggtggaaaggccacatctttaatgtaatattt

SEQ ID NO: 220852 - DNA, 610 bp, Homo sapiens
gaattccagagttttctttgtggaggaatgacttcctcaaagctctgagaaccagaagtagacaacatgtgaggtaattagacagtatgtygagactggaagtgtgggggtggggggtgttgaggttgcttctatagattccagtgaaacattttgtggaaataaagagtcagactcaaacttaaaggtaggctctatcatttactaagattttcatgcaatgagaagaattggaaagcaaacacacagcagaagttcaatgccccaatatttttagtactttaaaattacaaatgttcttttatctgctcttaggtggaacaaatatgcaaactaacctaatagcttgagcaagccaccgagggtttctttcaagggatatttttctctgggtctacaggggagctaagaacaaagacgtcacgtaacacagggaagcttgggaacacttctagcaaggaagagttgagtgatgtctttaccactatggagaagggtgaacagaagaaggtgaaatgatgaaaacagcaagctggctggtctaatagaaaagccttctctttttgatatgctagaaggaattgatcagctattgaaccctgcagtagtt

SEQ ID NO: 220853 - DNA, 579 bp, Homo sapiens
gatcttggatcttgtgcaagaaagaattcagccaagtccatagagtaaagtgaaagtgagtttattaagaaagtaaaggaacagtctgggcgtggtggctcacgcctgtaattccagcaytttgggagaccaaggcaggtggatcacctggggtcaggagttcgaaaccagcctggccaacatggtgaaaccctgtctctactaaaaatgcaaaaattagctgggcgtggtggtgggcacctctaatcccagctactcaggaggctgaggcaggaaaatcacttgaacctgggaggcagaggttgcagtgagccgagatcacaccattgtactctagcctgggcaacaagagtgaaactcagtcaagaaagaaaggaaagtaagaaagaaggaagagagagagacagaagaaagagaaaagaaataaagaattgttgctccatagatagagctgccccaggggatgctggttggctatttttatggttatttcctgttaatatgctaaaaaaggggtggattattcatgagttttccagaaaaggggtgagcaattcctgcaactgagagatcctcttc

SEQ ID NO: 220854 - DNA, 550 bp, Homo sapiens
agtgacagcaatagagtctggagatggggaagggttatggctcattcacttgggtttctagacctaaaaatgtacagatatggaaacaagacctacagagattctgacccactcaaggttaacctcccagttgtggctgagctagccaagaaagtcagtgtcctgacacccagccatgagcttttctgaaattgaggggactcttaagaatacataatactactaagcttttcgttcacacagagtttgcaaagcagtcatggaggactctctgaagaagggcaaacggtccctgatggggaggagctgcttgctgcaggagctcgttgccagcaattattaattcactcctgctggatccgtcttgggggcctcccgcgcacaataacattaggagtgttggcagctgcggagggagaagccctgctcagagggaggaaggtgggactcgtcacaaggttgctctgctcccagttcctgctcttgggagaaatgctcagtgcttttgggcctgggatcaggctgctraggacacagtgttctggggatg

SEQ ID NO: 220855 - DNA, 452 bp, Homo sapiens
ccactgacaaaggttaattgttagaatctctcaggaattcacaccttagcaaagtgtgtacaccgtaaacaactggatcaaagcagattagaatcattttcccacttgtctgatagttaatacctgagaaactgattggattgctatatgatccctctaatttagataagatggcctaaacaattagatcgaccctacagtagtcactaaattgaatcagcactggcwtctcattttggctctgttatcaccacgtgatcacacgatttgtagacaggtgtctattgccctaaattctgcattataggtgtgtcataaaaaatatggctgacctctatctttggttccaggaaggtagtctctaaacttttggaatttctcatttttttttaagagagtgtctttgttattcacagtaggctcccttgaccacacctgatagtttatggtaa

SEQ ID NO: 220856 - DNA, 390 bp, Homo sapiens
ccgtaaacaactggatcaaagcagattagaatcattttcccacttgtctgatagttaatacctgagaaactgattggattgctatatgatccctctaatttagataagatggcctaaacaattagatcgaccctacagtagtcactaaattgaatcagcactggcatctcattttggctctgttatcaccacktgatcacacgatttgtagacaggtgtctattgccctaaattctgcattataggtgtgtcataaaaaatatggctgacctctatctttggttccaggaaggtagtctctaaacttttggaatttctcatttttttttaagagagtgtctttgttattcacagtaggctcccttgaccacacctgatagtttatggtaa

SEQ ID NO: 220857 - DNA, 554 bp, Homo sapiens
cttttttttcttttttttttcatgtaggaagtagaaagaaagcaaaatgtatttcagtaattaccagggtttgcctggatcccagggcttgctggatgagggaaggcagagagggttgggaaaaaggtactttgatcttgatggcatcaaacctgctcatcatgacattcttccatgtcccggtggaatgactgtacccattttatttttgacactgggcatggcaaatatattctttttcatatcttgtatttatagcaacatgttatttacatgacatttaaaaggtgttttgaatcgctgagtgggaaagytctagaatggagtatgaccttagatgtcaccttcttcacgtctttactttccagaagaggaaactgaatatggagagcagggtcttaagtaaggacacataccaagttggcggcagaaaaaggattgagctcaacagaggacagacaattgcccagaagactactataaatgggcaagcggtaaatacttacagatgaccttgcccactccattgttttaattcatcagcaaatacactc

SEQ ID NO: 220858 - DNA, 541 bp, Homo sapiens
tcatgagcatgtgttctttgcaattgctaagttctgcgtcatgattggtgcaaattttcattggaaaagttaaaggaatgtgtgggtcacttgcagcagatgttagacctataacttgatcatttttcaggaccagaaacctcgagatgtgagctcaccttggggtttgggacagcaccttctgccctctgcggcttagtacaaattagctttctggaataatgagaacaagtgtcccaagactggagcagctggctcgcctgttttgaggagcggggagaggactcagggagtcagtctctcaatagttaacccaggcgaattgttcgttgtacaggacaaattcagttagggaaaattaaatatttccttgagtgtgaaccactgatgaggaaagagagagataattaattatttgattatttgaggccagggacagagtggttttagaagagctctaagtcttattgattcattacaaggccacggggacaaccagacacttyagttaatgccagtatgaatgtcctatgaaagacac

SEQ ID NO: 220859 - DNA, 541 bp, Homo sapiens
tcatgagcatgtgttctttgcaattgctaagttctgcgtcatgattggtgcaaattttcattggaaaagttaaaggaatgtgtgggtcacttgcagcagatgttagacctataacttgatcatttttcaggaccagaaacctcgagatgtgagctcaccttggggtttgggacagcaccttctgccctctgcggcttagtacaaattagctttctggaataatgagaacaagtgtcccaagactggagcagctggctcgcctgttttgaggagcggggagaggactcagggagtcagtctctcaatagttaacccaggcgaattgttcgttgtacaggacaaattcagttagggaaaattaaatatttccttgagtgtgaaccactgatgaggaaagagagagataattaattatttgattatttgaggccagggacagagtggttttagaagagctctaagtcttattgattcattacaaggccacggggacaaccagacacttcagytaatgccagtatgaatgtcctatgaaagacac

SEQ ID NO: 220860 - DNA, 486 bp, Homo sapiens
agatctagttgcctacgttacaacccatgaagtcatattcaactctttccttttatttatcatccccaatacaatcaattacagggttttatgacttttgtctctagaataaactcttctcagtattgtcctttttttaaacctctctgtccctacattaggttatgtttctatcatttctcattggattcataccattttcaggtcaagagggatgcaatattttgtgtatttgatggatatgccaaattagcctcagagattataccaaatttcattcttgcygataagggattgttaattttaaggaatccttcccaaagctaattattgtcttcaaaaacaacttcagcaatcctttaggtaaatattctattttgaagttctaatcacattactaataaggttgaacactttttagcctccatatctttatgcaagtcaaagctggatctaaatctcctgcttaaaatctttcatggcttc

SEQ ID NO: 220861 - DNA, 486 bp, Homo sapiens
agatctagttgcctacgttacaacccatgaagtcatattcaactctttccttttatttatcatccccaatacaatcaattacagggttttatgacttttgtctctagaataaactcttctcagtattgtcctttttttaaacctctctgtccctacattaggttatgtttctatcatttctcattggattcataccattttcaggtcaagagggatgcaatattttgtgtatttgatggatatgccaaattagcctcagagattataccaaatttcattcttgccgataagggattgttaattttaaggaatccttcccaaagctaattattgtcttcaaaaacaacttcagcaatcctttaggtaaatattcyattttgaagttctaatcacattactaataaggttgaacactttttagcctccatatctttatgcaagtcaaagctggatctaaatctcctgcttaaaatctttcatggcttc

SEQ ID NO: 220862 - DNA, 613 bp, Homo sapiens
ctgtaccttcttgcctatcttttgatattcagggamccatgtacgtacatgggaatcacagagcacccctgcagtctacacagagatccagcagcctataaaccttagatttggaaagaactcaacatctggtccaactttctatcgaagtaggagtattttctgcaggaatcctgccctgtggccttcaggaatatgctgggaataagtccagtacttggaaaatcattacttttctaggcagctcatttcatttatgattggctttaattgttagaaaggcaacctagttatttgtgttggagctgcacaaaatatgcttgttattatttttttccccgtggtatgaccatttaaatgtttggagatgaatgttgtatgtgcactaatctttctccaagacaagtagtccaagcttttagccatttctccaaacatgtggtctctagaaacttcaccattgtctgtaagttttccagtttgagaatgtgcttacaacaccgtatctagaaatagagaatagggttaatcatcacgaaccacacctgggttatgacctcttttgatctaagcagaatcttaatgcagagaagccatatgtgcagggcaagtc

SEQ ID NO: 220863 - DNA, 540 bp, Homo sapiens
tcattaggcagtaatctcaaggctgtcagcctaggccacaagggcatgtccaggcaggggagctgtgttttcaacaattcaatccatttccacaaatattattgagccaatgttacgcaagaggcctggcgagtggcagcagaggaaacaaagatgagaaagggacagtttctgcttcaaggaccttaaattctagcttctctgagaaccacaggagagagaagaccaagggtggctagggttcagagttggacgagagaacagacagttgaaaactcaggacaaatgtcacagaggaggagtcctgcatagaatttcttcttccctcrtttcctccatccttccctgtggtagacggaataatgcacccccatgccccgccttgccaagatgttcacgtcataatccccagaagttaaatatattaccctatatggcaaagaatctttgcagatgttattaagtgaaggatcctgaaatggacagaattatgctgaattacccaggtgggccctaaatgtaatcacaagtgtccttgtc

SEQ ID NO: 220864 - DNA, 584 bp, Homo sapiens
gaacgtgtttgactagaacatcttgatgggaatgtccacgagtcagctagaaatgtaggtctggggctctgggaagatgtcagagatgcagaggcagactgtgagtcgtctgcaaagaggtgaagcaatgaacctggctagagaagaagactgagggtaggaccttggggagtcctcagatttagagagtgagaaagagacactggtgaaagcaaccaagaaggagcattcagaaacgtggggaacacccaggctgctaaaatggcagacaaaccaagaacgtttgaagaagacaggatggtcagcagggtcaaaggctgcctggaagtcagagggatgagtgaggaaaggtctttcctatggcatttgggagatggttcctgagccgtgtgagatgaggcaggtggacaggcaataagggataaaaggagattgagtggggaggcggtggaarcaccagtacctctttcgacgtatgtggaagggaaggaaaggagggatatgaaaacaggacctgagcaagtagcagagcgacataaatctgattgaaaggatgtgagggggcttaatgtggaaatgactga

SEQ ID NO: 220865 - DNA, 480 bp, Homo sapiens
acctctttttgcgaagttttattttatttgactgctgcgggggaaaagccctctttatttttgaacaggagactcttaraaaatcagcccgagccaggcattttctagtaccctgaacaaatgcagaatttgctgtcagcctgattggacacggctccacgtcagggtctgctacctgcaggcttctatggcgggtcccatgacatatgctgccaggctggaaggaagctccacagacagcaggtccccttcccagacagatgggggtctctccttttctgaaacatcccttgggaaggcttgattgggagcatcttcccaaaatgggatgtctgtgtgttgtgagtggctttattgctcagagcatctggatatgttgtgataaacagcgtgatagatgattttaatgcttctggaatgggttgcccagacagaaggaacagaacagggaacatttgcctccctattgcttggaacaga

SEQ ID NO: 220866 - DNA, 353 bp, Homo sapiens
tcatcaattctcagaagctaagccctttagctgatcaacatcaccagaaaggaatcatattatygtgattagtcagtattaattcaaaacttgaagccagaatgaagaatttgcaatggccagtacctatcagtaaatttgtctcttttgtctacttccctccctctcccaacaacctctctcccttctccctctcctcctcacctatttcaccagtctctttctttgtcattgtcatgggtcccctaaatcatttatctgagttccctataaactttaactccatcctcctctggggccaaccattatttcttagaccctgtcaggcccaagtttgtaatgtgaaccccttc

SEQ ID NO: 220867 - DNA, 610 bp, Homo sapiens
gttttaattttaatacagtaagtatatatacataaaacattcataaacaaaagttcttcagagttttcaataagtttcaagagtgttacaaaccaaaaatttgagaactactgaagtagagcatcatgtgaaggttaaattaacaaatattatatataaagtgtgtggcttataaaaagtgcctagttataacattaatagccaatatatatttactatgttcaagcactattataagtgttcatttaaccctcacaatacctctgtgagataagtacagttatctttttaaagatgagaaaaatgaggcacagagaggttaagyaacctgtccaaagttaaacagctagtaaatggtagaattaggatttgaacccaaatagtttggctccagatctgggttccaaatacttatattatattgtcagtacctgttgatgttgatgttagtcattgttggtaatggttgtaagctagattctgtagtttcacatgctgtatttattttcctcttattattttaggcctctttataaggtgttatttaatattcaaaattagtctcaaatctgccatgggatattaagggactggaataagagatggtatt

SEQ ID NO: 220868 - DNA, 559 bp, Homo sapiens
ctcaaaaccacagctttaaaacagtacctgttctaattcagttcaaatttctaaaatgatggttggcactgtcttcgtgcaatcaatctgagaaagcttctgtcaactcctttgcagatgctttcagtcctgagtatttccagaaagaacagtacttttctgtgaatagtctgccagctggtctgagaaaagcaggtgcagatctttttaaataccacatgtacttgcatgctttccctgtacttgcatactcccctccgtcccccgccacgattttgagaaaggattgttttggttgtttyatttttttcttctacacaattttccccaagactactatggtcaaaagcaacagttataaaaacaatgtaaagtgttcatgctagtcattttaacttcacagcagattcttaacactttgtacatgacattctgtttgtttgaggatctgtctaacccaggaagaatggctaaggctgttatgaagaaggaaagaggaaatttgtccccagtttcctaggacctgtgtaaatgatggcatcccattatctgaacaatg

SEQ ID NO: 220869 - DNA, 479 bp, Homo sapiens
agagacctgaagaaagctttaaggtaggcatacarttttgtttaaaaatccaggtgtgaaaaaaaattcatcactttattttcttcactaaatccaactgtaagccaccatccttctgaggtagtcagaaattcattgcagtaagtattggggctccctctccagattcaagcaaaagtcccaggggcttctgcagtgacaccccccacccccatcataagtcacggcaggtacactgggacaccatatggtctcttcaggtaaggctgggagacccagaaagcaagactccctagaagcaccaccccttcccaggccttgcccctccccagggcatggcactcctgtttctttcccaacaaagggaaaactcatagtacaccctcatccacactcccagaagcatacccctttctctcctgcccctctggctcttcaagcagcttctactctatgtccagtgaaaattatataattaa

SEQ ID NO: 220870 - DNA, 576 bp, Homo sapiens
agcagctcatgcctgcaatcccagcactttgggagaccgaggggggcggatcacttgaggtcaaaagttcaagaccaacatggtgaaatcccatatctactaaaaatacaaaaattagctgagcgtggtggcgcacacccatagtcccagctactcaggaggctgaggcaggagaatcgcttgaacccaggaggcggaggttgcagtgagctgagatcactggactccagcctgggtgatagagtgagactctgtctcaaacaaaaacaaaamcaaaacaaaactgatggttagaagagatgagggagagtgaaaatgtaaacctacttcctatctgaagtattgaaagactctgtgctggtgacagaaagagagatcagaaaaaaattatcagttggagaaatgatgtgatgaattttgtttgctgcctactgggtgggaaattatagctaagtatacaaacaagatgcccaagtaaaacagagtgggagtgcaggcaagtggtcagggctccagatggagaagctggagttctgcacattgcaaaccttgaggggcctctgagaggagacagag

SEQ ID NO: 220871 - DNA, 576 bp, Homo sapiens
agcagctcatgcctgcaatcccagcactttgggagaccgaggggggcggatcacttgaggtcaaaagttcaagaccaacatggtgaaatcccatatctactaaaaatacaaaaattagctgagcgtggtggcgcacacccatagtcccagctactcaggaggctgaggcaggagaatcgcttgaacccaggaggcggaggttgcagtgagctgagatcactggactccagcctgggtgatagagtgagactctgtctcaaacaaaaacaaaaccaaaacaaaactgatggttagaagagatgagggagagtgaaaatgtaaacctacttcctatctgaagtattgaaagactctgtgctggtgacagaaagagagatcagaaaaaaattatcagttggagaaatgatgtgatgaattttgtttgctgcctactgggtgggaaattatagctaagtatacaaacaagawgcccaagtaaaacagagtgggagtgcaggcaagtggtcagggctccagatggagaagctggagttctgcacattgcaaaccttgaggggcctctgagaggagacagag

SEQ ID NO: 220872 - DNA, 560 bp, Homo sapiens
aaatacacataacataaaatttatcataactattttcaagtgttcagttcagtagtgttaagtatatttgagttgtgaaaaaggtctccagaaccttttcatcttgcaaaactgaaactttgtacccattaaacaataaccayggaaagcaaaaccacagataaggaggaattcctgttctatgctattttgattacagtaactttatgataagttttgaagtcaggaagtatgagacctccaacattgttcttttccaagatcacattgtctatttaaggtcctttgatatttccatatacatttttggattgggttttcctctttctgcattaaaggactgcattaatctgtagatcactttaggaaatattgacatctgaacaatattgtcttccaatccatgaacatgggatgtctttccatttatttatgtcctctttaattgctttcagcaatgtgttgtacttttcagtgtacacatcttgcctgcttggttaagtttattcctaagtattttattctttttgatgctatcataaatggaatagtttgtcttt

SEQ ID NO: 220873 - DNA, 560 bp, Homo sapiens
aaatacacataacataaaatttatcataactattttcaagtgttcagttcagtagtgttaagtatatttgagttgtgaaaaaggtctccagaaccttttcatcttgcaaaactgaaactttgtacccattaaacaataaccacggaaagcaaaaccacagataaggaggaattcctgttctatgctattttgattacagtaactttatgataagttttgaagtcaggaagtatgagacctccaacattgttcttttccaagatcacattgtctatttaaggtcctttgatatttccatatacatttttggattgggttttcctctttctgcattaaaggactgcattaatctgtagatcactttaggaartattgacatctgaacaatattgtcttccaatccatgaacatgggatgtctttccatttatttatgtcctctttaattgctttcagcaatgtgttgtacttttcagtgtacacatcttgcctgcttggttaagtttattcctaagtattttattctttttgatgctatcataaatggaatagtttgtcttt

SEQ ID NO: 220874 - DNA, 499 bp, Homo sapiens
ataagcagttaactagaacatagccacattcattcatttttgtctgccatgtrtagctgcttttgcagtttttgtcgtatgaagctgaatgcacagactttcttgccacgcagcagttcagtgggttattgtgatttttttttttttaatctcaggaccaagattaaagttttttgtgcagagttgcaggtagccaaattactttttgtattcctgtgccttagattcctcatctgtagagcaaaattgagatcgtctttcaggtctgtttgctctccacatcctaaggtcctaggtctgaatcagacttagttcttctgttgtggctgcttagcacatcaggctcctaactgaatgattgtagtggtgttttactcggtctcctagcctcgtccttccccattctgtgtatcttcagcatgacctcagaccaccgtctttctaaaacatgagcatgtcacactccagttcttaactgtaagaactttgtcaggtatga

SEQ ID NO: 220875 - DNA, 499 bp, Homo sapiens
ataagcagttaactagaacatagccacattcattcatttttgtctgccatgtatagctgcttttgcagtttttgtcgtatgaagctgaatgcacagactttcttgccacgcagcagttcagtgggttattgtgatttttttttttttaatctcaggaccaagattaaagttttttgtgcagagttgcaggtagccaaattactttttgtattcctgtgccttagattcctcatctgtagagcaaaattgagatcgtctttcargtctgtttgctctccacatcctaaggtcctaggtctgaatcagacttagttcttctgttgtggctgcttagcacatcaggctcctaactgaatgattgtagtggtgttttactcggtctcctagcctcgtccttccccattctgtgtatcttcagcatgacctcagaccaccgtctttctaaaacatgagcatgtcacactccagttcttaactgtaagaactttgtcaggtatga

SEQ ID NO: 220876 - DNA, 499 bp, Homo sapiens
ataagcagttaactagaacatagccacattcattcatttttgtctgccatgtatagctgcttttgcagtttttgtcgtatgaagctgaatgcacagactttcttgccacgcagcagttcagtgggttattgtgatttttttttttttaatctcaggaccaagattaaagttttttgtgcagagttgcaggtagccaaattactttttgtattcctgtgccttagattcctcatctgtagagcaaaattgagatcgtctttcaggtctgtttgctctccacatcctaaggtcctaggtctgaatcagacttagttcttctgttgtggctgcttagcacatcargctcctaactgaatgattgtagtggtgttttactcggtctcctagcctcgtccttccccattctgtgtatcttcagcatgacctcagaccaccgtctttctaaaacatgagcatgtcacactccagttcttaactgtaagaactttgtcaggtatga

SEQ ID NO: 220877 - DNA, 607 bp, Homo sapiens
atattcattgaacatctactctgtgcaggcactgttccaggtgcttgcaatatgccattgaggaaaacagacacagacctctgcacttgtaaagttattcaagtgacaggacacagacaataaactacaaacatgacaaacagttgtaaactacatagaatgttagaggtaatgaggtcacagtctttggaaaaaagagacttatttcccaaaaagtactgcatcatcacacacaatcccagcttgctctctgttacctctccaggagtctctgaggctggagtggccacactgctcacttctcttttatttctcaaacaccctccaccatccacctgtctcccttgtaacctgtactacacatgtgtgggacacagagaaggtgctcaatcatgtgtggcatcaaattaaccatcctagtttaggaacacaaactgtctccygacagaaatcctcctctaagatgatctgtttacctgtttgccagggccctagagccccgtctccattgatcatcccctgtgtcacatgtgggaaatgtggttatccaaggagactttgatgattaatttccctccctcctcttaggtttcccaggagcccatct

SEQ ID NO: 220878 - DNA, 584 bp, Homo sapiens
ataacaactgcgatgagtgaggctcaatggaactgtggttttaaaaaagagcaacactttggagacaactgggtagtctcgataggcatttgcttcacagcaggcatcgttactcccattttatagacagcatgtggaagctgggaactgtgggacaatttgttcaagctctcatagccygttgtatggcagggtcaagatcagaacacagcgaagaacccacatgctctttggggatcactgtccacctggcaccacttctgcccactgcctgagctggcactccacacacctgggatacaaccagtgtcctgtttctgcctttgcccccaaaagcccattgtccacacagtagccagaaggagcgtgggttgggggggcgggggcgggcattaaaagccaagccagccagtggctctcacctgagttagaaaaaggcaacgtttttataaaaaccaacgaggctccaccatcccctcatctcctgccacataccctttcacacaatccacttcctgttcctctaacgcaccggtcttcttactgttcctctaatgcaccgagcaggctccagcctcagggtc

SEQ ID NO: 220879 - DNA, 484 bp, Homo sapiens
tccactctggggctcatttgtcctgtacctctgtatcacttgcattatattcagtcctgttcaaaccatgtatccagtttgggaaactgaaaaattttaaactaagttcaatttaggaaggtattgagccattactctgyagtgggcacgggaataaagaagacacacactttttacttttaagaagcttagaaaacaatctagtcaggaagataaatagtcatgcaagtgaatataatataaggcagaataaaaagatcagaggagaggcgaatgccttctagcatttaacttcaagcatcatatttttagggataagtagtaagtatgaatctaatatatctaatgtaactactagtctaatataactaatataactaggtcatttagaaacatcctagttgtaggtagtataattgatatgaatttcagtttataaactcaggcatgcaaacagtaaagcattttttttttaactgaattc

SEQ ID NO: 220880 - DNA, 487 bp, Homo sapiens
gaattcttttcctggacaaagccaagaacccagatgggctaagctccactctggggctcatttgtcctgtacctctgtatcacttgcattatattcagtcctgttcaaaccatgtatccagtttgggaaactgaaaaattttaaactaagttcaatttaggaaggtattgagccattactctgtagtgggcacgggaataaagaagacacacacwttttacttttaagaagcttagaaaacaatctagtcaggaagataaatagtcatgcaagtgaatataatataaggcagaataaaaagatcagaggagaggcgaatgccttctagcatttaacttcaagcatcatatttttagggataagtagtaagtatgaatctaatatatctaatgtaactactagtctaatataactaatataactaggtcatttagaaacatcctagttgtaggtagtataattgatatgaatttcagtttataaactc

SEQ ID NO: 220881 - DNA, 591 bp, Homo sapiens
agtgccaatgactgcttccatcccatctttccctctgagaagcatcagggccctgcagtagatctggggaaaaaatgcccataagtcctagagtggacgatctgagcctccgtctccccggagcttccctgggatgtgaagccttccactccccagccgggatctgggctgtttgcaacacctactagcctggggagccccatattcccttccccaaccctgcagactgaaagagaggccggtcacatgctgcccgtttcctctgccttctctgcccatctggtggtgtcgggatgggctggaggagcttcttagaaaaaggtgatctctgcaggcagagtcgtgtaaggaaagtgccagagattggggttctaggcccttaacttgctagttggccacaagtagccattttaaaattctctaggcgtgggtgtctgtctgctcatctgttagatgcaggaattggattaaatgatgtgtrtaattttagtatatcactcaagcagcttttacatgtcagggggacccctctgctaaggcaatttaaatttagtttcatgaaataattggggtttcctcagttgatctctt

SEQ ID NO: 220882 - DNA, 457 bp, Homo sapiens
tggaacactcccaggcctgtcttctattcccacctctctgcattagcattctaggagcaccaggcrctctgctgtctgatgggtggaatgttctgcgttctagtgttaccttggcaaagagaggatccctcccaagttctgctctgttgattgcaatgctctgctttccacagctgtcagtggtttgagtcatcagacacagattgttctgttccctcggattttaggatagctttcttcttgtatcaatggctaattctttgaaagaagataaattatagtacatacagggacttttgcttagctggaatattagattaacccaagcacctggtttttcccccatgactgttgattggggaaaatgctatcatgtctctttgaagaatggagcttcctaattttacatatgtggaaactgagacccgaaagtcctagtaatgaaggagaaagaagc

SEQ ID NO: 220883 - DNA, 415 bp, Homo sapiens
agggagaattgaacagaccagggccccagagcctccgcacatggagctaaaacaagcatagaggagccgagtcggactgattccccagctcttcacagcccccagattagctgggtattagtgcaggctggtctcagctgcccawgaaaatgagaacacattttaaaacctgcatttgaattttaaaggtactcaacatttctagtattgtttactgaaaaaggtcaacactcaagtgttttatttatgcacggcagaacctcagtctaaaagcactaggctttccatatggcatagcctgagaatgtgttaaatatgtagttccagagccaagaatattatttttcaacttagcgaatgcattattaaaagacctctgctgtgcccaccactgggagatagggcaagaggcagc

SEQ ID NO: 220884 - DNA, 529 bp, Homo sapiens
tgggctgatggctctaactcacccgcttgttaacctgcgttgatctctcctaactggctacctctctatgccctccatggctattctgccttctgggcttaccttctagtcaaatacttggaattctcctgtttataagccccatctaacttctgcccaaccttcagscttggcttgccagtttaatctgtctctactgtgatccacatccccaaatcagcttggttctcatgtgccccaaattgtccttaactccctcatccaacaatcccatattcctattccacagtctccatgcccatcctgggggcacagtactctttgactaaagtttagaatgatagtctctggtcagtcctgtcctaccagtcaaaccctaatctcaatccaggtctggaagctgcgataatcttgagtacaatacgaactggtaatcagcaagtggggtagctcaaacagaatactggcaaatgaaatttgccttagagggccatgagaacatagtggcctctgattaataccaaagaaa

SEQ ID NO: 220885 - DNA, 505 bp, Homo sapiens
agccaggtgtggtggtgcacacctattaatcctggctactcgggaggctgaggcataagaatcacttgaacccaggaggtggaggctgcagtgagccaagattgcaccactgcactygggcctgggcaagtaagtgagactctctcaaaaaaaaaacaaagacaaaaacaaacaaacaaaaaaaccaacaaccaaattttcagattaaatgcctaaactagtaggcccagtttttataaaatcctaatgacaatttttaaacattcattcagccactattcattatatacttatgagccaaacaataagttggaaaattccaggaacactgcaataatcaagatagccttttagtcaagcatcttaactgtcttgtaaagagatacaactaggatgtcaaaaaccataagaaggtggtaccagtaggtgtttgtaataatggggtctgaaaccaaactggcgggggtgttcctgcttcattacttcctggctgtatgaccttggg

SEQ ID NO: 220886 - DNA, 503 bp, Homo sapiens
agaagtttaccttacctcggtgatattcttcccaataaccctaatcagccaaaagtgagggcatgctttaaaaatacttggctaatacacatcaagaccgtcaatgtcatgggaagcaagaaaaaactgagaaactgtcacagaccaaaaaagactgaagagacatgatgacacaatgcaatgtgatatcctagactggactggatcctggaacagagaaaggacattaatagaaagactggtaaaatccaaaygaagtctggagttgagttagtagtgatgcaccaatgttggcttcttagttgtcacaaacgtaccaggccatggtaatgtgagatgttaacagtgggggaaagtgggggaggagtatgtaggaactctttctattatctttgcaattttttctgcaaatttaagattattccagtataaaaaattgtcaaaaacactaataataagaaggcccaaaaggtgaaacagatattggcaaagctcttgtggta

SEQ ID NO: 220887 - DNA, 453 bp, Homo sapiens
ggtctcatctaaatccacacaaggtcatctcataccacttagcttgggagtgcttgaaaaattcaggacaggaacagggacaggagaggacatcataatcccatgcctcaggggaatactacaacctaacaggaacataactgaaaggcaagctaaccaaaacaagtttayaaaagaggcaaaaataaaatttcactcatctgctattaaaattttaaataggaagcataaaccatatgaaataaactcaatcttcacttctatattatggtgaattagtgaattaagggaaaaaggaaatacaggaactgtagattctgagtagagattagaaataaaaggaagaaataaagttgaagatgaaaagaaaggaagtaagtcagagggagagacagcagcagacagatggagggaccgtccgagttctagttcaagggtagactaacagaaact

SEQ ID NO: 220888 - DNA, 453 bp, Homo sapiens
ggtctcatctaaatccacacaaggtcatctcataccacttagcttgggagtgcttgaaaaattcaggacaggaacagggacaggagaggacatcataatcccatgcctcaggggaatactacaacctaacaggaacataactgaaaggcaagctaaccaaaacaagtttacaaaagaggcaaaaataaaatttcactcatctgctattaaaattttaaataggaagcataaaccatatkaaataaactcaatcttcacttctatattatggtgaattagtgaattaagggaaaaaggaaatacaggaactgtagattctgagtagagattagaaataaaaggaagaaataaagttgaagatgaaaagaaaggaagtaagtcagagggagagacagcagcagacagatggagggaccgtccgagttctagttcaagggtagactaacagaaact

SEQ ID NO: 220889 - DNA, 592 bp, Homo sapiens
ttggacattcatgcccttattcaattatttttttttactataaccaaaacagatcttcatgttttttcaaatacatttggtcagtcagtcaaaagaatttgaaaagcatatcacaagtatttaacttccttctatcagagagtgatgggacagagacatgagggaagtgaatcatttcagcataaagcttttgttaaacagagctaagttaaactgaactaaaatagaataaattggatgtatgaagtgtgtattatgggaacttatcctgagacctcttctgttcagtgtcttttcttgatgtcttgaacaaagatygctataatacactcactaaatactcaccatcatcaagttacttgtgttgaaggcatgtcaggtgctaagaacacagaaaggttgaagacaagtgtttaggcttcacgcttcaagagggacaggaactttcagagtaaattaaagtgacaaaaaagtactttaagttattgaaaaccttgctaaaatgaaattaaagagctgaaactctacccagagttatatgactgacacagtcacagcagattataacagaaagtcatacatgtaagaggta

SEQ ID NO: 220890 - DNA, 609 bp, Homo sapiens
tgaattaaaataaaatttcatgatatgcagctaaaacagtactttaaaaatgtttaaggcactaaatgcttatattagaaaagaagaaaggtcttacatcaatgaccatggcttctatcttataaaaaaaaaaaaccttaaaaaaaaaagagcaaattgagcctgaaataagcagaaaaaaaaattaagaacaggaattagtgacatagaaaaactatagagaaaatcaatgaaaccaaatgctagttctttgtgaagatcaatgaaattgataaractccagccagccttaggcaggaaagcagagaagatacaaactgctaatattagacataaggaatgtaacataactacagttcccatacataaatatcaaggcatattacaaaaattgtatgtcaataaatttaacaacttggaatagatttcttgaaaaacacaaattaccaaagctcattgaaagaaaaacaaataatctatatagctctgtatctattaaagaagtagactttgtagttacaattattcccacaaggaaacttcatgcctagatgactttgctagagaatcctactctagtagaggttaaatcttaaggaaaaaataata

SEQ ID NO: 220891 - DNA, 609 bp, Homo sapiens
tgaattaaaataaaatttcatgatatgcagctaaaacagtactttaaaaatgtttaaggcactaaatgcttatattagaaaagaagaaaggtcttacatcaatgaccatggcttctatcttataaaaaaaaaaaaccttaaaaaaaaaagagcaaattgagcctgaaataagcagaaaaaaaaattaagaacaggaattagtgacatagaaaaactatagagaaaatcaatgaaaccaaatgctagttctttgtgaagatcaatgaaattgataaamctccagccagccttaggcaggaaagcagagaagatacaaactgctaatattagacataaggaatgtaacataactacagttcccatacataaatatcaaggcatattacaaaaattgtatgtcaataaatttaacaacttggaatagatttcttgaaaaacacaaattaccaaagctcattgaaagaaaaacaaataatctatatagctctgtatctattaaagaagtagactttgtagttacaattattcccacaaggaaacttcatgcctagatgactttgctagagaatcctactctagtagaggttaaatcttaaggaaaaaataata

SEQ ID NO: 220892 - DNA, 576 bp, Homo sapiens
ggtagagtgatgctaattctcactctcaacacaatccaagcgaggaaatttctccaaaataagataaaaacttgcagggttttaggtgtcattgtatatctgaatttactccacagaaattcttctcccaacttgttaaatttcaagacttctccttggagccatgagcagaataagaaaaacacagatggctcaacttcacggtaataatgattcaaggcaagcaaaccttcagctgtttatatttcagattaaaatagaattgaggagagaaacatcattckgggtgctaaaatgaatattaagataaagctagtgtaagtattattaatattgcactattattattttgggtttgcaatccataggaaatccatgtatgcttctgtttgcttcccttacaactggtattttaaataaattctgcatgctcaataaatagggtctatttactcaaaggcgacagaccccatggtactctccacaaagacttccctcatggcctcctgctgctgttgtttatagggctgcaattacagaaaggattctcagcagaacgagcaatgacaccattac

SEQ ID NO: 220893 - DNA, 611 bp, Homo sapiens
aaacaaccatatatttggaatgatatcaactttttaggattaaacacattcgtttatacatttgtagaaaaagaaattggaaggaaatacatcaagacacatgtagtggttatttctgcatcttcaaatgacaatttttgctyatttatacctttgtgtattcaaatttttataataaaattacattattaaaactttccttggggccgggcaccgtggcccatacctgtaatcccagcactttgggaggccgaggcaggcagatcacttgaggtcaggagtttgagacgagcctggccaacatggtgaaaccccatctctactaaaaatacaaaaattagctgagtgtgggagccggtgcctgtaatcccagctactctggagcctgaggcaggagaatcaattgagccttggagatggaggatgcagtgagctgagactgttccactgcattccagcctgggcgacagaacaagattctgtctcaaaaacaaaacaaacaaacaaaactttccttggtacattctaggttctttaaacaacaacaacaaaaactctttgatggcaaatggaagagacaggattcatgttacacatccctctgtgtcctt

SEQ ID NO: 220894 - DNA, 542 bp, Homo sapiens
gtaagtaaatctgctgctgcctagaaaggttttaaatggttgtgttctgaggcactgtctccttcctgcctactgtgtgtaagataaagctatacttcctctcaaatttgccaaactcagttcargatcgaatgccattccgttatttattcatggattacataaataattgtggaaaagaagaaggaggcatgagcaaaaattgaccttaaagaatacagatgagagagaaaaatatctggctcatggtaccgaatgcaatttcatgttagcttagagtcatcgtatgtatttaggttttattatttataaaaaagaaatcgtgctgaatgttctttgtgggaactgcaatatattgctattgctacgatggtttactattttcacagctagatggcttaaacccaaactaaacaaatattttaaaagaattcccaccagcattattacttttttttcgtttctagtgttaatgaaaaagatcttctgcttttcaagtcctctgatatctttactcttgagcaattctcaattttatggct

SEQ ID NO: 220895 - DNA, 542 bp, Homo sapiens
gtaagtaaatctgctgctgcctagaaaggttttaaatggttgtgttctgaggcactgtctccttcctgcctactgtgtgtaagataaagctatacttcctctcaaatttgccaaactcagttcaggatcgaatgccattccgttatttattcatggattacataaataattgtggaaaagaagaaggaggcatgagcaaaaattgaccttaaagaatacagatgagagagaaaaatatctggctcatggtaccgaatgcaatttcatgttagcttagagtcatcgtatgtatttargttttattatttataaaaaagaaatcgtgctgaatgttctttgtgggaactgcaatatattgctattgctacgatggtttactattttcacagctagatggcttaaacccaaactaaacaaatattttaaaagaattcccaccagcattattacttttttttcgtttctagtgttaatgaaaaagatcttctgcttttcaagtcctctgatatctttactcttgagcaattctcaattttatggct

SEQ ID NO: 220896 - DNA, 343 bp, Homo sapiens
acttggtaggaacccaatactagctaataagcctactcctactgtcttagatctagttctgtttcagaattggaagctttaaggattatgaaattctgggaacttggagtaggtccacctagaagtagaagcagcaaaacccaaaaaaccaatacaatttttaatagtgttgtttaatttttaagtgttatttactagaaaataaaactatactgtgtttaatcatcaagcaatttttaacaaaaaastttagcactaggaataggttaaacttgacacaatttgctatcatagaattatatatatgggtaaagggtaccagttagattcccattggcaaaaa

SEQ ID NO: 220897 - DNA, 510 bp, Homo sapiens
atatttagtggagataagaaccactgaaacttagcaaagtaagaaaaggcttttttgaaaaggctaagaaacaaatccagctgtttcctattctacgtttccttatcatgttctaaatctagcacttacaggaagacaccaaaaatacctttgatatttggccatttctgagaaaagctgaaaatatgaagamccaattaagtaaattagtaacaacaccaaggaccacaaatgtgtatgttgaaacagactgggtcgtgacagttcagagtttttaaaacatgctataaatagttggaaaaatgaaatgccaaaaagttgttctattttataattaaaggtaagtaagcttagatgattgaagcataattgccttagagtagttctaaaattttagtaaactcaataattaataacagccttttattttgctgcagaaattcagaagccacactaattaggatcgatttctcctatttctcttctttgtttcttgcatatccagaattc

SEQ ID NO: 220898 - DNA, 496 bp, Homo sapiens
atcctttgtactttatattctcactgtttaaatgtaaatcgcatcatatatggtctgtgggctctgtgacggttaagaacgtcaagtcacagttctgccctccttcctccactctggagggtgaatgcgttttctctgggggcagcctccagggggtgctccacaccgggaggagggctgaagtatcttgttgtctactgagggctttcagacttagggacctaggccacgtggttaggggacaggaccagaatgggaatgagccctttcctttttgtctttctgttgatagttccatactattaagagagatactattagggttgtctcttttcagctcsccatccgcatatttgcctaccttttttgagttcctgcagtgctgcctttctccaagtccatatcttggatcttgttgcatttccctcaaccctccacccagtggtgatgcttcccaggctgaggtgttgctcgccttcacctgtagcttgcattg

SEQ ID NO: 220899 - DNA, 392 bp, Homo sapiens
gagtttgagatcaatttccagcctaaaaccaccctggaagagtcagcttctgctttcagcttcttctcttcccaggagatgactggccttcgctgtcacggaggaacagccctrtgtttacaggcccagaagatagagcaacaccatatggggtcatcagagcagggtcttcccactgctagtggatttaattctcccactttcacagatgagtaaatgaggatcagaaagttaaaacaacttatcctatgttacatggcttctaagcttcagggtcaggatttgaacccagtgtgtatgggagggcttttcaaatgcccacccagtggcttgcaccaagctggctgcccagacccttgagggagcttgttaaaatagtgatcggttcctga

SEQ ID NO: 220900 - DNA, 428 bp, Homo sapiens
ttctcacagctgcttggctgcggaactgcagaaacctgaggggctgaaygagtggttctttggggccactggggtactatttagtaaatggatgccatttgcagataccattaatttggtaagtgctgaaaagtaaacagaaaagaaattcagtaaaggcacattggttcttagacatgcatgccctttagttactgtactatggggatttaagagggctcatgcatattcccaaatgcctatattttccccagaaagatgttaactcactgaaaaagagctaaagaagagttagtaaaatatttcaaattgcttgctgtgggatacactaagttttcaccaagcagcattgcatccatttttgttgagagaacctcaatctcattcattgtggcaatatgctcaactccagggaatgaaacacagct

SEQ ID NO: 220901 - DNA, 459 bp, Homo sapiens
ctattcttcctgagtgcttctcacagctgcttggctgcggaactgcagaaacctgaggggctgaatgagtggttctttggrgccactggggtactatttagtaaatggatgccatttgcagataccattaatttggtaagtgctgaaaagtaaacagaaaagaaattcagtaaaggcacattggttcttagacatgcatgccctttagttactgtactatggggatttaagagggctcatgcatattcccaaatgcctatattttccccagaaagatgttaactcactgaaaaagagctaaagaagagttagtaaaatatttcaaattgcttgctgtgggatacactaagttttcaccaagcagcattgcatccatttttgttgagagaacctcaatctcattcattgtggcaatatgctcaactccagggaatgaaacacagctgctctaagccaacc

SEQ ID NO: 220902 - DNA, 601 bp, Homo sapiens
tggcatttcaaatatttcaattactatccactaagggaagtagcctcctatggtcacacagcttgtagttggtggaatcagaggctcagtcaggtcagccgtgcctagggctggggctctcaaggaacagattctgcttttctttggataatctgctagcgtagaaaagactttccagtggaagattagaagcaaaaataaagtaacatttgaaattacacttatgctactgaggtgtttttattttactaaaataattacatcacaggctggttgccatatctatcaatatcactgcaattctgaaatgccagccaccgaaacacatgagtgttcaaagaaaagctgacgtcaagaaaacgtgggtctatgtacttcaactttattcatatcattgtaatccttccaataagacattaatacatatcataattcctaattacccacaagcatgacaatatttctaatggtagaattttcaaacaaccttctatactgaagaatatggggtttttcttaaacataacmctattttatccttttcttgaagaaggaaaaaaacatcccaaagttacttgctgacaaaagtcaattacaagac

SEQ ID NO: 220903 - DNA, 574 bp, Homo sapiens
gagctcggtacctcacacatttccatcagtattatttaccactatccttactagagcccaaggtcccataaaactgccctcttatggtgtggtcggtgctggtaaagccctggaggtagacacactgggccttgtgctcccacaaactggctggaaaacttgggcaggtctgttaacacrcagagacctctatgcaatgaacccattgaacaagacaatttgatagatgcctctcagctttcagttcttcttttgcacgctgtgtagagtccctcatgaattagatcttagaacattgagacagtagtgtattcctttgccagaggaattatatgttacattagaaggccacctacattgtggttttaatttgtaggatggatacttaaggtatccatgacttcaacactatgcaatctatgcctgtaacaaaattgcacctgtactccgtacactcatacaaacaagcaaacaaacacaaaaggccctctggagaacaggactgtcctctagatgctgacagtctatgttcagtgcctgtctccctgtctctgccttaccccctttctttagg

SEQ ID NO: 220904 - DNA, 574 bp, Homo sapiens
gagctcggtacctcacacatttccatcagtattatttaccactatccttactagagcccaaggtcccataaaactgccctcttatggtgtggtcggtgctggtaaagccctggaggtagacacactgggccttgtgctcccacaaactggctggaaaacttgggcaggtctgttaacacgcagagacctctatgcaatgaacccattgaacaagacaatttgatagatgcctctcagctttcagttcttcttttgcacgctgtgtagagtccctcatgaattagatcttagaacattgagacagtagtgtattcctttgccagagsaattatatgttacattagaaggccacctacattgtggttttaatttgtaggatggatacttaaggtatccatgacttcaacactatgcaatctatgcctgtaacaaaattgcacctgtactccgtacactcatacaaacaagcaaacaaacacaaaaggccctctggagaacaggactgtcctctagatgctgacagtctatgttcagtgcctgtctccctgtctctgccttaccccctttctttagg

SEQ ID NO: 220905 - DNA, 555 bp, Homo sapiens
gctttgaaaaccaaattagaagtctatcttcactccaaggatctttctgcctrcagaaataaggctagaacctactctctgagctaggagaaccgagctaggagaaaataaaatcaatttcactcgggaagaatggctgatctgtttttgtgtccctttaactccagcagtttaataaatacttgtgatttaatgcccaatgaagatattattgaaggaaaaccaagcctcaatctcttcttggcaaatgagaaataactacttggaaatgtaaataccagttcaattaattccaatgtaaagtggacacctgatgatatttcaaatatgctgttataaagaaaatactgagtatgtttattttaaaaggattctaaatttgttttaaattataaactagttttcagttattctgccctattcttctatgaaattcacagaaattattgtggccattttatatttgttatttccccccatttaaaatacgttatgaaaaaccaatccctaatttctcatagcttattttattatttgaagacaactttttcttat

SEQ ID NO: 220906 - DNA, 435 bp, Homo sapiens
tgttgaggcttctacttctgacattctaatttttcttattttgtttttaacactcrgaaatcaaacgtatcggtggccacttttcttgtttaacttggatttatcttttttttatttatttattttcttccatttacaaagatagggggctggaagagagaatgccagggggtccagtgggccacaccgaccctttcttccctccatgttccccgttagaatctaagcacagaaggaagaaggcctacttttccagacagtagggccttctcttggcttgcagaagtgcatttgaaatggaggtggcagagatgggataccacaccgggccaggccttgtggaacctgcaatgcattccctgcagagtgatctccagtaggcttcggagagagtaagggctggggccctgtcaagatgctgcacagggagaattc

SEQ ID NO: 220907 - DNA, 483 bp, Homo sapiens
atcatgggcttcagtggtagggttgttgagttcttcaagtcaattaatgatgatggcaatcatttgatgtgtgagtgccttctggaaagctttgaaatccttgagaggataagatatagtaggatggtaaacaaaatgactacagagagaataatagccaaggatttttaaattccctggagcasagattcccaggagccaatatttcaccaataaaataaatcagtggaggaggcaacacctgtctgataaaagacatatttgttccttaagatcctttaaattgggctcaacaatttctaatttattaatatagaaacaatatttttttttacaaataagagcctccttgttaagttgctaaggtatcaaggacttctattttggagtactattgaggttaaattgtttatttcagatagtattgcttgaagggaattcaaggtagcattctataaaaacaaaagaaaaaaaaaaggttaa

SEQ ID NO: 220908 - DNA, 483 bp, Homo sapiens
atcatgggcttcagtggtagggttgttgagttcttcaagtcaattaatgatgatggcaatcatttgatgtgtgagtgccttctggaaagctttgaaatccttgagaggataagatatagtaggatggtaaacaaaatgactacagagagaataatagccaaggatttttaaattccctggagcacagattcccaggagccaatatttcaccaataaaataaatcagtggaggaggcaacacctgtctgataaaagayatatttgttccttaagatcctttaaattgggctcaacaatttctaatttattaatatagaaacaatatttttttttacaaataagagcctccttgttaagttgctaaggtatcaaggacttctattttggagtactattgaggttaaattgtttatttcagatagtattgcttgaagggaattcaaggtagcattctataaaaacaaaagaaaaaaaaaaggttaa

SEQ ID NO: 220909 - DNA, 631 bp, Homo sapiens
gaacatacacctttatttctgttcgctcctaaaacccacaaaaatgaacataaagaaatgcaggaaacataggaacgagggaaactagaaggtaaaatagcaagaaaatttggggagctgaaaaaaatatataagtaagtgggaaatgacttagaagtgagaaaacagaacctttcatcagagttgaggaaggcagaagtcaagtcttatttacacaacagtattgccaagatggctgagaaagtggaggtggtttaggggagtccgattaagaagaaatggtagaaagttgtttaagaagcaatgaggaacccagatccccttgccactttctgyagatgagcgaccttgacccaccttggcagacaactgggaatgaatgccttagagaggttgcaaagaaggctgggtttctgtgtgtggtagggaaggggtgggcaataggtataggtgaggatggtgacaatgtcctgaaaaccatgggattatgtgaagaacatgtaccagaagctgagaaacactccagccctcttctcctatttggattccagaaagttggcagccagatcttcttcctccagacaagagatggggtgagtcttccctggggatcctgagcagcccaagagag

SEQ ID NO: 220910 - DNA, 570 bp, Homo sapiens
ggcaccctccctgtcctcacagggcttgcattctaggtggggagaagcacaagcccaacaccagtgtgaataccaccagggcgcctccccacatggtggctggagtgtgttgacaccaagtgctaacaagggccttccctgcagtctggaaagtccagaagcttcctgatggaggagaaagggtagatagaggtcagcttaggaagggagatttgggtggagagaccagacgaaggttattgggaaaaatgcaaagcaggaccagaaaccagggctaaggccattggttcatgtttgtgggaaccaggcrgtgtgagggctggaaaggcagtgtggaccagaggagggagggtcatcagcatcagggatttggggcttacgggggagtaattgaaagccctgggagctgagagaagcttgaaaattatagcagtcagggtccccacaggaaacacatggcgtgtccacactcaagtttggagaactggaagaaagcttgataaagggcgtattcgtttcctggagctgctgtaacaaatcaccacaaaccatgtgtcttaaaacaacagc

SEQ ID NO: 220911 - DNA, 359 bp, Homo sapiens
tgggctagttaaagtcaccagtgacctccacatggccaagtccaaggaccagttctcagtcctcattgtaaccaactcacytgaagtgccttaagctttttttcttctcgaaatactttgtccatgttggctccagagcatctgactctcttggttttctttctacctccttggctgtgccttttctgtctcttttgcaggacctgcctcttcttcctgacctctaaaggatggagtttacgagggctgcatccttggcactcatctccccaccatctataccatgggcttggtgactatagcagtttcctaggactactgtaatgaagtaccacattgagtggcttaaaataacagaa

SEQ ID NO: 220912 - DNA, 359 bp, Homo sapiens
tgggctagttaaagtcaccagtgacctccacatggccaagtccaaggaccagttctcagtcctcattgtaaccaactcacctgaagtgccttaagctttttttcttctcgaaatactttgtccatgttggctccagagcatctgactctcttggttttctttctacctccttggctgtgccttttctgtctcttttgcaggacctgcctcttcttcctgacctctaaaggatggagtttacgagggctgcatccttggcactcatctscccaccatctataccatgggcttggtgactatagcagtttcctaggactactgtaatgaagtaccacattgagtggcttaaaataacagaa

SEQ ID NO: 220913 - DNA, 606 bp, Homo sapiens
tgaactcttgttctgaaaccttggtccttccctttctccttaaatggcagcactttgcaaccagttgctcagaccaaaaattctggaggtatccttgatttccctttttttctacmtcccaaatacaatttatcagcacatcactttggctctactttccaactatattcaaaatctagctacttctaaccacctccatccccacctttctaatccaagccatcatccactgtcaccaactacagagcctctgacctcatcttctaccattctcctcattgcactgtcctctgccaacttaacaatctgaatttaaaattgcaaaggcctggactgcttctgctgacacatttagggacttgctaagggttatgccattcagccccagccttaagataattctaaataaccaaataacttctctcagaggtttcttttcttgatactgctcatgtttttggaattgctttcttctattcattcattatcaattcacatgtattgagggcttcctgtgtgccaaacaccctcctgggctctaggaaaataaggttagataagaagtagtctgtactctgcaggctttcctaatctaatagaaaaacg

SEQ ID NO: 220914 - DNA, 565 bp, Homo sapiens
tgggttttgctgtaaactcttttagcatcatttcacttttgaaactatctgcatgtattgtttttattaagttttatataacttattttttaagttacttgaaaaataaaaactggaagtaggaagactatcacaaacatacccccagtaaccccatctgggatcataattgaggtcaaccttagacgaccagtcagcagtttccagaattcccaccctccctgggctacttggtcaagctctttcccagggtctctcactgctcatkattccagagacttgaatttgcttagagcaactaggcgttgtcttacagcctcttgcccttctcgattctctcatactaatgtttaccttacatgcctcaatgcaaagagtcttctccttgtgaagacaaatgcaaaacaccagttgaaaacttccgttctccctattagctattcgtaaaaccccatcggtctgaggcttttcaactcgttctgacactttcttctctttaacttttttttgaaaactttagttaaggtagggatctgacctgcgggcacttggtttcctcctttgt

SEQ ID NO: 220915 - DNA, 556 bp, Homo sapiens
ctttctctggcctcacatttctaaatatactcaaatgaggattttatgagcaaaccaagttatacataaaacatttttacattcctacactgacaaagtgatttaactgtgtaaagggcacttgaagtctaagtatgacacatgcttcaaaatttccttaaatttccacttttaaaaaaagggattttgaagaactccagaattcccagacattttcctactctagcctgactctcaagtggcaatgtgtgaccatgcagcagcctgttccatgaaaagcactcctgagtggagaaggctagggcctcaccgagtcttttgtgtccaggcacaagcccttccatcaccatcaccgcctcccacaccacactgaacttcccaagaagaagatgccataaacagctggagttgcctctgcagagcaaagctcccaggaggccaaacatctgggcagctgccaagagctccagttcctccagcccttctccgttttarggaccttaacatccctttttccccagatctcttagcaaatgcctaactgcattctggggtg

SEQ ID NO: 220916 - DNA, 583 bp, Homo sapiens
ggggccttagttggagctgcatcatagcttgacttcttcctctgcccagttctgcctccttcctcctgcttccctaggtatgactcctcagaacacttcctaataaacatcttacatgatactctccatctcagagtctgcctcccagggaacccatgtgacagttggtgccagatatcgtccgagaaagcagacataagataggttattggagctggtcacctaccagcaaactgatgatgaaaaycccattgctagtgggaagtggaggccagagagctgctggcccaagatgaaaggacaattgttggaaattcaaccagtggtgagacaggattgcacatcagtggtagggaatacattagctggtgcaatgcagcaggcatctgagaaatatgagagaaattattactatgatataaggacaacagaattgggtggctactactgaaactgactgacttctggaaaaagaaaacaaaaagctgagtgtgattaaccagcaactaagagatagttttgaaagctagaggacttcctggaagcctataaaaaggctcaaatctcctgaagtgggagggca

SEQ ID NO: 220917 - DNA, 588 bp, Homo sapiens
gaattctgagagatacaattcaagttgggatttgggtggggacacagccaaaccatatcagagggtatccttgtaaatgaaaaggggaggacttaggctcttgttgggtgtaataagtttgagatgtccaagaatagatgttgagtacatgcctcaaaatgtaaatctggagctcaggggacagttctgggtgggatatacaaatttgatcatgactataaagatggtttggggaagctatgaccaccactgagctctcagacctgtgatgtagagtctgacaggccaatgccagccagagcttytaaatcctgtatggaataattaagtacatagctatggcttgaatgtgttccccaaagttcatgtgttggaaacttaatccccagtgcaatgatattgaaaggtgggacctttaataggtgattaggtcatgagggctctgccttcgtggatggattaatgccattttcagggggggtgggttagttatctcaaaaatgggttcctgataagaggataagtctggctcttttcccttctctccctctctctccctttctcccaccatgtgatgccttcaaccat

SEQ ID NO: 220918 - DNA, 459 bp, Homo sapiens
tgaattcaagggcatgcagaactgtaatccaaagttagaagagaactgaacattggcaaattaagtcatgtctacgatgttgagaatcagtcatgagcaaagccctgatccaatgctgggcatcagtcatgagcaaagccctgatccaatgctgggcatcagtcatgagcaaagccttgatcaggagaagaaagtagctaagaggaggcccctgcttaataggcaggcatccagcccagtgaccaagacagacacacctgcagaaaaagctgctgcaagcaagtgggttaggagggtgagggtctatmctccccttagccataaactccataaccagtccgaagaatgacaataaggataagtacacaacacatgacaaggatatcaggcaagaatcccaattctttgcacattcgatgggcagtgaaaatctggatgacttgtgattgggcacccaca

SEQ ID NO: 220919 - DNA, 575 bp, Homo sapiens
agaatacatttcgaagtggaaaagcatgttataaaatagtgttttcagaatgattctatttttggaaagaaaaatacatatgtaggaaaatacatacaactaagaaagacctgaaggatatcaactgaaatgcaaatagtgctttcttctggagtaggattgtcagtggttttattttcttcttttgcctatatttaatttctacttttcccaacatgaatatgcattgctttttaaccaagaaaaaataattcatttaaatgtgatcaccctccccaccttcctaaccctaggtctgtcaaaatgagactctcttctagattgctttattattttctctgttttcctaatggtaattatggctacttggtagcttaaagctccaaataatgaaggcagttaacattcagaaatcttcattttatttcccaaaagcaattccaggtagaagggagtctgtcagtcatgcaytcgaggtaaacagatgcatgggaaagttttagggtcatatttaagtttttaattcataccagattgttaaacgtaagtgaagtacccatcccagtatcaagaat

SEQ ID NO: 220920 - DNA, 538 bp, Homo sapiens
gaattcatttgcagaagacaagcacaaaacctccgatagaaaataaatkcaatgtaccatagtaaatgggagcagcttaaaaaaaaaaaagcacaaaatccattggggaccctgttgccataggaactggcattacagcttgcttccgataattaatggagggttttgctattacagtattcttgaaacttcggtttcccctgtgctgcactgcagaatgcagcatcctctccccattcataaatatttcatgactaccggctgctgtgtttcatcaccgtggatagcactcggcctaatccaccccttgccaaattcatgttgtcctgtcagagagcaacttccatttcttcctctttcttctgcagtcttcatttatctggtttgaagttctttaccttcccaaccccagaatggtggctttcattgtggctttgtcttcagacgctggacatctctttcctgtgcctgtcttattttcctaacggtcccgtgggcctcccccaggggcattggttgtgctccggccgtactgcct

SEQ ID NO: 220921 - DNA, 527 bp, Homo sapiens
aaaataaatgcaatgtaccatagtaaatgggagcagcttaaaaaaaaaaaagcacaaaatccattggggaccctgttgccataggaactggcattacagcttgcttccgataattaatggagggttttgctattacagtattcttgaaacttcggtttcccctgtgctgcactgcagaatgcagcatcctctccccattcataaatatttcatgactaccggctgctgtgtttcatcaccgtggatagcactcggcctaatccaccccttgccaaattcatgttgtcctgtcagagagcaacttccatttcttcctctttcttctgcagtcttcatttatctggtttgaagttctttacyttcccaaccccagaatggtggctttcattgtggctttgtcttcagacgctggacatctctttcctgtgcctgtcttattttcctaacggtcccgtgggcctcccccaggggcattggttgtgctccggccgtactgccttctgcacatctgctttaatggagtcctg

SEQ ID NO: 220922 - DNA, 538 bp, Homo sapiens
gaattcatttgcagaagacaagcacaaaacctccgatagaaaataaatgcaatgtaccatagtaaatgggagcagcttaaaaaaaaaaaagcacaaaatccattggggaccctgttgccataggaactggcattacagcttgcttccgataattaatggagggttttgctattacagtattcttgaaacttcggtttcccctgtgctgcactgcagaatgcagcatcctctccccattcataaatatttcatgactaccggctgctgtgtttcatcaccgtggatagcactcggcctaatccaccccttgccaaattcatgttgtcctgtcagagagcaacttccatttcttcctctttcttctgcagtcttcatttatctggtttgaagttctttaccttcccaaccccagaatggtggctttcattgtgkctttgtcttcagacgctggacatctctttcctgtgcctgtcttattttcctaacggtcccgtgggcctcccccaggggcattggttgtgctccggccgtactgcct

SEQ ID NO: 220923 - DNA, 527 bp, Homo sapiens
aaaataaatgcaatgtaccatagtaaatgggagcagcttaaaaaaaaaaaagcacaaaatccattggggaccctgttgccataggaactggcattacagcttgcttccgataattaatggagggttttgctattacagtattcttgaaacttcggtttcccctgtgctgcactgcagaatgcagcatcctctccccattcataaatatttcatgactaccggctgctgtgtttcatcaccgtggatagcactcggcctaatccaccccttgccaaattcatgttgtcctgtcagagagcaacttccatttcttcctctttcttctgcagtcttcatttatctggtttgaagttctttaccttcccaaccccagaatggtggctttcattgtggctttgtcttcagacgctggacatctctttcctgtgcctgtcttattttcctaacggtcccgtgggcctcccccaggggcattggttgtgctccggccrtactgccttctgcacatctgctttaatggagtcctg

SEQ ID NO: 220924 - DNA, 512 bp, Homo sapiens
gaattcctctaacgcctcttcctgggtcagagcagagagctcagtgccaaacatttcataattaccacttcaaagattacgcctcacacrtgcttcagggatgttccaggggcagagaaaggaagcgtgcactggaggtgttatctcgcttcattaccaacgtcataaagattgagtacttacctgccaggtcgcatagtgttcagtgctggagcgcatgtgaatgtctacagtgcactgcccatcgggccaaaccttagttcccaaggccttccttgagtgacttcagctcatttctggaatgtttcaatgacgccactttccagttccagggagactttctagagagtcaaagcaacaaaaggcagagaaagcaagagagaaagtagaaggaggggaggaagaaatggaagagcaacagactcctttttcactctcagactctctcctctctcccactcagagccccacacttgcttgcttagaagttgcctgctcggctgccctgggac

SEQ ID NO: 220925 - DNA, 512 bp, Homo sapiens
gaattcctctaacgcctcttcctgggtcagagcagagagctcagtgccaaacatttcataattaccacttcaaagattacgcctcacacgtgcttcagggatgttccaggggcagagaaaggaagcgtgcactggaggtrttatctcgcttcattaccaacgtcataaagattgagtacttacctgccaggtcgcatagtgttcagtgctggagcgcatgtgaatgtctacagtgcactgcccatcgggccaaaccttagttcccaaggccttccttgagtgacttcagctcatttctggaatgtttcaatgacgccactttccagttccagggagactttctagagagtcaaagcaacaaaaggcagagaaagcaagagagaaagtagaaggaggggaggaagaaatggaagagcaacagactcctttttcactctcagactctctcctctctcccactcagagccccacacttgcttgcttagaagttgcctgctcggctgccctgggac

SEQ ID NO: 220926 - DNA, 512 bp, Homo sapiens
gaattcctctaacgcctcttcctgggtcagagcagagagctcagtgccaaacatttcataattaccacttcaaagattacgcctcacacgtgcttcagggatgttccaggggcagagaaaggaagcgtgcactggaggtgttatctcgcttcattaccamcgtcataaagattgagtacttacctgccaggtcgcatagtgttcagtgctggagcgcatgtgaatgtctacagtgcactgcccatcgggccaaaccttagttcccaaggccttccttgagtgacttcagctcatttctggaatgtttcaatgacgccactttccagttccagggagactttctagagagtcaaagcaacaaaaggcagagaaagcaagagagaaagtagaaggaggggaggaagaaatggaagagcaacagactcctttttcactctcagactctctcctctctcccactcagagccccacacttgcttgcttagaagttgcctgctcggctgccctgggac

SEQ ID NO: 220927 - DNA, 512 bp, Homo sapiens
gaattcctctaacgcctcttcctgggtcagagcagagagctcagtgccaaacatttcataattaccacttcaaagattacgcctcacacgtgcttcagggatgttccaggggcagagaaaggaagcgtgcactggaggtgttatctcgcttcattaccaacgtcataaagattgagtacttacctgccaggtcgcatagtgttcagtgctggagcgcatgtgaatgtctacartgcactgcccatcgggccaaaccttagttcccaaggccttccttgagtgacttcagctcatttctggaatgtttcaatgacgccactttccagttccagggagactttctagagagtcaaagcaacaaaaggcagagaaagcaagagagaaagtagaaggaggggaggaagaaatggaagagcaacagactcctttttcactctcagactctctcctctctcccactcagagccccacacttgcttgcttagaagttgcctgctcggctgccctgggac

SEQ ID NO: 220928 - DNA, 475 bp, Homo sapiens
gtgccaaacatttcataattaccacttcaaagattacgcctcacacgtgcttcagggatgttccaggggcagagaaaggaagcgtgcactggaggtgttatctcgcttcattaccaacgtcataaagattgagtacttacctgccaggtcgcatagtgttcagtgctggagcgcatgtgaatgtctacagtgcactgcccatcgggccaaaccttagttcccaaggccttccttgagtgacttcagctcatttctggaatgtttcaatgacgccactttccagttccagggagactttctagagagtcaaagcaacaaaaggcagagaaagcaagagagaaagtagaaggaggggaggaagaaatggaagagcaacagactcctttttcactctcagactctctcctctctcccactcagagccccacacttgcttgmttagaagttgcctgctcggctgccctgggacttgctt

SEQ ID NO: 220929 - DNA, 377 bp, Homo sapiens
gaattcaggtaaagaaaactagacaaactaagttgtaatcattaaatgactgcttcccttctaatttcctccttagaaaactacagaaaaaagttgttaaataccttcttggagcctccaagtagtattatctttattttaaaagctttcatcatagttgtttcttaaaagcctctttgaaacattgacttctggccaggcactgtagcgcacgcctgtaatcccagcaatttgggaggccaaggcaggagaattgcctgagtccaggagtttgagactagcctgggcaacatggccagaccccgtctytaaaaaggaaaaaagataaaaatcatagaaacactgattttcttttagtctaatttttacataaagag

SEQ ID NO: 220930 - DNA, 564 bp, Homo sapiens
ccggcttgttttccctgccgaaagtaatactttcttactgatatcgagaaagatattttgagattctttgatatatttgaattgatttgttcacaattatttgtctataataagacctataatatgcatttataatctaaagagaacattctacactgtggccattggaaacaaataaaaattaaagtagttcttgcggataataagctcattattgtggcatcattattacattgttctaaagccctaggtaagagattaataagacacaaaatacrcaggttattttaaacagaaatgtacattctcaacttggtatatttccccttccagaaacatggatgcacctactatagactttttctaattctccaaactgttaaagtctacttcctcttctgtctaattagtttcatagcaagagtatcttatattttatttagctcactgtcttaatacatttgatcattgatgttatttttacagattttattatgatcaatccaattataccactactattatatatattatatatatattttttgagacagagtctctttc

SEQ ID NO: 220931 - DNA, 564 bp, Homo sapiens
ccggcttgttttccctgccgaaagtaatactttcttactgatatcgagaaagatattttgagattctttgatatatttgaattgatttgttcacaattatttgtctataataagacctataatatgcatttataatctaaagagaacattctacactgtggccattggaaacaaataaaaattaaagtagttcttgcggataataagctcattattgtggcatcattattacattgttctaaagccctaggtaagagattaataagacacaaaatacacaggttattttaaacagaaatgtacattctcaacttggtatatttccccttccagaaacatggatgcacctactatagactttttctaattctccaaactgttaaagtctacttcctcttctgtctaattagtttcatagcaagagtatcttatattttatttagctcactgtcttaatacatttgatcattgaygttatttttacagattttattatgatcaatccaattataccactactattatatatattatatatatattttttgagacagagtctctttc

SEQ ID NO: 220932 - DNA, 618 bp, Homo sapiens
attcagtttgtctgatttattctaaccaatttataagagaataccatcatcaagaaattgataatttattcattaatgtgataaaaataacttacaaagagacctaaaataaatactctagtaagtgcatttttccttctatggcttgaaaaaaatcaaattataaccagattttgcttggcataaagagatgttatccaacatcttaattaagcctctttccagaccacggcaaagcgaaatgcactattctatcactaaamtggaacatacctaatatgaaaatgtttcagtgctcctgtaaaaagacctgcctcctctaatatggagatgtaggcaatataaagaagtgttttcatttattttccaaaatacttttctcctcacataccgtgagaattagagctgttgccattggtctagttaattgtgctgatccaaaaaggacaataaaactgctatctacctaagagggctaatggttatagactacactaagcctctaagttaaactcccaagcttccaggaagactaaagatctatctccctagatatctacatgtaaagggataaagcctagtccttggagacatatctgtattatgacagtgaggctt

SEQ ID NO: 220933 - DNA, 614 bp, Homo sapiens
ggaggccattatgcttagcaaactaatgcaggaacagaaaaccaaatgctgcatgttctcacttataagtgggagctaaatgatgagaactcatgggtgcaaagtggggaacaatagatactggggactagttgagggtagagggttgagggaggaagaggagtagaaagaataattattgggtactaggcttagcacctgagtgacgaaataatctgtataccaaatccccgtgacacgagtttgcctgtataacaaacttgcacatgtacccctgaacctaatayaaaagtgaaaagaaagcaagagttcatgtctcatgttttcagtacagatacacacacacacggtaacatgtcagactactcatagttcatttttttaatgacaagaaaaattgtatatatttttggcatacaaaatgtgtgtgtatatatgtgtatatatatatggatgtttgtatatatatatacacataaatatggtagaataataaaatcaagctcacatacttatttttttggggggcgagaacatttaaaatttactctctcagaaatttttaagtatacaatatattattaagtatagtcaccatgctgtaaaatagatct

SEQ ID NO: 220934 - DNA, 341 bp, Homo sapiens
ttcataatgttaattatctccttttgtgtcagcttgaagactcacctcaacatttcttgtaaggtaggtctagtggtgatgagctcctttagcatttgcttctctatgaaagtttctttttgccttcacttctgaaggaaagctttgatgagtaaattatttttggctagaagcttttctttttctttctgcacattgaatatatcattccactccttcttggcctagtttctrttgagaaatccattgtcttatgaacattctctggtatgttaggatcttagttgttttttgtttctgttgttgttgttgttgttgttgttgttgttgttgttgttgtt

SEQ ID NO: 220935 - DNA, 552 bp, Homo sapiens
gctttgcattgatgtccacacatttgatggagcagtcaccattttaagactttatgaactggtttcaataggaaaagtccttcctctatgggtgggtgtgggggtgctagcaaggtagtttgtaatacttctggctctgtgggcayaggagtatcgtttacattgagctctgtcagctgaggtctgtgttggcaaaacttgtagggattttatgcagtcaaggatgtggatgattacagtggcaaccatagctttggggtctttggtggaaaaggctgctagggcccttccaatctgtttatcccacccgaaaagtcacggccaaggggatccctcttggtgctggctctggctggagggctttcttgtggtaatggccatggggtctggtttgcaatgcccatggagctgccacagagctggagtctgaaacatggacatacataaagaaaccaaggctctagggttggggcagaggtaacaccaatgtcacaaacacagacaccctcactgtcacattgggaatggtgtatgaggcatgggtgcttgtgg

SEQ ID NO: 220936 - DNA, 552 bp, Homo sapiens
gctttgcattgatgtccacacatttgatggagcagtcaccattttaagactttatgaactggtttcaataggaaaagtccttcctctatgggtgggtgtgggggtgctagcaaggtagtttgtaatacttctggctctgtgggcacaggagtatcgtttacattgagctctgtcagctgaggtctgtgttggcaaaacttgtagggattttatgcagycaaggatgtggatgattacagtggcaaccatagctttggggtctttggtggaaaaggctgctagggcccttccaatctgtttatcccacccgaaaagtcacggccaaggggatccctcttggtgctggctctggctggagggctttcttgtggtaatggccatggggtctggtttgcaatgcccatggagctgccacagagctggagtctgaaacatggacatacataaagaaaccaaggctctagggttggggcagaggtaacaccaatgtcacaaacacagacaccctcactgtcacattgggaatggtgtatgaggcatgggtgcttgtgg

SEQ ID NO: 220937 - DNA, 552 bp, Homo sapiens
gctttgcattgatgtccacacatttgatggagcagtcaccattttaagactttatgaactggtttcaataggaaaagtccttcctctatgggtgggtgtgggggtgctagcaaggtagtttgtaatacttctggctctgtgggcacaggagtatcgtttacattgagctctgtcagctgaggtctgtgttggcaaaacttgtagggattttatgcagtcaaggatgtggatgattacagtggcaaccatagctttggggtctttggtggaaaaggctgctagggcccttccaatctgtttatcccacccgaaaagtcacggccaaggggatccctcttggtgctggctctggctggagggctttcttgtggtaatggccatggggtctggtttgcartgcccatggagctgccacagagctggagtctgaaacatggacatacataaagaaaccaaggctctagggttggggcagaggtaacaccaatgtcacaaacacagacaccctcactgtcacattgggaatggtgtatgaggcatgggtgcttgtgg

SEQ ID NO: 220938 - DNA, 595 bp, Homo sapiens
tgtttttccatccaaaatatctgcataaaagttttcatgtatttcctatttatctaaaatataaaaagcaaagaaaatatagtttccttttagtcatgctctaatatctgtcccaattgttcttatcttctgagtgcatcctaacctttttgtctgtaagttcattgtaattctcatggctcttagcatacagcattacaaatttctcaacaacctgcttagttccactctgtgcattgtgtttatttcaaatcatataaattggtgtcaattctgttattaaaaacatggaaagaataagaccttgctttttataaatttcttcatttatctcagtatttaatgacctttgcaaagagaaggaggttttaatttattttgagcctaaatcctaactttgtgatttaagcttagtttatttcttataataaatatttrtatatatatgatgattatagtcagtctccttactgcccaaattagagacagcctcaattttgtaaaatgccttttttttaaaaaacaaattttagcaccatctgtggtttaagtccctttatttcagttccagctgcatacatgcaattctactcac

SEQ ID NO: 220939 - DNA, 545 bp, Homo sapiens
atggctcatgcctgtaatcccagcactttgtgaggccaaggtgggaggatcacctgaggtcaggggtcctagagcagcctggccaacatggtgaaaccccgtctctactaaaaatacaaaaattagctggatgtcgtggtgtgcacctgtagtcccagctacttgggaggctgaggsaggagaattgcttgaatccaggaagcggaggttgcagtaacccatgatcgcaccattgtactccagcctgagcaacagagcaagactctgtcttaaaaaacaaaacaacaacaaaatacaagtaagctcttttaaactttgaacatttaattatgtcttgtagttgggtttcatagaaatattataaatttttttggttactatatttcatgaagtgtttggataattatctggaggaattttcattcttttgtcacttaaaggatgatggaaaattgtttaatattttagcaatgtcattagagtgtttatattttttcataatcataaggatgtctcaaggggtaagttatttttaagagtgctgt

SEQ ID NO: 220940 - DNA, 545 bp, Homo sapiens
atggctcatgcctgtaatcccagcactttgtgaggccaaggtgggaggatcacctgaggtcaggggtcctagagcagcctggccaacatggtgaaaccccgtctctactaaaaatacaaaaattagctggatgtcgtggtgtgcacctgtagtcccagctacttgggaggctgagggaggagaattgcttgaatccaggaagcggaggttgcagtaacccatgatcgcaccattgtactccagcctgagcaacagagcaagactctgtcttaaaaaacaaaacaacaacaaaatacaagtaagctcttttaaactttgaacatttaattatgtcttgtagttgggtttcatagaaatattataaatttttttggttactatatttcatgaagtgtttggataattatctggaggaattttcattcttttgtcacttaaaggatgatggaaaattstttaatattttagcaatgtcattagagtgtttatattttttcataatcataaggatgtctcaaggggtaagttatttttaagagtgctgt

SEQ ID NO: 220941 - DNA, 490 bp, Homo sapiens
acaacaaaaattttttaaaaatggatctgtcaatcacagtggaatgctattttcctgggatcactgtgccaccatcttttctgggatcgagaatctccttttccgttcgtttgttagtttgcttttttgcacygttggaggagaacgttttcaaagcaaattaagagaaaattgaagaaatggacctttaacccttcctcagagctactgatgagggcctgagagaaacttctctttaaaatcctctggaaatctagaagccatttgaacatgttcattagtggcctttggccaatgatgtctgtacatttcttagacaacttttcatatatttggaaaattcaatccagccctaatgccactgtggattatttccttgggctcctggatattttctgtgcttcttcttcttttttttggatctgataattttttgtaattaagggaaataaaccctcaaacaaattacttattatcatgttttattatt

SEQ ID NO: 220942 - DNA, 478 bp, Homo sapiens
taaaatatgagcattgtgctgatatttggtagcattcttcattgaggtctctgtttttcttactaaggataaatctgagccagctttaaccaagtgtttgctttgcttcagtcaaagcttaaaaaaaacccaactaattctgtcaattgcaaaagtaaggctcatgataagccagcaaaatagtgatcactagtttagtgaagaacaaaagtaacaactatcacttcccatttatagcatatctgtatcatcattttattatgmtttttggaccaattgtataaacaggctatgatgcctccactttattagaatatcagtaagttcagtgacttgcccaagtcctgctagttaatgactgagctgagactcgaatcctagcctttgggctgtaagcctactgattgataagagtggctccagccctgctcctctatactctttctagaatactgtggttgggaatagggtggtgagc

SEQ ID NO: 220943 - DNA, 433 bp, Homo sapiens
gaattcagcaaagaccttgggatcttggctttcagctcttggtcatttgttgatgaatttagcattaataatttaatggctgataatgggctagtacatgacctctcagtccataattacacttayttgtgtggttcccagaaaagatgatgtcttaactcaaagaaatgagttccagttggtgaaacttctgccacataggggaaattatctttgagtagagcaactttgtttctcactccataccatttagacagtcctgcactcacgaatttgattttacaaattgcatgtgttctttccgactctttgctcccatgtacaatagaagaaaaactaataaccctcacatttgtattgcgttcatcagaatgagcttgagggcatgtttttccttattttaacaacagattaagagttcccttataacatg

SEQ ID NO: 220944 - DNA, 379 bp, Homo sapiens
taaaaacacactttttcaatcagactttaatagtgttaaaggcaaatcttttttcaatgagaaagaaacaaaaaatattgcttttgacctgacaaaccacaacattcgcctgtaagcttttcataaggatctcagacacaacgtcttcaggtgttcagccataaagagttactctgattagaaatgtaaaggaaaaaaaaaattattgctgaattgaggttctatatttgagggtaagtcaaaccttgaacagcatttattgtttggatttcgattattacagattttgacctgttacttttgtgatctgtgaaatcagaggcaaagaatgattcattcttctttstttttttcactcatcctcaaatcatgcgttggg

SEQ ID NO: 220945 - DNA, 573 bp, Homo sapiens
tgttcccaacctctgccccaatgacatatttgctcattcatttgaacatgtacctggaattaattttagttccagcagacaaaggagaataatacctggatgatttcaggcatttatttcaccttgaccgtagtttgaatgagtagaaaataactttcagaccaggcaacttggttggaaatgacaattttgtgatgcctctctcaaccctttccaccactttgtgagaaacactactgttgtcagcaagtgaccagtttgtgtggtgagatgataattaaataatatttctrtttctctgttggtatattgaagtatttgagaacgtgtgacatgtgatatgttcatggaaattcagacaaattacaattacttcaatacaagtttgataaagccatctgaaaaacaaatctgaagattaaatgaattcatctatgggaaatactagaacagaatgtggaacagagtaagtgttccataggattaggtgtcattattgttatcgaggctttctcttcttgtcagaaacactattttgctttgaaaccgcatgtgtaaaggtattagaaaaaa

SEQ ID NO: 220946 - DNA, 573 bp, Homo sapiens
tgttcccaacctctgccccaatgacatatttgctcattcatttgaacatgtacctggaattaattttagttccagcagacaaaggagaataatacctggatgatttcaggcatttatttcaccttgaccgtagtttgaatgagtagaaaataactttcagaccaggcaacttggttggaaatgacaattttgtgatgcctctctcaaccctttccaccactttgtgagaaacactactgttgtcagcaagtgaccagtttgtgtggtgagatgataattaaataatatttctatttctctgttggtatattgaagtatttgagaaygtgtgacatgtgatatgttcatggaaattcagacaaattacaattacttcaatacaagtttgataaagccatctgaaaaacaaatctgaagattaaatgaattcatctatgggaaatactagaacagaatgtggaacagagtaagtgttccataggattaggtgtcattattgttatcgaggctttctcttcttgtcagaaacactattttgctttgaaaccgcatgtgtaaaggtattagaaaaaa

SEQ ID NO: 220947 - DNA, 607 bp, Homo sapiens
ggtgtttgattttatttaaagccttttctgcatctgttgagataatcatgtggtttttgtttatgtggtgaatcacttttattgatttgtgtatgttgaaccaaccttgcatcccaggaatgaaacctacttgatcctggtgaattaactttttgatgtactgctactttgctaatattttgttgaggaattttttgtctatgttcgtcagagatactggcctgttgttttctttttttgttgtggctttgccaggttctggtataagggtgatgctgactttgtagaatgagtgagggagagtccctcttccttgctttttggaatagtttcagtaaaattgatatcggctcttccttgtatgtctggtagaatttggctgtgagtccttctggtctggggctttttttggttggtaagttttttatcactgattcaatttcaaaatgtgatattggtctgttccatgtttcaatttcttcctcattcaatcttgggagrttgtgtgtttccaggaatttatccattttctctagattttctaggtgtgagcatagaggtgttcataatagtctctgaggatctttagtatttctgtgtaagcctc

SEQ ID NO: 220948 - DNA, 541 bp, Homo sapiens
aatattttactctagccaaattcagaaaagaaactttaatgaaaaattttactggtttagcattgatcatcatacaggaatgatataggtcaaaaatttaaaaaataaaataatttttcttttaattaaaaacagttttggaactttatatctcaataagcttcaacatacctttcccatccaccctaccccctatattttattgctagtgatccctttattttctccaccaatgctgttttatttttgttctggttgaagaggttcaccttgccaaagaagacaggcaggcttatcagtttggataaatactcccagaaggatatgccaatttgcaaacactaacataaactaagtgttcagcagaagaaagtgagattaaattaggtgtattttgcttccattcaattcagtttagaacattaataatattaagagcatttcctatttgctgatatgtcataaataaataagatagtttaaagatattacaacattcttaaggmaaaattgcaggtatgaataataagagcttccattt

SEQ ID NO: 220949 - DNA, 560 bp, Homo sapiens
ctaagtgttcagcagaagaaagtgagattaaattaggtgtattttgcttccattcaattcagtttagaacattaataatattaagagcatttcctatttgctgatatgtcataaataaataagatagtttaaagatattacaacattcttaaggaaaaattgcaggtatgaataataagagcttccatttatagtagggtttatatgggccaaactttgtgctaagcactttgtgtgaattattttctttaaggataaagaaattgaggcctgagaggtcatgtaagttgcttaagtttacatagctggaaagtggcagacccaggacrtcaataacctaagacagcctggctccaaagtccatgctcttaaataccatatttcccataatgaaagatcaacaaatgtcaagtcattcttatgatgaatggtgtattctgaatacgtatactggaaaaactccatatttttggaccaaaaaaatccactttacttttcataacaagggctgttgaaatgcaggtgtattatggccattctacacaggacttttgacaaac

SEQ ID NO: 220950 - DNA, 576 bp, Homo sapiens
tcttacaaggtcaaatatcttgtgagggccttcttgctgtgtcatcccatggcagaaagcagaagggcaagagagcacacacttgtgagagaggaagggagaccaacttacccttttatcaggaaaccactgtcatgataactaacctactcctacattaatgggattaatccatttatgtgggcagagcccttatgacttaatcacctcttaaaggtcccagctctcaaaacgtgcactggggattatgttctgaacacataaactttgagggacacgttcaaatcataaaatggtgctccaaggtccccaaattaatatccttctcacatataaatacattaattccatcacagtaacaccaaagtctaactcgttctggcaccaactcaagtccaaaatccgaaatctcatctaaatcagatatgggtaagactcagggcatsattcatcctaaggcaaattctcttctagccataaacctttgaaatcaaaacaagttacctacttccaaaatgcaatgatgggacaggtataggatagacatccccattccaaaagggagaaataggcaag

SEQ ID NO: 220951 - DNA, 470 bp, Homo sapiens
tctagaaaagtgattatcttgcaaagggaaataatattgccattattggcaatattaataagccaattatggtttattttccagaaatgggcattttgccacccccttccaattaaggttctattatcagggaataaaggtggtatggaatgacctttgaatgaacaatcacattctacttcaccgtggttaaaagacatgggaatgtagacaaaggagtataataagtagtcagtktcctgcttcttcaatggataaataatatataaatgacaagatattcattttggatcagtgattggagagcaaaagataagtatgcccaattggtctttccatttcctttactgacttactgacttatatacctacttgtgtgtcctacaagattcaataaggacagacattgtgttacatcattttgtagttaatatgttgtcagacagaaagcattcaattgtcatgtgtta

SEQ ID NO: 220952 - DNA, 388 bp, Homo sapiens
attctatcattttcttacgttttctcttctattttstatctctttcacccctaatttctagggcatttctttttaattttagattctaaacattctattgattctttttcatttctgctatcgtattttaattccaactaccaaattttaattttttgaatctttgttctatttctatgccttctttgttcttctttcagcattctgagagttatatatatttctacctttcttctgctctttacattgtctctgtttccttcaaatttctttcatcatgtttgtctgtactgtttgctgctttaaagttagattcttttctcaaatgtctagtgatccatggctggtcattcgatttaagaatgagtcactatttatatgattgaat

SEQ ID NO: 220953 - DNA, 577 bp, Homo sapiens
gtagtttttcgtccctcagaccctgtaccttcttcccttgtgaatcttcagtgtccattataacactctgtgtgcctttgtgtacccatatcttagctcccacttgtaagtgagaacatgcagtatttggttttccatttctgagttacttmacttaggacagtggcctccagttccatctaagttgctgcaagtgacattgtatctttcttttttgtggctgagtaatatcccatggtgtatatgtaccacattttctttatccactcattggctgatgggcaattaggtagattccacattttcaattgaattgtgctgcaatatgtgtgcaggtgttttctttatataatgacttcttttcctttgggtagacacccattagtgggattcctggatcaagcagtaggtctacttttagttctttgagaaatctccatactggtttccatagaggttgtactaagttacattcccaccagcagtgtataagcattcacctttcaccacatttgtgccagcaactattgctttttgactttttatgatagccattctggctggtgtgacgtggtat

SEQ ID NO: 220954 - DNA, 433 bp, Homo sapiens
attgagattaaaaaaggaaaaagaagaacctgacatggtctgataaacatgactggttaacacatctgattaaataaataacaccacaagctttgaaatttgccagttgccattatatactgaagccttagaaagtgtccaattattcttatctccactaaagtttccacttgcttccacatcttcctctaattaaaacgtgttttcatcaataaataatatgcagagtagaaaatgttattgtattatttttgttgttattatctattttgttgaaagcaagcatagaatctcataaacacattatgtgttaaggagattttgagaagccataaacataatttatattcttatttctctgtggaacaggctctaacttctaaaatayatcaacttataagtgacctttggaaactatccatttataagttta

SEQ ID NO: 220955 - DNA, 545 bp, Homo sapiens
gatgcttcctacgtctttttcaaggtttcttctgtgaggaaagatggagccataattctcctctccattcaaccctgagacccagcttctgcagccctagctgggataaggtattggtttatggaaaatggatatttaagatcataaaggtattgctgacacccatttacccaaagacacaagccctggaaggaaacaygggagttaataccctgttatgtctccatgggtcttgggattctggctccaacaatgttgggatgtttgtctcttactgagagtgaaattctttggagataaggttatgtgactgagactcaagaatctggtgctgagctgcaccagattgctctggccaagagtgttctcttcatatgctcctgtaaggtaactaaatccttatctcctaggagcagctgctgtgttgcatataaccgaggataccaatcatgctgtaatcaatataattcaaatttaaattatccagcattattcctgcttgcaattcacaaccaaactcatcagtggcaaagatttcatcatct

SEQ ID NO: 220956 - DNA, 575 bp, Homo sapiens
aatcccactactctgtttttaaagagtcttagcacatttatgctttcgactgaaagatagaggcaggctggcttggtggtttgttttccttgggaagcagtcacatataattttttataataacatagcctggaataccaattcccatgccacactgtcatcctgcatgtcagcactttgagtattgaatcctgtgcagaaagccctcatccgcacttgtccgagaatgtttcctctgggttaaaacccgcacataaaggtttcagcagcagcagcagcagcagctgtttgggccactttctggagttatgtgagtactgtgggttcagttatatttccttggaacataaaaataggaggttttggtttgttacctttgaaacctcagggaaatcaaaaccagagctcattttggatgctgaagcgattaatccatactgccctctgagctgaagtaatgatttgatgcactggaatagtttctgcagcaacgttctgtctctcttctgtttgtaagtgatcagaaacagcatttwaaaaaatcccacagtaggacacagagtattcttatatat

SEQ ID NO: 220957 - DNA, 420 bp, Homo sapiens
tctccaggactgtctgaaactccattaacaggagagaagctgcagcagccagacctgtctccaggactgtctgaaactccattaacaggagagaagctgcagcagccagacctgtctccaggamtgtctgaaactccattaacaggagagaagctgcagcagccagacctgtctccaggactgtctgaaactccattaacaggagagaagctgcagcagccagacctgtctccaggactgtctgaaactccattaacaggagagaagctgcagcttggctgtcaggcaggctgatccgggcctcccgggatgtgtgtgtgggagccggcgggtctaagctggactcccgtaggcctgcggtggagtgaagcggcccagcagtgcgcaccttcccggccggcccccctcgcccaggccccc

SEQ ID NO: 220958 - DNA, 558 bp, Homo sapiens
aaattaattttgctttagtatgacacatgtagtaacaggcctttcccctttgtaactgagtcccaggattcacggagtttgaggatcttgccttctggcttcctccttgcctcagaccctgccctttaggggttactgccctaagaggctgaaagtttagtaatgccccagrgcctcgttgcaggagctagtcacttttggcactttcttgctgtcagaccgcaggctctgggagccagtcttcttgggacatggcttcatcctgtgtctctggcttgagcccaacctttcaggcctgggttaggggtgaagccttttatctggcaggtcccacagtctggcgcctttcccagcgtggtggagttgagaccttgctgtcagagcctgttcagaaggagagagggagagacaagaccttcgcgtgaggaggaaagagtttaagtcccgtctgtggaatctgtttcccctggcttgttgaattttctcagctgaacatggcagaagtggttgatatttgaattagaggctatgaaagtgtccttgggaaatgggtggggc

SEQ ID NO: 220959 - DNA, 595 bp, Homo sapiens
ggcctttctagacactttccccaaatggatgcagtggagaagtggacttctagttctaggaaacaaggatatttagttcccacaaggatgactggaaaatgaaggggtggactgagatgaaatctgaacaatctcacctctctctaacatcattctctgtccagactcagtcttgactaataaccaacaggaaagagttgaacctgcatttctagaattcacggccccctcctttgtgatgcaggcamaaacagcccttcacagggagaatcctctacagaatcctctaagctctaaacactgtatgtagctcaggggagccctgcttctgtggctgcaacccttcggcctccctcatgcccagcctccatgtgaaccccagcccctccagattacctgaagctgcagtggtggggacactggccggcggtggctgagaggtgccactgcactcagtcatgaggcacgggttactgccattgttctctcttttgacaagcagctcggccgcactgggcagtgggatggggtggctgatacccaattcctcctcctgggcctgctgccttctcagggccacctggaagcacacgac

SEQ ID NO: 220960 - DNA, 496 bp, Homo sapiens
gggaattctcaggccactcctcagacctactgaaggagaaactatggagttgaggcccagcaatctgtgttttaataagctttccaggtgattctgatgtacagtgaagtttgcaaaccactgcctgatgattctagtgcaagcactaatgctgctgcttcccactctttggcacctgcgaaattagggactggatgctggagattctgccagagttaacgcagaagaatcagctgtgtctgcccgtgtgtttgccaaaagaactcattcccccctgcctatatatggctgctgtrtcacactggttacttctagctctgagactcctggaagtcatcctctggggagaaccagaaccatgttacgtatgtgcacccctagctggagaggacacaagaaatcacctgtaggccgggcacagtggctcattcctgtatccccagcatcttgagaggctgaggtagatggattgctagaggcagggatagagcattga

SEQ ID NO: 220961 - DNA, 475 bp, Homo sapiens
ggcccagcaatctgtgttttaataagctttccaggtgattctgatgtacagtgaagtttgcaaaccactgcctgatgattctagtgcaagcactaatgctgctgcttcccactctttggcacctgcgaaattagggactggatgctggagattctgccagagttaacgcagaagaatcagctgtgtctgcccgtgtgtttgccaaaagaactcattcccccctgcctatatatggctgctgtatcacactggttacttctagctctgagactcctggaagtcatcctctggggagaaccagaaccatgttacgtatgtgcacccctagctggagaggacacaagaaatcacctgtaggccgggcacagtggctcattcctgtatccccagcatcttgagaggctgaggtagrtggattgctagaggcagggatagagcattgacatagggatcctaatgaggagaaaaggagaat

SEQ ID NO: 220962 - DNA, 475 bp, Homo sapiens
ggcccagcaatctgtgttttaataagctttccaggtgattctgatgtacagtgaagtttgcaaaccactgcctgatgattctagtgcaagcactaatgctgctgcttcccactctttggcacctgcgaaattagggactggatgctggagattctgccagagttaacgcagaagaatcagctgtgtctgcccgtgtgtttgccaaaagaactcattcccccctgcctatatatggctgctgtatcacactggttacttctagctctgagactcctggaagtcatcctctggggagaaccagaaccatgttacgtatgtgcacccctagctggagaggacacaagaaatcacctgtaggccgggcacagtggctcattcctgtatccccagcatcttgagaggctgaggtagatggattgctagaggcagggayagagcattgacatagggatcctaatgaggagaaaaggagaat

SEQ ID NO: 220963 - DNA, 455 bp, Homo sapiens
ttaatgtgtcacctcatgcacttatttctttgtggtgagaacatggcaaaagcctctattttagctgttttataatatacagtaccttaccgttaatcgtcgtcacctgactgtagcacaacaccagaacttacttctatctaattgaaacctggtacctgttggccagcttctccccattttcccctttccttctcccctccccagtccttattttcacttaacataatgtcctacaggttcatggatattgtcacaaakgacaggacttcattcttttttatggtggaatagtattgtgtatgataactacattttctttatccatttgtcacttgctgctcccttaggttgattccatagtttggctattgtgactagtcctgcaataaacacggatgtacagctatctctccaacatactggatttcctttagctatctggtagcgagact

SEQ ID NO: 220964 - DNA, 524 bp, Homo sapiens
tttatggggttgtcactagaaatccaaatgttttctctggaggctgtcatggatggagacctaaactagaatgtggaggacctgsgttcacttctccggccattaattttcttttcttttcttttcttttctttttcttttctttctttcttttttttttttttttttgagatagagtttcactctgtcacctaggctggagtgcagtcgcggctcactgcaacctctgcctcctgggttcgagcaattctcatgcctcagcctcccgagcagctgggattacaggcacatgccaccatacccagctagttttttatatttttagtagaaacagagttttgccatgttggccaggctggtcttgaactcctgacctcaggtgatccacctgcctcggcctcccaaagtgctgggattacaggtgtgagccactgcaccccgcctaattttcttatatttaagatagggataaaaatgatacttgcaccaagttgactcttcagaggcagatggatgaaaaaaat

SEQ ID NO: 220965 - DNA, 532 bp, Homo sapiens
tttatggggttgtcactagaaatccaaatgttttctctggaggctgtcatggatggagacctaaactagaatgtggaggacctgcgttcacttctccggscattaattttcttttcttttcttttcttttctttttcttttctttctttcttttttttttttttttttgagatagagtttcactctgtcacctaggctggagtgcagtcgcggctcactgcaacctctgcctcctgggttcgagcaattctcatgcctcagcctcccgagcagctgggattacaggcacatgccaccatacccagctagttttttatatttttagtagaaacagagttttgccatgttggccaggctggtcttgaactcctgacctcaggtgatccacctgcctcggcctcccaaagtgctgggattacaggtgtgagccactgcaccccgcctaattttcttatatttaagatagggataaaaatgatacttgcaccaagttgactcttcagaggcagatggatgaaaaaaatcaatctgt

SEQ ID NO: 220966 - DNA, 412 bp, Homo sapiens
tctgccccgcggcggctgcacagggacgagaactgagaacccctgctcaaccccatccggggtgactgccaaatgcctatgccagcggccccgatctccctccggtggaggagtggggggagacacggcctgggggcctcaggctgggcgcgctggcgatcccgaggccgaccaggtcatgcacctccagtccgcctgggcacccaagctgcagccgccttctgtgygcagacagcagcctccaggcaatccccgagcccgcccgcactccccgcatctcaaaaccggggctagaggtccctgtagctgcggccaagccaggcggtctgccctgcggcggctgcacaggggcaggaaccggccctcagacccaaccccggtggctgcagagggccactggctagaggtcccc

SEQ ID NO: 220967 - DNA, 517 bp, Homo sapiens
cagccatagcactagtaaatcccraagaattaataacatcactggttactaggaactttggatgacagtatttttggaatacaagcccataaatattattccaaaaatactattgtatttatgtatattaggttacattaacaaatttcttttgacttttcatttgcctgaaatatagtgatactatcctggggaaaaatcattttgatatgaacaggagacagggaaatactgggtagaagagggtggttccccagcaaaggccccaccctcaagcctggaaacccatggtcctaaatgggaacaggtatttctgtttttgcgcccaaaagttgccttttggcctgccataccccactatcgtggctccatataacccccagaccccaggctccagaagacatgaacagtagagcagaagaacagcagaatggtgtggcagagagaagagaaggaatgtctgaatgttgagaggaattcgactgggggtggtcaaagaggaaatcagctgctggat

SEQ ID NO: 220968 - DNA, 514 bp, Homo sapiens
gaacagggtgcagaaacctggaggccaagggcccagccagaatggagcctcacgtgctgggaagagccattttccccarggcaggccagggaaccccatcagctcctgtttcacataccactgacccctgctggtgagtaaagatggtgccagcctccaaaggttcctggggagaaggccccatgtccatttcaaaaacggggaaatggacacccacacacattcactccctcagccttttctttccactggataaagcctccagaaacacaatgaactttacaaaatttatgatgctagtctcagggaatatgtcctggtggcagtaagagaatagagaacccaggagtccttgctcagcagccttttctggctgcaaacatctgcaatctggttagtcatgctttcatttattcaacaaatatttgccaagctcctactttgctcctgacacttctagacactaggtgtaaaacagtgaacaaaatagaatttatgactgcccttgtggcac

SEQ ID NO: 220969 - DNA, 415 bp, Homo sapiens
attgcataaagtcatcagatcctagttccttccagtgcacttttctgccattccaagggttttgccttcatgattcaaaatgacacatccacattctaggcagcaggatggaggaaggtgactaaaccatgtgamtatattactgatttttaaaatataacaaaattataattataaacatgtagaatagattgtaaaagcccaaacaatacaaaaataaaatatatttttggattgttaaatcacctataattgttatttctatcagccccactccaaattcccagcctaagcatctagtttattgcaactattaaggactgagccagtcttgattcccacaattgaaaatgttttcagaaggaattattcttatggaagctcataaaatgttcttaaacccataggtttgaaa

SEQ ID NO: 220970 - DNA, 415 bp, Homo sapiens
attgcataaagtcatcagatcctagttccttccagtgcacttttctgccattccaagggttttgccttcatgattcaaaatgacacatccacattctaggcagcaggatggaggaaggtgactaaaccatgtgactatattactgatttttaaaatataacaaaattataattataaacatgtagaatagattgtaaaagcccaaacaatacaaaaataaaatatatttttggattgttaaatcacctataattgttatttctatcagccccactcyaaattcccagcctaagcatctagtttattgcaactattaaggactgagccagtcttgattcccacaattgaaaatgttttcagaaggaattattcttatggaagctcataaaatgttcttaaacccataggtttgaaa

SEQ ID NO: 220971 - DNA, 615 bp, Homo sapiens
gccggccggcggcgggtcttggccgcccggactccgacgacttgtcccctcctccgctgctagggggagggggcgcccggcagccgcggctcgcgctcgcccaagttcaacaaccggtgcgagcgaagctgagcgcacgtccttcttctcttgcgtggctctccgccgccttctggtctttaccgccgtggagaagcctaagacgcaggaaaggcttgcaaaagttsgctccgggactctgccacttgtctccggtcctcccagccgggaaagttctttgctgctgcagccgctcgccgacttcccccggcgggcgcgtgggtaccgctgctttccgccgctgtcaacagcgcctgggcagcagggctctcctcccgggggcggctggagaccaggctctctggacactcccgaaacaccagcccgggagccacaggcgctagctctgggcagttagagagaaggtgaaaagaaaataagatttgcagttcggactatactgccgacctggctggctggctgtgtctgtctgtctgcctgactccgcgcacctccactcccgcctcgctgcttcagccacactcagtgcaactctgagcccttatccagcccgag

SEQ ID NO: 220972 - DNA, 548 bp, Homo sapiens
cttcagagcattaaaggaagatgcttcattttaccagtgacattttttyaatgatacaactaaaagcaaggatttagcttttgctttatgtgagtaaacaaagttgttaaagtcaggcatcgtcctggaataaatgtgaactgctgtaattagaaactgtttctgtcataattacgttctagaggctgaggcgtgagttcattttaataaatgggaaaagaaagtaacccaggccaaggagattcatctttggaaaagagcctagcagaaatacaacatcatcctacctcagaaactggataaacaaatgcccaaatgagagaaacagaaaccacagctcctagaaaaaactcttgaaccataagaagactgtaaaagaaaggggctgaattctgaccataggaggagtcacgcaaaaatctccctttatgtggttcccagtgagcttgtctgaaagggaaatgagtggtgaaaggcttttagttttaaattttcgtcaaaaggatgatctattctgttgcattatggcccatgcagaaaagaaggaa

SEQ ID NO: 220973 - DNA, 548 bp, Homo sapiens
cttcagagcattaaaggaagatgcttcattttaccagtgacatttttttaatgatacaactaaaagcaaggatttagcttttgctttatgtgagtaaacaaagttgttaaagtcaggcatcgtcctggaataaatgtgaactgctgtaattagaaactgtttctgtcataattacgttctagaggctgaggcgtgagttcattttaataaatgggaaaagaaagtaacccaggccaaggagattcatctttggaaaagagcctagcagaaatacaacatcatcctacctcagaaactggataaacaaatgcccaaatgagagaaacagaaaccacagctcctagaaaaaactcttgaaccataagaagactgtaaaagaaaggggctgaattctgaccataggaggagtcacgcaaaaatctccctttatgtggttcccagtgagcttgtctgaaagggaaatgagtggtgaaaggcttttagttttaaattttygtcaaaaggatgatctattctgttgcattatggcccatgcagaaaagaaggaa

SEQ ID NO: 220974 - DNA, 618 bp, Homo sapiens
taataatagactggataaaggcaatgagaacaggagttagtsaaagtttttggctttaatcgggaattcttattgggctatctagaacaaaagtgggtattaaaaaggtaatgcagatttaatggaaaaatagcttagatttgaaaaaactctttacttggctatcatctgtaaaaaagctttaacttttcaaaactatcagaagttgccacttgtgttgatttgtgtcagatgattcatgtctgtgtcattaccttgaggctgctatacatagaactgtgctcacattcatgctggacatagggactattttctctaaaatttcaggtaaattttaaaaactctggttctgtattatcagcatgatcacttccttcaattctagtcctttccagggtgtgtatgacactaacattgtggttaatgtgtgggagggtaggggcatcttgagagtgaaatgagagtatcaagaataaacactgttcttattaatatgaaatataaactgaaaaagttagcaagaagaagttcaaatcttatatttagtttcaaacaatgaggagagcatccttcaaataaactcacgtgaaagtgaataggaccttaatgcaatatagt

SEQ ID NO: 220975 - DNA, 505 bp, Homo sapiens
ctctaagtataaggccgtgacccctgaaagaacaataatagctaaataaattgctactttgtctttctccaacattgctttattgtttgctataggaattagatctaggccaatgagagtcaatatctgctttcttgataaacattttccctctaagcttccaactccgtatttatttattaagcttaaagtaacacagaatgtcttcattattatgcaaataaatatttcatttttggatttatttaacaaatatcaygtgccagttttgtcctgggaatagtacttagtacataagaaaagctgatgactgtgtctatgacaaggaatctttagtgaggaaacagacatgtagacaacttcaatataaatcagataactggtttgaaggagtaatgtacagaatgctataggaactcagaaaacagctttcctatgtcacctagagacagcaggggcctcatggaggaagcagcatttaagctgagaagcaaagcctgagtag

SEQ ID NO: 220976 - DNA, 604 bp, Homo sapiens
aactttgctaatggaattgtcatcccagaggttgtgtagctttaaaatgtgaagtactgtatcaaatctaattaccatttattgttaactttccaaatgctaggcattgagctgctaggtttactcacagtactttatttgtcacactatcacacacacatacacacgcaggctggcagtcagttattgttctcattttatatttgggaacactgaggttcagatatgtgaagcaactagtccaaagtcacatagctggtggtgatgctaggctttaggcttgggtctgtctgacaactctggccatgtccttatctccatattgtctctacaaaatggtttaagtagataatagttaagaaagcaaactaaatgttctgggaaataaactgctaatttctgagtttgacataaatcaggataatctttttttyctcttttttcacttttctataaatgtgttatttattgttgcagttatattacctatacgtaaaagagatgctctgcctgattctcatcactggactctgcagtagccttgattaagaaaagatcacttcatcaccctttacccattttctgtttgaacttagcatatcag

SEQ ID NO: 220977 - DNA, 552 bp, Homo sapiens
gttgaccagaaatgaagtatttgacaccattcttgcaactcctaagtagctaaatagcgtcagggttaggagttggactttctcatgagatcaagataaatgtaagctgtggaatttttactttgcataggatttcttcatccaatcagcagccctttgcagatacctacaatgtgtcagaacctgcttaagccttcacatctaggaaggctaaaggttgagtttgtctgtttcatcctgtcttggctgatcacatgcacatacaaccacacactcacttgcatacamacatataagtatgaggagaattcaaaatgttcatggaaaaatgagattaaaagataaaagtttaaagatgtaaactttacttctcaacataagcaccatcacattcaagatactgttataagctatgatagcggccatttagtccatccctaaagaactgagggtcctgggaatttaatcacatcaatgcaatctttcttacattgttaactaaagaaaaatgggtgccctttgaagatttttaaagattaagtaacaaaaaaa

SEQ ID NO: 220978 - DNA, 552 bp, Homo sapiens
gttgaccagaaatgaagtatttgacaccattcttgcaactcctaagtagctaaatagcgtcagggttaggagttggactttctcatgagatcaagataaatgtaagctgtggaatttttactttgcataggatttcttcatccaatcagcagccctttgcagatacctacaatgtgtcagaacctgcttaagccttcacatctaggaaggctaaaggttgagtttgtctgtttcatcctgtcttggctgatcacatgcacatacaaccacacactcacttgcatacaaacatataagtatgaggagaattcaaaatgttcatggaaaaatgagattaaaagataaaagtttaaagatgtaaactttacttctcaacataagcaccatcacattcaagatactgttataagctatgatagcggccatttagtccatccctaaagaactgagggtcctgggaatttaatcacatcaatgcaatctttcttacwttgttaactaaagaaaaatgggtgccctttgaagatttttaaagattaagtaacaaaaaaa

SEQ ID NO: 220979 - DNA, 437 bp, Homo sapiens
cccatctctactaaaaataaaaaaattakccagacatggtggcacatgttggtaattccagctacttgggaggctgaggcatgagaatcgcttgaacctgggaggtggaggtttcagtgagttgagatcgcaccactgcactccagcctgggtgacagagtgagactgtctcaaaaaaaaaaaaaaaaaaaaaagaaggaggaccgttgatcagcttccagattctactgcctaagttgccatcttctcagttttccaatggagccaaggtaaatgggtttttcatccccagtgaaagcagaattggagaaaatggactcagacacttgggctaacagaacagaaggaaaccttcagctttagaaaatggagggcctgtaatattctttatgaacatatggattttctctgcttattatattcagagaagtatacat

SEQ ID NO: 220980 - DNA, 589 bp, Homo sapiens
aatagtcattgccacaccccaggttatctagatttttctcctgttatctccaggggtttaatagttttacatgttgaatttggttctaatatccattttgagttagtttttataagaagtataatggttgtgtctagattatttttctttcttttttttttttgcatgagaatgtccagttgttcccacaccatttgttgaaaagactatctttgcttcactgtattgtctttgcttctttgtcaaagatcatttgaccatatttatgtgggtctatttttctgagctctctattctgtgctgttgatctatttgtctattattttaccaatattacactgtcttgattgttgtagctttatagtaatcttgaagttggacagtgktagtcctctgttcttcttccatattgtgttggttatttggggtctttgttctttccatataaactttagaatcagtttgttgatattcataaaacaacttgctgggattttgatggggattgcattgactctatagatcaagctgtgaagaaatgacaacttaccaggtttgagtctttctatccataaacatggaatatttc

SEQ ID NO: 220981 - DNA, 586 bp, Homo sapiens
gtgtattctgccatcattagatgaagtattttgtaggtgacaagcatataagttgattgatggcgtttttgagttcaaacatgttcttactgattttctgtctcctgaatctgcccatttctgacagagaagtgttgaaatctccaataatagtggatttatctatttctttttgcagttcaatcaatttttgcctgtagtagtttgatgctctgttgttaggtgcatacacattaaagactgttttgtcttcttgaagaattgatccctttatcattatataatgccctctttatacatgataactttccttgctttaaagtctactctgtctgaaattaatatagctgctcttgcttttattggatcagtgttagcatggtatatttttctcaatttacttttaatcttaatgtgtctatatttaaagtaggttttttatggacaacacagarataggtcttgttttttaattcactttggcaatctctcttttaattgctgaatttagaccattgatgttcaaactcatcattggtatagttgaattaatatctagtgtacttgctactgtcttctatttggt

SEQ ID NO: 220982 - DNA, 631 bp, Homo sapiens
aatttccagcctagaaagttggactctgtccttttttactctcagagttaagaaagagatttttaagattaattagatgagactgaatttatccacttaaaggtgatcttggggaaactgaaagagcagtgaggctgagaggaactggagaatgagatgaaactgggtcacctctggtggtactcaggggttggcagccaggactcctcacctggcagctggagtccttatctgccctggaccattttctgagcattgtgaccaacaccattgctataggagaggaggaaaacctgtgcacgcactaagcccatttgatgctctttcttgcccaggctggcaagaggctaggagcaatggtctttatctttgtagtgttaacaagcagcaccagtaacaaccatcrccagttactaaacaggttccacgaattaggtattttatgagtattatttctaattgttacaaaatagtaggtgttattccccatttacaaagaggaagacctgtgcccagggatgttaaacaactccttcaaggttacacaaccagttgagattcagacccaggaagaccatgccccttccgctacacctcactgcctcattcagaataccaagcaggacaagca

SEQ ID NO: 220983 - DNA, 586 bp, Homo sapiens
gggttttgccatgcaggacaggctggtcttgaactmccgacctcaggtgatattcacttgcctcggcctcccaaagtgctgggattacaggcgtgagccaccatgcccggccagtcctccttctttaaagcatcctctcatcattcattcattcattctataagcatctattatctaacatgtttgtttctaatcttgtttctattcttaatctgcttgtcatctaaaaggctcaactcattttatagtctgtaaaatgtgtgtaataaaatggactccagctgagcccaaaagtaattaaaaactcttgggaacagcatcctttctgtaacctggggaactcccatgagtaactgaggaccaagccatcatacctggagtaggtgagatttgtggttcttaaaaagggcagagacaacagctgtgaggattttgcacagtgccagcagtatacagcaggtgttcaataaaggacaactgtcagtatattgttacatagtcaaactgcctaaaccaactcagtattgattcatcaagttttgagaattttaaaaataaatcatatgctttctgtaggaaagaaaaa

SEQ ID NO: 220984 - DNA, 586 bp, Homo sapiens
gggttttgccatgcaggacaggctggtcttgaactcccgacctcaggtgatattcacttgcctcggcctcccaaagtgctgggattacaggcgtgagccaccatgcccggccagtcctccttctttaaagcatcctctcatcattcattcattcattctataagcatctattatctaacatgtttgtttctaatcttgtttctattcttaatctgcttgtcatctaaaaggctcaactcattttatagtctgtaaaatgtgtgtaataaaatggactccagctgagcccaaaagtaattaaaaactcttgggaacagcatcctttctgtaacctggggaactcccatgagtaactgaggaccaagccatcatacctggagtaggtgagatttgtggttcttaaaaaggrcagagacaacagctgtgaggattttgcacagtgccagcagtatacagcaggtgttcaataaaggacaactgtcagtatattgttacatagtcaaactgcctaaaccaactcagtattgattcatcaagttttgagaattttaaaaataaatcatatgctttctgtaggaaagaaaaa

SEQ ID NO: 220985 - DNA, 578 bp, Homo sapiens
aacatcatattgaatgggcaaaagctggaagcattctctgtgtaaactggcacaagataaggatgccctctctcaccacccctattcaacatagtattgtcctggccagggcaatcaggcaagagaaagaaataaaggacattccaaataggaagagaggaagtcaaactatcccagtttgcagatgacattaacttatatctagaaaaccccatagtctcagcccaaaaccttcttaagctgacaaacatctttagcaaagtttcaggatacaaaatcaatgtrcaaaaatcaccagcattcttatatgcccacagtcaagccaagaaccaaatcaggtacaaactcccattcacaattgccacaaaaagtgtttagaaagaaagctagaaacaggcttaatttggtttgggtgacttctgttaccattttggacaattgattagcatggattctcaaatatacatgtcttaagagcttttcagaaggtacattccacattttgtgatccaactaacagttgcagaacaaaaacccattaaagaaaaaccataacttccagctactgaaattgacca

SEQ ID NO: 220986 - DNA, 455 bp, Homo sapiens
agatcttgcttacacagtgaaaaatctcagacgtagtactaagtataaatttaaggtaagctttgaaaacccttaaacgatttgttccttgttcctattcttactggtgtggtggggttctttgttttctgtttgtttgtttgtttgttttttgagacgggctcttactctgtcacccargctgctgcagtggcacaatcatggctcactgcagccacaacctcctgggctcaagtcatcctcccacctcagcttcccaagcagctgagaccacaggtgcatgccaccacacctggctaacttattttgtagagacgaggtttcaccatcttgcccaggctgatctcacactcctcggttcaagtgatcttcctgcctcggcctcccagagttctgggattacagacacaagccactgcacccaacctctattcttactgttttaaagacaagta

SEQ ID NO: 220987 - DNA, 408 bp, Homo sapiens
taaatgatataactatttgctatcaaggttttactcaaaaagaaggtgggagaaataaaaagttttgataggttggggacagtggctcaggcctataattgcagcactttgagaggccaagatgggaggactgcttgagcccaggagatcgagaccagcatgggcaaaacagcgagaccctgtctctactaaaaattaaaaaattagctgggtgtggtggtgtatgcctgtagtttccagctgcagttatctatgatcgtgccactccagcctgggtgacaaagcaagaccctgtctcaaaaaaaaaaagttttgattaaaaaccagcagcatagccttatcaaacrcccagaatcagaagaaaggaatctggattaatgttctctgagttttcctatcaaatagaaa

SEQ ID NO: 220988 - DNA, 614 bp, Homo sapiens
tcattactgttttagtgtgactcagaacacaaaaagtgctatttatgattggataaccagaccctgaattataagtagcttatatttcaaaagttaatttgtaactgcaatctgtaaaccccacctccataaatcaattaaattgattttatatgcggcagtgacccctttggtcaggaccaaaaaagcctatctaatttataatgtgcctgtaatactaacagtatcttagtgataggaactaactaccatgrgaagatatttttaggcagggacacatttctctgcttcagtgggaaatggattcctttctctatatgacagattgtaagattggagactgttttaaaattattgggtagaggttttaaaaacacaggaaaggataaagggaaccagacagaaaataagaaggctctcccctctttatgtttttgactgtccaaaattacaagatggaatatgggtggaaggaatagtagtgagcaagggaactggggttgaagtctttgtaaaatcaacatgccttcactctgagcaagagaagacaagaaaagacttctggagttcattttcttccacttagccatcactagtttctgtcatatggcaag

SEQ ID NO: 220989 - DNA, 529 bp, Homo sapiens
ttccatttcaagtcatttggtagaatggatgctctgctctaggtaccatcctcttattaaaaaaagatcttctgtaagaattttaattgcattattgtgcccacaaaaagtaagagacatgtcctaggggatagggagcaagaaacaatgctgggacagttggttatccatttggattaaaatggaatcagatccttttctcataccttaccccaaaattaatgcttgaagacttaaagacttatgtgaaaggataaacttaaaaataataataaagagagagtatcttcatgactacagagtaragaaagtttttttaggatacaaacacacaaaatgctaactatcaaatgatcagtaaatttgactccattacaattaagaactttggtacatcataaaatatatgaaaaatataagtcataaactaggaagagtatatttgcaaccaatgtaaccgtaaggaattagtatccagaatacataaaaactcttcccaatctattttttaaaaaagactacccagtag

SEQ ID NO: 220990 - DNA, 502 bp, Homo sapiens
ccattcctttgcattccgtttccaatctattggagtccattgcattccagtccaatccattccattacattccttttgattccctgccagtcgattgcattgcatactacaccattccaaasgagtccattccattctatctcaacactttccattccactctgttcgagtccattccattccattccatttaattcaagggcattccattccattccattccattccatttcatattattccattccagatgattccattccattctataccattgctctctgttccattccattccatctgtctccattcctttcgtttcgattcctttccattccattccattacatttgatcctattttattaaattgcattctattcgagtgattgccattcgagtcctttccattcgattccattccattctattccattcctttggattccattccattccgttccgttcacatcaattccttgcgattccattacattcgattt

SEQ ID NO: 220991 - DNA, 627 bp, Homo sapiens
aaaataacacaaatatatcactatccgattatcagtactcaaaartataaaaacagaggagtaagttagtattatgctcctgagaagaggaaattaacatttagtttactgggtaagttttgtcacttcttttttttttttcttttttttttttttttaagagacggagtctcgctctgtcgccaggctggagtgcagtggtgtgatcttggctcactgcaagctccgccgcctcctggttctagcaactctcctgcctcagcctcccaagtagctgggattacaggtgtgtgccaccacgcccagctaattttttgtattttagtggaggtggggtttcaccatgttgcccaggctcgtcacaattgtcccttctttaaaagaaattatgtctatgttaatgaggaacgtaacaaaataatgaaaggctaaaccgtattatggttgtaaaagcacagttatttactttgtttaaattatttcaacactgtagattatgttatcttttccgattagaaactgggaaacacacgtcagccttaaggactacatttcagagctgagagagaaacaagtggtcgtctacaataaccttctatccaactcacatctcctctctggagaatt

SEQ ID NO: 220992 - DNA, 627 bp, Homo sapiens
aaaataacacaaatatatcactatccgattatcagtactcaaaaatataaaaacagaggagtaagttagtattatgctcctgagaagaggaaattaacatttagtttactgggtaagttttgtcacttcttttttttttttcttttttttttttttttaagagacggagtctcgctctgtcgccaggctggagtgcagtggtgtgatcttggctcactgcaagctccgccgcctcctggttctagcaactctcctgcctcagcctcccaagtagctgggattacaggtgtgtgccaccacgcccagctaattttttgtattttagtggagrtggggtttcaccatgttgcccaggctcgtcacaattgtcccttctttaaaagaaattatgtctatgttaatgaggaacgtaacaaaataatgaaaggctaaaccgtattatggttgtaaaagcacagttatttactttgtttaaattatttcaacactgtagattatgttatcttttccgattagaaactgggaaacacacgtcagccttaaggactacatttcagagctgagagagaaacaagtggtcgtctacaataaccttctatccaactcacatctcctctctggagaatt

SEQ ID NO: 220993 - DNA, 429 bp, Homo sapiens
gtttttaattatccagtgtaggaaaatttgtttcaaaaataaccagccaatggacatatgtcccggtcagtagtctcgtcacagcatacttgcttgagaatggaccagtgaattcagaggaatataataggcttggagcaatgttttcttagactttacagtgccatatctgatcatggattaattttgagttgtttctcttgggcaaccttttgtgtcttagccacttcattatgctcatagtgattttttgaagccctacatttatgtgtcaattttggtttataaagctctaattctcatacaaggttttcaaccagccaatgaaatagtaartaaatatcacttgaattgtataaataattttaatgaagctagagaggtttttatttgtccaggatcacacagctagaaaatgactgagtagat

SEQ ID NO: 220994 - DNA, 611 bp, Homo sapiens
gaattcttttcctaggccaatgttcagaaaagtttttcctaggttttcttcaagaatttttaaggtttcaggytttgcatttaagccttaaatcaatctccaaaataccaagttattttgtttttgcttttatgtaaagaaggctgtgaacatgagagagggctggggggtatacggcgctttcataaagcacagggaaacttctttaaaattctttttcctcattgtatttcacatccactgtctcagctcctgcaggtgctttagtgtctctcttcccagattcccacatcctcaccaatttggctcctctaaacccgatgctgcagtctttcttttttctccccacccaccctagctcaattctttattgcatggattgagttcacctttcctgtctctcagttactactggttctcccagtccctagattttgtacaatcaatggcccagggttgactaagccagtcaggatctttccttcttaggaatatggggtaaggagtgaggaagaacggtctaggagtcttattaaaggcagaaacagggaaagaggctacaaatacgcattgactaatgattttggaccctgttttaatgaatgaataga

SEQ ID NO: 220995 - DNA, 611 bp, Homo sapiens
gaattcttttcctaggccaatgttcagaaaagtttttcctaggttttcttcaagaatttttaaggtttcaggttttgcatttaagccttaaatcaatctccaaaataccaagttattttgtttttgcttttatgtaaagaaggctgtgaacatgagagagggctggggggtatacggcgctttcataaagcacagggaaacttctttaaaattctttttcctcattgtatttcacatccactgtctcagctcctgcaggtgctttagtgtctctcttcccagattcccacatcctcaccaatttggctcctctaaacccgatgctkcagtctttcttttttctccccacccaccctagctcaattctttattgcatggattgagttcacctttcctgtctctcagttactactggttctcccagtccctagattttgtacaatcaatggcccagggttgactaagccagtcaggatctttccttcttaggaatatggggtaaggagtgaggaagaacggtctaggagtcttattaaaggcagaaacagggaaagaggctacaaatacgcattgactaatgattttggaccctgttttaatgaatgaataga

SEQ ID NO: 220996 - DNA, 611 bp, Homo sapiens
gaattcttttcctaggccaatgttcagaaaagtttttcctaggttttcttcaagaatttttaaggtttcaggttttgcatttaagccttaaatcaatctccaaaataccaagttattttgtttttgcttttatgtaaagaaggctgtgaacatgagagagggctggggggtatacggcgctttcataaagcacagggaaacttctttaaaattctttttcctcattgtatttcacatccactgtctcagctcctgcaggtgctttagtgtctctcttcccagattcccacatcctcaccaatttggctcctctaaacccgatgctgcagtctttcttttttctccccacccaccctagctcaattctttattgcayggattgagttcacctttcctgtctctcagttactactggttctcccagtccctagattttgtacaatcaatggcccagggttgactaagccagtcaggatctttccttcttaggaatatggggtaaggagtgaggaagaacggtctaggagtcttattaaaggcagaaacagggaaagaggctacaaatacgcattgactaatgattttggaccctgttttaatgaatgaataga

SEQ ID NO: 220997 - DNA, 441 bp, Homo sapiens
gaattcatttcaaagaacagaaayagattaagagacaatgaagtcctatatatttgttaatcattcaatttaagagaaattattatgcaaattttaaaaaatggccatagcaaagcagttaatagggaaaggaattaaataatgctagatcgagacacacaactgatatgaaacactatccaaacaaatatcattttgttttacacagttctgtgtttctaagttatttttcagccacattttcagtagcctttgcattggatatcagctttgaatcattattcaagaaaacaagtgaataggaacatatttttgacctcctagatgaagagctgaaactgtgtagactgaattgctcctattggacatatgaaggcagggacttcattgttgtagagtctatcttttaatatattctagatatttaattatgtctattca

SEQ ID NO: 220998 - DNA, 585 bp, Homo sapiens
caatccaatatcataccatgttatgtccctggagttctactttggaaacattaattgttttaaaatacatggtgagccagattcgtcaccattgcaagacagaataccagaagtattctgctaaacctcctaaaaacacacacacacaaacaaaaacaaataagcctgctgccatagaaattagatattccttgataggatcaaaccaaaaaaaaggttaaagaagctatgcttaccaaatggaatagaacactacctaaagtgtaagatgcatattctatgggaatacagatgctccttgacttaagatgggagttaccttccgatgaacccattgtaagctgaaactatcataagttgaaaatgcacttaatacacctaatatgccaaatagcatartttagcctagtctaccttaagtgtgctcagaaccctgacattagcctacagttgggcaaaattatctaatgcaaagcggattttataatagagtgttaaatatctcatgtaatttattgactacagtgcactgtgtagtatctgttgtttactgttgtgatcgtggctgcctgggagctgcagttt

SEQ ID NO: 220999 - DNA, 545 bp, Homo sapiens
agttggtaggctatttattactcaytcaatttcggagctcattattggtctgttcagggaatcaatttcttcctggctcagtcttaggagggtgtatgtgtccaggaagttatccatctcttctaggttttcttgctggtgtggttagaggtgttcttagtagtttctgatggttgtttttatttctgtggggtcagtagtaacattcccttcatcatttctaattgtatttatttagatcttctctctgttctccttttttagcctaactagtggcctacttattttattatttttttcaaaaacccaactcctgtattcatttatcttttgaacagtttttcctgtctcaatttccttcagttcagctctaattgttgttgtttctcatcctctgctagctttggggttgattttttcttgcttctctaattctttcagttgtgaagttaggttattaatttgagatctttctaactcatttagtgctatgaatttgcctcttaacactgccttaactgtgtcccagagatcctggtatgttg

SEQ ID NO: 221000 - DNA, 595 bp, Homo sapiens
attcaagatgagatttgggtggggacacggagccagactgtgatggttaatactgagtgtcaacttgattggattgaaggatacaaagtattgatcctgggtgtgtctgtgagggtattgccaaaggagattaacatttgaatcagtgggctgggaaaggcagacccactgttaatcagggtgggcccaatctaatcagatgccagcatggctagaatataaacaggtagaaaamtgtgaaaagagagactggcctagcctcccagcctacatctttctcccatgctgggtgcttcttgcccttgaacatcggactccaagttcttcagtttcggaacccagactgtctctccttgctcctcagcctgcagacaacctattgtgggaccttgtgatcctgtgagttaatacttaataaactcatatatatatatatatatatatacacacacacacacacacatatatatacatatatacatatatttatattccatcagttctgtccctctagagaaccctgactaatacacagaccatagcaatgactatgtgattttcctgacatatgaatataatgaatatgttaatagat

SEQ ID NO: 221001 - DNA, 550 bp, Homo sapiens
ttcactagaaatgatgccagctcttctttgtacatgtggtagaatttggctgtaaatccatctggtcctgggcttttttttagttggaaggctattactgattcaatttcaaaactccattattggtctrttcagggaatcaatttcttcctagctcagtcttgggacagtgtatatgtctaggaacttatccatcttttcaaggttttctagttttttttgcacagaggtgttcatagtagtctctagtggttgtttgtatttctgtggggtcaatggtaacatcccctttgttatttataattgtgtttatttggatcttctctctagtcttctttatttagctaacagcatatcttctttttttttttttttttttttttttttcaaaaaaccaactcctggattcattgatctttgtgatggtttcttgtgtctttacctgcttcattcagttcagctctgattttggttatttcttgtcttttgctagctttggggttgatttgctcttgcttctctagttctttagttctgattttagcttgtt

SEQ ID NO: 221002 - DNA, 239 bp, Homo sapiens
ttacgcatgcttctacaattgacttgataactgtgttcaccgaatgtgttacatttctctctgaccttcttgactataatgttcttgaagacagaaactatgtcttcgtactcatttcagctctagttcctagcataatamagatacgtaggtggcatttaaaaatgccaaatggcctgtggatggatgactagaaggaagaaagaatggataagtggatatatagatgagtggttggt

SEQ ID NO: 221003 - DNA, 557 bp, Homo sapiens
agaatctaaaccaccccatatacagcctgcattgaatgtcaacttagttgcttcattcaaggagccttcccaagagagatcccagctgttgctgctcgccttagcttggccactatcttgccttaactttggctgttctgtttctgattgaaacttctggcatacaatggcctattacctgtctaccttcttcagcagcygcctctgctgatgtcacataaatgccatgtacctttcaacaaagaagaagatgagtgcctcatcaacttaggcttttgcccatacttctaaggttcactatgtgagacctctagaaagtttcctattgattttagcttctaaaaatctcttgaacctctgtacttatcacttactctccactgctactattgacaactctcccctgcaccattttaatagcccctaatatggtttggctatgccccacccaaatctcatcttgaattataatccccataatccctaggtgtcataggagggacccagtgggaggtaactgaatcatgggggcggcttcccccattgtgtaattgtga

SEQ ID NO: 221004 - DNA, 519 bp, Homo sapiens
ctgcattgaatgtcaacttagttgcttcattcaaggagccttcccaagagagatcccagctgttgctgctcgccttagcttggccactatcttgccttaactttggctgttctgtttctgattgaaacttctggcatacaatggcctattacctgtctaccttcttcagcagctgcctctgctgatgtcacataaatgccatgtacctttcaacaaagaagaagatgagtgcctcatcaacttaggcttttgcccatacttctaaggttcactatgtgagacctctagaaagtttcctattgattttagcttctaaaaatctcttgaacctctgtacttatcacttactctccactgctactattgacaactctcccctgcaccattttaatagcccctaatatggtttggctatgccccacccaaatctcatcttgaattataatccccataatccctaggtgtcataggagggacccagtgggaggtaaytgaatcatgggggcggcttcccccatt

SEQ ID NO: 221005 - DNA, 522 bp, Homo sapiens
aaaatatcaatgaaacaaaagttgattttttgaaacgttaaacaaaattgacaaacatttagccagactaagaaaaaaaagaagatccaagtaaatagaatcagaaatgaaaaaggagacattacaactgatactgcagaaattcgaaggatcattagtggctactatgagctactgtatgccaataaattggaaaatctagaagaaatggacacatttytagacacatacaacctatcaagattgaactatgaagaaataccaaacctgaacagatcaataacaagtaatgcgattgaagctataataaaaagtctcccagtaaaaaaaaaaaaaaaaaaaaaaaaaaaaagcctggaaactgatggcttcactgctgaattttaccaaacatttaaagaagaattaataccactcctattcaaactattctgaaaaatagaggaggaggagggaattcttccaaactcattctacaaggccagtattaccctcataccaaaaccaggcaaagacacatca

SEQ ID NO: 221006 - DNA, 551 bp, Homo sapiens
gggtaccagaatatagttaggtagaatgaataactagtatttgatagtgtaacagggtgatgacagtcaayaatgttttattgtaaatttttaaataactacaagggtataattgaaatgtttgaaacataaagaaatgataaattcttgagataggtaatgcataccccatttaccctgatacaattattgtacattgcatgcttgtatcaaaatgtctcatgtaccccataaatatatacatctactatgtacccataaaattgaaaattaaaacattttttaaaactataaaagaaatttattatgtcacggttctggtggctagaagtgcaagatcaaggtgttggcaagattgattcctacagagggctatgagggagactctgttccacttttctcttctagcttcttgtggtttgctgcaatctttatcattcctggcttatagatgcatcacactcatctctatcttcgtctccaaatggtgtgctctgtgtgtgtatgtctgtccttcaattttcccttttcataaggacaccagttgtatt

SEQ ID NO: 221007 - DNA, 551 bp, Homo sapiens
gggtaccagaatatagttaggtagaatgaataactagtatttgatagtgtaacagggtgatgacagtcaacaatgttttattgtaaatttttaaataactacaagggtataattgaaatgtttgaaacataaagaaatgataaattcttgagataggtaatgcataccccatttaccctgatacaattattgtacattgcatgcttgtatcaaaatgtctcatgtaccccataaatatatacatctactatgtacccataaaattgaaaattaaaacattttttaaaactataaaagaaatttattrtgtcacggttctggtggctagaagtgcaagatcaaggtgttggcaagattgattcctacagagggctatgagggagactctgttccacttttctcttctagcttcttgtggtttgctgcaatctttatcattcctggcttatagatgcatcacactcatctctatcttcgtctccaaatggtgtgctctgtgtgtgtatgtctgtccttcaattttcccttttcataaggacaccagttgtatt

SEQ ID NO: 221008 - DNA, 442 bp, Homo sapiens
ttttctcaactgagtaatgtagaaacctcttttaaaggggaaaagaatcttattgatccccagcgtagacttgaattacatttwgaatgctgtcaaaataagaatgtaaagttacataatgaaatgtgtaatgtaaaatgtaagatatttgtatagatatttattttaagtaatacacataaaactagttataaactccttagaacacatgtgataattcccttcttccacctttttctttgagtcaaaggacacctgcattgtatacagggtctttctttcgcaggaacacaacttttgtctaacatgtccccttttgtgggattttttgtctagcttctaacaattacaacaacactctacttggtgtcaattcaactgttaacgcaaacatataagtgggcagaaaaatagcatggtagtacttgattataaaaatgta

SEQ ID NO: 221009 - DNA, 598 bp, Homo sapiens
tggtgatttgaaatgagctccaggtctgttttttgtctttatgttcaagtcttgggctgaccaagccattccctttctctgtgctgacatatcgggggttggtaatttgggtaggagaggaaaacggttttagtccaattcaccacaccctaggacagccagctcttctttcactttgaatgggacaaaatgaatcaggataatagtcttacagtttctaaagtacttcaatgtacagtgtcttacttgctcttctttacagccctgtgaagtaggaactgatattagcaccgtttgacagatgaggaaattgtggcatggagaggttaagacactcgtgcactatgggcaaaatttgtgacaaaggtactttggcaatataaaccttttagcactggggattttaactctctgtgctttgttatctgtgggtgacatcaccctccctgagctcagcactgtgttatggtttagagcagtgtgaaaaccarggcctgtggggttcaacctcaccagtccttgtagttaagggtagattttacatctttaatgggttgcggaagagaaggaggtggaagaagaggaaggagggaggagg

SEQ ID NO: 221010 - DNA, 576 bp, Homo sapiens
tgtctcagcagcttctaggtgctccggttgctcattgctactgagtggtcactgcttctaggcttgttggtgggaagatctagaaaatatgtactttatagaaagagaaaaataggccaggcgtggtggctcacgcctgtaatcccagcactttgggaggccgaggtgggyggatcacgaggtcaggagatcaggaccatcctggctaacatggtgaaaccccgtctctactaaaaatacaaaaaattagccaggtgcggtggcgggcacctgtggtcccagctactcgggaggctgaggcaggagaatggcttgaacccgggaggcggaatttgcagcgagccaagatcacgccactgcactccagactgggcgacagagcgagactctgtctcaaaaaaaaaaaaaaaaaaaaaaaaaaaaaagagaaaaatagattatgatttcattttgatatttcccatttgcataagatttcaggatttttactgaatttctttgattttacgtttatttttgttttatgctgacaatcttggttccttttgatatgagcatagttatgtgcttatccta

SEQ ID NO: 221011 - DNA, 576 bp, Homo sapiens
tgtctcagcagcttctaggtgctccggttgctcattgctactgagtggtcactgcttctaggcttgttggtgggaagatctagaaaatatgtactttatagaaagagaaaaataggccaggcgtggtggctcacgcctgtaatcccagcactttgggaggccgaggtgggcggatcacgaggtcaggagatcaggaccrtcctggctaacatggtgaaaccccgtctctactaaaaatacaaaaaattagccaggtgcggtggcgggcacctgtggtcccagctactcgggaggctgaggcaggagaatggcttgaacccgggaggcggaatttgcagcgagccaagatcacgccactgcactccagactgggcgacagagcgagactctgtctcaaaaaaaaaaaaaaaaaaaaaaaaaaaaaagagaaaaatagattatgatttcattttgatatttcccatttgcataagatttcaggatttttactgaatttctttgattttacgtttatttttgttttatgctgacaatcttggttccttttgatatgagcatagttatgtgcttatccta

SEQ ID NO: 221012 - DNA, 394 bp, Homo sapiens
gtgtgctgcccacccacatcagtgagggtgatcttctttactcagtcaactgaatcaaatgctaatgtcttgcagaaactctctcacagacacgcccagaagtaatgccttaccagctatctgggtatcacttagcttagccaagttgacacctgaaattaaccacaacagtgcccaacagctaatttaatcctcataaaatcttgtgaagatactagtattaccatcctaattttaaaaatgaatctgaggcatagcgtgctaagtgacttgcccatggtcacagagcagggagtggtagagctcagatttgcacstggggagcatggctccagagttttgcttctcaagttcccctcaagaaacaaatgcaaaataggataagaacctttcg

SEQ ID NO: 221013 - DNA, 401 bp, Homo sapiens
gattatttcagatgtaatggtttyacattttatttgtttcctgcttcccagtccaatggtcgttttcagaccctctcattcttggaccccagtccaattttgctgagaatgctaaaggctctgaggataatgtgtcttcccacaccccaggagactccactcaccaccaagtgtggccagaccatggctattctgtctgtgttcctgttgatttgtagaagaaagatggtagtacaaaagttttccctgccctgtgggataagatccctgcaggtagaccaggaggaataagcatgacagttgtaaaatcttagaaatattacttagcttccatcttttccataatgatgagttcatctgaaggagttcagaaatagattcttataccttctaagactggc

SEQ ID NO: 221014 - DNA, 603 bp, Homo sapiens
ctaaaataaagttaaatgtaagccaggtattggagtaaaatatttgcaatgcatataacctacacaatattagcatccagaatacatacagtcattaaaaatcagtgagaagaagaaacaaacaactcaatggaaaaatgagcaaaggatagaaattgaggattcataagctataaacatatgccagtaaacatatgaaaagactttctaacttattaggaaaatgcaaattaagacaagatatcatttcacatctatcagaccagcaaaaaattttccagtctgacaaggtaggcatggggattggtacaataattcttagaatattttagcaatacttacagagttaattaagtgtgcttactctacgacacaggatggccacttctaggttatttcttggggcagtattttccaatttccccattatgacacacatagagaaagataatactcatagagcacagtggggtaagccgaggaggctgctcatagcaggaggtgcccatttagggggctgtggtcacctcaggtcccacwtcttctacccaactgtgaggcactgctatacagaattgtatataagctctgccctagagaagc

SEQ ID NO: 221015 - DNA, 563 bp, Homo sapiens
ctaattttacctcgtaaaaaattcttcctcatccctcctcatccccctcccatattcttttgacttttttttttttttttttttttttttttgccacccaaacagcatcccagaatgcctcatttggtgacatcacagatagccatgggttgcttctggtgtcccatctgttcctgcaggccttgcctcagtgcgggtgagatatgaagggagtgttcagttgaggctggggtgtgggtgggggtggggatcgggcctttgaagctgttttctatcagggcactgcagctgtcagtgttggctgcggaagccagtgattgtccttgtagctccctgttgccggcagtgcactgtgcttgcggatattaattgggctttcattatgtgaatgaacccagaggcttttgcagccgattcctatatctatattgatttattaaaaatgccaataaataatagctctcgcaaagcagcttttmatgtatttgataattagttggtttatgtttttttcaccatttttctccctttttttttctttttacacatcacagcataataga

SEQ ID NO: 221016 - DNA, 604 bp, Homo sapiens
gataggctggggcagagacaagctagctgttcctctttcttactaggtggtatttcctctctcatagctaggtgtggtcacgtgactaatttctgcccaatgaaatgtagacagaagtgacggaggctgcttccagtcttgacctataaaaaaggtgcacatggactgtgtctccacttgctcttttcccctcatctggtgacagaatattcaggtcaaggtgwtcctggaagtccaatgttgaaaacatttgtggtcttgtcagtttgacctctttagcgattacgtagagcaaagcctcaccttctttccctcaaacaccaattgaactgtgagtgagaaatacatattgttttaagccattgagatatcatggtttatctgttaatgcagagattgcatcagtattaaaattaatagtagggctgccttatctttatttctgcccattttccaagcctcattctgtggccctcttggcaaccctgtgagctcccaaatgaatatcctttcaatttatttattttctatttgttacccagaattggtttttcttgctcgcaactaaaaaaccttcctcgacacagtcattgtaaaagttagg

SEQ ID NO: 221017 - DNA, 583 bp, Homo sapiens
tccagtcttgacctataaaaaaggtgcacatggactgtgtctccacttgctcttttcccctcatctggtgacagaatattcaggtcaaggtgatcctggaagtccaatgttgaaaacatttgtggtcttgtcagtttgacctctttagcgattacgtagagcaaagcctcaccttctttccctcaaacaccaattgaactgtgagtgagaaatacatattgttttaagccattgagatatcatggtttatctgttaatgcagagattgcatcagtattaaaattaatagtagggctgccttatctttatttctgcccattttccaagcctcattctgtggccctcttggcaaccctgtgagctcccaaatgaatatcctttcaatttatttattttctatttgttacccagaattggtttttcttgctcgcaactaaaaaaccttcctcgacacagtcattgtaaaagttargttaaataatgcccttaggataatgccaaacatctaactaaatattctgcaaatattaaactttcctttgctttaactggaagagccagtttaatactttcatatgagtca

SEQ ID NO: 221018 - DNA, 586 bp, Homo sapiens
aaagtcatcaagcaggtaattggtggagcttaaatttaaacacaggaatcagtcaccagagttcatgtgctcaatcactggactacactccactatgctacactacacaacttgatacattgttactctggataaggagctcagcttggaagcccacatagactgggccaaggcaatcaccctctccagggtgctgaggggactcctagcacaaggaatagagagcttatgtttatggatgggacggggaatgtgaacaggatgcaggagtggagaaggctaatagaagagtgactggttggagaacccagaggagagtcggtggcacacttagcagctggtataagcaggaaatttgaaatagacaaagaaatgcctaaaggggatttttgggtaactttytttgtggggcagtctctaaaattcccctgccacttcttctagaaaaggtacagatctacattattctttaattcagttgtttttttttttttttttttttttttttggcaggatctcactctgtcactcaggccagaatacagcggtgtgatcacggctcactgcagcctcgacctccccaggc

SEQ ID NO: 221019 - DNA, 586 bp, Homo sapiens
aaagtcatcaagcaggtaattggtggagcttaaatttaaacacaggaatcagtcaccagagttcatgtgctcaatcactggactacactccactatgctacactacacaacttgatacattgttactctggataaggagctcagcttggaagcccacatagactgggccaaggcaatcaccctctccagggtgctgaggggactcctagcacaaggaatagagagcttatgtttatggatgggacggggaatgtgaacaggatgcaggagtggagaaggctaatagaagagtgactggttggagaacccagaggagagtcggtggcacacttagcagctggtataagcaggaaatttgaaatagacaaagaaatgcctaaaggggatttttgggtaactttctttgtggggcagtctctaaaattcccctgccacttyttctagaaaaggtacagatctacattattctttaattcagttgtttttttttttttttttttttttttttggcaggatctcactctgtcactcaggccagaatacagcggtgtgatcacggctcactgcagcctcgacctccccaggc

SEQ ID NO: 221020 - DNA, 586 bp, Homo sapiens
aaagtcatcaagcaggtaattggtggagcttaaatttaaacacaggaatcagtcaccagagttcatgtgctcaatcactggactacactccactatgctacactacacaacttgatacattgttactctggataaggagctcagcttggaagcccacatagactgggccaaggcaatcaccctctccagggtgctgaggggactcctagcacaaggaatagagagcttatgtttatggatgggacggggaatgtgaacaggatgcaggagtggagaaggctaatagaagagtgactggttggagaacccagaggagagtcggtggcacacttagcagctggtataagcaggaaatttgaaatagacaaagaaatgcctaaaggggatttttgggtaactttctttgtggggcagtctctaaaattcccctgccacttcttytagaaaaggtacagatctacattattctttaattcagttgtttttttttttttttttttttttttttggcaggatctcactctgtcactcaggccagaatacagcggtgtgatcacggctcactgcagcctcgacctccccaggc

SEQ ID NO: 221021 - DNA, 586 bp, Homo sapiens
aaagtcatcaagcaggtaattggtggagcttaaatttaaacacaggaatcagtcaccagagttcatgtgctcaatcactggactacactccactatgctacactacacaacttgatacattgttactctggataaggagctcagcttggaagcccacatagactgggccaaggcaatcaccctctccagggtgctgaggggactcctagcacaaggaatagagagcttatgtttatggatgggacggggaatgtgaacaggatgcaggagtggagaaggctaatagaagagtgactggttggagaacccagaggagagtcggtggcacacttagcagctggtataagcaggaaatttgaaatagacaaagaaatgcctaaaggggatttttgggtaactttctttgtggggcagtctctaaaattcccctgccacttcttctagaaaaggtacagatytacattattctttaattcagttgtttttttttttttttttttttttttttggcaggatctcactctgtcactcaggccagaatacagcggtgtgatcacggctcactgcagcctcgacctccccaggc

SEQ ID NO: 221022 - DNA, 354 bp, Homo sapiens
attttttgttttgtttttttttttttttactgtgagagcttagataacttgcccaaattcaagttgatttatttggtagagtcaggaaggttttgtgctctttcctagctaagttgggagcactgtcatccaggggaaaaaggcctytcttggtgagacagaggagagaaaacaggaagtgctcccctggtccaagcagttgccctgtgtccctatgcagaaagttgagtccagattgattgtcatattctgacttcccctcccccactgcttttcttttaaacaaggcagtaaatttgttagtagtttggcaactgaactcatgggttggtggaagtagccaccaaatggtgt

SEQ ID NO: 221023 - DNA, 599 bp, Homo sapiens
gactgaggaaaggatccctttcaaactcattgatccttgaagctagttttctccccgccagaatagctataggccttaaagccagaatcatctcagcaagaaaagcttcccaataacattagtgagccaccacacaaagaaactggagtgttctatgctagataagtttcaagaggaaattgattttagatttctttgctgtaaaacttgaagtagtaagtagtctacacaagatattccaagggctgaaaatcttaaaacaaaatgcacaggaatacctaatcaatggattgttatcagggtgcctcctttaattcctctatacagagaggaccygggaacagctggagctagctggcactgtatgtgggtggcaagaacctcatgcatgtattgattgggtgcccacagctctaaggcttctagaaggaggatatctctgaagagaaaagtttcacataaatgttcactcactcactcccatctgatcatctatagccccttttctttttcttccatctctcacaaatacatcttccgtctatggccacatagaagattcttgcttggagttcctgctcctgagccatgcatgccct

SEQ ID NO: 221024 - DNA, 628 bp, Homo sapiens
aggggaagccaaagtcagtatatcctgactgaggaaaggatccctttcaaactcattgatccttgaagctagttttctccccgccagaatagctataggccttaaagccagaatcatctcagcaagaaaagcttcccaataacattagtgagccaccacacaaagaaactggagtgttctatgctagataagtttcaagaggaaattgattttagatttctttgctgtaaaacttgaagtagtaagtagtctacacaagatattccaagggctgaaaatcttaaaacaaaatgcacaggaatacctaatcaatggattgttatcagggtgcctcctttaattcctctatacagagaggacctgggaacagcyggagctagctggcactgtatgtgggtggcaagaacctcatgcatgtattgattgggtgcccacagctctaaggcttctagaaggaggatatctctgaagagaaaagtttcacataaatgttcactcactcactcccatctgatcatctatagccccttttctttttcttccatctctcacaaatacatcttccgtctatggccacatagaagattcttgcttggagttcctgctcctgagccatgcatgccctatg

SEQ ID NO: 221025 - DNA, 473 bp, Homo sapiens
taaaatataatcattcatgtaccaccttcataatttttgctgtggccatgtaccaactgaaccacaggagaaataatatttgtaaaagatcaactcatagcatacaaattgtggaaccagactatctggatttgaattctggctctatcacttactaactggggcaacttgggctgcttattaacctctgtgcctctgttttctcatctattaagtggagataaaaatagcaactacttcataggattattatgagggttaaacagataagtacatgtcaacctaaaataggtctgtcacatagtaagcacagtggaaatgttagttacattactataatttaaatacaaaattttcaaatgaaagtttacracattccatatatttaaaaacatagtaacacattccataaatagaggtcactctaaaacaaaatgtgaaaacaaaccaatagaattaaatcctagcagaca

SEQ ID NO: 221026 - DNA, 391 bp, Homo sapiens
atcactgggctggaggccaagagtggcaatccgtgaggctgaggctggcccagtgcccagttttcagacaaagacaggttgggaacccccctgcaatgaagaatccacggttccctcctcccagagtcctgcctcttgtttcttgggtactttctagaacaccacccccatcctagtgtgtgtgtgtgtgtgtgcgcgtaygtgcgtgcgtgtgcacgcatgtgtgtgtgtgtgagatggagagagagagattggtggggggtagatgaggggggactgagaagcagggagggaaggagagaaaggctggacaaatctcgtgcttgtaagggtaccaaggattgctcatatactacacacactcatggaaataaatcatgtttttaggggg

SEQ ID NO: 221027 - DNA, 503 bp, Homo sapiens
gatggatacttttccaaaatgaaatccagaggtttccctgctagtcttaaaaaaaattgtttgcattataatcatcrtgacatgtacaaggacaattccattttctccctcctactgggccctcttttgtcccctatgaaatcttgaattcccttctctttctccctaagcctagctaatgctgtggtctgccactgttgcccttattcccacttctgtgatgtttccatacttcaaggcaggccacagaatggctggcatacaactgggaattcctgcaaggctcgtccagttaatggtgattagctgttacagacaggagccaggatgggtgtacatggtcccaaacaatggagtctaacatgcatccacaaaagctttcatcttgagaacatagcctcttgtgagatattaccagaagtctcaaggtaattgcattttactggaatcaaacctaacaagtattttataattaaagatcatgctggtttcctttactatca

SEQ ID NO: 221028 - DNA, 629 bp, Homo sapiens
ttcatagggtgctaaaagccaagtattaggggtagaaacttatacatctttatgtctactgagccttgataaaaatccagctcccgctctcgcaaccaggaaatgggtacaaaagagaatcaaaggagaattaatagcacagagtatgcttgtcgcctagaaacaaagggcagagttggagacaggagctcagatacgaggggtggatmtagcgtgtgttcaggaaagaaggaggatggctagtatgtctataaagtttcagttttatcacatcaccttccttatcaaaaacttttcagccctctaggttccacaaaacaaacccaagctcctccttggcctacctttctacaacccgggccagctctgtcttcaggcactcacctgtgatcctaggtcaaagccatccattcacctgagccatcccaaatgcctcacttctctgccttttaatgccacctctatctcctccttgaacttcctgacagcctctctccactctgctccaattacccacacctaacctaattttgaagacccagctcaactcccaccacgtttgcaaagtgtcccctgaccatttacccacagtaatttctgcttaccctgggatcctatgtccccaccac

SEQ ID NO: 221029 - DNA, 563 bp, Homo sapiens
aaatatctgattcccaagagatttacatcagactaatttagcacgaaattttgggaagtgaaaccaggcatttttattttacagaagataccaagatctttatgaggtrcagtaaaatctgctgttgcaatgtattataatcaatattgtcatgagaaagtgtcgtgagattaaaagcagctgagaattaatcatcagtaatgtgagacgctgtatacattatttccatgattttgcccaaattcagtagtacagaagtacagagaaatgccaaaaggcaggttctagagcagggtttcttatgcttgtcattgatattttgggctggataattctttttttctctggagctgttctgtgtattttaaacatccttggcctctatccactagatgccagtgttgcccctcacttatgacaaccaaacaggtttccaaatattgccaaataccccctggggacaaaataggcccagttgacaaccactgttctagagtttcagtggctggacacaaacccaggctttactatgtaacagtatgattagtgcaagttactcaatc

SEQ ID NO: 221030 - DNA, 600 bp, Homo sapiens
cggtgtgggactggccagcacaccgttctgctgaccgtgtgagaagctaagttcaaggtctacttttgcttttaaggtgtttccttgtcactgtagccaatgtcaaaattaagaagttgctttgcttgttcaactcatctcttctagtgggtgagtgaatatcatctaggctgagaaaaaggaaaactcattcacttccattcaccccctaaaatacaaccagtgattaggaatttggagggaaagtgcccacatgactacaactccttatttcttttgctcttaatcagaaggtctctattaatcagacaggtgggcaaataggatttctagcaatgtcccacggtaggaagtccttccataytgaaaattttggaaatctcacaggaagctttgtagtgagaaatcgtagagaattgagtagtaatcttttttaaacttccaaatttaatgtgatgtccttgagggaagacaaacttttattcacacgttagaacttgtttatgcataaaatatctctgacatgataaacaagaaactggtaaaactgattgccttggggagatggttaggcatgtgaggggaacatatcattgaaaa

SEQ ID NO: 221031 - DNA, 431 bp, Homo sapiens
ttctttgggcttcttgtatttggatgtctagatctccagcaaagccagggaagcttttctcgattattccctcaaasaatttttccaaacttttagatttctcttcttcctcaggaacaccagttattcttatgtttggtggtttagcataatcccaaacttcttggaggctttatttttttaaaattcttttttctttgtctttgttggattgggttaatttgaaagccttgtctttaagctctgaagttctttcttctacttgagtctattgttgaaattttcttgcatattttgcatttctttaagtgtgtttttcatttccagaagttgtaattgttttttcattataatatctctttctctggagacgttttaatgcatatcttgaattttttttttaatttaagttgtttttcatctttctctgg

SEQ ID NO: 221032 - DNA, 564 bp, Homo sapiens
cagcaaagccagggaagcttttctcgattattccctcaaagaatttttccaaacttttagatttctcttcttcctcaggaacaccagttattcttatgtttggtggtttagcataatcccaaacttcttggaggctttatttttttaaaattcttttttctttgtctttgttggattgggttaatttgaaagccttgtctttaagctctgaagttctttcttctacttgagtctattgttgaaattttcttgcatattttgcatttctttaagtgtgtttttcatttccagaagttgtaattgttttttcattataatatctctttctctggagacgttttaatgcatatcttgaattttttttttaatttaagttstttttcatctttctctggtatctccctaagtagcttaataatcaaccttctgaattctttaactggcaattcagagatttcttcttggtttggatccattcctggagagctagtgttatcttttaggggcgttatagaaacttgtttagtcatattgctggaattacttttctgatcccttctcatt

SEQ ID NO: 221033 - DNA, 580 bp, Homo sapiens
cctcaccccagaatcagaagggctcaggaatgcacccatcatgtcacggccccatttctatttgtgtagtatttscaagtaaagatccacttggtgtcaaaaagattgtaagtatctattccccctctgcctttttctgaaatgacaacttgagtcctggaaaacttcctgggtttatggaaccattaatctctgccttaggacccaggatatgctgaaggctacaaaatcaacagaaagaaactagggaagagaatgtcttcattggatggtctgcattggatttcaagtattttatcacagtcttagctcaagcttttactctagtcattaaaatattaaaaataacacaattctaaatggcaaaatagaatatgcctatcattccagcaggaagaaaagaaaaataaaagactagagtctattatctgttgaaaatatatgccaatctttcccctaaatacagaaagagttgcaatatttgctatggacaaagtgccaaaaatgagtggagagggtccatattttaaagacataatggagacaaatatgagttcagaactaaagccttttctgtgag

SEQ ID NO: 221034 - DNA, 580 bp, Homo sapiens
cctcaccccagaatcagaagggctcaggaatgcacccatcatgtcacggccccatttctatttgtgtagtatttgcaagtaaagatccacttggtgtcaaaaagattgtaagtatctattccccctctgcctttttctgaaatgacaacttgagtcctggaaaacttcctgggtttatggaaccattaatctctgccttaggacccaggatatgctgwaggctacaaaatcaacagaaagaaactagggaagagaatgtcttcattggatggtctgcattggatttcaagtattttatcacagtcttagctcaagcttttactctagtcattaaaatattaaaaataacacaattctaaatggcaaaatagaatatgcctatcattccagcaggaagaaaagaaaaataaaagactagagtctattatctgttgaaaatatatgccaatctttcccctaaatacagaaagagttgcaatatttgctatggacaaagtgccaaaaatgagtggagagggtccatattttaaagacataatggagacaaatatgagttcagaactaaagccttttctgtgag

SEQ ID NO: 221035 - DNA, 471 bp, Homo sapiens
actgcacccagctaattttttatttttagcagagacagggtttcaccatgttgcccaggctggtcttgaactcctgacctcaggtgatccacccgcctcagccttccaaagtgctgggattacaagtgtgagccaccacacctggccttaagttcagttttttataaccttcctactcttagctaaggttcagctgaatgtgactgtcacaagaattacataagtcaatgaagacacaagcacatagtaataaagggaaaactattttagctaatctataaatgctgacagtaacaggtgacaggcaggtagtgatgactataagcattgaatattttatattarcttaattttttaagaactaatttagagttaaatatatgccatctattttggtcataatacagttcataaatgtgtttattacaattctgtgtaatctggagttggtcaaaggcaccaatgtggttg

SEQ ID NO: 221036 - DNA, 601 bp, Homo sapiens
aaccaacaacttttgaagggagtcaagcagttgctgtgaatgaatgaagatcaagtctcaaatctgagacaaagggagcttcaagaccaagcagagataagaaatacaaccaaggccaggcacggtggctcatgcctgtaatcccaacmctttgggaggccaaggcaggcagatcacttgaggtcaggagttcgagactagcctggccaacatggtgaaactccatctctactaaaaatacaaaaagtagccaggcgtggtggcaggcacctgtagtcccaggtaccaggaggctgaggcagaagaactgcttgaactgggaggtggaggttgccgtgagcccagatcacaccactgcactccagcctgggtgaaagcacaagactccatctcaaaaaaaaataagaaatacaactaaaagcctgggacaagttcatgatcagagctggcaggactggctaggactagggcaaggaaatgaggatgtataggctaataataaattccatcgtaaactaaaaataaaatcctaagcctccccagcctgcttttggccaaggagacctgagagaaacctaaaaaactgagttattggccatga

SEQ ID NO: 221037 - DNA, 601 bp, Homo sapiens
aaccaacaacttttgaagggagtcaagcagttgctgtgaatgaatgaagatcaagtctcaaatctgagacaaagggagcttcaagaccaagcagagataagaaatacaaccaaggccaggcacggtggctcatgcctgtaatcccaacactttgggaggccaaggcaggcagatcacttgaggtcaggagttcgagactagcctggccaacatggtgaaactccatctctactaaaaatacaaaaaktagccaggcgtggtggcaggcacctgtagtcccaggtaccaggaggctgaggcagaagaactgcttgaactgggaggtggaggttgccgtgagcccagatcacaccactgcactccagcctgggtgaaagcacaagactccatctcaaaaaaaaataagaaatacaactaaaagcctgggacaagttcatgatcagagctggcaggactggctaggactagggcaaggaaatgaggatgtataggctaataataaattccatcgtaaactaaaaataaaatcctaagcctccccagcctgcttttggccaaggagacctgagagaaacctaaaaaactgagttattggccatga

SEQ ID NO: 221038 - DNA, 337 bp, Homo sapiens
attgaattagcccagatgttgtaaagttggtatccatcttaatttcttcagaaatactcttgaacttccaaaaaaaaaaaaaaattggaaagggaagagcttaaaatgaaattcattttaaaatggtagttytaaaactgttaattgtatcaaacattgtcttgccaataaacgtcacaggccacaaactgaaactacaacaaaaatattttcttcccaaagaaaataagctgttcaattgtgtaagttggagcatgtttttaaatatatggaacaggtgggggtgcagttgagcaagttaaaggcaatctacctggcctgaaaggcctgaaagccc

SEQ ID NO: 221039 - DNA, 337 bp, Homo sapiens
attgaattagcccagatgttgtaaagttggtatccatcttaatttcttcagaaatactcttgaacttccaaaaaaaaaaaaaaattggaaagggaagagcttaaaatgaaattcattttaaaatggtagttttaaaactgttaattgtatcaaacattgtcttgccaataaacgtcacaggccacaaactgaaactacaacaaaaatattttcttcccaaagaaaataagctgwtcaattgtgtaagttggagcatgtttttaaatatatggaacaggtgggggtgcagttgagcaagttaaaggcaatctacctggcctgaaaggcctgaaagccc

SEQ ID NO: 221040 - DNA, 586 bp, Homo sapiens
gataataaaatacgtgtcctgtctacctcccagggtgattttaaggatcagttgaggggatgtatacattgaaagtgctttgtaaactgtaaagcaacatacacgtattcaaatgttaaagattattataagacacttgttttttccccctgcaaattagaaacatttgctgaagtaaacactgttgatgcattagctgtcaggatagtgtattatatttggaaaacatttgccaatgcctgttcagtttttgaatttccagtcacatgtgttttttgtttsagcaaatgcatcaagtaataatggatttattgttaattgtgcaacgttggagcttcaaggtttaagtaatctccatttcgtgttgactttattccatgttgactgtagaagtttgcagtctttattgattaatgaaaagtgataactgagcactattaccaccttgtattcatcaaacttttatcagaagaaattcaggattctgcacgtagacaagtgtgccaataaaagcatattccctccgagaaaaaggagggaaagaggtgtggttatctccacttaaaacagctttccaaagagctcc

SEQ ID NO: 221041 - DNA, 582 bp, Homo sapiens
ttcatccattttacagagcagtaaactgagacagcagtggggctaagtgagttgtccaaagaggcacagtgagttggttgcagaacccagcgtgatttgctaaccagtattatcatcacatggcctttagccctccaggattgtggcagcctttggcgccaccctgcatgaacccagagcttattatctgagccagggcagggagtctcccagatccatcaaatttcttgcctctgatgacaggtagatgwcagaacggagcaaagtcacagaagctttggctttggggaagacagaaccttattagctttgtcagacactcactcctctggttttacgactgcagctttctatatatggcccgccaggccccagtggatttccctactaatgccatgtctatctaatagtggcagacctaggatggccctgatcatttccctgatgacaacactgaagcacacacatgccacagagcaacacactgtaccttctgtggcttgtgccaaagtgagccccttgctcataaatgtagcagtatgggtgtgaattatcagatgcgccctgctataggcctacatg

SEQ ID NO: 221042 - DNA, 609 bp, Homo sapiens
aaactgagacagcagtggggctaagtgagttgtccaaagaggcacagtgagttggttgcagaacccagcgtgatttgctaaccagtattatcatcacatggcctttagccctccaggattgtggcagcctttggcgccaccctgcatgaacccagagcttattatctgagccagggcagggagtctcccagatccatcaaatttcttgcctctgatgacaggtagatgacagaacggagcaaagtcacagaagctttggctttggggaagacagaaccttattagctttgtcagacactcactcctctggttttacgactgcagctttctatatatggcccgccaggccccagtggatttccctactaatgccatgtctatctaatagtggcagacctaggatggccctgatcatttccctgatgacaacaytgaagcacacacatgccacagagcaacacactgtaccttctgtggcttgtgccaaagtgagccccttgctcataaatgtagcagtatgggtgtgaattatcagatgcgccctgctataggcctacatggccttctctaatagaagttctttcttgcaggttgtgcatcccccaaaat

SEQ ID NO: 221043 - DNA, 611 bp, Homo sapiens
ttttatttgtaatgactaaagttattcaggggtgctggctaggagtggtcctttggagaagattgagatagagtccatagaacttcaggtctaggacaatgtggtctgcaccccaaaaatcatgtgggggccaatgcctctcttacctgatggatggacattgagttacaaaagaaagaggtatgtcagtctgtgaaggaacaaggaactgcatttgggcatctgcgacaatgagtgctgatgggaagaagsgggagaaacttccgcatggccatgcaggcagcagccccccgtgtgagatgatgtttctggtaggggatctggatccacacaattcttgatgcaaagtattttaggatgcagatgtcatgtggggaaatcgttcatgaagacccacttctcatttaaagaagaaaattaaaagggacatcagagcgtaatggattattaggattgatttggggttgagtgccaactctaacatttggtgaaaacaggtttgaaatagagaacgctgatgtaaaacctggctctgtacttactagctgtgcaatcttgggcaagttactgcacctctctaagcttctctcttctcagttggcagacgcaaa

SEQ ID NO: 221044 - DNA, 488 bp, Homo sapiens
cttcaaccttgatttgaatccctaaattttagctctgctggcacttacttgtctgaaactgcagctgcccccagggagtggagcctgttggaagccagtcctctttctgttccttcctgcttatcctgtctccctaggtcctggcattccacctactcccaggattaatgctgtctaccccttgcttctggatctctgaagtcttcctagactctgtcacagctctccatcatcaacctgcccagagggtctgccctaacattccctgcatgggttccgatgacaagggtggaaacaagtttctgatctgataaaaactcagtcacaaaggttccaggcatttctgctgaatctctgtwtaactgggcttaacaaaagacaaagctgatcatgtcatgttcttgattaaaatctgtctcatatttcctcaagataaagttcaaaatcctaagcatggcctgccatgtcccacaggacacaacacatgg

SEQ ID NO: 221045 - DNA, 254 bp, Homo sapiens
ccgactgcaatccaagaccactagaccaccctggaaaagcactgccttctcagaattgcatgggaacccacgtctgcccacattatgctctgaggccacacagtctgaaaatgsagtgtcacattttttggtctgagctgtgtgctggcctgctccaaagctgaagggaacagcattctctaggcacaaagaatgcactcagacccactgactaggaatgtatttttaaaccaaaaagtttgggaagagttaag

SEQ ID NO: 221046 - DNA, 526 bp, Homo sapiens
ctccaaaccctgggccaggaatcagtactggtctgtggcctgttaggaaccacgccacacagcaggaggtcagtagtgggtgagctttacttttcatctgtactttacagccactccccrtcactcacattacgacctgagctctgtctaccgtcagatcagtgagggcattagattctcataggagtgcaaaccctgctgtgaactgcgcatgcaagggatccaggttgcacatttcttatgagaatctaatgcctgatgatctgtcactgtctcccattacccccacatgggaccgtctggttgcagaaaaacaagctcagggctcccactgattctacattatagtgaattgtataattatttcattatatattacaatgtcataataatagaaataaagtgtgcaataaatgtaatgtgcttgaatcatctggaaaccatcctcccaccccaccacctcatccatggaaaaactgtcttccacgaaaccagttcttgatgccaagatagttggggaccgctg

SEQ ID NO: 221047 - DNA, 526 bp, Homo sapiens
ctccaaaccctgggccaggaatcagtactggtctgtggcctgttaggaaccacgccacacagcaggaggtcagtagtgggtgagctttacttttcatctgtactttacagccactccccatcactcacattacgacctgagctctgtctaccgtcagatcagtgagggcattagattctcataggagtgcaaaccctgctgtgaactgcrcatgcaagggatccaggttgcacatttcttatgagaatctaatgcctgatgatctgtcactgtctcccattacccccacatgggaccgtctggttgcagaaaaacaagctcagggctcccactgattctacattatagtgaattgtataattatttcattatatattacaatgtcataataatagaaataaagtgtgcaataaatgtaatgtgcttgaatcatctggaaaccatcctcccaccccaccacctcatccatggaaaaactgtcttccacgaaaccagttcttgatgccaagatagttggggaccgctg

SEQ ID NO: 221048 - DNA, 526 bp, Homo sapiens
ctccaaaccctgggccaggaatcagtactggtctgtggcctgttaggaaccacgccacacagcaggaggtcagtagtgggtgagctttacttttcatctgtactttacagccactccccatcactcacattacgacctgagctctgtctaccgtcagatcagtgagggcattagattctcataggagtgcaaaccctgctgtgaactgcgcatgcaagggatccaggttgcacatttcttatgagaatctaatgcctgatgatctgtcactgtctcccattacccccacatgggaccgtctggttgcagaaaaacaagctcagggctcccactgattctacattatagtgaattgtayaattatttcattatatattacaatgtcataataatagaaataaagtgtgcaataaatgtaatgtgcttgaatcatctggaaaccatcctcccaccccaccacctcatccatggaaaaactgtcttccacgaaaccagttcttgatgccaagatagttggggaccgctg

SEQ ID NO: 221049 - DNA, 526 bp, Homo sapiens
ctccaaaccctgggccaggaatcagtactggtctgtggcctgttaggaaccacgccacacagcaggaggtcagtagtgggtgagctttacttttcatctgtactttacagccactccccatcactcacattacgacctgagctctgtctaccgtcagatcagtgagggcattagattctcataggagtgcaaaccctgctgtgaactgcgcatgcaagggatccaggttgcacatttcttatgagaatctaatgcctgatgatctgtcactgtctcccattacccccacatgggaccgtctggttgcagaaaaacaagctcagggctcccactgattctacattatagtgaattgtataattatttcattatatattacaatgtcataataatagaaataaagtgygcaataaatgtaatgtgcttgaatcatctggaaaccatcctcccaccccaccacctcatccatggaaaaactgtcttccacgaaaccagttcttgatgccaagatagttggggaccgctg

SEQ ID NO: 221050 - DNA, 593 bp, Homo sapiens
taatattgattcaatttataggtagttcttgggacatgtgtagatttctcaaatccttgtcacaacttcacagggtggttccctccccaccaacaaccatcccacctcacaccgattcccaggatgatgcccttctgggaaatacctgattactcaataactactggtacatatttgtattttctgtaaagacatatgaatacagaatatgtggtattagaaaatataattttttctacaataaaaatctactactcatttaataaaagaatacaagagcaacttcaataactgagaaaatgcatttctcagacaatacacacatactttcttagaaaagaaaatgcattttcccagttattaaagttgttcttctatcctttcagctgttaataaagtayagttaataaaataagcttttaaccaaattataacaattttatcctttggaatgtaaaaactataatgtttttgtttattcctttttctgagacattcctataacttctttagtttttatattattcttgtcagacaggacaaatatagtagttattggatctactcaattgagtgacaaaaacctatgtttt

SEQ ID NO: 221051 - DNA, 564 bp, Homo sapiens
atttaaaattggacacagaaataaaagaaaatataatgtcttgaaaataagtctaatgtcatcattgttgtccatttaattgtatgatgaacaaaggccacacctgtgacattaccaagcaaggtggctggatgagctaaaggatctccatgaagcacacaccattttaggatcaataaatccacagaagagcaccaaaaggcttgttttccattagttgtcattttttaaaaactggccattatacataagaggaaaaaatctgctcaagtaaacaaatcctttcctgtatccgccacaaaattctccttgcacgaataatttaccagaggagcttttcaaaagctgtaggttgaagctctraataaataaacgactaacaatagtgttaccaaaatattcaaatacctctgcataaattccagtatttcatattctagaaagactgctaataatgagcattttaaaaataaacagccttcatataatggaagacattttaaacttatgcttgcccaccagtcattctattagcctcttgcagttactagctttatactagtg

SEQ ID NO: 221052 - DNA, 564 bp, Homo sapiens
tcagaatgatttgctacagggactagatcctattgcaagctgtcaaatttgtatattgctgtaataccaaaccataaaatcttttgagtaaaatggaaaatgtcagatgggcatggctacaaataatatactttctgaaggctgtagatgtctataggagaaaatgtgtaaatgcatgaaatgttatcttgttactatggatttttctttatctgttgagagaaaaactgtgagacaaaaggaaattgactggagcctttaaattttcagttttgaagtcattttttcctgagggctaattttaaaaacattattagacaggtgggacttcagataattcatgattaaagagtattgtgaaaaagtaatcttattttctagcttgcattgacgaatgctccatttttttctgatcttgtctgtgtgagtrgtgattactgacagatcttttaattgagtgagtgagccaggttggagtttcagagacagggtcattcctttcactctagtactgcctgggtcaataccaacaaacacatgccaaaccgaggcagctgttagaca

SEQ ID NO: 221053 - DNA, 581 bp, Homo sapiens
ccacagaccaaacatccaggaacatccctgtggatgcagttgacaggaccacaccagtggaatgttggtgccaagctggcccctgtgaacccaagatcctggcctaactcagtagacccaagcttcagttcttacatggtggacttaggctccagatccaaccccatgaacccaggtaccaggccagctcacatactgacgcagacacaaggccggaggattccaggagcaagcctacccttggaccatgccagatggcctgcctagaaaatttggatggactgactggtgaagggttgtccaagccaaagccagtctacaaaggttggaataagtcactagttcttcaaatgcatggataccaactcatggtcacaagaatcatgaataatcagggaaacatgacaccactgagggaacaaaataaaacctcagtaaccaacaataaagaaatatagatttacaaactgcctaaaagtaattcaaaataataatcttaaagaagctcaatgagctgcaagtgaatacagatagacaactaaatgaaatcaggaagacawtgcacaaacaagttgagaatt

SEQ ID NO: 221054 - DNA, 553 bp, Homo sapiens
aaaagaattgatgctttccacgaactaattttggaaagacacagttttagtagccagttgctttcttrtatgaacagacatatagaatattgtccttttcctgcagattaacatttgggtgggagtctgaggtggaatattgatttaaaaaaaactagtagtttggtcaaggagaacaacaggaagaacaaaagttagaagttagtgtctggaacaggagttagtggatttgagtgactagaatgatgagctcttttccatgtttttcactcatgtggaaacgttatgtttttcagccagatagcagcaatgaagaaaatgatgctagatgggagacaaaattagatgaagtcgttacatcggagggaaagactaagcccctcataccagagatgtgttttatttatagtgaagaaaatatagaatattctccacccaatgccttccttgaagaggatggaacaagtctccttatttcctgtgcaaagtgctgcgtacgggttcatgcaagtaaatggatctataattcatcaatcactggcttttcagcatt

SEQ ID NO: 221055 - DNA, 533 bp, Homo sapiens
aggtaaagcgaactgtcatccaaaggttctagaatggagaaagaaaaataatgaaattcaacacaattaatgtattacttacttattgttcttcgtttscttaagagcacctcctctcaaattgcagagacagcattcctggggggaaaagaaaataccacatgatgaccagacccacataacaaaagtcattaccattcatctaaatattctcagagatcctgatttttcattctaaaattaaaaccatcaggaattacatgaaggtctatctctgagaagttcaaaaagaaagacagcggagggggaaatggtagaggtacacccctcaaatttcagggtataaaattctcccagagggaaccatcatgaaatgaacctggtataattttaaattgacactgtcatcaaaggaaagctgtgacacagagaacctagcagtccagagaacctagtccacacacctagtatatgcaagaattctagagcagagaatgcacacacgacggtgtagccttgtgctctgggaattc

SEQ ID NO: 221056 - DNA, 637 bp, Homo sapiens
gactaagcccctcataccagagatgtgttttatttatagtgaagaaaatatagaatattctccacccaatgccttccttgaagaggatggaacaagtctccttatttcctgtgcaaagtgctgcgtacgggttcatgcaagtaaatggatctataattcatcaatcactggcttttcagcatttcacatcatctttatttctcacttttttggaacctgtcagatctgttgcatggactattggcattcttaatggttatatcattctttttcatatttctgctggtaaaagtatgagttggtatattcatccttttttcaccactttcatgtagtatccgtggagagcaggtctggttttttttgttggtttgtttgtttggggtccagttgaggagtcatsatggggttcctttcacatgtttggattttacttactttaagatctagtttataaaaacttaatttgaaagtctgatactgattgatgactgcttttctttgtgacttttaaaagagaaatgaatgttcctttggttgttctgagaattgttgtactgagttaactttttttcattcgtgaggataggaatctctattgtattccaggggagaacagtcattacagttgttttac

SEQ ID NO: 221057 - DNA, 392 bp, Homo sapiens
ttacttattgttcttcgtttgcttaagagcacctcctctcaaattgcagagacagcattcctggggggaaaagaaaataccacatgatgaccagacccacataacaaaagtcattaccattcatctaaatattctcagagatcctgatttttcattctaaaattaaaaccatcaggaattacatgaaggtctatctctgagaagttcaaaaagaaagayagcggagggggaaatggtagaggtacacccctcaaatttcagggtataaaattctcccagagggaaccatcatgaaatgaacctggtataattttaaattgacactgtcatcaaaggaaagctgtgacacagagaacctagcagtccagagaacctagtccacacacctagta

SEQ ID NO: 221058 - DNA, 489 bp, Homo sapiens
tcctgcacctctagctgaccctcagtttcctttaacaggcttctctttcactatcctcacacactggaatttctgtaataggccctattacttctctctccacacatgcctgctgagsatctgatccactaccctgattccgatcactctctataggccaatggctcacaccttaattccctgaggtgtctgactaacagtgccacaggtatctcaaacacacatgcaaaactgaactcatatcttcttctcaagcctgtactccccgactgttttccatcagtggtgcctaccatccattctagctcatattggaggacacatttttcctctcatcctttagatccaatcaactgagttctgtcaatcccacctccaaatccaccctgttctctccatcatcactgccatcactttcgctgatagtcccagtatccttcaccagacctaaactattgcaatagccacccagagctactctgaacccca

SEQ ID NO: 221059 - DNA, 561 bp, Homo sapiens
catttaaaaaaccattctgctgtatatttttttcctcagggtggttaaaagataaatgaaaaaatataaaatctgatcatattctgaacagttttgtacttttcctgatgaggtccctttcgctcacctaataccactgacaaaatccccttttaacaatgccagctatttttaaaatttggtttcataaaaaatcaccactgagatgaaaagttagcatagcaattcataacatggaatgatttctttatgcctcagttattaaaccatggaaaagagtatttataatcaaaatgctgacacaacattgacagtggtgagaacagcattgttgtaatatggctgtcacagttgttcattatttgcagccgagggaaatcatgttccaatgtctcttctrtaaaacatcagttaaagaaatgccaataccaacattctcaagctgcattgtaggaagctctcattttagtagcatatccataagtgccactaaagccaattttcagtgtcatagaaaaataattagattgaagtacccccacaaacacaccctcatttatc

SEQ ID NO: 221060 - DNA, 496 bp, Homo sapiens
actgaattaatttttgccactcaagagaaatgcctgcactgcagtttttccacactcttcctggggatctctctcctcattgcaaaagagatgtgccttgcagcccagtgacctccaggcaagcacagcctggtgtgtagtacagtatgttaggctccctgtaatgtcactcattattcttcttgactttacttgtgctttctagttgaagcacyaaagattaatgaggcatttgttctcaatcaagaagctatttatgaatacagttccacttacagtaagctatctaaacttctttttatttctctccattacagagcagaggtggggggtgttattgagcaaaagaaagaggaaagaacagagaaaaatgatttgtgactttttagccactcagcagttccctaacaggacggcttccacatcatagctatgctgtcaggataactgatatcctcttatgtgctcttctgtttggttaaagtgaaataattat

SEQ ID NO: 221061 - DNA, 367 bp, Homo sapiens
gaattcaagacgttatccagttctgggaaaggtcctctaggcagaacctagagtacatatgaaagggaaaagaacctgctcatccaaccaataatgctaattattctacgttaagtagaaaaccagtaacgccagaagttagtgctggctttattttcaatgtaaacaaacaaaaactagtcaaatacattgttcaggattaggtcagtggyttggccttctttcccctccaaaaacaaaagctgagcagaggaggcaaggcctgggaatgagatggtctggcatcctggttctcttaggacacacaagagtgatcctgggcaaaggaatcacaactctaacaccctccggttcattagttgtaaaa

SEQ ID NO: 221062 - DNA, 618 bp, Homo sapiens
gtaaatgcctttttagctcatactctattatttggtgaattccaaaccscaaacctcaaatggtgctagaggtgttcatctgaagctttgcttgggatcatacattaccgttttaatattccaaagccctgtggttactgatgactatattgaagttgctattaaagagatccaggtgtttaatcaggacctcattcctcttaactctcatgtgtggttcagtcaagtttaggttactaatgtgtttcctaaatgatgatgaaaaagaaaatagatgagtttgaggtgatttagaaactactgtctcctacagatccactttcagcttggtatactttgtaaagactggggaaaagatcatataatttacaacatcacgtgaggcagcttttcctgatgagggaacaattttagtgttcttaaattgcctttgctacattttctaggtggaagcactgttagcactgtatttcccaagtatatttctagtagctgttacttatccattcttcttccattcgactccaagtacggattcctccccaaagtgtttgggaactaaccagtaggaatttatagaatctggcaactttggttaagaacattgtgatttgcccc

SEQ ID NO: 221063 - DNA, 623 bp, Homo sapiens
ctaggtttgtatggtttagtgggtgggaatgaggtatgggttgggcctaccacctcctcatcctctacgcrcttggatccacagcctgattatggtgcacatactcttccacagggggcctctgcttttctggtctctttctttaagagcaaagtttacagttcctttgaagacagtttcccgcatttgaaaatattttaaacctattgaagaagggatgaaagtggggtagaaatctcagaaactgacttcatcccaagatttttaaaccgacctgaaaccaaggaaaatacagccacttttctaagacttgcagtattggagagaaactgataactaatatggcaactatactgcttgctttccctttcttatcccagcacttgtttagccagatcatcaaaaatatggcttagcacaaaagttagttatggagaactttagactgccttaaaactgttcagttcaatatatgtagggaccatgaagcatcctggaagtaaacgtaaccttttttctttaaacttctccatccgacttcattcttgctgaccagacctcattcacacaagtgtgtcaagcaaacatttttgttttttttttgatgagacagtggtgggaaa

SEQ ID NO: 221064 - DNA, 623 bp, Homo sapiens
ctaggtttgtatggtttagtgggtgggaatgaggtatgggttgggcctaccacctcctcatcctctacgcgcttggatccacagcctgattatggtgcacatactcttccacagggggcctctgcttttctggtctctttctttaagagcaaagtttacagttcctttgaagacagtttcccgcatttgaaaatattttaaacctattgaagaagggatgaaagtggggtagaaatctcagaaactgacttcatcccaagatttttaaaccgacctgaaaccaaggaaaatacagccacttttctaagacttgcagtattggagagaaactgataactaatatggcaactatactgcttgctttccctttcttatcccagcacttgtttagccasatcatcaaaaatatggcttagcacaaaagttagttatggagaactttagactgccttaaaactgttcagttcaatatatgtagggaccatgaagcatcctggaagtaaacgtaaccttttttctttaaacttctccatccgacttcattcttgctgaccagacctcattcacacaagtgtgtcaagcaaacatttttgttttttttttgatgagacagtggtgggaaa

SEQ ID NO: 221065 - DNA, 561 bp, Homo sapiens
tttttcctcagagctctagcaagcagctccagggaaaactcaagccttcaatgttttagctttcttgtgagatttatttattttttaaataaatcagaaacctctctttctatagatatgtgaactttctttaaacgaggagatctctggccctgaaaaactttgaaaccactggttcaggtgaagtcgatcattacctgctatttcactgccatgagagtgagaagtctgtcgtgagagagggttaagggagtcagggcattggcgcacctgctggtcccctgtgccagcctgagagcagaactgttgggaaatgtctccagtggccttggcaggcttacccatgaatgttcagcaccaaattatgaatatccatgacatcatmtctaaatgttagggtagggctgaatcaacttccatttaatacaaaatataaacattatgaaaattctttgtttcttctaataactaacgtggccagatgtcactatcacttcacatcgtaatatcagattgtcaccattcattattgacccttcgattactctttaaatgaaaatg

SEQ ID NO: 221066 - DNA, 496 bp, Homo sapiens
tcagacacaaacagacaaattaacaaatgatttgtgaaaagtactacaccaacagcacagtcatactttgttttattttggatcaacagatacattacaaggaagatcaagtaagaatccttgcggaagcaccttttaagccaagtagcagaacactgactgaacacataaacagccattaaccatatgaatgttcccttaatgcgtataatgtattaattcattctttcacccatttcaatacttactaaatatcttctatgtaagatcattttgcaaaatgcaaaggcagatgaaaaaatgaaaaagatatacaatccttgtatttaaggaacttaatttggtataaaaaacagctataacaaaagctttacagccataatcacaataggaaagataaagcactactagatttaagagacgattggactggcagggcaaggcgaggcagcatgtgagcctsacctggttacctacctccacccagccctcaaac

SEQ ID NO: 221067 - DNA, 549 bp, Homo sapiens
aaagctattgtcagggttctagtttcatgttaggtggtggttttaacaatgtgtattattgttgttgttgttgttattgttaatagatagaagtccytatatagacatttgataaaagcatatcatgaatcaagaatcatgattaatctcttcatgtatcctgttaaaaaacaaaatttcaaccaatttagtttaaatgtctaattggcttttactagtgattcatgaatcagtcagcctcccatgtaaaaatagagggaagctccactggacatggcagaacagtcagttttgtgagatagcttgagcaagaacaaggaaacagaaaaacacaaaaataaatgtggattggttaacatcaggttacttcaggtcactttctttgtaagggttaaagcagagagcatgttggctcagggtaactgggccctttctgattggctgctgtgaatctcgtatttttaggaaaaactggcctttgggacgggcagggcggggtgaggattatcttgcttccttaaagttgcagtttgattatgtggcaatcag

SEQ ID NO: 221068 - DNA, 581 bp, Homo sapiens
ttttatttaacaaacccctgcttttggtcaggctctcacccaggtgagacttagggcatcagtgctacactcagtgatcatcattctggattttcagtctcaacacattattcacaggttagagtgtcctcattattacacatttctttgagtttttgtcattctggctggagagagactatttggcattgggtggatgactgcatgcaggaatttaagacttttgagagcatgcaccaggaagactatcccatcctaggtctgacccatccagaaaacatacagactatagcaagtacatcttgataacccatacttggtaggagttaattgaaatctaattataaatgctcagatgggcctgatggacaggagtcatcccaggaagaacagaaacagactttcctggcttcagaggttgaccgattaagcactgattataaataatgtttgcaattttataatggtttcctcaccaatacctactgattctttgtatcatcttaccaatacyattatggataaagaaatgtaaggagcctaacaaaggtcccttaaggaagcctgggaacaccatataa

SEQ ID NO: 221069 - DNA, 486 bp, Homo sapiens
gacaaataacatgtatataaaatatatgatgttattcatagcttactttcagaatattttgtcagaatctattaatatttttcaaactcaagaagtgagtttaccatgatattctatcaaaaaactgctgcctaaaaaatgccaaaaaacagaaaattttaacaatgccaaccaaayaaaacctatcaatgtttccttaaattatatttcaactaggtttttttctgtgcatgacctgaaggcatataattaatggaggtaaatcaattggcaaataagaatgtaaatgaatatgggtatatatttatctcctatggtttgtgttttaaatgatgattaaccatcagcctaaaggtgataaaagacttatttcacttcatggtaagaccatagatataatttcaggaacagaaaataaaaatgtcaatgtcaacaaataataatattaacatgtattacatacctgctatagtctagggactatgc

SEQ ID NO: 221070 - DNA, 601 bp, Homo sapiens
aaaacccaaatgctgatagaaaagcaagcctcataaaagacgcatttactcaactagttttcctcaaaggaaaatgtgaaagctaactaggctgcaccagtccaagrtgtccctagttcaagggagttggagaaagcatgaaaactacagctgcagggcattatacagggcttactgcctgggattttttgtcaacccattggcagtcaactccatcaccagaggacagcacctttggtggagggaggatgttgggacctactactggctctcctgggaatttaatgcaaagttgctcttttgaaaggagagtgccaggagagtacctcaaacacactcttttttcttcattcctttttttcttaatccctgtttcttctaactttcatagggtgtcatggaaaccaccacatgagaactgcccatgccactttgatgaccttcctatttccagaatctagtacagagactggcacttgataaacatttgctggaaaaaaagaatcaaagatttctaaatcctgtttcaagtcagaaatcttggttttgaattttgtctctgttccataactgggttttgtgaccctgggaaagttactta

SEQ ID NO: 221071 - DNA, 601 bp, Homo sapiens
aaaacccaaatgctgatagaaaagcaagcctcataaaagacgcatttactcaactagttttcctcaaaggaaaatgtgaaagctaactaggctgcaccagtccaaggtgtccctagttcaagggagttggagaaagcatgaaaactacagctgcagggcattatacagggcttactgcctgggattttttgtcaacccattggcagtcaactccatcaccagaggacagcacctttggtggagggaggatgttgggacctactactggctctcctgggaatttaatgcaaagttgctcttttgaaaggagagtgccaggagagtacctcaaacacactcttttttcttcattcctttttttcttaatccckgtttcttctaactttcatagggtgtcatggaaaccaccacatgagaactgcccatgccactttgatgaccttcctatttccagaatctagtacagagactggcacttgataaacatttgctggaaaaaaagaatcaaagatttctaaatcctgtttcaagtcagaaatcttggttttgaattttgtctctgttccataactgggttttgtgaccctgggaaagttactta

SEQ ID NO: 221072 - DNA, 509 bp, Homo sapiens
ccccaaggcctaaaaaggttgatgcaaatataaacagaatcggaagagctggtgaggtatttagctgaaactttaaagaaatgcttctctcactgggacttcttggtgatggttgtaatgcagctcaaatgcttaagctgtttgtacacttttatcctttttccttgatgcaggctttctgacatccctggctgtctgaattacacacagggtagaccatcctggcccactgggttgcatcaatagcttcttagatcccttttctgattctattattctgtgactgctgagtagcccatggttatttttcaatataatctcacacasagaaagaaagaagaatatatcattttgaatgaattaaagtaacaaaggaaaaaattagttttaaggagaaaaaagacagcaggaggtgtgataaaaaccaccaaatttttaatgtatctaacctaagagaatttcattcattctcttaataatgatgacaattcatttattatgtcattatt

SEQ ID NO: 221073 - DNA, 509 bp, Homo sapiens
ccccaaggcctaaaaaggttgatgcaaatataaacagaatcggaagagctggtgaggtatttagctgaaactttaaagaaatgcttctctcactgggacttcttggtgatggttgtaatgcagctcaaatgcttaagctgtttgtacacttttatcctttttccttgatgcaggctttctgacatccctggctgtctgaattacacacagggtagaccatcctggcccactgggttgcatcaatagcttcttagatcccttttctgattctattattctgtgactgctgagtagcccatggttatttttcaatataatctcacacagagaaagaaagaagaatatatcattttgaaygaattaaagtaacaaaggaaaaaattagttttaaggagaaaaaagacagcaggaggtgtgataaaaaccaccaaatttttaatgtatctaacctaagagaatttcattcattctcttaataatgatgacaattcatttattatgtcattatt

SEQ ID NO: 221074 - DNA, 507 bp, Homo sapiens
agtgccctcttcacgaagctattatgaggattcagcacgataatgtatgtaaagctctaagtatcttgtttggcgcataataagtgtttaataaatgttaagtattgttattattgttgatgtggcattaaggttatgctggcataaaacattagaatttgttcagtgcatggaacaattacattaaacttagagcaagctatattacttacttaacagtggaataccaaagaaatacaatgaacaacaggttttaagagttcctatatggcagtggttgcaggtatttatctttgtcaccctagtaactttgagarctctacagagtaggccttcaataagtgttgaataaatgaacgattttgctgattttaaaatattttttatacttgtaaacatggtaagtgtttctgcagataatctgtaaataaaaaatacatctgtaaattcaacaccaatgtgttttcttccaaggtgtgtgtgcatgtgcgtatgtgtgtgtgtgta

SEQ ID NO: 221075 - DNA, 533 bp, Homo sapiens
agtgcaatgattccttcatgctgaatgtactgtcactgcatatagtagtaacacactcagtactctatgtgtgacactcagtgtaactactgctgtggtctgaatgtttgtgcctccccccagattcatatgttgaaacctaatccccagggtgatggtattaggtcatgaagtttccaccctaataaaatggaattagtgcccctacgaaataggctcaacgaagctcattcacccttttcagcatgtgaggacctagctacatggcaccatctatgaaccagaaagcaggccctcaccaggcaccaaatctaccattgccctgatcttggacttcccagcctccagamctataagaaaccaatttcttttgtttttaagtctcccagtctatgatattttgttatagaagcctgagcagactaagataactattaactatccctccaaacttcaccattctgcatttattttgacttaaaagggaaaaataaggcaaataagggacagtggctccacactgagtttgaaac

SEQ ID NO: 221076 - DNA, 410 bp, Homo sapiens
gtgagccggagcctgtggttccaggggagatccagaatgcatgtgtctcttcccacgcatttatgtcatgttggtagctttagatcagccatrgtgagaaaagaacaaaagcttttagttgtttttgttttgttttggagaatttgtttaccagtaaatacatcactgcctgtaccccaaatgttaccagctccctgaggtgtcccacatactattgtgagttctcagagcatgaactgtcctcagaagagcagggctaggacttgtcccagcatctgtgcctccataccaatcctctttctcacagagaaccacttcccatataagatgcttaaggctctcaaaacagcagaacaatgaaacatactctccctacacttgcttagccaagagataccactcaggtaact

SEQ ID NO: 221077 - DNA, 562 bp, Homo sapiens
acaaacttctttttgcattgcccttgtaatcggggcagtcattgctttggggtgcccagctaatgcacaaggttagtgggaaggggagctgttataaagtacaggaagcacaccctctccaaattgcctaagagagataacatatctgtggaaaaggtgttgggactcttaaaaagtacattgtattagctatgtatatkgtaaattatgaagtgaaagtcgtggttttctgtgacaagagaacataaagtttccaaaatgttaatcaagagagaaaatgcaaaccagaaatgtgctttctggaagagggtgaatagaagttagcagtgcaccacagctaaagcaggcactggtgattcaggaccatggatatgtccccccacccctgcaacaaactccaagagagttttcaactgggcagtatttctgtgcaccagctgtagccactaccctgcatctacaatgtggctttgaagaaagtagggtatgatacatgatgtgcccttcgtttgtcttcttggcactggcctgtatactgtgaaagatgcttactgcactgcca

SEQ ID NO: 221078 - DNA, 412 bp, Homo sapiens
ttggtatcaagcagctgcacgctgatggtctcctgcttttggtccccataatatgtcccatccgtcaccaggtggacaatgacagctgcggcaaccattggttgagaaaaatacgcctgaaattgtgaagacgtaggagggtcacatgtgcactcagtcatgtggtggggaggcagccacatkggggtgcatttgaggagaaacttcctttttaagaactgggctactactcatcaggggtccaagatgggaaggaggaggcaatgaaacctaacagtgaagagcacaggctctgagatcagaaacccaatttcaatctttctctgctcatacttagctgtgtgacattgagtgaatggctgggccactctgggtctaagttccattatttccaaatggtggattaaaaaaa

SEQ ID NO: 221079 - DNA, 412 bp, Homo sapiens
ttggtatcaagcagctgcacgctgatggtctcctgcttttggtccccataatatgtcccatccgtcaccaggtggacaatgacagctgcggcaaccattggttgagaaaaatacgcctgaaattgtgaagacgtaggagggtcacatgtgcactcagtcatgtggtggggaggcagccacattggggtgcatttgaggagaaacttcctttttaagaactgggctactactcatcaggggtccaagatgggaaggaggaggcaatgaaacctaacagtgaagagcacaggctctgagatcagaaacccaatttcaatctttctctgctcatacttagctgtgtgacattgagtraatggctgggccactctgggtctaagttccattatttccaaatggtggattaaaaaaa

SEQ ID NO: 221080 - DNA, 345 bp, Homo sapiens
tatttacccagcgttgttgcagtgatttcagatgattgtgggtataatgctggccccttcatccattttatctaatggaaaactgtgagcttgaggaagaagccatctgcttccaggtcacagagacaggtggtagcagagcaagaagtagaagactggcctttttacacctagcagagaaatcttctccctacatgccayagctacagaatgacgaaaacaacctcttggaaataagatcataggggtgcctaattcttggtatcactttcttctcctccaatgtaaagaaaaatagggtaagattatgttctctgtaagggtaagatctagtctctaaagtga

SEQ ID NO: 221081 - DNA, 612 bp, Homo sapiens
atattgagtcacttgctcatgcaacttgtacattctgaacctacttgagcctaatttcttatatgctgtttccactgaatgaaggattgctgttatccatattcaacattatgctttggtgggtcagataccagtgttcatgatggcagcttgggttgcacgattacttaatgtcccatatttaggcctagtggtaatacaggagctttttctcaaaataggaatcattatagtagaagagggtgtgrctttgctccagagacctgtggaccttcctactggggtttgtcatagactccatataacatccctgtatgccacagacactgagcatcactggctctgttgagtcatcaagcccaatgggcaaggcagcctgcattacatcctggatctactccataaccttcttttgctctattctctactcagaaccaacagccttataggcaactgggaaaatgggttggagtggcgtacaataatagcacataatatctccaaaaattcaagaaagccctcaaatcattgtgtcttctttttagtaatacacaatacgaggtatagtaacttatatttcattttgaaggagatatcctgacgtgttccaaa

SEQ ID NO: 221082 - DNA, 612 bp, Homo sapiens
atattgagtcacttgctcatgcaacttgtacattctgaacctacttgagcctaatttcttatatgctgtttccactgaatgaaggattgctgttatccatattcaacattatgctttggtgggtcagataccagtgttcatgatggcagcttgggttgcacgattacttaatgtcccatatttaggcctagtggtaatacaggagctttttctcaaaataggaatcattatagtagaagagggtgtggctttgctccagagacctgtggaccttcctactggggtttgtcatagactccatataacatccctgtatgccacagacactgagcatcactggctctgttgagtcatcaagcccaatgggcaaggcagcctgcattacatcctggatctactccataaccttcttttgctctattctctactcagaaccaacagccttataggcaactgggaaaatgggttggagtggcgtacaataatagcacataatatctccaaaaattcaagaaagccctcaaatcatygtgtcttctttttagtaatacacaatacgaggtatagtaacttatatttcattttgaaggagatatcctgacgtgttccaaa

SEQ ID NO: 221083 - DNA, 471 bp, Homo sapiens
aatcctgtaacaggcaatgaggttggctttaaatgaagtgagggggagtcaatattcttttttctctggtatagaartggtctcccccttggtagaaacaaaggaatcatctataatattttatagtgctggagaaataagctgttcccagcaaggcagagactacttgggagcaaaacaggagatggtacacgaagagagcatagggcaagacagccacagaggggcgtttgaggaattctgtgcaccatgctctctttccgttatttctgaatcaccagtaaagctcattaaaagttacagactaatactttcggctatgctctaaaaacctcaagatatatacacaaagacattcagtgcagcattgtctataaaaacaaatgagcaaagattctatcaataagggactattaaatcaggtatgctacagccatatgattgaacgttatgcagtcataaaacatgagc

SEQ ID NO: 221084 - DNA, 560 bp, Homo sapiens
gatttctcttggtgactgatcatagtgcttactcagcccttctctacgtggaattcttttttttttttttttttttttgrgatggagtttcacactgttgaccagactggagtgcagtggcacgatctcggctcactgcaacctctgcttcttaggttcaagcgattcttctgcctcagcctcctgagtagctgggattataggcgtgcatcgccacacctggctaatttttgtatttttagtagagatggggtttcaccatgtttcccaggctggtctggaactcctgacctcaagggatccacctgctttggcctcccaaagtgcagggatcacaggcgtgagccaccacacccagctcctaagtagaattctgtacttcattataggaaacagcattccagctacttatattctacattttccttttacggaataaattctttgtgttcacattatttcagaaaagaaatacaaccgtttgtatgaaaagtaaaggagtttttggatgaagaatagaaagccactgaattaggttgacttatttgaatgaaatgaaa

SEQ ID NO: 221085 - DNA, 589 bp, Homo sapiens
gctgtctgccacatctgcgtcctcctaggctgtggcttccttaatatgttctttaaattgacttactgccttttttatttaaatgcatttcttttaaaatgagactttatattactcctataaatggaaaatcacaggattcatggactagttatgtatatttttataatgcacattaaaatgaatttatcaccataaaaaatgagaaatgtttacccatagaccatgtacaattattccacatgctgtcagtgtgtttcatccctctctttgggagttggctttgcacctgtcctggtttcaccaaatcacaatgttatgaatggctatcatttattatggtaggaaatcgtcaaayggcttctgtgcacaatcaaatgcagactccccagcatggcctcagggccctcctggcccctggtttcctgatctccagttcctctggtcttgctactcttagacaaaggaggacttctcttggttttctgcctacccagccagaagatcccaggccatgggcctgtggagccaaagttcttaaccactgcactgtgtcacctttctatgatgtcaggcctcagcaaggctt

SEQ ID NO: 221086 - DNA, 531 bp, Homo sapiens
gctgggggtaccctggggagatgccgcaagagtgaggagtaagggagctggaatccactttccaggcaaatgtaactgacgttcactccgaggctggctccgtttctgcctctgtgagatggggcacagcagcrgccggaaggttatttgtgtgcaaagccaacagcagatgtgaaagtgctttggaaggcagggatcttgggaggaacgtgggctgggattgtttgaccgggatgtgaggtcggccgcagacacagccccgattcttcccctggggcctggagggagcctgggccactcgaggggatgagaagtggggatctcccctttgtgcctccagtggggaggcaggggccgtgtcctctcagcttccagctcagtcaaaccacggccttctgcccaccaaagagaacttgagacctgtgctaatcattagggtaacttgtccggcccaagctcttgttgggcaacttgtgaagtcacggctgtcactggttcctcctttcctggtgactcacagtgtggtcttgg

SEQ ID NO: 221087 - DNA, 531 bp, Homo sapiens
gctgggggtaccctggggagatgccgcaagagtgaggagtaagggagctggaatccactttccaggcaaatgtaactgacgttcactccgaggctggctccgtttctgcctctgtgagatggggcacagcagcagccggaaggttatttgtgtgcaaagccaacagcagatgtgaaagtgctttggaaggcagggatcttggraggaacgtgggctgggattgtttgaccgggatgtgaggtcggccgcagacacagccccgattcttcccctggggcctggagggagcctgggccactcgaggggatgagaagtggggatctcccctttgtgcctccagtggggaggcaggggccgtgtcctctcagcttccagctcagtcaaaccacggccttctgcccaccaaagagaacttgagacctgtgctaatcattagggtaacttgtccggcccaagctcttgttgggcaacttgtgaagtcacggctgtcactggttcctcctttcctggtgactcacagtgtggtcttgg

SEQ ID NO: 221088 - DNA, 531 bp, Homo sapiens
gctgggggtaccctggggagatgccgcaagagtgaggagtaagggagctggaatccactttccaggcaaatgtaactgacgttcactccgaggctggctccgtttctgcctctgtgagatggggcacagcagcagccggaaggttatttgtgtgcaaagccaacagcagatgtgaaagtgctttggaaggcagggatcttgggaggaacgtgggctgggattgtttgacygggatgtgaggtcggccgcagacacagccccgattcttcccctggggcctggagggagcctgggccactcgaggggatgagaagtggggatctcccctttgtgcctccagtggggaggcaggggccgtgtcctctcagcttccagctcagtcaaaccacggccttctgcccaccaaagagaacttgagacctgtgctaatcattagggtaacttgtccggcccaagctcttgttgggcaacttgtgaagtcacggctgtcactggttcctcctttcctggtgactcacagtgtggtcttgg

SEQ ID NO: 221089 - DNA, 531 bp, Homo sapiens
gctgggggtaccctggggagatgccgcaagagtgaggagtaagggagctggaatccactttccaggcaaatgtaactgacgttcactccgaggctggctccgtttctgcctctgtgagatggggcacagcagcagccggaaggttatttgtgtgcaaagccaacagcagatgtgaaagtgctttggaaggcagggatcttgggaggaacgtgggctgggattgtttgaccgggatgtgaggtcggccgcagacacagccccgattcttcccctggggcctggagggagcctgggccactcgaggggatgagaagtggggatctcccctttgtgcctccagtggggaggcaggggccgtgtcctctcagcttccagctcagtcaaaccacggccttctgcccaccaaagagaacttgagacctgtgctaatcattagggtaacttgyccggcccaagctcttgttgggcaacttgtgaagtcacggctgtcactggttcctcctttcctggtgactcacagtgtggtcttgg

SEQ ID NO: 221090 - DNA, 372 bp, Homo sapiens
caatgcctatgagtgatgagacgttctagagcaggagcaagcaaaagagcagaggggtgtcctggaagctgtgcgctcggcccaggttgtctccaggctgtggtcctcagttgactccagtggggggttatcttcctgcaccccgaaagagtcctctctccttcccagaaagggcagggcctgggggctttcccataggctagctggcaacaggtgtgmtgataggaccttgagcatctggatggaaaaagagaagctgtggtccagatgtgtcaatagcccatgctggctgtcatctggacccagccatgggtgacgactctgcacatcatgagctatttgtggacttggcccctctagggagggttaaat

SEQ ID NO: 221091 - DNA, 487 bp, Homo sapiens
gcgtgggctctttgcctaattcctcatcctgtggacttgtagtagtgctgcttgagtgctctcctgacatggctgctggcttcccctgcgggagtgatgtaagagataagcaaggaggaaaggcagtgtcttttaagacttctatcacttctgccacattctgttagttagaagtgcgttgctaagtccagcccacactcaaggggagaggaaataaacaccacctttagaagggaggcgtctcaaagaatgtgtggtaatatttgcaaatgaccacagaggcagtctcacctagggcgagttcccctgcatcagtcattggtttcaagctgcccctaggggagggaatgtaacctcccaggtattagtggattaggtggtccctgtcagccaaaatgatcttstagagaagagcataggtgtggcccatgggcagctgacacctgccagctggggatgggccggtgcgccagcctgggaagcagat

SEQ ID NO: 221092 - DNA, 596 bp, Homo sapiens
aggtttggaaacttactcaagatcacacagctggaagatggcagatgaggaatgacccattgagcattgagctcagtgagtcctgacccattgagcaggaagtagaggcttagagaggataagtggcttacttagagtcactgacatgttcatggcagagctgggatgtgactcagatctccctgattccagagcttgtgctcttaccaccaccacacgccccaagcctgtgggtgagccagacaccctggggatatgtgaaaggtgaccagaggagggaaggactgactctgcccagaagggtcagtgaggcacagatgacagctgggagcgctccagggagacaagggtgggggagggcattccaggggagagaagagcacgagcaaatcacagaggcgtgaaatagggtgccacgttctggcagtttatagctgacccattgagcaggaagacagcctccgcttctctctgcccccacccccatcctggttcagaaagcctgattgtccccacttccctccgcccccctcctgcaggctmctgggatatggacaagaaaggagcttgtctttcctggctctgctggagtcctg

SEQ ID NO: 221093 - DNA, 404 bp, Homo sapiens
aatgaaattctgcagcgcgtgttcttttgtgagcacttctttctcccaacgttatgtttgggagcttcgtctgtgtggttgcgggtagctaactcattttttccattgctgtgtatactccattgtatgaatctaccacaatgcatttgcctgttttcctgcaaaataacatttggattgattccagcttggggctgtyacaaataaggcagccatggccaccaggctccgtgctgggtgtccacacacaggcacctgtgctgctcagttgatctttctgaatcactgtcttcaatgatttacttctcacacccactccaggaggtggatggattcttctctcccttctacagatgaggaaatgttacagatgaagtaacatggccaggccaggatcccacagg

SEQ ID NO: 221094 - DNA, 467 bp, Homo sapiens
gtaggctgagcaaagtgcccacaaggaggaattgagaggttttagccaggatctcaaaactgggtcaagacagcacttgtgaaatatgatattacagcatgwcagctagagaggcccttcaggtccctatatagtcaatctttttgggccagggatgtcaagtccagatcttggaagaagagtatggacagtcagtcttccaggccagtcaagtggttctccatctttacagagaatcagccctccagagccatgtatagagagttctttggcttcacagtcagagtgtcctccagaaatgggattggataatctggagccaggagggcaggacagtgcaaaaccggtgaggaagggtcttccagaaacaggttgcagaattccaaaactaggagcagaaagtcctctggagccatggagttttccctagagccaacaatgttgtgggactataaatgtctctggaa

SEQ ID NO: 221095 - DNA, 538 bp, Homo sapiens
tttggaggggttaaggtgtaggctgagcaaagtgcccacaaggaggaattgagaggttttagccaggatctcaaaactgggtcaagacagcacttgtgaaatatgatattacagcatgtcagctagagaggcccttcaggtccctatatagtcaatctttttgggccagggatgtcaagtccagatcttggaagaagagtatggacagtcagtcttccaggccagtcaagtggttctccatctttacagagaatcagccctccagagccatgtatagagagttctttggcttcacagtcagagtgtcctccakaaatgggattggataatctggagccaggagggcaggacagtgcaaaaccggtgaggaagggtcttccagaaacaggttgcagaattccaaaactaggagcagaaagtcctctggagccatggagttttccctagagccaacaatgttgtgggactataaatgtctctggaacattttccagagccaaggacagagatatttccagagccagatacagcaaaattt

SEQ ID NO: 221096 - DNA, 485 bp, Homo sapiens
ctcaccagacctttgttcttgttgacttgttgcccagtcaagggaaaggcaggacggtctgggctttggggaagggaaggggacagatttagagaacaattgggcatgagcttccataatgccagcaggggaggttagacagctggagggacttccagaaaactacaaaggcataggcactgggccgagtgaatgaaaagggcagttggactttgctctacccacccctctgtctgtccatccatcaacacaacacattgatgcccatcagtgccaggttctgggcttggcgatggctcagtcccctgagcgcctggaatcacagcccagtctgggaggcaggcacacaaatcctgggtttcaatgggattccaraaaaaggcaaaactcaccctgccaggtggggtgcttgactcaggcagggaagctttgtggaggagggggtctttgagctggtgtttgggaggatggccaaaagcttgttt

SEQ ID NO: 221097 - DNA, 569 bp, Homo sapiens
tctggccttcctggttgcttggagtaattgcccttttagataggaaagctgcctgcctgggggtagagaaggggtgagggtacgtggaggccagaaggagctgggccaaggtttttgtctgagcaggagctcataagttcttgctctaagcctgggcattcatgcccctcttctaattcctgccagctcccaacttggagtcttttctccaggagccatcagaggccatgccagtcccaaagcaggcaagarcactgttgcagctcctgcaggaccaccttcctttcctgttcatccctcagctcctccaagatgagagcattagatgagccgggcccaggctctgcctttaactcacccctggccaggtcactgcctctctgagtctcacggtcttgacatctctatgtcctcaagctgtagcctggtggctggcacaaagtacatacttagtaaatgttgggtgagttgaaatgaatggtgaagttgtttatttcactggagcaggggttgagggaagagtggtagagagagatcatgttgttggggctgtcaaaataagatcacat

SEQ ID NO: 221098 - DNA, 369 bp, Homo sapiens
agttcctaatttctctgtgcccgtttcctctctgataaagcaatgtgatgggcatatatctggtatgatctagccttgttcacttaggcagacttgtttccttccatccagtagttcrcactgtcatttgttcagtgcatttgttcattcttgctcttacccattcacaccattcgttactacattcattcaggcatcagttcatttgttcctgcatttgtcaatgcattaattcacacacacatctgggcatgatcaaccccactgttcagcctttttccagcctgtgggcagacagaccaggccccagaaagggctctgaacatggctggtagaaaacatgtgattcctcccatgtcacttaaaggt

SEQ ID NO: 221099 - DNA, 556 bp, Homo sapiens
atttttctcagctattgcaggagagtcatcttcctatttttcttaccaagtacatatgtttctgtgctcctttctatattgtgcttcgtaagtgtgaggatcaaaatgagctcattatatagcattggatccacaagccaagacattactaacactgatcaggagtactgtcatatgagggacccagaaaaacaagcctagaaccccttataagaggcacttttacaatccagggcaagacagatttccctgaataaacaaccctttctgactgagaagtcacagaatctaattacatattttaaaggaaaaatactgccaattaaatctcaaacytccatgtacaagatatgcaccaaaatagataagatagggattgagaattagtgaagtgaactgagaggtagaactgaaaaaccatccagaatctagagaaattttttaaaatagaacttaggattgcaaaatgtgaggaagaagcaccatgaacaaagttaaaaaaccataacttggaagaggatacctccaatacatacaaccaacaaaggttagctgg

SEQ ID NO: 221100 - DNA, 564 bp, Homo sapiens
tcaatagagaggattatgtaactcatgttttagttaggggaggtaacagtaattaatatgttatctgttaaattacataaacttttttttaaaaacctctagcattagtcaacaacaamaaaaaagtaacctcaatttatggctgaatatgcttgacttcacaatgccaagaaaggttgtgggctcatttattttttcagataactagacacatactatgacaaagctttttttagtaatattaccagggaactaatattctgaatttactgtgattggcacaggaaaatattaagagtgagagtgatcaggagtgattttaatgaaggtgaccagaaagcaactatatgattaccttttaaatagaatgctattgcaaatgtcaaactttaaatgggacatttggctttatacactaaaaaaaaaaaaaaaaaaaaaaaaaaaggcattagtagtttcccaccaagaccgctacaaataaattcagaacatttatagaaatccaacattcacacttccctgtaactctaacctattgaaattagatgtaaaaggaagaaaaaa

SEQ ID NO: 221101 - DNA, 471 bp, Homo sapiens
atcaattccacggggaaaaactctgtaggcaggcagtcctaaagaagcgtgtcaccgcggttcccaggaagcgttattcctctttgcgaacaactgaacagaatagctgctgcaraaagcatctccggaatatttgcaacccagagccgtgcgccccacacgcaatacaccggcaaagggttaatctagtggtgcctccagcgcggaaaagaactcaagatctaatacatccttaacgcgggatttttacaaaggccatagaagtattacctaaagttaatgccgtcactggctcacatcactcaagagctgtggagtaagaattgatagaaaccaccagctaagggggaaaaaaaaaatcaccgaagggaaagacaaataacaactctcgtccctcctcctcagcgtcaagaaaaggtggggatcgcaaaattaccgttaagttgtccgggtaaagacttttgggggagg

SEQ ID NO: 221102 - DNA, 558 bp, Homo sapiens
gaattctttcctggctaagaatagtcatcccccagtgcaacagcttctttgcagctgtataataaatggtctctggtttgttgtaaatcatggcattagtgcacattagtttgaagttatcctttagttctatcgactggtagtcattgttcttgaccttttctttcatagtrctaaaatcccttgggtgtttaatgatcatggagtagccaggagcaataaaatcagtcacaggaaatgaaaagaaagcacttgggtcttttctctgcaattgtctcatcagttgattcaaagcttcttgaaggggtgtctgttctacttcttcttgtttggctaaagagcttgtgagaggatctcacacgggcatgacactggaggtctttttctgcctcattctccacaaggtctcgatctcgcttctttttatcctccctaactctcctccgttttctctctttttcttcccctggatcctgcttctctcctttctttctctttttctgctttctgtccttgtatttgtcatgatcttattcgccttcgaagaggctggagtcg

SEQ ID NO: 221103 - DNA, 507 bp, Homo sapiens
tgtacaataagcagaatactatcatctaccttacagggacatgtaaacattgagtatatgcactaaagcacccagcgcatagatcagtcagtgatttccacttgtacttagaatgggggccctggatgaatgggcagtaacacacaggcccgtgaagctggtgggcgggacattgctctgcactgtgtcatgttgtagtctccgcgagtgaggctggttttcctctagcacagtttgttttactgaatggacagggctgttttgctcaaggagagtyacagaagaaagctcatttcatgaagcgattaggacacacaagattatgcctctgacaggtaagaaaaccctgacagcccattttttcccatgaagcaaagagttttgttgcatattgcatatttataaggtgaaggggccactggcttttataccttgagaagccaaaacaatgccagatgttaagattatgaacctgaatttcactttgggtttatgagttaaccagaa

SEQ ID NO: 221104 - DNA, 543 bp, Homo sapiens
gatgaaaacttccaccctcactttgattagcgtacactccaacatggtggactacttggccaaagatgrccctcatttgagcagtttgcacaagcctgtcacactaatcctgattccttagggggataacttcctgtgaggaaaactaagtttgttttgcagctgcatttcatgtttacatacagtttttacaagctgtgtgggcagcccaagcagcctcaggcaggtggtccagttccaattctgaaccattgcaaaatgagactctagacttcaaaaaagtcagggaaaggcaagacctgatccagaagtctgtgtcatctaagttaggccgatagttctgagatgcacttctttctaatcattagccagtttatcataaagtggatctaaagttgtgagggccgtgtaagagctactcttcctgacagcgttgctgaatggtggagccagccagaaggttctgaggcattagaatattttcctttgggtttttacaagacaaggaaggcacctacctgcttcaggtgccatatagactgt

SEQ ID NO: 221105 - DNA, 543 bp, Homo sapiens
gatgaaaacttccaccctcactttgattagcgtacactccaacatggtggactacttggccaaagatgaccctcatttgagcagtttgcacaagcctgtcacactaatcctgattccttagggggataacttcctgtgaggaaaactargtttgttttgcagctgcatttcatgtttacatacagtttttacaagctgtgtgggcagcccaagcagcctcaggcaggtggtccagttccaattctgaaccattgcaaaatgagactctagacttcaaaaaagtcagggaaaggcaagacctgatccagaagtctgtgtcatctaagttaggccgatagttctgagatgcacttctttctaatcattagccagtttatcataaagtggatctaaagttgtgagggccgtgtaagagctactcttcctgacagcgttgctgaatggtggagccagccagaaggttctgaggcattagaatattttcctttgggtttttacaagacaaggaaggcacctacctgcttcaggtgccatatagactgt

SEQ ID NO: 221106 - DNA, 583 bp, Homo sapiens
tgttcaaataaagcttatagaactttatttatttatttatttttggactggaaatgaagtttggtttttacatgcaagcctttgttcttctgacattttgctttatgtgcacataagtttttaaaaaatcctttgtccatcatgtgaatgctagttagatagaataagtttattttcttaaaagattccatctttgcccactatgtttggagtctatgtggtctatgatgacttagaaacatgtatcgacccccaactcatcccatgctccaaatatcattgcttcggctacaaagattttaaaatcagttaatcatggaagttaaaaacaaagtgtgtgcataagtctaccagcatccagcatcaggacaagtacccatttggcaagagacattcttgaatgcaggaagatcatttgaggtattcytgatttaattatttccttctattttgagatgaattttaattttgcagcactgtggttttgtttatacgttttctgtgattcgcagatacagtaaacaagaaaccattgttttatatatttgaccaacaggccttcttattctgcttatccgtcaat

SEQ ID NO: 221107 - DNA, 599 bp, Homo sapiens
aggagaaatataaaatatatatatttcacacacataaacatcgtgaacttattacgttgtattataatttctatttatttgtcattttccttggataaagtatcagctctttcagggcagctctttattaattactaaaccccaacaccatgggccgtgctaatgtgcagtcaatttcaataaataaactgatgaaataactaaaattaaacatgaattttctgtgaccatcccatctaaataaatatgaatgtgaggcagtagaggcacttgtgtataattaccgtgcaccagctttcaaaaccgaatcttgctctagctcctcctaactctcaccccagagttccccaccagatgttaaaggccaaaccaaccattaaaaagacaagtgacactcatgtctctatgtaaataaaaattgtgaaagtactttaagggagttccccttgaatatttctttcctttaagggacaaaagcaaattgactgccagcgaagagccctttagtccakaaattcttcatagcaaaggcacagaaacttgaaacaatgtcctcagtgctctcccttttgtctgtggcaatagaatggggattctgt

SEQ ID NO: 221108 - DNA, 579 bp, Homo sapiens
cttttcacacaattgtgctgataatgacacatatacagaatcactaaatccagttaagctaataggtgcttaatagaacaaaaacaacaacaaaatataatttaaaaaatagaaggacaagaaaaaccctaaatggcatcaaaagttgatggggtagccaggcaaaatagtttgaagctgtagtcccagctattcaggaggctgaggcaggaggatcaccttctggccaggaatgtgagtccagcctgggcaatgtagcaagatcccatctctaaaaaaataagttatggagaatgtgagacttgggcagaactttgaaagatgtatawcactttgggaatgggcgtgggggacacaggtaggagaattacaacccaagttccagaaagggactcatttagtgtgatgtgtatataaggatgaatgcatgtatgtgtgtggggagagtggatataagattggaaagatggaaggaaaagctagggctacagtttatcagtctctcctccttctccttcttctttagtacaagcacagacaacaagaaactctttaatgccctacagaaggacagtttca

SEQ ID NO: 221109 - DNA, 604 bp, Homo sapiens
gaatcgacttcaggttatatcaatttaatttcagtgagatataaaagcattacttctctataactctattttctctttccctttgtcatgctattgttgttgtacatattatacctatatgtgtgacaaaccaaagaatacattgttataattataacaatgtatcattattactataacaatgtattgttgcatttgtataactgtaaagaagctaaaagaaaaaaggggaacaagtatatattttttgaatttattgttttaaccttcttatttatcatttcttgttcctttgtccatgtggatttgagttaccatctgatgtaatcgccttagtgcaatccagctttgctccacttgcctcctttgtgccaytattgtcaaatatattacatttctctatgtcataggcctaaaaataaaattatgtacatattgttttatacaataactttttaattaaattaggaggagaaaggaaaagaaatatacattgataccatctttatatttgcattattaccgtcactggtgctctttgtttctttatgtggattcgaactcctccctgggctcaattgctcttatcccaaataaatccctt

SEQ ID NO: 221110 - DNA, 557 bp, Homo sapiens
cttcctcgggaaactgaccctcaagtgaggaacagaaactcatcagatcaccacatccaatcatatgccagacccctcatccattgctttcttacttcttcctagtatttttttcctgccttccctggtatgtaaaccccaattttagtttgtcaaggagacaggtgtgaaactttacctcccactctccttgactactgcacccaattgccttctttcctggcaaaactcatctcagtgattggcattctgtgtggtgagcagcaggacctagaccaaacccctggcatgttggtaagaatttatttaaaacatttcataataaatggaacagctatgtccactatgtaaatgaggcaattaactccttcaagaagttttctgtagtttattctacattatcaaaatttatagcctattaactgtgaatcaaagatggaaagaggaggatgaattgctctgaattgataaatttactccctctaaagaagtacatctaactgccgttatattaaggataaggatgaagacwgatttaactgcttcctgctgacagg

SEQ ID NO: 221111 - DNA, 558 bp, Homo sapiens
gtattagctggaatctaaaccccataggtttgtgggaatccggagaactctccatgatttcttcaagtcaccagggcttccttcttcgtggtcctctccacttctaaatactcacgttttgctcccatgactcatagcacaaaactcgatyctttcactagtttcagcaacgacagcaacaacaaatccacttaatgtaaataattcgctagtttcataacttgactaaagacaaaacaaatagattaattctttatttactggacctcctgagaaataactgagcacagcctcgaaaatagaacgtaaatttcattagcccggtttctaaaacacgtgcagtgtggaaggagtagaggaagtgaaacaagctgttgctctcctcctatctttctccaaattttacctcaggaccctgatggcaggaagaaaaggacactatgtgacttcagtgcctaacaacacagtcctggaagtttatgctgttgatactatagcaaacattgtaatcattttgtgagggattggattcttccctttatactgtagcataaacat

SEQ ID NO: 221112 - DNA, 558 bp, Homo sapiens
gtattagctggaatctaaaccccataggtttgtgggaatccggagaactctccatgatttcttcaagtcaccagggcttccttcttcgtggtcctctccacttctaaatactcacgttttgctcccatgactcatagcacaaaactcgatccttycactagtttcagcaacgacagcaacaacaaatccacttaatgtaaataattcgctagtttcataacttgactaaagacaaaacaaatagattaattctttatttactggacctcctgagaaataactgagcacagcctcgaaaatagaacgtaaatttcattagcccggtttctaaaacacgtgcagtgtggaaggagtagaggaagtgaaacaagctgttgctctcctcctatctttctccaaattttacctcaggaccctgatggcaggaagaaaaggacactatgtgacttcagtgcctaacaacacagtcctggaagtttatgctgttgatactatagcaaacattgtaatcattttgtgagggattggattcttccctttatactgtagcataaacat

SEQ ID NO: 221113 - DNA, 585 bp, Homo sapiens
cacagcctcgaaaatagaacgtaaatttcattagcccggtttctaaaacacgtgcagtgtggaaggagtagaggaagtgaaacaagctgttgctctcctcctatctttctccaaattttacctcaggaccctgatggcaggaagaaaaggacactatgtgacttcagtgcctaacaacacagtcctggaagtttaygctgttgatactatagcaaacattgtaatcattttgtgagggattggattcttccctttatactgtagcataaacattgatatatcaatgtgtttagccatttagaaattataaagaaggggagtgtaactgacatttcattgaacatacctttcatatattacaaaattggtctattaatgctgaaataaatgttcacatttggccactctttatcaccatcactgtagtgaaacaggtattctttactcaatagattacgatacacataagtaaacaaataaaatctaaagaaaagatttcctacatttatattttatgccatgcatataaacatgtgaaattcaaaattcaaaacggaggaaaacaggatggttaatcatgataca

SEQ ID NO: 221114 - DNA, 226 bp, Homo sapiens
ttggtgagagcttcacagtgcagcggcgaggtgagcgcggcgcggggcggggcctgagtccctgtgagckgagaatctgagtgtgtgtgtgtgtgtgtgtgtgtgtgtgtgtgtgtgtgtgtgtgagagagagagagagagagagagagagagagagcgccatctgtgagcatttagaatcctctctatcctgagcaaggagttctgcgggcacaggtgtgtgtgt

SEQ ID NO: 221115 - DNA, 226 bp, Homo sapiens
ttggtgagagcttcacagtgcagcggcgaggtgagcgcggcgcggggcggggcctgagtccctgtgagcggrgaatctgagtgtgtgtgtgtgtgtgtgtgtgtgtgtgtgtgtgtgtgtgtgtgagagagagagagagagagagagagagagagagcgccatctgtgagcatttagaatcctctctatcctgagcaaggagttctgcgggcacaggtgtgtgtgt

SEQ ID NO: 221116 - DNA, 226 bp, Homo sapiens
ttggtgagagcttcacagtgcagcggcgaggtgagcgcggcgcggggcggggcctgagtccctgtgagcggagaatctgagtgtgtgtgtgtgtgtgtgtgtgtgtgtgtgtgtgtgtgtgtgtgwgagagagagagagagagagagagagagagagcgccatctgtgagcatttagaatcctctctatcctgagcaaggagttctgcgggcacaggtgtgtgtgt

SEQ ID NO: 221117 - DNA, 582 bp, Homo sapiens
tattcctatcaagctaccaaaataatttttcacagaattaaaaaaaaattgtaaacttcatatcgaaccaagaaagaccctgaatggccaaagcaatcytaaacaaaaagaacaaagccagaagcatcatattacctgacttaaaattatactataagctacagtagccaaaatggcctggtactggtataaaaacagcatatagaccaatggaacaaaatggagaacccagaaataaagccatacacctacagccatctgatctttgacaaagttgacaaatataagcaatgaggaaaggacttcctattcaatgaatggtgctgggatagctagctagccatatgcagaacaaggaaactggacccctatatttcaccaaatacaaaaaataactcaaggtggattaaaaatttaatgtaagacttcaaactaagaatcctagaagaaaacctaggaaatacctttctggacatcagccttgggaaataatttgtgactaagtcctcaagcaattgtaacaaaaccaaaaattgacaagtggggtctacttaaataaagagcttctgcacagcaaaagga

SEQ ID NO: 221118 - DNA, 582 bp, Homo sapiens
tattcctatcaagctaccaaaataatttttcacagaattaaaaaaaaattgtaaacttcatatcgaaccaagaaagaccctgaatggccaaagcaatcctaaacaaaaagaacaaagccagaagcatcatattacctgacttaaaattatactataagctacagtagccaaaatggcctggtactggtataaaaacagcrtatagaccaatggaacaaaatggagaacccagaaataaagccatacacctacagccatctgatctttgacaaagttgacaaatataagcaatgaggaaaggacttcctattcaatgaatggtgctgggatagctagctagccatatgcagaacaaggaaactggacccctatatttcaccaaatacaaaaaataactcaaggtggattaaaaatttaatgtaagacttcaaactaagaatcctagaagaaaacctaggaaatacctttctggacatcagccttgggaaataatttgtgactaagtcctcaagcaattgtaacaaaaccaaaaattgacaagtggggtctacttaaataaagagcttctgcacagcaaaagga

SEQ ID NO: 221119 - DNA, 582 bp, Homo sapiens
tattcctatcaagctaccaaaataatttttcacagaattaaaaaaaaattgtaaacttcatatcgaaccaagaaagaccctgaatggccaaagcaatcctaaacaaaaagaacaaagccagaagcatcatattacctgacttaaaattatactataagctacagtagccaaaatggcctggtactggtataaaaacagcatatagaccaatggaacaaaatggagaacccagaaataaagccatacacctacagccatctgatctttgacaaagttgacaaatataagcaatgaggaaaggacttcctattcaatgaatggtgctgggatagctagctagccatatgcagaacaaggaaactggacccctatatttcaccaaatacaaaaaataactcaaggtggattaaaaatttaatgtaagacttcaaactaagaatcctagaagaaaacytaggaaatacctttctggacatcagccttgggaaataatttgtgactaagtcctcaagcaattgtaacaaaaccaaaaattgacaagtggggtctacttaaataaagagcttctgcacagcaaaagga

SEQ ID NO: 221120 - DNA, 521 bp, Homo sapiens
ctaacttgtaattctggagtgaagtggtttcagataataacaggatctctggtatgactatcagtgtgtgtggctaaggtgaaagagaaaagccacctgagatatggatttcaaataactgagtagtcagatgttgcattgkttatccttggagatgttgaaatcactgaggatagtggcagatcttgaggtaggaagaaaggatgtgaacaggggccaaagtcattgataaatgaaggggagtggcccaaaggtaaatctaggaatgactagaagtgaaagaggggatataattgaatgaactcaaagcatcaggtttgggttttatagtttacacttttatttcagtagcataggaatttaatggtctgaaagcagaaatgggggcaaggaggacaccaaccctacccttcatcttgctctgaggacagaaaagaaaagccctactccaaagggctgcagtggtggcccaggtttcacttaaggtcagggatgaagggaactcttgatgacaaggctga

SEQ ID NO: 221121 - DNA, 521 bp, Homo sapiens
ctaacttgtaattctggagtgaagtggtttcagataataacaggatctctggtatgactatcagtgtgtgtggctaaggtgaaagagaaaagccacctgagatatggatttcaaataactgagtagtcagatgttgcattggttatccttggrgatgttgaaatcactgaggatagtggcagatcttgaggtaggaagaaaggatgtgaacaggggccaaagtcattgataaatgaaggggagtggcccaaaggtaaatctaggaatgactagaagtgaaagaggggatataattgaatgaactcaaagcatcaggtttgggttttatagtttacacttttatttcagtagcataggaatttaatggtctgaaagcagaaatgggggcaaggaggacaccaaccctacccttcatcttgctctgaggacagaaaagaaaagccctactccaaagggctgcagtggtggcccaggtttcacttaaggtcagggatgaagggaactcttgatgacaaggctga

SEQ ID NO: 221122 - DNA, 543 bp, Homo sapiens
cagataagtcctgttcccactcacgtgctccaattttttgttgtgtcaaggaagttccatgttttgattctttggaaaggttaacttgttttctgattaaagtcattacttctattttccttttgtcttttggagttctctggcytttcaggtctccaagagcagagaattagatgatgatcataatgtaggaccaggcccttcacctttcttctgcattgaaccttttttgttatgagctaagtggtatgacctcaaggaagacaatttttagctgcagtggttcatttgggactctcgggacatgtcacaacgcaagcatttgcatgattctttagagcaaaaggaaaccagataacatatttacaatggacagctttccttaagccaaaagaagaagctgaggaaagaaacaattcagaaagtttccaatctgttgagtcttcttttaaaacaacctcagctgtctctctctctccaaagacctcctcctttctatcaaactctatttcttccccttacaatctgactttatcctggcct

SEQ ID NO: 221123 - DNA, 369 bp, Homo sapiens
tggaattcagacctcctgattcccactgaatatattaagatggcactcacagtgcttcttaagatgagaaagatgattcctgggcaaccttctccttttgggaccattccattccctgctccagcccaacctttctcctgccaattgttgctatttattggcatgatgcttcccatgctgagtatgttcacyacatgatgccctcaatatttgccagctgcaattgtaggcccctcagttctttgcagagcaacctttcccttcctactgtgccaagttcctattcacacaaggccgtgcagctgggaaccagatttgtcctaaaagactttttcctcagcttagtgacactgctctctaactagaagc

SEQ ID NO: 221124 - DNA, 602 bp, Homo sapiens
cacttcccccaactcctattcaacacaaagaggtcctagaccctccaattctttcaattctggagaggttaagcttgaccagagccacaaaaaagtcacattctatttctataactgcagtgccttgtattttttgactggtcytatccaacacttcttaaaaatgccatacctgagtgaaattaaccctaaaaaacagacatccttttggagccaagaaattgaagcatttcacagataccaaaactgattaatggtacctgtgacatagtgataagagctacgaaatgctgatgacatactagatgacaataaggccctggctgaagcatttcttatgcattgtgtttcacaataatcatataaaggaagtgttagttatactcctcattttacagatgaggaaaatgaagttcagagaggtaagtgacttgccattggtcacacagcttgtaagtagaagaccaagacttgagcccaggtgggacggctccaaagcccatgcccttacccattatgtgatatggcctcctggcactgggcaagggacaacagaatacatagtcaacccaattcctgctccccagggtcacgctcttgct

SEQ ID NO: 221125 - DNA, 602 bp, Homo sapiens
cacttcccccaactcctattcaacacaaagaggtcctagaccctccaattctttcaattctggagaggttaagcttgaccagagccacaaaaaagtcacattctatttctataactgcagtgccttgtattttttgactggtcttatccaacacttcttaaaaatgccatacctgagtgaaattaaccctaaaaaacagacatccttttggagccaagaaattgaagcatttcacagataccaaaactgattaatggtacctgtgacatagtgataagagctacgaaatgctgatgacatactagatgacaataaggccctggctgaagcatttcttatgcattgtgtttcacaataatcatataaaggaagtgttagttatactcctcattttacagatgaggaaaatgaagttcagagaggtaagtgacttgccattggtcacacagcttgtaagtagaagaccaagacttgagcccaggtgggacggctccaaagcccwtgcccttacccattatgtgatatggcctcctggcactgggcaagggacaacagaatacatagtcaacccaattcctgctccccagggtcacgctcttgct

SEQ ID NO: 221126 - DNA, 527 bp, Homo sapiens
gaagcttcagctttgaaattgctctatggaggcttaaaagatccaaattgcaaattacagaagctcaagtaagttgtaactgttagttttcattcggcaggaatatttgaaaaatatgcaactcaagacggatgtcttaggatcaaaacaacatttcaagggagtcatgaagaggaggaataaatgtggcagtccctaaagttgcttctgtgtaacaagtttaggaagacaattttcattttaagtkgaaacattatcaataacaataactcatgcttagcaattattgagtactaagcattgtgctgagtatgcacaaattcttttaatctgcacaacagctgtgagagatccagattattactggtattttcgcagatgaggaaatggaagaggtccaatatagttagggtaaaaaaatatggcaaaggcccaattcaaaactcaaatgtgtctgacttcaagtccaccataatcacattaattaaaaaaaagtgttatacatgttagtcaaggttctccagaga

SEQ ID NO: 221127 - DNA, 667 bp, Homo sapiens
tggaattggggaaagcccacagggagaaggaaacttctagctgaactgggtaacaattttgactgaatgcaaagtttcctggacagaatccatgggagggagcaaacggggagtgtggatacaagcaaggtaactgtggcaggcagggaagcatgaaccctgaaagccctacttgctttctcagtggggaggcttgtagcctggggcaagttctcagccctgctcaccagctgcctgggaacaaactcagtgcagttggcgggggcatggtggaagtaagactggccttttgggctgtgtgggagcccggtgagacctgtcactgctgctttcccccacttccctggtgacctgtatgacacagcagagacagccatagtctgttgcgggaagtcagggaccccaaacggagggaccggctaaagccatgacagaagaatgtggattgtgaagattttatggacatttattagttccccaaattaatacttttgtaatgtcttatgcctgtctttactgcaatctctaaacataaattgtaaagatttcatggacacttrtcacttccccaatcaatatccttgtgatttcctatgcctgtctttgctttaatctcttaatcctgtcagccaagaaggatgtgtatcatctcaggaccctgcaataa

SEQ ID NO: 221128 - DNA, 522 bp, Homo sapiens
agttagatctcagtgaggttgtgaatgaacttctctccttctttaagctttaaaaaaattgtttgaatgtatatatgaatgaaaagaaagaaaatttatatttcttcttatctccataaagaaaatgtttctaaatacgactctctgtgagatttgagttgatataatacctcttttagaaataaaatgattaaaaatcactacaacagattaattaaacaaatatttattgaactttgtgttgctttccattgctgctgtaacaatttccrcaaacagggtggcttaaaacaacacaaatatattatctgatggttctgtaagttagaagtcagacacaggtctcactgggttaagatcaaagtgttgacagggctgtattctttctgcaggctttagaggagaatccattttcccctcttttccagtttctagtggtcacctgcatttcttggctcatggcctcttcctccatcttcaaagccagtaatggtgggttgagtccttctccacattgcatca

SEQ ID NO: 221129 - DNA, 604 bp, Homo sapiens
gcgacggccactctaagaaaaaaatgcagtgaatggttcctgagttattccaaaaataagagcccaaccccagttttggtttcaagccaaaacacacctttgcctggaaagggaagacaagacttttacacagcctcaagatccacaaaaattaatcagtcttggtgctgcaagaacaccttcagaggtcagaaagttttcttatcctcttatcccaggtgggcttaagacaagggctgtgttgtataagatgaccagccatcctggtttgcctgggattgtgggtttccagggatgcaggactttcagtgctaaaactgtgacagtcccaaactgagatggttggcatcctagtgctagtttcccctatgtgacaacacagtcaagctaattgggctcaaatgttagtaaatatacatgtttcaaatccttgaaattcttcaggtgctgcattttacaatttattattacttttctttttttctagggaaaatgaycctaaaatgttcagcatttgatcgttaatttatccattcaattaaatatgtattgcaagctttatatgccctgggctgggtatggggttgcaatggcaagtaagcgc

SEQ ID NO: 221130 - DNA, 438 bp, Homo sapiens
gaattccagactgacatcagtcagcccaaatgactaggccacttgattaggatttggaaccatgaaaagtaatgaagacagtgggcatcttcctgcctttggtcaccctgctacagggccacagcaagcagctacacsagatccagaggtttccaacctggcttcttacggacaaaactattcaggatcatccgtatacagatgaggtcagatggcttagaagtggcagaaccgggattgaaactttgctccaactcttctttgcaatgcaccagtggtctgagagtcaggagggatacccaggaaagctctccctttgggtcttgatttctgcatctgaaaaatgcctgacttacaccaggccttcttcaaatttgacatttagtgatttgttacggtatcacggctcctaatatttgattgagggtcttggcattt

SEQ ID NO: 221131 - DNA, 508 bp, Homo sapiens
actggggagatggtggggtatatcataattgcccagaggaaagtctagaggggctaggttaggctgggggcagaggaaaggagagattcaagaaatgcaatcaaggatagaccacgactctccgagtgtgaggtgggtttcagccaccagggaagttcttagggaggaggtggggcacctcttccatggcagtaagatgagggagttcccttcctgttgattctatttgctctgtaagataggagaggtcattcactgkgtgttagatgctggggtgaagatggggagaaaggaatggatgatgtctgggaaccccagatgaaatgcctggggtgcaggaatggagaatgaaggcatgggaggagcacgcattaggaactcttgcaggagcagctctccctgttcacaccctccacttccctaagtctcctgtaggagaaaagtgctaagtacacattgctaaccagaccatagggaaagagcctgggttgctctgggatctcagaag

SEQ ID NO: 221132 - DNA, 408 bp, Homo sapiens
gcctcattaggagcaatggctggaagtagactgcctagcttcacattagggctgacctcgtattagggcatgtgaccttgggcacattacttgccctctctatccttgatttcttcatatgtaaaataggggaaaacagtagtacctaccttggactgttatgcctattaactgacaagtgggctaagtgtctggcacctaataaatgctcaataaaaagtattattatatatagacmatttccccataaccagagccctctaactcaaggaagcaggctatggggacttcctccagttctgggtggttcttcatcacaactatccctcaaactcatagctggctgttggtcacctctttccaacatgtacaccattctgccttgcactggagttagctgctggcttg

SEQ ID NO: 221133 - DNA, 474 bp, Homo sapiens
ctgacatatatgtgaacaactgattttgataaagatamaaaggcatctttttcagtagagaaaagatggtcttttagaaaaatgttggctgaaacaattggatatacaaaaccaaaaaaagaatctcaattcatacctcactatgtataatatataaatatgaatttaaaatgaggccaggcacgttggctcatgccagtaatcccagcattttgggaggccgaggcaggaggatcacttgagcccaggagtttgagaccagcctaggcaacatagaaagaccctgtctctgccaaaaaaaaaaaaataataataaaaatagccaggttgggaagctgaggtgggagaattgtttgagccagggagattgaggctgcagtgagccataatgataccattgcactccagccagggtgacagagtgagaccctgtttcaaaaaaaaaatatatatatatatacatatttattttat

SEQ ID NO: 221134 - DNA, 507 bp, Homo sapiens
tgattttgataaagataaaaaggcatctttttcagtagagaaaagatggtcttttagaaaaatgttggctgaaacaattggatatacaaaaccaaaaaaagaatctcaattcatacctcactatgtataatatataaatatgaatttaaaatgaggccaggcacgttggctcatgccagtaatcccagcattttgggaggccgaggcaggaggatcacttgagcccaggagtttgagaccagcctaggcaacatagaaagamcctgtctctgccaaaaaaaaaaaaataataataaaaatagccaggttgggaagctgaggtgggagaattgtttgagccagggagattgaggctgcagtgagccataatgataccattgcactccagccagggtgacagagtgagaccctgtttcaaaaaaaaaatatatatatatatacatatttattttatatttatatataggaccataaacatatatgtaaaacctaaatataaaacttcta

SEQ ID NO: 221135 - DNA, 498 bp, Homo sapiens
tgattttgataaagataaaaaggcatctttttcagtagagaaaagatggtcttttagaaaaatgttggctgaaacaattggatatacaaaaccaaaaaaagaatctcaattcatacctcactatgtataatatataaatatgaatttaaaatgaggccaggcacgttggctcatgccagtaatcccagcattttgggaggccgaggcaggaggatcacttgagcccaggagtttgagaccagcctaggcaacatagaaagaccctgtctctgccaaaaaaaaaaaaataataataaaaatagccaggttgggaagctgaggtgggagaattgtttgagccagggagattgaggctgcagtgagccataatgataccattgcactccagccagggtgacagagtgagaccctgtttcaaaaaaaawatatatatatatatacatatttattttatatttatatataggaccataaacatatatgtaaaacctaaatata

SEQ ID NO: 221136 - DNA, 558 bp, Homo sapiens
ctcacttagaagtcactcactcccatcctctggcaatccactttctttctctataaatttaccagaatataaattctcgatatttcataaatgaaatcatacagtatgtgtctcttagtgtctggtttcttccacttagcataatgttttcaagtttcatctatgttgtggcctgtatcagtatttccttcttccttatagctgagtaacatttcattgtatggatatatcacagtgtttatccattcatcagttgatgcatgttctggttgttcccagctgaagtactttttttgatgacttgaatagacacagattttaccaaaagtattaactatgcttaaaagatatgcttaaaagcaaaaacaatattcttagcacacatcaccatacttaaattttattgagtttttaattatgtgaagtcttcagaaatgcattccttataaaatcagacagttctgygtaggcggccaggtttattaacagtcttcccataatactcttgatcatatcacagattgcctggctataatgaagggcattaaggcttgtttc

SEQ ID NO: 221137 - DNA, 558 bp, Homo sapiens
ctcacttagaagtcactcactcccatcctctggcaatccactttctttctctataaatttaccagaatataaattctcgatatttcataaatgaaatcatacagtatgtgtctcttagtgtctggtttcttccacttagcataatgttttcaagtttcatctatgttgtggcctgtatcagtatttccttcttccttatagctgagtaacatttcattgtatggatatatcacagtgtttatccattcatcagttgatgcatgttctggttgttcccagctgaagtactttttttgatgacttgaatagacacagattttaccaaaagtattaactatgcttaaaagatatgcttaaaagcaaaaacaatattcttagcacacatcaccatacttaaattttattgagtttttaattatgtgaagtcttcagaaatgcattccttataaaatcagacagttctgcgtaggcggccaggtttattaacagtcttcccataatactcttgatcrtatcacagattgcctggctataatgaagggcattaaggcttgtttc

SEQ ID NO: 221138 - DNA, 542 bp, Homo sapiens
agtaaaaagctacacttggaagagagccaagtgggtaacgtgagagagtccagtgtgtggtttgaccttggacttgggggggggtcttacacattggcatgctggcagggttgcgttactgttcccctgattcttccctttgggtgcgttgtctgcatgcacagtggtctgccagcacttgagaggggcgcatgtgcagtgtgtttactgaagttgtgcacatgctcacttgaggcatttttttcccttaycagtccggcgttcctacaggagggacatatagccgttacactccgccattttgcctctgagtgcgcatgcttgagcccacttgcccaattcctgagatcttgtcaggaagctactaatcaccggtttcaggtgttttctattgggaaactgcctttccctagccctggctttgaccaattctcattttagagagatagtataataaccacctgatgatcacctaacattccgagtgagaggggtccctctcctgccctgctcatgtctgactaactacctactgtaacatt

SEQ ID NO: 221139 - DNA, 569 bp, Homo sapiens
tagttagcctattcctattgatggatatttaggttgctttcacaatttttgctattagagacagtactacagagaaaatctgtgtgtgtgtgtgtgtctatatataccttatgcattcatactagtatttctttagcataaaccactagaagtggaattaccgtgtaatttgcatttaaaattttgataagtgttaatgtacacttcaaaaagcttctaaccaatttatatttcagaagggaagaaaatacccaatttccaactaggtactattattttgaatttgtacatatggtagaaaaaaatggaatcttgttttaattttgaatttttatagttgttggacagttgagtattgcatatatatttattggctatttygtatttcctctttaaattgccagttcatattggttttgcctattatctgttagtcccaaggactattagatgcctaaaataattctgggtcttattctaagagcttatatttgaaaaacatttttattatcttttgcagaatatctaatgataatatcatctgtgattatgtgaagttttccatttta

SEQ ID NO: 221140 - DNA, 311 bp, Homo sapiens
taattactgggttcagtattaatcaatcatgactggtacaaatgccataaatgtcactgcaagtgaggaaatgccaaacttctaagacccagtgattccaaccaatatcatatgatatttcatttttaaaaattcaattattaaaatatattatactgatggctacayaccatgtatctgaaaaaaatattagactgagattttatttatatgagccaagaaaccaaaataaaacacccatatttctaatttgagagatcaagcagtgctaaaaatcacataactgtaggcagttctttaatcaatcagtc

SEQ ID NO: 221141 - DNA, 311 bp, Homo sapiens
taattactgggttcagtattaatcaatcatgactggtacaaatgccataaatgtcactgcaagtgaggaaatgccaaacttctaagacccagtgattccaaccaatatcatatgatatttcatttttaaaaattcaattattaaaatatattatactgatggctacacaccatgtatctgaaaaaaatattagactgagattttayttatatgagccaagaaaccaaaataaaacacccatatttctaatttgagagatcaagcagtgctaaaaatcacataactgtaggcagttctttaatcaatcagtc

SEQ ID NO: 221142 - DNA, 409 bp, Homo sapiens
gcatgaacattgtcatcaaacacaagccaaaaaaaaaaagagatatgtggtatacaaaaagattgatgtaacatattctcaaaaattaccaaagtgtgttgtaaagtaagcgagtaagcagctcaaatccatgatgtaattgcataggggcaaaaattcaagaaaaggaagttgcttgacattttagtttttaaatgggtaaaaaggttttagttatttrtaacttttaaaaatcagtatttaaaaattatgatggtaactacattcataccacagtaggtagaacaacaatgtgaagtccaaattgtagattcttttaaaagatacactgtattgttactttcagattttatactaactagaaattgactcaagtttattggaaccttactatatgtcagtcactggg

SEQ ID NO: 221143 - DNA, 363 bp, Homo sapiens
aatgtcaagtggctgtaatcagtctcccctcctgtagcttcctttgttcttaggagtaagaccaaaattcttaagcctacgaggcctacatgatttgcctctgtttagatctctccatttctcactgtgctcctcctatcattttctcaaaaatgccaaattcttgtgccaccatcctatgcccagggcctgattcagtgatttcaaaggcaggttcatccatgccgtggtggtagtgctaggaaatgtttttccaatgaatggatgaagttatgaccactaagattcttgactaagaagacctagtmcaagtttctcacagttttgagatctattatttattcattggatatatgtggagta

SEQ ID NO: 221144 - DNA, 489 bp, Homo sapiens
ttgatagaatatattatatgtataaattacatatatgttatataatatataacatcatttcatatatgtataaatatgtgatataaaattatatattatttatatgtaactttatatagatataaaagtttatctctgcttatagatatttccaaattaaaatgctgctagctttatgttaacctcagaatattttcaaactgtaattgcaaaatagtgtctactatgggagtgtaaaaacactaaataaggcaytgcttcttaattcctcagttgttgacatttcagaagcactaagatcaaagcctgatgttttgccggtatatgagatcaacaacaaccagttgtaagcaatgactgtgatataagacatttatgcagccaaaagacacatgacaaaatgctcatcatcactggccatcagagaaatgcaaatcaaaaccacaatgagatactatctcacaccaattagaatggcgatcattaaaa

SEQ ID NO: 221145 - DNA, 571 bp, Homo sapiens
cctccagctcaaataccccttttcttcccaccacttgtaggtttcactctagaagcctattgctcctaggccacaggcctgcacagcatattactgtgctaaataccgtaggtaatagtaacacaaggtaagtatttgtgtattaaacatataaaagatacagtaaaaatatagtattataatattatgggatcactgttagatatgtggtcggtcattggctgaaatgctgtttgttgtcagtgcatgacyatatatgtaaataattttaaaactgtgtcaattatgattagtccactattattttccattttgccttgttccctctccaaaaacaaaaggattgaggtcagaattataataggttgtcaagagcaacaacaacaataacattgctaggtaacaagtacagcactttcatgacctagttacttgctgggacacttacatgttgtttaactgacacaacaaatgtctgacggatgtaccattatcatgtccattatacagctatggaaactgcaacatagagtagttaatttgtgacaagtcacataggtgttaactggta

SEQ ID NO: 221146 - DNA, 581 bp, Homo sapiens
tgattataatgaaatggaggtgatgtggtgaaagcaaagggtgtggcagagtctaagaccacatggtatgatttyggttgtcttttagctattttgaatgtcactgttcttatctataatacagagataagtaagatatacagcatatgaaatgatttatatgaaattatgttgtgtttaatctgtactgtatatgtgtccttacagtacacaatattttctttatttgctcctaatgggcaatttatcaaaaaattaattgcaattgtgagccatgtaaagtcatctaaagaaaaaacagaaaattatcttgagctcattaattatcagctgtgcattgactgtaaaagctatagattctcttaattaataatggaatcattagatcacaatatcccttgtcagcaatggtaagctccacctgttttctacttctaaaggtgccttcaaagtcaaataagataagaaaaaaagaaggatctcgaatagatgactgctaaaaatttaaaattacatggagaaaccgaactaatatgaaagcatgtttgtaaagtattttatgtggtatttattataatgat

SEQ ID NO: 221147 - DNA, 581 bp, Homo sapiens
tgattataatgaaatggaggtgatgtggtgaaagcaaagggtgtggcagagtctaagaccacatggtatgattttggttgtcttttagctattttgaatgtcactgttcttatctataatacagagataagtaagatatayagcatatgaaatgatttatatgaaattatgttgtgtttaatctgtactgtatatgtgtccttacagtacacaatattttctttatttgctcctaatgggcaatttatcaaaaaattaattgcaattgtgagccatgtaaagtcatctaaagaaaaaacagaaaattatcttgagctcattaattatcagctgtgcattgactgtaaaagctatagattctcttaattaataatggaatcattagatcacaatatcccttgtcagcaatggtaagctccacctgttttctacttctaaaggtgccttcaaagtcaaataagataagaaaaaaagaaggatctcgaatagatgactgctaaaaatttaaaattacatggagaaaccgaactaatatgaaagcatgtttgtaaagtattttatgtggtatttattataatgat

SEQ ID NO: 221148 - DNA, 581 bp, Homo sapiens
tgattataatgaaatggaggtgatgtggtgaaagcaaagggtgtggcagagtctaagaccacatggtatgattttggttgtcttttagctattttgaatgtcactgttcttatctataatacagagataagtaagatatacagcatatgaaatgatttatatgaaattatgttgtrtttaatctgtactgtatatgtgtccttacagtacacaatattttctttatttgctcctaatgggcaatttatcaaaaaattaattgcaattgtgagccatgtaaagtcatctaaagaaaaaacagaaaattatcttgagctcattaattatcagctgtgcattgactgtaaaagctatagattctcttaattaataatggaatcattagatcacaatatcccttgtcagcaatggtaagctccacctgttttctacttctaaaggtgccttcaaagtcaaataagataagaaaaaaagaaggatctcgaatagatgactgctaaaaatttaaaattacatggagaaaccgaactaatatgaaagcatgtttgtaaagtattttatgtggtatttattataatgat

SEQ ID NO: 221149 - DNA, 581 bp, Homo sapiens
tgattataatgaaatggaggtgatgtggtgaaagcaaagggtgtggcagagtctaagaccacatggtatgattttggttgtcttttagctattttgaatgtcactgttcttatctataatacagagataagtaagatatacagcatatgaaatgatttatatgaaattatgttgtgtttaatctgtactgtatatgtgtccttacagtacacaatattttctttatttgctcctaatgggcaatttatcaaaaaattaattgcaattgtgagccatgtaaagtcatctaaagaaaaaacagaaaattatcttgagctcattaattatcagctgtgcattgactgtaaaagctatagattctcttaattaataatggaatcattagatcacaatatcccttgtcagcaatggtaagctccacckgttttctacttctaaaggtgccttcaaagtcaaataagataagaaaaaaagaaggatctcgaatagatgactgctaaaaatttaaaattacatggagaaaccgaactaatatgaaagcatgtttgtaaagtattttatgtggtatttattataatgat

SEQ ID NO: 221150 - DNA, 435 bp, Homo sapiens
taaatacagtgcagactacacaaaataatgtatatgaattattttgtctcacaaaaatacttttgaagtgtttatagaagacttcttggctatgtgaaacaaagggaacagttacaggtgatgccaaattactgtgtgtggattgctggcattgaccagtgtaaatgtttagcttgagtggwtatcagtaacatgggatatcttgaaaaatagtttgtaatgttatattaaaatagcactctgataagaaatcatctaatttccaaaatgtcagatctattcctagggagtaattctcacactgggagcatttcattgtgtcaataatatttaaatgagtcactgttatttgtaaacctttcattgtgatagcacaaaataatgtgtgaaaaacatgattatatggttaccattctctttaatagggtttgcagc

SEQ ID NO: 221151 - DNA, 435 bp, Homo sapiens
taaatacagtgcagactacacaaaataatgtatatgaattattttgtctcacaaaaatacttttgaagtgtttatagaagacttcttggctatgtgaaacaaagggaacagttacaggtgatgccaaattactgtgtgtggattgctggcattgaccagtgtaaatgtttagcttgagtggttatcagtaacatgggatatcttgaaaaatagtttgtaatgttatattaaaatagcactctgataagaaatcatctaatttccaaaatgtcasatctattcctagggagtaattctcacactgggagcatttcattgtgtcaataatatttaaatgagtcactgttatttgtaaacctttcattgtgatagcacaaaataatgtgtgaaaaacatgattatatggttaccattctctttaatagggtttgcagc

SEQ ID NO: 221152 - DNA, 577 bp, Homo sapiens
tcatatagtctcatgaggatcactaatgatgacagaaagcaagtatatagggatgatgggttctgtaaatgtaccattcttcagggaaacacggggaattgtaaaattaggtcaagttgttgtgctaagaaggtggttattgcatatatacttatctcagcagctaagggactgcttccaaaatgactacccagttaagctcagcccacacattgacacttaactgacaagttggcacatgtaagtggacatcttgcatcyacatttagtacatatttagttccgtgagtatattagctcttaaactctgttttcaagcccctcctgaaccaagcctcaggcgttagttctcctccattcctccatggcaatcatgaggaatgtttgacaagctcgtggacagaaaacctgtcagtattttggacagagattcatccaaataaaacaggaaataatagagacaagctgaagaataaatgtttaaataattttaattgattagaacttatttcaagcactagaagagagaaaagtaagagtttatgcattatatacatatgtgtaggggtgtgtgtgt

SEQ ID NO: 221153 - DNA, 618 bp, Homo sapiens
ccagtgagagtccacatttaagatgtaaatcagagtttaagttatggtttaagaaacaacaagaacaattttatacatcgttaaaaatcatattatccttcgcaatwtattttaattcaaatgtacctctttaagatggagaaggaggttttttttttctgacaaatttagagattatccttttttcagtttttaaatttgcatcatgtatgcttacagggtttctgcttttaaatctaactttgacaaacgttcttatttcttatacaattttttaaaactaattccactttttaaaaaaatccgtttttattttttcacaagttttgtgatattttactctgttgactaggattggggctatcattcctacctttttaatttcacagacatgtaaagttcttggtattttccttccaattgtacttcaatatatttttgaaataacttattttgctcaatatatgtattattgattcaattaacattttttattatttttgatcatatagaatcagaaaattgtaatgaatcccaggaaatcacccagtcaagaaaaagtatagagactaatacctaccacattttaaaatatttttattttaatttttgtgggta

SEQ ID NO: 221154 - DNA, 444 bp, Homo sapiens
agtcccatcctttgaaatgtgtcataactgaaatgagaacattagggcctgagcatagagcattatctattaaaggtgattttaattaaaggcattctctttttaacctaaaattgcttggttattaaagagtatagtggtccttgatgtttaactagtgtttgaaaacagttacattttatctgataagaatgtttgtaataactgaacagaaggtatttaaattgtgaataatgcctaacagccaatacctgtaagttcatggtttctatcattttaaggtaaaaatataaagacaagctaagtgaatatgttcacaatatgtttccatgtcccttctttgtatgactatttaaaaatatgarcaatgacttaaggcatcactagcccatgaataccaatgtgattatattaacagtagtaatccaaatatcagtgtcactt

SEQ ID NO: 221155 - DNA, 544 bp, Homo sapiens
ttacagtagaatttcatgctagtaatatagtatatttaaatgttggagtatttgcatgatgttgaaaaattcatatggaataagtaaaaataaattctgacctaaatgaacctcaggaattatccattttgtaagcctttcctctaagatctggaatgcaacaaggatgctaacttttaccattgttactcaacataatacaggaactcccagctagagcaatcagacaagaaaaagaaataaagktcatctaaattggaaaggaagaagtagaattatccttgtttgtagatgatatgatcttatatttggaaaaacctaatgactacacacacacacacacacaaaaaaaactattagaactaacaaacaaatcctttaaatttgcaggattgtgcacatgtaccctaaaacttaaagtataataatagtaaaattaaaaaaaatcagtagcatttctctatgccaacagtgactgatctgaaaaaagaaatttaaaaaggaatgccatttacaataccagaaataaaattaaatactttgg

SEQ ID NO: 221156 - DNA, 397 bp, Homo sapiens
atgctaacttttaccattgttactcaacataatacaggaactcccagctagagcaatcagacaagaaaaagaaataaagttcatctaaattggaaaggaagaagtagaattatccttgtttgtagatgatatgatcttatatttggaaaaacctaatgactacacacacacacacacamaaaaaaaactattagaactaacaaacaaatcctttaaatttgcaggattgtgcacatgtaccctaaaacttaaagtataataatagtaaaattaaaaaaaatcagtagcatttctctatgccaacagtgactgatctgaaaaaagaaatttaaaaaggaatgccatttacaataccagaaataaaattaaatactttggaattaacttaaccaaagaa

SEQ ID NO: 221157 - DNA, 544 bp, Homo sapiens
ttacagtagaatttcatgctagtaatatagtatatttaaatgttggagtatttgcatgatgttgaaaaattcatatggaataagtaaaaataaattctgacctaaatgaacctcaggaattatccattttgtaagcctttcctctaagatctggaatgcaacaaggatgctaacttttaccattgttactcaacataatacaggaactcccagctagagcaatcagacaagaaaaagaaataaagttcatctaaattggaaaggaagaagtagaattatccttgtttgtagatgatatgatcttatatttggaaaaacctaatgactacacacacacacacacacaaaaaaaactattagaactaacaaacaaatcctttaaatttgcaggattgtgcacatgtaccctaaaacttaaagtataataatagtaaaattaaaaaaaatcagtagcatttctctatgccaacagtgactgatctgaaaaamgaaatttaaaaaggaatgccatttacaataccagaaataaaattaaatactttgg

SEQ ID NO: 221158 - DNA, 592 bp, Homo sapiens
ttttcagtattctggattttggccattctaataagtacgtactgatatctctatgttgttttaagttgcttttccctgatgacatggtgagcatcttttcacatgcttatttgccgtgtgtatatattctttggtgaaatgcctgttaatgtctttggcccattttttaatgaagttgtttgtttcttattgtttagtttttgtttttctttgtatattttagataacattcctttgtcagatatctcttttacaaatattttcttacagtcactggcttgtcttttcattctcttgacagtgtcttttttcagctggaattttttattttaacgaattccagtttatcatttatttatttcatggatcatgcctttgttgttctatctaatgtcatcatcaaacccaagatcatctacattttcttctatgatatcttgtaagagtttcatagttttggcttttacacttgggtctgtgatatgttttgagttaacttttgttaagggtgcaagatttgtgagtagattcattttttcatttatttttgcatartaatgtctatttgtaccaggcaccatttgttggaaag

SEQ ID NO: 221159 - DNA, 554 bp, Homo sapiens
atatatgtatatatgtaaattttcatttctttgaaagaaggcatcacaatcatgggaaatgggtctaccttgtattttgtctatatcttcacattttatttattgtgtgataacaaaaactaaatatttttgtctgagaatgatggcaattaagtgaaaagtattaaacaaatgagtgtgcatcagcagaatgaaaagatgcattttaaaattcagtctgcaagaattctctttgaacttaactctaacatattcttttatcgttattggaaattgaatgcatggcttggcaaggatcatatcgtactataattggaaccaatggaactctaatttggcaaataggttyctttgttgagtaatggatcttttacaatatattattattggaacctgtaatgcattcctaattttaacttttcaggcgaggcaacctgatttctattttagggaacaagcagttacattccctgccagggtaaaaacctattaagaactattgcagaaaataaagaagattgttgtttgatttagtagtgatgaaaaagaaaatt

SEQ ID NO: 221160 - DNA, 456 bp, Homo sapiens
ttttgtacagtcctggagtccagaagtctgaaataagtttcactgtgtgaagtgaaggtatcttcagggctgctttcccttctgagactgtagaggagaatttggttccttttctgttcccagaatctagacctgcgtttcttggcttagggcctcttcctccattttcaaagccagcagtgtagcatcttcaagtctctctctctgcttctatcacattaaattctcctctctatggtaaaatctacctttgctccactgtttattaaaaacacttgtgattatatgtagggtccacccaaataatctccgctcatcttcccatctcaatatcttcmcttaatcatctctgaaaagtttcttttgccctataaggcaacattcaaacattcaaggattaggatgtcaaggattaggatgttgaccatgttttgagaccatcattccatctactac

SEQ ID NO: 221161 - DNA, 437 bp, Homo sapiens
agaattcggtataagaaaataaccaaggagtatgcccacttcttggagaagaatatggtaatttactcctggccctttaatctgcttcagcccccccgtcgtttgtaccttaaaggactaataaaaacaaataaaccaaaatggagagtaattgctcagcaagagattatttcccccttcaagcactctcaaccttggccaccaatctctatgtctcccctaatttagttctaatctctaagtcaaggtgaattatgtcctatgaaaatgaaaggatttggagaattgttgagccattttcaatattatctgagaaatcctaaagrctagtaaagatgtcaaaggacaagagattacctgttgttcatccaaaaattaagagggaataaattctcagagtaaactcaatgttaattcctgatagaaattattattat

SEQ ID NO: 221162 - DNA, 449 bp, Homo sapiens
ggaatttgtccatcttttctaggttttctattttgtgtgcatagagatgttcgtagtagtttctaattgttatttttatttctgtggggtcagtggtarcattccttttttcatttctaattatgttatttggatcttctctcttctttattagtatagcttatgttaagttgaggaattagtcttcaaattcttctcatttggcttcaaatcttccctcaggctgtttctaatgcactgcagagtttacatgaatagaatttatcatgaaatggacactcagcattaaaacatcaaaaaagttatgaaattcatttttatagttgcaggtctaaatgcatgctaattttgaagtacagtatatttgttatattaagaacaatttaagtacttttcatccatatgcattcttaattgccatcataaatatttgaaatggttttacccca

SEQ ID NO: 221163 - DNA, 457 bp, Homo sapiens
gtctgggatacaatttcttctcattagrtgatttagaggcctattgaaaaatacaaaatataccagtttaaaagccttagaagttcacttagaattttacatcattcaaattctttgtcatggcagtctactgttaatctcattctgaacaataatgtaaatagtaaaagtaaataaatttaaaaaggtaacaggcaaacatttgctgatctcttagcatgtgccaggctccgtactagtgcctgactcaaattttcttatttattcctaaatgaaggtaataaaactcagccccatattattgataaggaactgatgcctggaaaagctaactaacatggagggtaattcatgtggtaagtttagctgtgatttaaacgtaggcagactgattccaaacacactagtcttaaccactcattcatattatcagtaaaacagtgtgtgaaatttagtt

SEQ ID NO: 221164 - DNA, 457 bp, Homo sapiens
gtctgggatacaatttcttctcattaggtgatttagaggcctattgaaaaatacaaaatataccagtttaaaagccttagaagttcacttagaattttacatcattcaaattctttgtcatggcagtctactgttaatctcattctgaacaataatgtaaatagtaaaagtaaataaatttaaaaaggtaacargcaaacatttgctgatctcttagcatgtgccaggctccgtactagtgcctgactcaaattttcttatttattcctaaatgaaggtaataaaactcagccccatattattgataaggaactgatgcctggaaaagctaactaacatggagggtaattcatgtggtaagtttagctgtgatttaaacgtaggcagactgattccaaacacactagtcttaaccactcattcatattatcagtaaaacagtgtgtgaaatttagtt

SEQ ID NO: 221165 - DNA, 471 bp, Homo sapiens
aactcagccccatattattgataaggaactgatgcctggaaaagctaactaacatggagggtaattcatgtggtaagtttagctgtgatttaaacgtaggcagactgattccaaacacactagtcttaaccactcattcatattatcagtaaaacagtgtgtgaaatttagttggttttgrcatttccaatgagcaaactcttacacttctttacttttatatctattgatcacacttgttaagattgggaaaaatggttttatttaaagataaatctttgtctgaatcaatgttattatttagattaacaatgactgttcctttttatgtcacttggtacaagtactttttttcagttatttaaatagatttgatgtaagaagctatgaatacataagaaatggtcttataatttttattatgtgtgtatcaatgtccctaaattttggagacattcactacatcaacag

SEQ ID NO: 221166 - DNA, 476 bp, Homo sapiens
ttagagaaaattgatatacacatgctaaaagtgaaaattcttctgtcatagatatttacagctaaagttacagtatatgggcagacctctacacaccagcaatgtgtttcatgttggttgcagatattttgttttatattttatggtgtctttycctgcagtagaacaggtgatgcttgctctgtggggtatggatgcatttttctaatttccaaagtcagaatgttgtcaagatttttgatagggtacacacagttcacttttttctttacgcaaatgaatactatgaaatctgtgtagacatgacatacattcttactatttcttcaattttcgtttgttattccactataatattaggtattttgtacaaatgtgatattagttttataattaaatctggttatatggtaacttaaatggttacttattagatgaataaactaataaaattttctctttttaaattatgtgaa

SEQ ID NO: 221167 - DNA, 476 bp, Homo sapiens
ttagagaaaattgatatacacatgctaaaagtgaaaattcttctgtcatagatatttacagctaaagttacagtatatgggcagacctctacacaccagcaatgtgtttcatgttggttgcagatattttgttttatattttatggtgtcttttcctgcagtagaacaggtgatgcttgctctgtggggtatggatgcatttttctaatttccaaagtcagaatgttgtcaagatttttgatagggtacacacagttcacttttttctttacgcaaatgaatactatgaaatctgtgtagacatgacatacattcttactatttcttcaattttcgtttgttattccactataatattaggtattttgtacaaatgtgatattagttttataattaaatctggttatatggtaacttaaatggttamttattagatgaataaactaataaaattttctctttttaaattatgtgaa

SEQ ID NO: 221168 - DNA, 489 bp, Homo sapiens
tcttattgttaagttagttaatatttactagttgaagttattcttttggtccatattattgagtttccatttaactgtatttatttgcakatataagcttgttattggatcactacaaaatttctgtacatacacttctttaatttttacgcagtataaactaatatataagtgattgagaagattctgaaccagacagtcagagcagaataaaaattatttatatcagttgcttttattttatttccttgtttagtgaattaatcatattctatatatgttgtactgtggcaactgtgtttttccctaacccttgctctactatactggttgaagtattattatctgttttattttctcccctccaggaccagaaagtttacttttcttgttaacagatttgtagaaaatataagtaaaaattccatgtcactgtctgttaaacaagataattattttaaacgaaaaacttacttgttataatgccat

SEQ ID NO: 221169 - DNA, 536 bp, Homo sapiens
tgggcaaagaattttcgtgtaagaccacaaaagcaaggcattgcaagcmataatagctgaatgggattatatcaagctaaaaaccttttgcacaaaaaaggaaacagtcaataaaataaagacataacttaaatgggagaaaatgtttccaaactatccatctgacaaaagattaataaccagaatatataagaagctgaaatggctcaatagcaaaaagataataatctaattgcaaaatgggcaaaagatcctaaatgacatttctcaaaagaaaacatacaaatgaccaaaagtatattttttaaaaaaatgcttaacatcactaatcatcagaaaaatgcaaatcaaaactacaatgaaatgttttaccctagttaaaatggtatttataaaaaaataaagaatattgatgctagtgaggatgtggagaaaggggaacccttgcacactattggtgcaggtacaaattagtatagccactgtggataactgtatgaaggttcctcaataaatgaaaaaatcacaactacctt

SEQ ID NO: 221170 - DNA, 466 bp, Homo sapiens
gatgacagtgataatggtatttcattatacacataaagtaagagagaaaaacgtaacaaaacaagatatgaaagatgaatttaaacaatggattgtgaaagccttgctgyttgcttctgtttttaaaaatattttgctactttttcttggctgctgccgttgctacagttgtagtctgcacagaatgaagccttaatcacacagtcatgctgaaacatatttacaaaggtaaaattaatgggcttatcttaagcaagatgtctttctatggcatcattagcatgctttagatttttaaaataaatgtgtttttattcttccagtacatcagaattggaattggagtcatgtcaagatgttctcactggcaaagacaggaggaggttaaaatagctccttgtacggcagtaacctcgggagaaaaagaactaatagaaaataaatggcgggtatttttttttgaatc

SEQ ID NO: 221171 - DNA, 466 bp, Homo sapiens
gatgacagtgataatggtatttcattatacacataaagtaagagagaaaaacgtaacaaaacaagatatgaaagatgaatttaaacaatggattgtgaaagccttgctgtttgcttctgtttttaaaaatattttgctaytttttcttggctgctgccgttgctacagttgtagtctgcacagaatgaagccttaatcacacagtcatgctgaaacatatttacaaaggtaaaattaatgggcttatcttaagcaagatgtctttctatggcatcattagcatgctttagatttttaaaataaatgtgtttttattcttccagtacatcagaattggaattggagtcatgtcaagatgttctcactggcaaagacaggaggaggttaaaatagctccttgtacggcagtaacctcgggagaaaaagaactaatagaaaataaatggcgggtatttttttttgaatc

SEQ ID NO: 221172 - DNA, 466 bp, Homo sapiens
gatgacagtgataatggtatttcattatacacataaagtaagagagaaaaacgtaacaaaacaagatatgaaagatgaatttaaacaatggattgtgaaagccttgctgtttgcttctgtttttaaaaatattttgctactttttcttggctgctgccgttgctacagttgtagtctgcacagaatgaagccttaatcacacagtcatgctgaaacatrtttacaaaggtaaaattaatgggcttatcttaagcaagatgtctttctatggcatcattagcatgctttagatttttaaaataaatgtgtttttattcttccagtacatcagaattggaattggagtcatgtcaagatgttctcactggcaaagacaggaggaggttaaaatagctccttgtacggcagtaacctcgggagaaaaagaactaatagaaaataaatggcgggtatttttttttgaatc

SEQ ID NO: 221173 - DNA, 526 bp, Homo sapiens
tttagaataaattttccagaacataaaaaggataatgatggcattatgtaaatttcagaccaaaattttctgaattaaattatttttacatagataatggttcacttctgattaggaacaataaataaaaagtaatcttaacaatatgacaatacaacttagccttcttgcattatcktttttagtctaaatatttaattattataatttgcacaaaatcaaaattatagtgcaattcctttctttacaaaataatcacaataaagtattttaatcaagcaactgagcacatacaattattattctatgtccataaaatttttttgcagaaaacatttatataagaatttcagtagtcaaacattgagtagcaggaaaatactattaaattttaaaaaccaaacaagcattggaaacagaaaaatggatacaaagagaagcaagtattctcctgtatttataattgtggtactttacaatatatgtaatatatctttagaaagattaattgtcttttattctcaca

SEQ ID NO: 221174 - DNA, 526 bp, Homo sapiens
tttagaataaattttccagaacataaaaaggataatgatggcattatgtaaatttcagaccaaaattttctgaattaaattatttttacatagataatggttcacttctgattaggaacaataaataaaaagtaatcttaacaatatgacaatacaacttagccttcttgcattatcttttttagtctaaatatttaattattataatttgcacaaaatcaaaattatagtgcaattcctttctttacaaaataatcacaataaagtattttaatcaagcaactgagcacatacaattattattctatgtccataaaatttttttgcagaaaacatttatataagaatttcagtagtcaaacattgagtagcaggaaaatactattaaattttaaaaaccaaacaagcattggaaacagaaaaatggatacraagagaagcaagtattctcctgtatttataattgtggtactttacaatatatgtaatatatctttagaaagattaattgtcttttattctcaca

SEQ ID NO: 221175 - DNA, 590 bp, Homo sapiens
ttggaaacagaaaaatggatacaaagagaagcaagtattctcctgtatttataattgtggtactttacaatatatgtaatatatctttagaaagattaattgtcttttattctcacagaaattctatgagccaggcagaggaactgtttttgttcccrttttacttctgtaaaaactgagtctcagaataactgctccccagaagtatagaatgattaaaggtcagagacagagcctgcatattttcacatttgttacacttttttagctattgttgtccaagagtactcttacttttgagatactttctttatttcactgttcagaatttttatatttgtatgatttaacaaaataatcggtaaatttcatttttggggattaaaaattaggttgtggaagctacattaggttgtggaagttgtgccccatctgagacaaatcttggattaatcagtgattgattaaattattgaaagtttagttattcaaagaaattggcatagaagtacattaagctaagctttatctggtaagatggagaactaacatgatgtgggcttctttctgtgaccacaaccctggaaatg

SEQ ID NO: 221176 - DNA, 590 bp, Homo sapiens
ttggaaacagaaaaatggatacaaagagaagcaagtattctcctgtatttataattgtggtactttacaatatatgtaatatatctttagaaagattaattgtcttttattctcacagaaattctatgagccaggcagaggaactgtttttgttcccgttttacttctgtaaaaactgagtctcaraataactgctccccagaagtatagaatgattaaaggtcagagacagagcctgcatattttcacatttgttacacttttttagctattgttgtccaagagtactcttacttttgagatactttctttatttcactgttcagaatttttatatttgtatgatttaacaaaataatcggtaaatttcatttttggggattaaaaattaggttgtggaagctacattaggttgtggaagttgtgccccatctgagacaaatcttggattaatcagtgattgattaaattattgaaagtttagttattcaaagaaattggcatagaagtacattaagctaagctttatctggtaagatggagaactaacatgatgtgggcttctttctgtgaccacaaccctggaaatg

SEQ ID NO: 221177 - DNA, 590 bp, Homo sapiens
ttggaaacagaaaaatggatacaaagagaagcaagtattctcctgtatttataattgtggtactttacaatatatgtaatatatctttagaaagattaattgtcttttattctcacagaaattctatgagccaggcagaggaactgtttttgttcccgttttacttctgtaaaaactgagtctcagaataactgctccccagaagtatagaatgattaaaggtcagaracagagcctgcatattttcacatttgttacacttttttagctattgttgtccaagagtactcttacttttgagatactttctttatttcactgttcagaatttttatatttgtatgatttaacaaaataatcggtaaatttcatttttggggattaaaaattaggttgtggaagctacattaggttgtggaagttgtgccccatctgagacaaatcttggattaatcagtgattgattaaattattgaaagtttagttattcaaagaaattggcatagaagtacattaagctaagctttatctggtaagatggagaactaacatgatgtgggcttctttctgtgaccacaaccctggaaatg

SEQ ID NO: 221178 - DNA, 590 bp, Homo sapiens
ttggaaacagaaaaatggatacaaagagaagcaagtattctcctgtatttataattgtggtactttacaatatatgtaatatatctttagaaagattaattgtcttttattctcacagaaattctatgagccaggcagaggaactgtttttgttcccgttttacttctgtaaaaactgagtctcagaataactgctccccagaagtatagaatgattaaaggtcagagacagagcctgcatattttcayatttgttacacttttttagctattgttgtccaagagtactcttacttttgagatactttctttatttcactgttcagaatttttatatttgtatgatttaacaaaataatcggtaaatttcatttttggggattaaaaattaggttgtggaagctacattaggttgtggaagttgtgccccatctgagacaaatcttggattaatcagtgattgattaaattattgaaagtttagttattcaaagaaattggcatagaagtacattaagctaagctttatctggtaagatggagaactaacatgatgtgggcttctttctgtgaccacaaccctggaaatg

SEQ ID NO: 221179 - DNA, 391 bp, Homo sapiens
gagctcccattctagcaaaactagagttgaaaagagaccactgctaactcctttaaagycattttggagtcggccaggcagaatatgactcaacctagcttggaaaatgaggaaatagtgacaaatgcagaaagaccatctgaaccctaggcattctcctctaacccagctactccatacaatgagtgttaggatggtgattaaaactgagggagaccagtcttggtaaacagcaccacccaggacacatgaatacaccaacttttatggaggaggaaggcaaacaaagggtggcagaatccagttatttcctaaggagtccttcattctaaacacttctggtgggtcaatcttgagcctgattttagtgccatgtattcttaatcagcat

SEQ ID NO: 221180 - DNA, 379 bp, Homo sapiens
ttaaagtcattttggagtcggycaggcagaatatgactcaacctagcttggaaaatgaggaaatagtgacaaatgcagaaagaccatctgaaccctaggcattctcctctaacccagctactccatacaatgagtgttaggatggtgattaaaactgagggagaccagtcttggtaaacagcaccacccaggacacatgaatacaccaacttttatggaggaggaaggcaaacaaagggtggcagaatccagttatttcctaaggagtccttcattctaaacacttctggtgggtcaatcttgagcctgattttagtgccatgtattcttaatcagcataataaatcttactaggaaaaaataggcctcaaaggaattc

SEQ ID NO: 221181 - DNA, 379 bp, Homo sapiens
ttaaagtcattttggagtcggccaggcagaatatgactcaacctagcttggaaaatgaggaaatagtgacaaatgcagaaagaccatctgaaccctaggcattctcctctaacccagctactccatacaatgagtgttaggatggtgattaaaactgagggagaccagtcttggtaaacagcaccacccaggacacrtgaatacaccaacttttatggaggaggaaggcaaacaaagggtggcagaatccagttatttcctaaggagtccttcattctaaacacttctggtgggtcaatcttgagcctgattttagtgccatgtattcttaatcagcataataaatcttactaggaaaaaataggcctcaaaggaattc

SEQ ID NO: 221182 - DNA, 565 bp, Homo sapiens
aatcacacccctttttatgggaggaagtacagatttttgattcctgagtcctgtaaatacaagtagcacctcagactttacctagattgatatccctctttctccatttctcagcttgcaaaatggagtgggcaattgtttaaggggaaaagtgtatgtgctttcaaattccagttcacttctcattagtgaaatctgtggattggtgaatacaattaatctcctgaattatactttgcaaaaacaaccaacactttttcttagacacaatacaatgcaatttcatactaaagaaagaatattacctattagcataatcatgcccattattttaataacaataaatggatattcattatccatttttgtgctgagaatcatttggtgttttattcctttcctrtagacctgaaggtatcaaaatgatagcagtagtaaatagtaatctttgttgttagagaaagaggcaatggttttgattacattctggtttgaggtaatctgattgtgatagcatgtttggtgagagaaatttgtaatcaatttctttctaacattattattt

SEQ ID NO: 221183 - DNA, 557 bp, Homo sapiens
tggaagacagtcttttgattttttttttgaatgcacaaaatacatgttattccctgactctccttttgatggatagcccttttttgagcaatttacaatcattttctttttttgattatttatgaataaagttcaaattctcacatctaatattctaaatccttcataatttgtcccaacatttacttctaattgtatattcaaatattctgaaacaatcacattattctgtctaatgtatgcattctatacttctgaatatgttttctatgcttatcaccaaatttgcacttgtcttttgaataatccataatgcayttttcctcttccccatattattgaagagtatcacataatagaagctctattaacctttctttgatcatcatagtccacgatggcatctccctccttagaagatccccaatatatattgcatagcacttttctgaaagttgcttttttgtgtttatgtttcttatgttcagacttggatattaagtgacctgaagataaaagatctgtattctacatcttctgttcacacatagcactta

SEQ ID NO: 221184 - DNA, 557 bp, Homo sapiens
tggaagacagtcttttgattttttttttgaatgcacaaaatacatgttattccctgactctccttttgatggatagcccttttttgagcaatttacaatcattttctttttttgattatttatgaataaagttcaaattctcacatctaatattctaaatccttcataatttgtcccaacatttacttctaattgtatattcaaatattctgaaacaatcacattattctgtctaatgtatgcattctatacttctgaatatgttttctatgcttatcaccaaatttgcacttgtcttttgaataatccataatgcatttttcctcttccccatattrttgaagagtatcacataatagaagctctattaacctttctttgatcatcatagtccacgatggcatctccctccttagaagatccccaatatatattgcatagcacttttctgaaagttgcttttttgtgtttatgtttcttatgttcagacttggatattaagtgacctgaagataaaagatctgtattctacatcttctgttcacacatagcactta

SEQ ID NO: 221185 - DNA, 557 bp, Homo sapiens
tggaagacagtcttttgattttttttttgaatgcacaaaatacatgttattccctgactctccttttgatggatagcccttttttgagcaatttacaatcattttctttttttgattatttatgaataaagttcaaattctcacatctaatattctaaatccttcataatttgtcccaacatttacttctaattgtatattcaaatattctgaaacaatcacattattctgtctaatgtatgcattctatacttctgaatatgttttctatgcttatcaccaaatttgcacttgtcttttgaataatccataatgcatttttcctcttccccatattattgaagagtatcacataatagaagctctattaacctttctttgatcatcatagtccacgatggcatctccctccttagaagatccccaatatatattgcatagcacttttctgaaagttrcttttttgtgtttatgtttcttatgttcagacttggatattaagtgacctgaagataaaagatctgtattctacatcttctgttcacacatagcactta

SEQ ID NO: 221186 - DNA, 564 bp, Homo sapiens
tgaagataaaagatctgtattctacatcttctgttcacacatagcacttactgaggaactatacacatagcaattctataaagtagggagtgttttctagaaaagaagtgactatgtgttgatacrtctccttcaattttattaataaactttcatttacgaatatgtattaaaagtgtctttaggctctctttttatgtttgacccatttcgtggtaaatgtgaacagtggaacaagatagttgcagtgctaaacttagactaaagggaagaggaactcaggttctaggccagccctttagagtgaaccacaaaccactttcaccttcctcccatgggggctgggaaggagagtagaaggggaagtggcgatgagtccacaaaacaagtgaatgtgctcatgtgaaacaagactcctgcccatccatgtgctatgccaatgtaccaatactcaagactctggattcctctttaggagaaataaaaggtcctgagattgctttcaaggtctattcaaggccattccctacgccagcctttttgaaggtggactggtgtgtacaa

SEQ ID NO: 221187 - DNA, 564 bp, Homo sapiens
tgaagataaaagatctgtattctacatcttctgttcacacatagcacttactgaggaactatacacatagcaattctataaagtagggagtgttttctagaaaagaagtgactatgtgttgatacatctccttcaattttattaataaactttcatttacgaatatgtattaaaagtgtctttaggctctctttktatgtttgacccatttcgtggtaaatgtgaacagtggaacaagatagttgcagtgctaaacttagactaaagggaagaggaactcaggttctaggccagccctttagagtgaaccacaaaccactttcaccttcctcccatgggggctgggaaggagagtagaaggggaagtggcgatgagtccacaaaacaagtgaatgtgctcatgtgaaacaagactcctgcccatccatgtgctatgccaatgtaccaatactcaagactctggattcctctttaggagaaataaaaggtcctgagattgctttcaaggtctattcaaggccattccctacgccagcctttttgaaggtggactggtgtgtacaa

SEQ ID NO: 221188 - DNA, 564 bp, Homo sapiens
tgaagataaaagatctgtattctacatcttctgttcacacatagcacttactgaggaactatacacatagcaattctataaagtagggagtgttttctagaaaagaagtgactatgtgttgatacatctccttcaattttattaataaactttcatttacgaatatgtattaaaagtgtctttaggctctctttttatgtttgacccatttcgtggtaaatgtgaacagtggaacaagatagttgcagtgctaaacttagactaaagggaagaggaactcaggttctaggccagccctttagagtgaaccacaaaccactttcaccttcctcccatgggggctgggaaggagagtagaaggggaagtggcgatgagtccacaaaacaagtgaatgtgctcatgtgaaacaagactcmtgcccatccatgtgctatgccaatgtaccaatactcaagactctggattcctctttaggagaaataaaaggtcctgagattgctttcaaggtctattcaaggccattccctacgccagcctttttgaaggtggactggtgtgtacaa

SEQ ID NO: 221189 - DNA, 564 bp, Homo sapiens
tgaagataaaagatctgtattctacatcttctgttcacacatagcacttactgaggaactatacacatagcaattctataaagtagggagtgttttctagaaaagaagtgactatgtgttgatacatctccttcaattttattaataaactttcatttacgaatatgtattaaaagtgtctttaggctctctttttatgtttgacccatttcgtggtaaatgtgaacagtggaacaagatagttgcagtgctaaacttagactaaagggaagaggaactcaggttctaggccagccctttagagtgaaccacaaaccactttcaccttcctcccatgggggctgggaaggagagtagaaggggaagtggcgatgagtccacaaaacaagtgaatgtgctcatgtgaaacaagactcctgcccatccatgtgctatgccaatgtaccaatactcaagactctggattcctctttaggagaaataaaaggtcctragattgctttcaaggtctattcaaggccattccctacgccagcctttttgaaggtggactggtgtgtacaa

SEQ ID NO: 221190 - DNA, 481 bp, Homo sapiens
cacaaatgttagggacaggcctgaatagctaacttttttcttttatttcaagttgacttaatattataaaaaacattttattttttcctttaatagagtcaartatacagtttctgttttcatccagtaactttagcagagactttttctctctgctagtgaaagagaggactcaggtttagaggaaatttgctttttcagaacatttgatcttcgtaacacatcaagatgtatttagagaaaagaaaacacggacttagtactatttataaatagcttctttacccttactcctaaattaaaacaaaactaaaacctaggaaaagcacttgcattatacaaaatttatactttagctatttctacatttaaaaataaaataatataaatcaccaattttacgttttaagcaaaagtgtattctcaaactttatattattcagcaatacctattactctccaagtatatgcatgtatcatt

SEQ ID NO: 221191 - DNA, 444 bp, Homo sapiens
acaaatgttagggacaggcctgaatagctaacttttttcttttatttcaagttgacttaatattataaaaaacattttattttttcctttaatagagtcaagtatacagtttctgttttcatccagtaactttagcagagactttttctctctgctagtgaaagagaggactcaggtttagaggaaatttgctttttcagaacatttgatcttcgtaacacatcaagatgtatttagagaaaagaamacacggacttagtactatttataaatagcttctttacccttactcctaaattaaaacaaaactaaaacctaggaaaagcacttgcattatacaaaatttatactttagctatttctacatttaaaaataaaataatataaatcaccaattttacgttttaagcaaaagtgtattctcaaactttatattattcagca

SEQ ID NO: 221192 - DNA, 481 bp, Homo sapiens
cacaaatgttagggacaggcctgaatagctaacttttttcttttatttcaagttgacttaatattataaaaaacattttattttttcctttaatagagtcaagtatacagtttctgttttcatccagtaactttagcagagactttttctctctgctagtgaaagagaggactcaggtttagaggaaatttgctttttcagaacatttgatcttcgtaacacatcaagatgtatttagagaaaagaaaacacggacttagtactatttataaatagcttctttacccttactcctaaattaaaacaaaactaaaacctaggaaaagcacktgcattatacaaaatttatactttagctatttctacatttaaaaataaaataatataaatcaccaattttacgttttaagcaaaagtgtattctcaaactttatattattcagcaatacctattactctccaagtatatgcatgtatcatt

SEQ ID NO: 221193 - DNA, 395 bp, Homo sapiens
tttgcctaatacagaattctggattgacagttcttgttttgcagtacttgagaaatatatcacttccttytggccaccattatttctgacaggaaatcattgtcattcaaattgtttttcttctggagagatgaagcattgttttacctcactgtttccaagattttttcttctgctgaagttttctgaaattgacctgtttctttgttgatttttttgtatgtgtcctgtttcagattttctcatttcttgaatctgtagttgtatgtcttttgccaaactcgaaaacgttttggacattattttttcaaatatatttttagcccaacccacttttgcctttccttctaggactctgatgacatgaatagtagattttttgctgtagtcttata

SEQ ID NO: 221194 - DNA, 395 bp, Homo sapiens
tttgcctaatacagaattctggattgacagttcttgttttgcagtacttgagaaatatatcacttccttctggccaccattatttctgacaggaaatcattgtcattcaaattgtttttcttctggagagatgaagcattgttttacctcactgtttccaagattttttcttctgctgaagttttctgaaattgacctgtttctttgttgatttttttgtatstgtcctgtttcagattttctcatttcttgaatctgtagttgtatgtcttttgccaaactcgaaaacgttttggacattattttttcaaatatatttttagcccaacccacttttgcctttccttctaggactctgatgacatgaatagtagattttttgctgtagtcttata

SEQ ID NO: 221195 - DNA, 395 bp, Homo sapiens
tttgcctaatacagaattctggattgacagttcttgttttgcagtacttgagaaatatatcacttccttctggccaccattatttctgacaggaaatcattgtcattcaaattgtttttcttctggagagatgaagcattgttttacctcactgtttccaagattttttcttctgctgaagttttctgaaattgacctgtttctttgttgatttttttgtatgtgtccygtttcagattttctcatttcttgaatctgtagttgtatgtcttttgccaaactcgaaaacgttttggacattattttttcaaatatatttttagcccaacccacttttgcctttccttctaggactctgatgacatgaatagtagattttttgctgtagtcttata

SEQ ID NO: 221196 - DNA, 525 bp, Homo sapiens
cttctcacttagtttactttgacacctaaggaatctggtggagaaggacggggcacattgtaactacctggyagagaagaaagttctagattcccacacggccttctctgatatcacccagacattgataggcggcagggcctgttagtttgtgtgtgtgtttaaattacacattaccaatagtatcactttgcataaacctatactaaactaaaagcacggaccccacagaagatatgtaattaaagttatcttgtagtatgcaggtctttttcacagatgcattcagtgtgtggtttaaaaggaagttaaaagtttagttctagttaccatgctagaagaacttaatatgtaaaagatgacatcatcaaagacagtgaaagtcctctttaatgtctcaaggcttttcattgtgtatcacgaaattttgattatctgtttcttttcagtaaatatttagtctatttttctaagtttaatatattaggattttcattttcattaatccttagtgtttgtactact

SEQ ID NO: 221197 - DNA, 525 bp, Homo sapiens
cttctcacttagtttactttgacacctaaggaatctggtggagaaggacggggcacattgtaactacctggtagagaagaaagttctagattcccacacggccttctctgatatcacccagayattgataggcggcagggcctgttagtttgtgtgtgtgtttaaattacacattaccaatagtatcactttgcataaacctatactaaactaaaagcacggaccccacagaagatatgtaattaaagttatcttgtagtatgcaggtctttttcacagatgcattcagtgtgtggtttaaaaggaagttaaaagtttagttctagttaccatgctagaagaacttaatatgtaaaagatgacatcatcaaagacagtgaaagtcctctttaatgtctcaaggcttttcattgtgtatcacgaaattttgattatctgtttcttttcagtaaatatttagtctatttttctaagtttaatatattaggattttcattttcattaatccttagtgtttgtactact

SEQ ID NO: 221198 - DNA, 525 bp, Homo sapiens
cttctcacttagtttactttgacacctaaggaatctggtggagaaggacggggcacattgtaactacctggtagagaagaaagttctagattcccacacggccttctctgatatcacccagacattgataggcggcagggcctgttagtttgtgtktgtgtttaaattacacattaccaatagtatcactttgcataaacctatactaaactaaaagcacggaccccacagaagatatgtaattaaagttatcttgtagtatgcaggtctttttcacagatgcattcagtgtgtggtttaaaaggaagttaaaagtttagttctagttaccatgctagaagaacttaatatgtaaaagatgacatcatcaaagacagtgaaagtcctctttaatgtctcaaggcttttcattgtgtatcacgaaattttgattatctgtttcttttcagtaaatatttagtctatttttctaagtttaatatattaggattttcattttcattaatccttagtgtttgtactact

SEQ ID NO: 221199 - DNA, 525 bp, Homo sapiens
cttctcacttagtttactttgacacctaaggaatctggtggagaaggacggggcacattgtaactacctggtagagaagaaagttctagattcccacacggccttctctgatatcacccagacattgataggcggcagggcctgttagtttgtgtgtgtgtttaaattacacattaccaatagtatcactttgcataaacctatactaaactaaaagcacggaccccacagaagatatgtaattaaagttatcttgtagtatgcaggtctttttcacagatgcattcagtgtgtggtttaaaaggaagttaaaagtttagttctagttaccatgctagaagaacttaatatgtaaaagatgacatcatcaaagacagtgaaagtcctctttaatgtctcaaggcttttcattgtgtatcacgaaattttgrttatctgtttcttttcagtaaatatttagtctatttttctaagtttaatatattaggattttcattttcattaatccttagtgtttgtactact

SEQ ID NO: 221200 - DNA, 549 bp, Homo sapiens
ttcctaaacagctccactgatacagtggagatataatctctcctctctattgaatgaatttgctgagggtcggtgcatatagtrgtcaatggaatacaaaccaataaaaatatgacagataaatagaatgaaaagtatccaagggtcaagtgctaaatctgttctgctgattccagctgatatttccttttcttctttaacccacatgaagacactctactaaacagtcatgtatatctcaggcatactggttttcatttgtaattttcattttattgcactttcaattttcaggttttgtccatctttcttccccttggcccttccatcacttctgctacttgatgaattctgtcttaaacagtagctagaatataaacatttaataaaatattaacctgattgcttgccctccctataaacaataaaatgacatacatgaacaaatgacaaatacaatattttatgttgtgtttatttctacctttctccgaggcttcttttaatctttattaaagtttattatagcaaactactatcaaatatttc

SEQ ID NO: 221201 - DNA, 549 bp, Homo sapiens
ttcctaaacagctccactgatacagtggagatataatctctcctctctattgaatgaatttgctgagggtcggtgcatatagtggtcaatggaatacaaaccaataaaaatatgayagataaatagaatgaaaagtatccaagggtcaagtgctaaatctgttctgctgattccagctgatatttccttttcttctttaacccacatgaagacactctactaaacagtcatgtatatctcaggcatactggttttcatttgtaattttcattttattgcactttcaattttcaggttttgtccatctttcttccccttggcccttccatcacttctgctacttgatgaattctgtcttaaacagtagctagaatataaacatttaataaaatattaacctgattgcttgccctccctataaacaataaaatgacatacatgaacaaatgacaaatacaatattttatgttgtgtttatttctacctttctccgaggcttcttttaatctttattaaagtttattatagcaaactactatcaaatatttc

SEQ ID NO: 221202 - DNA, 549 bp, Homo sapiens
ttcctaaacagctccactgatacagtggagatataatctctcctctctattgaatgaatttgctgagggtcggtgcatatagtggtcaatggaatacaaaccaataaaaatatgacagataaatagaatgaaaagtatccaagggtcaagtgctaaatctgttctgctgattccagctgrtatttccttttcttctttaacccacatgaagacactctactaaacagtcatgtatatctcaggcatactggttttcatttgtaattttcattttattgcactttcaattttcaggttttgtccatctttcttccccttggcccttccatcacttctgctacttgatgaattctgtcttaaacagtagctagaatataaacatttaataaaatattaacctgattgcttgccctccctataaacaataaaatgacatacatgaacaaatgacaaatacaatattttatgttgtgtttatttctacctttctccgaggcttcttttaatctttattaaagtttattatagcaaactactatcaaatatttc

SEQ ID NO: 221203 - DNA, 549 bp, Homo sapiens
ttcctaaacagctccactgatacagtggagatataatctctcctctctattgaatgaatttgctgagggtcggtgcatatagtggtcaatggaatacaaaccaataaaaatatgacagataaatagaatgaaaagtatccaagggtcaagtgctaaatctgttctgctgattccagctgatatttccttttcttctttaacccacatgaagacactctactaaacagtcatgtatatctcaggcatactggttttcatttgtaattttcattttattgcactttcaattttcaggttttgtccatctttcttccccttggcccttccatcacttctgctacttgatgaattctgtcttaaacagtagctagaatataaacatttaataaaatattaacctgattgcttgccctccctataaacaataaaatgacatacatgaacaaatgacaaatacaatattttatgttgtgtttatttctacctttctcygaggcttcttttaatctttattaaagtttattatagcaaactactatcaaatatttc

SEQ ID NO: 221204 - DNA, 569 bp, Homo sapiens
ttttctgattgcttattttgtaatgaaaacaaagaaagaagaggatgaggaggaagatgaggatgaggagactgaggaggaaggcaaggagaataaggaagaggagcaagaggtaaaggagaagaaaagaaaaaagagagagataagattattaaaaatcaaactaaatacatattggaaaaacaattgaaaaacaaaccaaaagtagcaacactctaacagagcaatagtataaacaaatttattcaaagcattaattttatattagtctgtatcaggctttctaacctgtacattatataaaattaggattattttctctcttctttccatgtaatgtacaattcatgtatccatcaaaaatagatgagtggtcattgtgtgacatctttcacttaatagaaaagactaggtcagaaaagagaaaatgtccttcacaagaccaakactaagttggctcaattttcctgatagcttatttgctacaagaattctgatataattctgtatttacaggctcattctcactctctcacaatccacaggcatacaaacaaagtgtgtgtgtg

SEQ ID NO: 221205 - DNA, 392 bp, Homo sapiens
tctgtttcccataaaagctgagtgtagaacatcctaaaaatccagttcagcttttttattcttgttacatttctgcagaattttaatataactttccttttgtgtatttatgcctactgtttctatttacttacrggtggcttgaattttttatccagagataaagttaatgcaagaaagaatttaaaaatgtatggtagattatcaaaattcttaattgaaaaaaaggtcaaatccacctttgctacagcacacaacctaatcttatatctgttcatcttttttgtctttgttttaaaaacacatacttgataatcatattagatggttacagctttctattgctgcataataaaccagtctaaacatagcagcttaaaacagctaagtag

SEQ ID NO: 221206 - DNA, 392 bp, Homo sapiens
tctgtttcccataaaagctgagtgtagaacatcctaaaaatccagttcagcttttttattcttgttacatttctgcagaattttaatataactttccttttgtgtatttatgcctactgtttctatttacttacaggtggcytgaattttttatccagagataaagttaatgcaagaaagaatttaaaaatgtatggtagattatcaaaattcttaattgaaaaaaaggtcaaatccacctttgctacagcacacaacctaatcttatatctgttcatcttttttgtctttgttttaaaaacacatacttgataatcatattagatggttacagctttctattgctgcataataaaccagtctaaacatagcagcttaaaacagctaagtag

SEQ ID NO: 221207 - DNA, 392 bp, Homo sapiens
tctgtttcccataaaagctgagtgtagaacatcctaaaaatccagttcagcttttttattcttgttacatttctgcagaattttaatataactttccttttgtgtatttatgcctactgtttctatttacttacaggtggcttgaattttttatccagagataaagttaatgcaagaaagaatttaaaaatgtatggtagattatcaaaattcttaaytgaaaaaaaggtcaaatccacctttgctacagcacacaacctaatcttatatctgttcatcttttttgtctttgttttaaaaacacatacttgataatcatattagatggttacagctttctattgctgcataataaaccagtctaaacatagcagcttaaaacagctaagtag

SEQ ID NO: 221208 - DNA, 392 bp, Homo sapiens
tctgtttcccataaaagctgagtgtagaacatcctaaaaatccagttcagcttttttattcttgttacatttctgcagaattttaatataactttccttttgtgtatttatgcctactgtttctatttacttacaggtggcttgaattttttatccagagataaagttaatgcaagaaagaatttaaaaatgtatggtagattatcaaaattcttaattkaaaaaaaggtcaaatccacctttgctacagcacacaacctaatcttatatctgttcatcttttttgtctttgttttaaaaacacatacttgataatcatattagatggttacagctttctattgctgcataataaaccagtctaaacatagcagcttaaaacagctaagtag

SEQ ID NO: 221209 - DNA, 347 bp, Homo sapiens
ttaatcaatgcttattaaatgaatagatgagaaaatttgacattgggtagaaatcctttaaaatattttgcgtggaaatcactttttgctttcaaagtaatgtaattaaagactttyagttcccacagtttgcaacaataatcttaggaacttaactatttgttttgtgaatatctagcactaaacaatgagctagaaatttgataaaacagttcaaataatttttaaatctctttgactcaattagtcatgactgaattcatttataccattaggatattaacacatcttttaaaaaacagtgttaaatggagctggtcaagctatgcattttaagaagaaaaagt

SEQ ID NO: 221210 - DNA, 347 bp, Homo sapiens
ttaatcaatgcttattaaatgaatagatgagaaaatttgacattgggtagaaatcctttaaaatattttgcgtggaaatcactttttgctttcaaagtaatgtaattaaagactttcagttcccacagtttgcaacaataatcttaggaacttaactatttgttttgtgaatatctagcactaaacaatgagctagaaatttgataaaacagttcaaataatttttaaatctctttgactcaaytagtcatgactgaattcatttataccattaggatattaacacatcttttaaaaaacagtgttaaatggagctggtcaagctatgcattttaagaagaaaaagt

SEQ ID NO: 221211 - DNA, 551 bp, Homo sapiens
gcaaatgtacatccctggtttcttgccaattatagctgggtcacacctgcctaagtagtgttttataataaatacatrgtaagtaaattagtatccaaccctcaggcctacacggaataaatttggtggggtacttctcccttgggaaaaaaatgttgttagcattttttgtttgctagtatcctttagacctactacctataaaaacccctctaaatgaagcctctggcagcatttcaataagctaacttccataggtttcttcagttcatgggggtattttcctcctttaatttgccagcagagatctgacatgaaaaagttcaggtgctgttttataatataagaaaacatatacatgagactccttgttccttgtcataatcacatgtacagtgctttaatttcaacaaatcatatagaaaaaagaaggttggtttaagtcatcatcacaaataaaaaagcccataaacctacacctatattgtggtcttgtaattcaccacttggaagcttgtaaaacctaaaacttaatatgcctacaaattttg

SEQ ID NO: 221212 - DNA, 551 bp, Homo sapiens
gcaaatgtacatccctggtttcttgccaattatagctgggtcacacctgcctaagtagtgttttataataaatacatagtaagtaaattagtatccaaccctcaggcctacayggaataaatttggtggggtacttctcccttgggaaaaaaatgttgttagcattttttgtttgctagtatcctttagacctactacctataaaaacccctctaaatgaagcctctggcagcatttcaataagctaacttccataggtttcttcagttcatgggggtattttcctcctttaatttgccagcagagatctgacatgaaaaagttcaggtgctgttttataatataagaaaacatatacatgagactccttgttccttgtcataatcacatgtacagtgctttaatttcaacaaatcatatagaaaaaagaaggttggtttaagtcatcatcacaaataaaaaagcccataaacctacacctatattgtggtcttgtaattcaccacttggaagcttgtaaaacctaaaacttaatatgcctacaaattttg

SEQ ID NO: 221213 - DNA, 551 bp, Homo sapiens
gcaaatgtacatccctggtttcttgccaattatagctgggtcacacctgcctaagtagtgttttataataaatacatagtaagtaaattagtatccaaccctcaggcctacacggaataaatttggtggggtacttctcccttgggaaaaaaatgttgttagcattttttgtttgctagtatcctttagacctactacctataaaaacccctctaaatgaagcctctggcagcatttcaataagctaacttccataggtttcttcagttcatgggggtattttcctcctttaatttgccagcagagatctgacatgaaaaagttcaggtgctgttttataatayaagaaaacatatacatgagactccttgttccttgtcataatcacatgtacagtgctttaatttcaacaaatcatatagaaaaaagaaggttggtttaagtcatcatcacaaataaaaaagcccataaacctacacctatattgtggtcttgtaattcaccacttggaagcttgtaaaacctaaaacttaatatgcctacaaattttg

SEQ ID NO: 221214 - DNA, 551 bp, Homo sapiens
gcaaatgtacatccctggtttcttgccaattatagctgggtcacacctgcctaagtagtgttttataataaatacatagtaagtaaattagtatccaaccctcaggcctacacggaataaatttggtggggtacttctcccttgggaaaaaaatgttgttagcattttttgtttgctagtatcctttagacctactacctataaaaacccctctaaatgaagcctctggcagcatttcaataagctaacttccataggtttcttcagttcatgggggtattttcctcctttaatttgccagcagagatctgacatgaaaaagttcaggtgctgttttataatataagaaaacatatacatgagactccttgttccttgtcataatcacatgtacagtgctttaatttcaacaaatcatatagaaaaaagaaggttggtttaagtcatcatcacaaataaaaaagcccataaacctacacctatattgtggtcttgtaattcaccacttgkaagcttgtaaaacctaaaacttaatatgcctacaaattttg

SEQ ID NO: 221215 - DNA, 523 bp, Homo sapiens
tacttctcccttgggaaaaaaatgttgttagcattttttgtttgctagtatcctttagacctactacctataaaaacccctctaaatgaagcctctggcagcatttcaataagctaacttccataggtttcttcagttcatgggggtattttcctcctttaatttgccagcagagatctgacatgaaaaagttcaggtgctgttttataatataagaaaacatatacatgagactccttgttccttgtcataatcacatgtacagtgctttaatttcaacaaatcatatagaaaaaagaaggttggtttaagtcatcatcacaaataaaaaagcccataaacctacacctatattgtggtcttgtaattcaccacttggaagcttgtaaaacctaaaacttaatatgcctacaaattttgaattttttagaatatactcaatttgcttctacttcttccattggggttcatggctatcwcacattgtaagacagttagtagacccagcagaaatgacttcaaa

SEQ ID NO: 221216 - DNA, 523 bp, Homo sapiens
tacttctcccttgggaaaaaaatgttgttagcattttttgtttgctagtatcctttagacctactacctataaaaacccctctaaatgaagcctctggcagcatttcaataagctaacttccataggtttcttcagttcatgggggtattttcctcctttaatttgccagcagagatctgacatgaaaaagttcaggtgctgttttataatataagaaaacatatacatgagactccttgttccttgtcataatcacatgtacagtgctttaatttcaacaaatcatatagaaaaaagaaggttggtttaagtcatcatcacaaataaaaaagcccataaacctacacctatattgtggtcttgtaattcaccacttggaagcttgtaaaacctaaaacttaatatgcctacaaattttgaattttttagaatatactcaatttgcttctacttcttccattggggttcatggctatcayacattgtaagacagttagtagacccagcagaaatgacttcaaa

SEQ ID NO: 221217 - DNA, 523 bp, Homo sapiens
tacttctcccttgggaaaaaaatgttgttagcattttttgtttgctagtatcctttagacctactacctataaaaacccctctaaatgaagcctctggcagcatttcaataagctaacttccataggtttcttcagttcatgggggtattttcctcctttaatttgccagcagagatctgacatgaaaaagttcaggtgctgttttataatataagaaaacatatacatgagactccttgttccttgtcataatcacatgtacagtgctttaatttcaacaaatcatatagaaaaaagaaggttggtttaagtcatcatcacaaataaaaaagcccataaacctacacctatattgtggtcttgtaattcaccacttggaagcttgtaaaacctaaaacttaatatgcctacaaattttgaattttttagaatatactcaatttgcttctacttcttccattggggttcatggctatcacacattgtaagwcagttagtagacccagcagaaatgacttcaaa

SEQ ID NO: 221218 - DNA, 302 bp, Homo sapiens
aaaagaaagaaaacgtttattggcaatgacacatgattattaatccccatgtctaagtaaatttggggtctttacccttgctatagtttggacatgggttattctctccaaaattcatgtcgaaatttaatttcccatgtaaggtgttaggagatcktgctttgaagaggtgattaggtcattaagacaaattaataactttctggtgaaactgggttatttttcatgataatggattagttctcataagagccagtcattctaaagaaagttgcctcttttattaagcaatgttttgcctg

SEQ ID NO: 221219 - DNA, 302 bp, Homo sapiens
aaaagaaagaaaacgtttattggcaatgacacatgattattaatccccatgtctaagtaaatttggggtctttacccttgctatagtttggacatgggttattctctccaaaattcatgtcgaaatttaatttcccatgtaaggtgttaggagatcttgctttgaagaggtgattaggtcattaagacaaattaataactttctggtgaaactgggttatttttcatgataatggattagttctcataagagccrgtcattctaaagaaagttgcctcttttattaagcaatgttttgcctg

SEQ ID NO: 221220 - DNA, 617 bp, Homo sapiens
tctggaggggaggcaataattgactgtatgagactattaagctataaaaacaatgttttattttgagcatcaaaatatgatagagcttcaaatgctcttggtgaagtcattattaacacacacaaaactgattttcattcaacgtttactgtagagaaaattatattccatcaggctttaaaattgagaagaaaacagaaagagtaagtcttaaatgcctttyttcctcaccttcctccttcacctagtttgcctgcggacctacacagttacattcccacatacctcctgtgtttatttctttgcagatcgtttaccttacatttctacatttccccttaattttttcctcatcaatagatgagaaaaaaatttgttaaatcatggtagatgaatatggaccagatcatcccatgaactacgttcaatcgttggttttacctttcaaaaaattctgaatgaaatatgtaataatttaatattctaaaactttattttttcaggaatatttacatatattcacccttccttctaaaacagtggccagagcagttagaaaacaaaagcatgagaaacagtaactcctacagttgtattatgtctgtatgcctccccag

SEQ ID NO: 221221 - DNA, 537 bp, Homo sapiens
aaaagaaaaaaaaacagaaaagaaactcagtgtggctggaggagggagagcagggggctggagtggggaggycagaaagctaacaaggactacataggcagggccttggccattgcaaggactggctctttttcaccccaaagacagctgagcctgagagggtgagaggtgctgagtgcagttgagttgaaggccacctgcatgccttgaccctcatccaagtatttctgagcctcccctcaccccaggacccagcccaggcaacaggtggaagatgcttttcttctgggacctcagaggtgagtgggtgggtggggaggaggaggtcaaggggggacagctgccccaagggagaggctgaggatggagcagggagggcactgaagtgggctgggtggaggacagggggctggagggtgagaagagggtggggtacttaccgcctgtgcccagatgcttgaaccatgttttgtccttcagatttgtagatgctgaggagccaaagagaggtcactagggctggaggacacagaactt

SEQ ID NO: 221222 - DNA, 537 bp, Homo sapiens
aaaagaaaaaaaaacagaaaagaaactcagtgtggctggaggagggagagcagggggctggagtggggaggtcagaaagctaacaaggactacataggcagggccttggccattgcaaggactggctctttttcaccccaaagacagctgagcctgagagggtgagaggtgctgagtgcagttgagttgaaggccacctgcatgccttgaccctcatccaagtatttctgagcctcccctcaccccaggacccagcccaggcaacaggtggaagatgcttttcttctgggacctcagaggtgagtgggtgggtggggaggaggaggtcraggggggacagctgccccaagggagaggctgaggatggagcagggagggcactgaagtgggctgggtggaggacagggggctggagggtgagaagagggtggggtacttaccgcctgtgcccagatgcttgaaccatgttttgtccttcagatttgtagatgctgaggagccaaagagaggtcactagggctggaggacacagaactt

SEQ ID NO: 221223 - DNA, 482 bp, Homo sapiens
aggtcagaaagctaacaaggactacataggcagggccttggccattgcaaggactggctctttttcaccccaaagacagctgagcctgagagggtgagaggtgctgagtgcagttgagttgaaggccacctgcatgccttgaccctcatccaagtatttctgagcctcccctcaccccaggacccagcccaggcaacaggtggaagatgcttttcttctgggacctcagaggtgagtgggtgggtggggaggaggaggtcaaggggggacagctgccccaagggagaggctgaggatggagcagggagggcactgaagtgggctgggtggaggacagggggctggagggtgagaagarggtggggtacttaccgcctgtgcccagatgcttgaaccatgttttgtccttcagatttgtagatgctgaggagccaaagagaggtcactagggctggaggacacagaacttggccccacacttc

SEQ ID NO: 221224 - DNA, 386 bp, Homo sapiens
ctttggaactctgggtcagacatagactttggtccttaaaaacaagaagcttaaatagtgacctcatcttagttcttgtaatgtagttgcagatcaaataaccatgattcatgaaccaacacaaaggaaccctttgcttcttgactgactccagaatgagtgaacaacatgactaagagcctagtcgcagagcctttctccagactaccttgctgggtcccggatattaatagtcttggaaagcggtttctacagctgctgctttgcctgaaaatagcaatgtttttcccaaacwtgcacataacactgccttctcttaacgagaacctccaaaataaacaaaagtcacccttgacctactaaacagtcatcacatggagatgagt

SEQ ID NO: 221225 - DNA, 362 bp, Homo sapiens
ttttctctcccgtagtactactcctgtgtgaaccagaatttggagcagggacagaggtttttccactttgatgattcttattcttcatctctacagtacaggactgcatctggacagcacggactgagttatttctgaagatgttttcacattgagtaaaattatacattttctccctgagttatgtgtgccctaaggcatatgtctycactgcgggctattccaaatggactccactcatgaatgtttgttcttgtattaattttactatgtatatgatggacattgttctgactgcctgtccatgtgtttgattttagctatttttctcccatatgaaacccagtgaatgttgcacctca

SEQ ID NO: 221226 - DNA, 362 bp, Homo sapiens
ttttctctcccgtagtactactcctgtgtgaaccagaatttggagcagggacagaggtttttccactttgatgattcttattcttcatctctacagtacaggactgcatctggacagcacggactgagttatttctgaagatgttttcacattgagtaaaattatacattttctccctgagttatgtgtgccctaaggcatatgtctccactgcgggctattycaaatggactccactcatgaatgtttgttcttgtattaattttactatgtatatgatggacattgttctgactgcctgtccatgtgtttgattttagctatttttctcccatatgaaacccagtgaatgttgcacctca

SEQ ID NO: 221227 - DNA, 499 bp, Homo sapiens
atacttggactcatacaatatgtagacttttcagactggcttctttcacatagaaatatgcattcaaatttcctccatgtctaatcatgactggatggcttatttttttacccctgataattatgtcattgcatggatatagcagagtttgtttatctaattaaggaatgattacctattaaaggataagctgggtgcttctaagttttagtaagtaagaatatagctgcacatgcaataaacatttgcatgcaagtttctgtgtggtacagtatacyatttctttgttcttaaatacttttcactggtgtgaaccaatgagatgctaacattgcattgctcgtacttggttggtttctaaactttacttacttttacaatttttaaagagaagtttctattgccagttttttaaagtgatatgctctgctggccttgacataacaacacaccatcattagcttttaagtccttaatatgctcaaaaaattagcgagca

SEQ ID NO: 221228 - DNA, 499 bp, Homo sapiens
atacttggactcatacaatatgtagacttttcagactggcttctttcacatagaaatatgcattcaaatttcctccatgtctaatcatgactggatggcttatttttttacccctgataattatgtcattgcatggatatagcagagtttgtttatctaattaaggaatgattacctattaaaggataagctgggtgcttctaagttttagtaagtaagaatatagctgcacatgcaataaacatttgcatgcaagtttctgtgtggtacagtatactatttctttgttcttaaatacttttcactgstgtgaaccaatgagatgctaacattgcattgctcgtacttggttggtttctaaactttacttacttttacaatttttaaagagaagtttctattgccagttttttaaagtgatatgctctgctggccttgacataacaacacaccatcattagcttttaagtccttaatatgctcaaaaaattagcgagca

SEQ ID NO: 221229 - DNA, 525 bp, Homo sapiens
gcatactaactgtaaaccacatcattgttcagattgattttttttaacagatcaaaacatatttaatccgttgcattgaatttaatgcattgtgttgctactccttattttattttgttttattttactcaattttatattttattttctttctagtagaatattagctggtacatctgaataccagaatgtaaagaaaggaagaacagatccaaataaatatttaaagtaataatggctaagaattttccaaaattaacagcagatactgaatacagattcaagaagtgcagagaataccaagcagaataaatgtcaaaaatctatacttaggtatatattttttaaaccaaagaaaatcaaagacagagagacatactgaaaggagccaagggtaaacaagaaaacttacctgtaaataaataaggctaagaattacagttggtttttcattagatgaaarcaagaagagagtggggggaaatacttaaagtgttgaaagtgaaacacacagagacacacaca

SEQ ID NO: 221230 - DNA, 321 bp, Homo sapiens
aaatacttgccgttatgttacaattgcctacagtgttcagtatagtcacatgctgtacagktgtgtagcctaggagcaataggctatatctcatatagcctagatgtgtagcagactatgtggtcaaggttttgtaaacatctatgatgtttgcataatgacaaaattgcctaacaacgcatttctcagaacatatcagttttactaaggggcacatgactatacatatttaatttttactggtgaaatattattattcatattgaacagaattggaactctagctctattacttatctctcctagttgaagccaagcttt

SEQ ID NO: 221231 - DNA, 321 bp, Homo sapiens
aaatacttgccgttatgttacaattgcctacagtgttcagtatagtcacatgctgtacaggtgtgtagcctaggagcaataggctatatctcatatagcctagatgtgtagcagactatgtkgtcaaggttttgtaaacatctatgatgtttgcataatgacaaaattgcctaacaacgcatttctcagaacatatcagttttactaaggggcacatgactatacatatttaatttttactggtgaaatattattattcatattgaacagaattggaactctagctctattacttatctctcctagttgaagccaagcttt

SEQ ID NO: 221232 - DNA, 321 bp, Homo sapiens
aaatacttgccgttatgttacaattgcctacagtgttcagtatagtcacatgctgtacaggtgtgtagcctaggagcaataggctatatctcatatagcctagatgtgtagcagactatgtggtcaaggttttgtaaacatctatgatgtttgcataatgacaaaattgcctaacaacgcatttctcagaacatatcagttttactaaggggcacatgactatacatatttaatttttactggtgaaatattattattcatattgaacagaaytggaactctagctctattacttatctctcctagttgaagccaagcttt

SEQ ID NO: 221233 - DNA, 321 bp, Homo sapiens
aaatacttgccgttatgttacaattgcctacagtgttcagtatagtcacatgctgtacaggtgtgtagcctaggagcaataggctatatctcatatagcctagatgtgtagcagactatgtggtcaaggttttgtaaacatctatgatgtttgcataatgacaaaattgcctaacaacgcatttctcagaacatatcagttttactaaggggcacatgactatacatatttaatttttactggtgaaatattattattcatattgaacagaattgraactctagctctattacttatctctcctagttgaagccaagcttt

SEQ ID NO: 221234 - DNA, 329 bp, Homo sapiens
gtggaaataatttcaaatgctagaatagttttttgagtaaaatctggtcctactaatgatttaagagctggaacacaacttcttgcaggtctagagctggatcctagtccaagtgttcctggaagggatggggtargggtgaatggagtgtgggaatgcagtcctgccgagtatgggcagctgttttggagccaagcaattcacagtttcactttgccaaaataaatccacttgaatgatttttttttttcagggatgaaactgagaaatcggtggtgagtagttctgcttaggaaaatttttgacatttcaggataaatgacaaatat

SEQ ID NO: 221235 - DNA, 329 bp, Homo sapiens
gtggaaataatttcaaatgctagaatagttttttgagtaaaatctggtcctactaatgatttaagagctggaacacaacttcttgcaggtctagagctggatcctagtccaagtgttcctggaagggatggggtaggggtgaatggagtgtgggaatgcagtcctgcygagtatgggcagctgttttggagccaagcaattcacagtttcactttgccaaaataaatccacttgaatgatttttttttttcagggatgaaactgagaaatcggtggtgagtagttctgcttaggaaaatttttgacatttcaggataaatgacaaatat

SEQ ID NO: 221236 - DNA, 329 bp, Homo sapiens
gtggaaataatttcaaatgctagaatagttttttgagtaaaatctggtcctactaatgatttaagagctggaacacaacttcttgcaggtctagagctggatcctagtccaagtgttcctggaagggatggggtaggggtgaatggagtgtgggaatgcagtcctgccgagtatgggcagctgttttggagccaagcaattcacagtttcactttgccaaaataaatccacttgaatgatttttttttttcagggatgaaactgagaaatyggtggtgagtagttctgcttaggaaaatttttgacatttcaggataaatgacaaatat

SEQ ID NO: 221237 - DNA, 277 bp, Homo sapiens
ctgtgtgtgtgtgggtgttcctttaattgcagtgtaaattgagtacagtcagtagacttctttcctacatgttttcagagtcctraggctttgttcagggcctttatttgtagctaaattcttgtctttcttttcacagtggggtatgatagcaaagtattattggtgttgaagttttggggtgtgatctagtagctggtgctgaagtgtaatggtcactgtgtaggctcctgctcagtcatgtggctcctccgtatttcctcatgggttgcagcta

SEQ ID NO: 221238 - DNA, 277 bp, Homo sapiens
ctgtgtgtgtgtgggtgttcctttaattgcagtgtaaattgagtacagtcagtagacttctttcctacatgttttcagagtcctgaggctttgttyagggcctttatttgtagctaaattcttgtctttcttttcacagtggggtatgatagcaaagtattattggtgttgaagttttggggtgtgatctagtagctggtgctgaagtgtaatggtcactgtgtaggctcctgctcagtcatgtggctcctccgtatttcctcatgggttgcagcta

SEQ ID NO: 221239 - DNA, 302 bp, Homo sapiens
accatcacattatgtgacttcaaactcttctacagggctacagtaacccaagtagcayaacactagtacaaaaacagacacatagaacaatggaacagaatagagagcccagaaataatgccacacatctacagccatctaattttcaacaaagccaacaaaaacaagcaataaagaaagaacttaccattcaataagtggtgctgggatatctgattagtcatatgcaagaagattgaaactggactccttccttataccatatataaaaatcaactcaacatgaattaaatacttaaatg

SEQ ID NO: 221240 - DNA, 302 bp, Homo sapiens
accatcacattatgtgacttcaaactcttctacagggctacagtaacccaagtagcacaacactagtacaaaaacagacacatagaacaatggaacagaatagagagcccagaaataatgccacacatctacagccatctaattttcaacaaagccaacaaaaacaagcaataaagaaagaacttaccattcaataartggtgctgggatatctgattagtcatatgcaagaagattgaaactggactccttccttataccatatataaaaatcaactcaacatgaattaaatacttaaatg

SEQ ID NO: 221241 - DNA, 302 bp, Homo sapiens
accatcacattatgtgacttcaaactcttctacagggctacagtaacccaagtagcacaacactagtacaaaaacagacacatagaacaatggaacagaatagagagcccagaaataatgccacacatctacagccatctaattttcaacaaagccaacaaaaacaagcaataaagaaagaacttaccattcaataagtggtgctgggatatctgaytagtcatatgcaagaagattgaaactggactccttccttataccatatataaaaatcaactcaacatgaattaaatacttaaatg

SEQ ID NO: 221242 - DNA, 313 bp, Homo sapiens
agttttcactgttatattcactggctcattttatttcattattttgagtctgggagacattcccttggctcagtgttttcrtctattgtaaattcacttcactcacaaagttgcaccttttcttcatttttcattataataaataacagtttctttggtttggaaatctacagtcaaccttaagtttacattaatattattttaatttgtctctatttcattcctgctctcataacccttacctaatcaatgtctaaattgtgaagaataagcattgtagtgacaaatgtcatgcttgtctacatttctttag

SEQ ID NO: 221243 - DNA, 313 bp, Homo sapiens
agttttcactgttatattcactggctcattttatttcattattttgagtctgggagacattcccttggctcagtgttttcatctattgtaaattcacttcactcacaaagttgcaccttttcttcatttttcattataataaataacagtttctttggtttggaaatctacagtcaaccttaagtttacattmatattattttaatttgtctctatttcattcctgctctcataacccttacctaatcaatgtctaaattgtgaagaataagcattgtagtgacaaatgtcatgcttgtctacatttctttag

SEQ ID NO: 221244 - DNA, 660 bp, Homo sapiens
tggaaacacacttctagacattggcttaggcaaggatttcatgacaagaacccaaaagcaaatgcaataaaaacaaagataaataggttggaaatgattaaactaaaaagcctttgcaaggccraaggaatgatcagctgtgtaaacaggcaacccacagagtgagagaaaatcttcacaatctatacatctgacaaaagactaatatccaaaacctacaaggaactcaaagaaatcagtaagaaaaaaaaaaaacctcatcaaaagtgagctaaggacatgaatagataattctccaaagaagatatacataatggccaataaacatatgaaaaaatgctcaacatcactaatgatcagggaaatgcaaatcaaaaccacaatgcaataccaccttactcctgcaaaaatagccctaagcaaaaaatcaaaaaacagcagatgttgacatggatgcggtgatcaaggaacacttctacactgctggtgagaatgtaaactagtacagccactgtggaaaacagtgcggaaattccttaaagaactaaaagtagaactaccatttgatccggaaatcctactcctggatatctacccagaggaaaataagtcattacacgaaagatacttgcacatgcgtgtttatagcagaacaattcg

SEQ ID NO: 221245 - DNA, 388 bp, Homo sapiens
gaatggctgatgttggctgggttyaaggtgggtcctggggtgctggaagattttgtttagtacctctgttcccctctcagctttcagcatccttaccttcctgcaccgccgaggtgttctctgtctttcctctttcccttactcaatacgtagacagctgatgcttattatttggtatcaggcttggcatagaggtaaaaagtggggtgttttatgttgccctggctcagcctcattcaatcttaggtatgtcctgtgtgaaaaaagtccaagttttcattcctttttctgtctttttgttgtgttggttttagactactgtcattgaattaagctgaattttttttctcaaaatggggcattcttagtgttcttgcattgtgtccaa

SEQ ID NO: 221246 - DNA, 388 bp, Homo sapiens
gaatggctgatgttggctgggtttaaggtgggtcctggggtgctggargattttgtttagtacctctgttcccctctcagctttcagcatccttaccttcctgcaccgccgaggtgttctctgtctttcctctttcccttactcaatacgtagacagctgatgcttattatttggtatcaggcttggcatagaggtaaaaagtggggtgttttatgttgccctggctcagcctcattcaatcttaggtatgtcctgtgtgaaaaaagtccaagttttcattcctttttctgtctttttgttgtgttggttttagactactgtcattgaattaagctgaattttttttctcaaaatggggcattcttagtgttcttgcattgtgtccaa

SEQ ID NO: 221247 - DNA, 366 bp, Homo sapiens
tatcgattctgcacaatcaatcacttccaataataaaagtaaaaaacaagttattctggaaagagggaccatggcacaagaaatgtttggcacagcacaaccagtccccagagaccaaagctgggccatgtcttcaaagcccagagtgtgcatagcttgagtcaagctgaaggaaggaataaaaaaaaatggggagaaagtcagggratatatgatgaagcaaaatcttttatgtctgatgttctcagaatgaataaaattataaaatgcaaagtgcatatatcacagtttcagaagcaatattggtcccactgctgattttctaaaatggagaacagatcaacctctacacaaactgatagtgag

SEQ ID NO: 221248 - DNA, 366 bp, Homo sapiens
tatcgattctgcacaatcaatcacttccaataataaaagtaaaaaacaagttattctggaaagagggaccatggcacaagaaatgtttggcacagcacaaccagtccccagagaccaaagctgggccatgtcttcaaagcccagagtgtgcatagcttgagtcaagctgaaggaaggaataaaaaaaaatggggagaaagtcaggggatatatgatgaagcaaaatcttttatgtctgatgttctcagaatgaataaaattataaaatgcaaagtgcatatatcacagtttcagaagcaatattggtccmactgctgattttctaaaatggagaacagatcaacctctacacaaactgatagtgag

SEQ ID NO: 221249 - DNA, 219 bp, Homo sapiens
gttcaattgtttagcttctctgggccacactgcaagaagacaaattgtcttgggccacatataaaatgcactaacactaacgatagctgacaagctaaagaaaaaaaaaaaacaccaaaaaaaaaatcccataatgttttttaaaagtttaccaatttctattgggcctcattcaaagctgtcctggactgtgygtggcctttgggctgcgggttggac

SEQ ID NO: 221250 - DNA, 525 bp, Homo sapiens
tcattgtgaactcgttacaaagcttgaatgctctagctattttgaggagcattaatargcattacccaaagaagatgatatattccctagacaacaagaactcttatttctctttatcttctttttgataaatgctacagtctcttggtagtgaatccagattctgtggtgtggggaaaagaaagagagatcagactgttactgtgtctgtgtagaaagaagtagacacaagagactccattttgttctgtattaagaaaaattcttctaccttgagatgctgttaatctgtaaccctacccccaaccctgtgctggcagagacatgcactgtgttgactcaaggtttaatggatttagggctatgcaggatgtgctttgttaaacaagtgcttgaaggcagtttgcttgttaaaagtcatcaccactctctaatctcaagtacccagggacacaatacactgcggaaggctgcagggacctctgcctaggaaagccaggtattgtccaaaatttctccccaagt

SEQ ID NO: 221251 - DNA, 525 bp, Homo sapiens
tcattgtgaactcgttacaaagcttgaatgctctagctattttgaggagcattaataggcattaccyaaagaagatgatatattccctagacaacaagaactcttatttctctttatcttctttttgataaatgctacagtctcttggtagtgaatccagattctgtggtgtggggaaaagaaagagagatcagactgttactgtgtctgtgtagaaagaagtagacacaagagactccattttgttctgtattaagaaaaattcttctaccttgagatgctgttaatctgtaaccctacccccaaccctgtgctggcagagacatgcactgtgttgactcaaggtttaatggatttagggctatgcaggatgtgctttgttaaacaagtgcttgaaggcagtttgcttgttaaaagtcatcaccactctctaatctcaagtacccagggacacaatacactgcggaaggctgcagggacctctgcctaggaaagccaggtattgtccaaaatttctccccaagt

SEQ ID NO: 221252 - DNA, 436 bp, Homo sapiens
cagtttgcttgttaaaagtcatcaccactctctaatctcaagtacccagggacacaatacactgcggaaggctgcagggacctctgcctaggaaagccaggtattgtccaaratttctccccaagtgatagtctgagatatggcctcatgggaagggaaagacctgaccatcccccagccagacacccataaatggtctgtgctgaggaggattagtaaaagaggaaggcctctttgcagttgagataagaggaaggcatctgtctcctgctcatccctgggcaatggaatgtctcagtgtaaaacctgattgtatgttccatcaactgagataaggagaaaaccgccttaaggctggaggtgagacatgctggccgcaatactgctctttaatgcaccgagatgtttatgtatgtgcacctcaaagcacagcacc

SEQ ID NO: 221253 - DNA, 436 bp, Homo sapiens
cagtttgcttgttaaaagtcatcaccactctctaatctcaagtacccagggacacaatacactgcggaaggctgcagggacctctgcctaggaaagccaggtattgtccaaartttctccccaagtgatagtctgagatatggcctcatgggaagggaaagacctgaccatcccccagccagacacccataaatggtctgtgctgaggaggattagtaaaagaggaaggcctctttgcagttgagataagaggaaggcatctgtctcctgctcatccctgggcaatggaatgtctcagtgtaaaacctgattgtatgttccatcaactgagataaggagaaaaccgccttaaggctggaggtgagacatgctggccgcaatactgctctttaatgcaccgagatgtttatgtatgtgcacctcaaagcacagcacc

SEQ ID NO: 221254 - DNA, 436 bp, Homo sapiens
cagtttgcttgttaaaagtcatcaccactctctaatctcaagtacccagggacacaatacactgcggaaggctgcagggacctctgcctaggaaagccaggtattgtccaaaatttctccccaagtgatagtctgagatatggcctcatgggaagggaaagacctgaccatcccccagccagacacccataaatggtctgtgctgaggaggattagtaaaagaggaaggcctctttgcagttgagataagaggaaggcatctgtctcctgctcrtccctgggcaatggaatgtctcagtgtaaaacctgattgtatgttccatcaactgagataaggagaaaaccgccttaaggctggaggtgagacatgctggccgcaatactgctctttaatgcaccgagatgtttatgtatgtgcacctcaaagcacagcacc

SEQ ID NO: 221255 - DNA, 436 bp, Homo sapiens
cagtttgcttgttaaaagtcatcaccactctctaatctcaagtacccagggacacaatacactgcggaaggctgcagggacctctgcctaggaaagccaggtattgtccaaaatttctccccaagtgatagtctgagatatggcctcatgggaagggaaagacctgaccatcccccagccagacacccataaatggtctgtgctgaggaggattagtaaaagaggaaggcctctttgcagttgagataagaggaaggcatctgtctcctgctcatccctgggcaatggaatgtctcagtgtaaaacctgattgtatgttccatcaactgagataaggagaaaaccgccttaaggctggaggtgagacatgctggcygcaatactgctctttaatgcaccgagatgtttatgtatgtgcacctcaaagcacagcacc

SEQ ID NO: 221256 - DNA, 571 bp, Homo sapiens
actctgcaattaatatgcctgatgcaaattgaaaaacccataatccatccttctctgttggaatgaaagtgtatattattattgagaagctgcaggataccagaaccrttttttaaacttgactgctcattaccttaaatctgcatataaaacagttttgcattcagatgaggtaatacataacggaatatattgtggcgcatataaaaaaaagtgctccaaataaaaacgacctgtgggcttcctttgtagaagaaatttatgcagttccaggcattagggattaatgatagctaagagcaaaagagaaggaatgagcattaaaacattgtgcctaactttcctgactaccccaaggctaaaggacaaagtgaattgtcaaatctccttaaaggtaaggactacgaatttatattaagtaaatatgatatttggggattgcatctggttctgtcacattagtattcagaatatttcttatagctttaaaggagaaaagacaaccttaatggaggtatgagagaagaaagattttaaaaatcctttgtttctaacagcttagagagcctct

SEQ ID NO: 221257 - DNA, 571 bp, Homo sapiens
actctgcaattaatatgcctgatgcaaattgaaaaacccataatccatccttctctgttggaatgaaagtgtatattattattgagaagctgcaggataccagaaccattttttaaacttgactgctcattaccttaaatctgcatataaaacagttttgcattcagatgaggtaatacataacggaatatattgtggcgcatatwaaaaaaagtgctccaaataaaaacgacctgtgggcttcctttgtagaagaaatttatgcagttccaggcattagggattaatgatagctaagagcaaaagagaaggaatgagcattaaaacattgtgcctaactttcctgactaccccaaggctaaaggacaaagtgaattgtcaaatctccttaaaggtaaggactacgaatttatattaagtaaatatgatatttggggattgcatctggttctgtcacattagtattcagaatatttcttatagctttaaaggagaaaagacaaccttaatggaggtatgagagaagaaagattttaaaaatcctttgtttctaacagcttagagagcctct

SEQ ID NO: 221258 - DNA, 571 bp, Homo sapiens
actctgcaattaatatgcctgatgcaaattgaaaaacccataatccatccttctctgttggaatgaaagtgtatattattattgagaagctgcaggataccagaaccattttttaaacttgactgctcattaccttaaatctgcatataaaacagttttgcattcagatgaggtaatacataacggaatatattgtggcgcatataaaaaaaagtgctccaaataaaaacgacctgtgggcttcctttgtagaagaaatttatgcagttccaggcattagggattaatgatagctaagagcaaaagagaaggaatgagcattaaaacattgtgcctaactttcctgactaccccaaggctaaargacaaagtgaattgtcaaatctccttaaaggtaaggactacgaatttatattaagtaaatatgatatttggggattgcatctggttctgtcacattagtattcagaatatttcttatagctttaaaggagaaaagacaaccttaatggaggtatgagagaagaaagattttaaaaatcctttgtttctaacagcttagagagcctct

SEQ ID NO: 221259 - DNA, 369 bp, Homo sapiens
gtcgagtattcactggatctcttcctactacaataaataagttctggcacattacttacacaaaagataaaaagtatcagtaataaacacttccattttataatcaaataggcacaaaggatgcataatattttccaggaagcgatgcccyatatatccatagattctagggttgttgttgttttttttttttttaacacaggagatgctaaacaaccaagtacatgctgctaaaaacaccctgcagataaaaaccctcccactagctaatttaactagcttgtttgctaaaaagtctgcttttagcatgtttacaaatgtattagtctgctagggctattataacaaagtatcatcaaccgggtggct

SEQ ID NO: 221260 - DNA, 369 bp, Homo sapiens
gtcgagtattcactggatctcttcctactacaataaataagttctggcacattacttacacaaaagataaaaagtatcagtaataaacacttccattttataatcaaataggcacaaaggatgcataatattttccaggaagcgatgccctatatatccatagattctagggttgttgttgttttttttttttttaacacaggagatgctaaacaaccaagtacatgctgctaaaaacaccytgcagataaaaaccctcccactagctaatttaactagcttgtttgctaaaaagtctgcttttagcatgtttacaaatgtattagtctgctagggctattataacaaagtatcatcaaccgggtggct

SEQ ID NO: 221261 - DNA, 452 bp, Homo sapiens
caaacctgaatttaagtgtactaaaaatataaaattcactttggagctaatgaagtaacttttcrtccaaaaaaaatatattactttaagtatttctcctgtagtaaaagtatttaccgttttattcatagctttggattgagcaaataaatcttaagatatatgtgtcataatatagactataacataaaatgtgggtgaacacagtaactcacttttacatcataatcaagtcattagcttctcatttccacaattaaaagaaatatgtcttatcagctattcaaaatcttaggttagagaaagttaccaagtaattagctgctattctggacacacagaaattagagtaacaaaaccagttcacacatagatacattctttgagagacagaatagtggattaaccacaaatataaagtagagaatgcagagaatgcccctgatggaatt

SEQ ID NO: 221262 - DNA, 439 bp, Homo sapiens
gaattctgaggtgatatcacagactcaatttatatgcaaacctgaatttaagtgtactaaaaatataaaattcactttggagctaatgaagtaacttttcgtccaaaaaaaatatattactttaagtatttctcctgtagtaaaagtatttaccgttttattcatagctttggattgagcaaatawatcttaagatatatgtgtcataatatagactataacataaaatgtgggtgaacacagtaactcacttttacatcataatcaagtcattagcttctcatttccacaattaaaagaaatatgtcttatcagctattcaaaatcttaggttagagaaagttaccaagtaattagctgctattctggacacacagaaattagagtaacaaaaccagttcacacatagatacattctttgagagacagaatagtggat

SEQ ID NO: 221263 - DNA, 452 bp, Homo sapiens
caaacctgaatttaagtgtactaaaaatataaaattcactttggagctaatgaagtaacttttcgtccaaaaaaaatatattactttaagtatttctcctgtagtaaaagtatttaccgttttattcatagctttggattgagcaaataaatcttaagatatatgtgtcataatatagactataacataaaatgygggtgaacacagtaactcacttttacatcataatcaagtcattagcttctcatttccacaattaaaagaaatatgtcttatcagctattcaaaatcttaggttagagaaagttaccaagtaattagctgctattctggacacacagaaattagagtaacaaaaccagttcacacatagatacattctttgagagacagaatagtggattaaccacaaatataaagtagagaatgcagagaatgcccctgatggaatt

SEQ ID NO: 221264 - DNA, 452 bp, Homo sapiens
caaacctgaatttaagtgtactaaaaatataaaattcactttggagctaatgaagtaacttttcgtccaaaaaaaatatattactttaagtatttctcctgtagtaaaagtatttaccgttttattcatagctttggattgagcaaataaatcttaagatatatgtgtcataatatagactataacataaaatgtgggtgaacacagtaactcacttttacatcataatcaagtcattagcttctcatttccrcaattaaaagaaatatgtcttatcagctattcaaaatcttaggttagagaaagttaccaagtaattagctgctattctggacacacagaaattagagtaacaaaaccagttcacacatagatacattctttgagagacagaatagtggattaaccacaaatataaagtagagaatgcagagaatgcccctgatggaatt

SEQ ID NO: 221265 - DNA, 439 bp, Homo sapiens
gaattctgaggtgatatcacagactcaatttatatgcaaacctgaatttaagtgtactaaaaatataaaattcactttggagctaatgaagtaacttttcgtccaaaaaaaatatattactttaagtatttctcctgtagtaaaagtatttaccgttttattcatagctttggattgagcaaataaatcttaagatatatgtgtcataatatagactataacataaaatgtgggtgaacacagtaactcacttttacatcataatcaagtcattagcttctcatttccacaattaaaagaaatatgtcttatsagctattcaaaatcttaggttagagaaagttaccaagtaattagctgctattctggacacacagaaattagagtaacaaaaccagttcacacatagatacattctttgagagacagaatagtggat

SEQ ID NO: 221266 - DNA, 452 bp, Homo sapiens
caaacctgaatttaagtgtactaaaaatataaaattcactttggagctaatgaagtaacttttcgtccaaaaaaaatatattactttaagtatttctcctgtagtaaaagtatttaccgttttattcatagctttggattgagcaaataaatcttaagatatatgtgtcataatatagactataacataaaatgtgggtgaacacagtaactcacttttacatcataatcaagtcattagcttctcatttccacaattaaaagaaatatgtcttatcagctattcaaaatcttaggttagagaaagttaccaagtaattagctgcyattctggacacacagaaattagagtaacaaaaccagttcacacatagatacattctttgagagacagaatagtggattaaccacaaatataaagtagagaatgcagagaatgcccctgatggaatt

SEQ ID NO: 221267 - DNA, 535 bp, Homo sapiens
ttctattataatataaagaaggaaagacttctattcataaaaggggaaaactctttcccttgtattcactggatttgaatgagaaatcctgtactgctcattgctcttaccagccattgcatactacaaggggaagcagaagtaggatkaagctaataggtgaactgcagggtggagaggcagaaagaatgtgcttccttgctgagatctctgaaccataaatcaagcagagctgaaaacttttctacctatctacttcttaatatatactatacaatctcttcattgtttaggtgggctttatttgcagggtataagctgtagtaaaagaagggccaaagatgtaaataaatgtgactgatagaggacagcataaaagaaaaaataagtttttttttaaagcaggactgtgaggagaattttaatagagtctagattggtgaataaaaaagaacagaatatcccaaaaagtatatactaatgctcaaatcagtaaagaaatatgagttaccactttgtggaaaaataacatggg

SEQ ID NO: 221268 - DNA, 535 bp, Homo sapiens
ttctattataatataaagaaggaaagacttctattcataaaaggggaaaactctttcccttgtattcactggatttgaatgagaaatcctgtactgctcattgctcttaccagccattgcatactacaaggggaagcagaagtaggattaagctaataggtgaactgcagggtggagaggcagaaagaatgtgcttccttgctgagwtctctgaaccataaatcaagcagagctgaaaacttttctacctatctacttcttaatatatactatacaatctcttcattgtttaggtgggctttatttgcagggtataagctgtagtaaaagaagggccaaagatgtaaataaatgtgactgatagaggacagcataaaagaaaaaataagtttttttttaaagcaggactgtgaggagaattttaatagagtctagattggtgaataaaaaagaacagaatatcccaaaaagtatatactaatgctcaaatcagtaaagaaatatgagttaccactttgtggaaaaataacatggg

SEQ ID NO: 221269 - DNA, 535 bp, Homo sapiens
ttctattataatataaagaaggaaagacttctattcataaaaggggaaaactctttcccttgtattcactggatttgaatgagaaatcctgtactgctcattgctcttaccagccattgcatactacaaggggaagcagaagtaggattaagctaataggtgaactgcagggtggagaggcagaaagaatgtgcttccttgctgagatctctgaaccataaatcaagcagagctgaaaacttttctacctatctacttcttaatatatamtatacaatctcttcattgtttaggtgggctttatttgcagggtataagctgtagtaaaagaagggccaaagatgtaaataaatgtgactgatagaggacagcataaaagaaaaaataagtttttttttaaagcaggactgtgaggagaattttaatagagtctagattggtgaataaaaaagaacagaatatcccaaaaagtatatactaatgctcaaatcagtaaagaaatatgagttaccactttgtggaaaaataacatggg

SEQ ID NO: 221270 - DNA, 562 bp, Homo sapiens
tccttcctctccatttccccttccatgattatttacattatcaacccctatgatcatttaacaacatcctctgacttccaaactgaatcactcagctatgccaaagctgcctgtctttattttagtatccacagctatgaaaggcctgtttcatgccatrtaacttactaggcactttatctacttagtttatttaatcctaattccccataaggtgcaatctaaatctcaaaaaagctaagaaacaccacatcatctatgtggtattcccaccaaaaatatttacaatgaatctgtttaggataaaacaattacacaaatccaaaccatggaaccctggaacactgtgtaaaataaatgtcccgagttcttcaaaactgtcaatgttctgaaagacaataataataacaataaaaagctggagaacttcattagagtcaagaagatgaaaaagaaataaaaattaaatgcactgtgagatccctattagatccctgaatcacaaaaaggaaaacaaacaaaaatctccagctatagaaaacattattcacaaaatttggga

SEQ ID NO: 221271 - DNA, 559 bp, Homo sapiens
gatgccagtatcacaacagtatgctgtactgcgtactgtagtcttataagatgttaccactggaagaaacagggtaaaggatacacagaattgcactgtactatttcttataactgcttgtgaatctactatgatgtcaaaataaaacttttaattaaaaagaaaaaagcaaaaataacgatttgttgtttatctgaaagtcaaattaaactgggcatcctgtattttatcaggcatctctgggagcttgttggagatgcagattccctggccccacttcagacccactacatcagaatctgtgttgtaacactaaagtatgagaagctctgattagtggctcctgggtgtgttagtccattttgcattgctatataggaatatgtgaggctgrgtatttacaaagaaaagacgtttgtttggctcacagttctgcaggaggcaaaagaagcctggcaccagcatctgcttctggtaaggactgcaggggagcttccaatcatgcagacagtgaaggggggatcaggtgtgccgcaggccacggggaggtgtcccagac

SEQ ID NO: 221272 - DNA, 578 bp, Homo sapiens
gatgccagtatcacaacagtatgctgtactgcgtactgtagtcttataagatgttaccactggaagaaacagggtaaaggatacacagaattgcactgtactatttcttataactgcttgtgaatctactatgatgtcaaaataaaacttttaattaaaaagaaaaaagcaaaaataacgatttgttgtttatctgaaagtcaaattaaactgggcatcctgtattttatcaggcatctctgggagcttgttggagatgcagattccctggccccacttcagacccactacatcagaatctgtgttgtaacactaaagtatgagaagctctgattagtggctcctgggtgtgttagtccattttgcattgctatataggaatatgtgaggctgagtatttacaaagaaaagacgtttgtttggctcacagttctgcaggaggcaaaagaagcctggcaccagcatctgcttctggtaaggactgcaggggagcttccaatcatgcagacagtgwaggggggatcaggtgtgccgcaggccacggggaggtgtcccagactgttttcaacaatcagatc

SEQ ID NO: 221273 - DNA, 481 bp, Homo sapiens
aaagatctgtgaagcaaagagaaaacgaaaaagaacaagagttactattcttacttcagacaaaatataaaccaacaatgctcaaagaggacaaagaaggacattccattaatgataaagagttcaattcaactatcctaaatatatatgcatcccaaattggagcacccagattcataaaacaaattattagagacctacaaagagacttaaataaccacataataatagtaggggacttcaacaccctactgacagtgttggacagaacattgagacagaaaactartaaaggtatttgggacctaaactcaacacttcaccaaatgcacctgacagacatctacagaatgctccacccaacaacagaatatacgtttttctgttcttatgtacacatggcacatactcttaagattgactgcacactcagccataaagcaattctcaacaagttaaaaaaaaaacaaaccaaccacac

SEQ ID NO: 221274 - DNA, 481 bp, Homo sapiens
aaagatctgtgaagcaaagagaaaacgaaaaagaacaagagttactattcttacttcagacaaaatataaaccaacaatgctcaaagaggacaaagaaggacattccattaatgataaagagttcaattcaactatcctaaatatatatgcatcccaaattggagcacccagattcataaaacaaattattagagacctacaaagagacttaaataaccacataataatagtaggggacttcaacaccctactgacagtgttggacagaacattgagacagaaaactaataaagrtatttgggacctaaactcaacacttcaccaaatgcacctgacagacatctacagaatgctccacccaacaacagaatatacgtttttctgttcttatgtacacatggcacatactcttaagattgactgcacactcagccataaagcaattctcaacaagttaaaaaaaaaacaaaccaaccacac

SEQ ID NO: 221275 - DNA, 559 bp, Homo sapiens
gcaggctaagtggggatgagtaattggaagaaacaatattataaattttaatctactcctttttagaaactcttatgagatgtcatggctgactagcaaccaacaagcatataaaatgagcatagtaatgatcaccaaaaatgaagaattttgcctcaagtggtttctacgaaatagtccacttgcytgcctgagccattccttttctttaggttgtcttcattgctctatgacccatgagacaatcttcatgcctacatgaaagtcatatttgtccttctgtgcctgagcccatgtgttttccacatgtgtttgcttgtttacatttgtgggagctggattgagtggggacctaccaagttgcaggcactgtggtaggagttttccatatataaagtcattacgcctccagtgggcctatgatgtgggtgtgattgctagtattgttcttcttttacaggtgaagacactggggctcaaagaagttagcagatttgcctaagaacacatgacaactgctaaaagttatcgtagtgatagacctagaatagtaactggg

SEQ ID NO: 221276 - DNA, 559 bp, Homo sapiens
gcaggctaagtggggatgagtaattggaagaaacaatattataaattttaatctactcctttttagaaactcttatgagatgtcatggctgactagcaaccaacaagcatataaaatgagcatagtaatgatcaccaaaaatgaagaattttgcctcaagtggtttctacgaaatagtccacttgcttgcckgagccattccttttctttaggttgtcttcattgctctatgacccatgagacaatcttcatgcctacatgaaagtcatatttgtccttctgtgcctgagcccatgtgttttccacatgtgtttgcttgtttacatttgtgggagctggattgagtggggacctaccaagttgcaggcactgtggtaggagttttccatatataaagtcattacgcctccagtgggcctatgatgtgggtgtgattgctagtattgttcttcttttacaggtgaagacactggggctcaaagaagttagcagatttgcctaagaacacatgacaactgctaaaagttatcgtagtgatagacctagaatagtaactggg

SEQ ID NO: 221277 - DNA, 559 bp, Homo sapiens
gcaggctaagtggggatgagtaattggaagaaacaatattataaattttaatctactcctttttagaaactcttatgagatgtcatggctgactagcaaccaacaagcatataaaatgagcatagtaatgatcaccaaaaatgaagaattttgcctcaagtggtttctacgaaatagtccacttgcttgcctgagccattccttttctttaggttgtcttcattgctctatgacccatgagacaatcttcatgcctacatgaaagtcatatttgtccttctgtgcctgagcccatgtgttttccacatgtgtttgcttgtttacatttgtgggagctggattgagtggggacctaccaagttgcaggcactgtggtaggagttttccatatataaastcattacgcctccagtgggcctatgatgtgggtgtgattgctagtattgttcttcttttacaggtgaagacactggggctcaaagaagttagcagatttgcctaagaacacatgacaactgctaaaagttatcgtagtgatagacctagaatagtaactggg

SEQ ID NO: 221278 - DNA, 557 bp, Homo sapiens
tggagatagagcctttagggggtgattaggtcatgaggatggaaccccccatgaatgggattagtgcccctataaaagaggccccagaaagctgctttgcctcttctaccacatgaggatacagctagcaggagccatctgtgaaccagaaagtgggccctcaccagacaccaaatctgctgacactttgatcttggatttccagccaccagaactgtgagaaataaatttccattgtttataaactacccagtttgtggtatcttgttaagccactcaaacagactaagacatttacacataaatgactctgccctgggcttcagactcaaacatcccaccacttactgatcatctccatttgcatttctctgagatactttaaactcaaaatgtcctactggacatcattttttcaccactctctaaatctggatctccttctattcmctttttcagtaaatggtccccagatttctccagtcatataaagcagaaactgaggttctttcttgatacctatttctccttcaaccctatatctgatccgtctccct

SEQ ID NO: 221279 - DNA, 502 bp, Homo sapiens
ctcattatatcattgtatataagaaaacccaattccccttgaggaagaggaagagctgaagtcctttaaaaattaactgcctgtttttctgtggctagtgagtcttatctctccacctttcccaggcattgtgaagaccctgtttctctagctgtgcagctgcaaggtcactaggcagataaactcaagtcataaaacgtgtttttccttggaaagtaagaaataatgtaatgcatgtctcarttgaataactgtctttgtttctctcttctgtaatatacttccccctgcacagatctccccggcccacaaaatacttaaaaagtaaccggactctttgttcagggctcaatctttttggatgttaatctgactgggccggtgcacctaaataataaataatatatatcctcctcgacctttggtctctctgattcctaaattatcctgctgcaccaggacttataggagcagaaatcagaagactttactccacacactt

SEQ ID NO: 221280 - DNA, 593 bp, Homo sapiens
gagagcactgacccagtgtggagcaggggttgggaaggcaaggagcagttgggcaggcaaagagataatggggaaggaaggagggagaaagagagaaagggaagagagagggagagagagagagagagaggtgatttcagggtttgcacgaggctcagtgtgtctgaagcagtgtgtgctggcttgggagactgggagatggggctggaaaggtaagtggaacagactgtaaagtcttttatcgaccatttaagaagcttggattttaaatagcaaagagtggggaacaacaagtgtttacagatgtctactctatcccagatattgtcctaagcctactactaacctcaatcagtttttaaagcaactctaagagactggggctattattattccccttttacagatgagaarcctgtgctagaaatgagagtcaggattgaaaccaggtagtccagcttcagagaccatgctttttagcacagcccctggcctttgtggcctcatttaagggtttcagcagagaaaggacatggccagatagaaatattggaatggcagaagtagccggaatctcagaaagactgactgac

SEQ ID NO: 221281 - DNA, 577 bp, Homo sapiens
atgtggcaagccgggtgtgagttggatttttagcctttacttgctcccttggctggtacattctgtaaaaatcattcaaggcagctcttaaaggacctctctcccaaggctggcatgaaggctaaatgacactgagcaagggaagagcctggcagaaagcagggaatgaaaatgttttatttttttggtgcccaaaatgaaaataacaccatgttacttacagtgtacatccactttccctcccattaactcccacctctgccaacccaaagtcctctatctgtcctgtaccatgggaaaatcctaggcaatactgaattatcagtgaagttagctactggagtctcacatcwcttctaagggtattgtgtccccacccctactccagcttcatgagcccattgccttcactctctctctttcctcttctccctgctccaaacaaattttgtttctggaaagaagctgatctccgcagtttgagccttttcatctttctaattgtgtacttacagactttctctgcttttggagatagctctggcattactaaatacatgtgggtcacaaagtaatt

SEQ ID NO: 221282 - DNA, 578 bp, Homo sapiens
gagtctttggaggattttcagtatgtgagtgacatggtcagattcatgttgtaggaaggaattcttgtaagtcgactcaggtgggttggaggagagagagactcactgcagactctggttaacagttggtatagacaggcacagtaagacggcagcaggttgggtggggaggataggtggccgtggtgggaggaggatagaagggcacaagctctggtcaagttaatttctctgagcatcctttaatctgtaaaatgggaaaaaataattcctgtctcatagggttgagattttgatgagaaattgcatgcaaaactctaagtatwtattacctggcttgtaataagaacttagtagatattagctgtttatgattcacctggagaacaattataagagccccaactaaggcagtagctatagggatggagctcagggatgaaaatgagagacatttaggaggttgactagaatgctgagtcatgttgttgcccctggagctgaaggcagttttatgctgacatttgctgctacacagtcggctctgctggcttcattataaacttcccatgaggccc

SEQ ID NO: 221283 - DNA, 604 bp, Homo sapiens
cctattaaatccagcagaactaattgactgattaactggttgacaaatgctgacttatggttttgatatgtttatttttcccctcagtctacgtgatttttatcttctatttaaatgttaactgacttcttcttctcgtatttccttgctagccttcttacatcttttctgaaagtatgcaacaaaaaattacaaacaaataagtaaatgaatgccctgaggtggttgacatgtattacatatacagtacacaaaatgcttacaaaggatctgtgactcaggatatttagagaatcatggtcactgaagatacttttcctcttccctctctacaaaattgctcgtgtgtgtgaagtgccactaccccaaaacaagcagtcgtatttttttctgccwttggcttctgccccaccctaacccctcacctgggtgctgagcttgtagggttctgctgctccctgcaaccagtctctctcagatgtaaaattccactccagaggtggctgaattagcagaagcacaaaacttgggagtatattgtatatgtggtacttagggacacttcaggaataaaaggggtgaggatcatgtgagttattattct

SEQ ID NO: 221284 - DNA, 573 bp, Homo sapiens
acacagttctcacatcttgcctttgaaaagcccagcctcacctttcctcattcattcagctctttggtccagcaggtcttagagtttgcacaccactttctccacatcttgttatattctggcttgtcatatccactattgttccacagaagtcagcattgtcagcacagctagattgccttctcaatgagagcatgaaatgtgattttacatctatggcccttaaagcagctactggcagtgctgggcacacagcaaggagctcattaattatgttgatcgatcagaggtcattttaggattcaacttaggaaaattccaaactacccactcagaagtgcccagtccatattgagaattctgcaactagcggtttgcttgtttcttcttcaacttttattttaagctcaggggtacatgcgcaggatgtgcaggtttgttacataggtaaacgtgtgccatgtcccatcacctatgtattaagcccagaatccattagttattcttcctggtgctctccctcccccmactctccccgacaggccccagagtgtgtagttcccacccatgtgt

SEQ ID NO: 221285 - DNA, 573 bp, Homo sapiens
acacagttctcacatcttgcctttgaaaagcccagcctcacctttcctcattcattcagctctttggtccagcaggtcttagagtttgcacaccactttctccacatcttgttatattctggcttgtcatatccactattgttccacagaagtcagcattgtcagcacagctagattgccttctcaatgagagcatgaaatgtgattttacatctatggcccttaaagcagctactggcagtgctgggcacacagcaaggagctcattaattatgttgatcgatcagaggtcattttaggattcaacttaggaaaattccaaactacccactcagaagtgcccagtccatattgagaattctgcaactagcggtttgcttgtttcttcttcaacttttattttaagctcaggggtacatgcgcaggatgtgcaggtttgttacataggtaaacgtgtgccatgtcccatcacctatgtattaagcccagaatccattagttattcttcctggtgctctccctccccccactctccccsacaggccccagagtgtgtagttcccacccatgtgt

SEQ ID NO: 221286 - DNA, 410 bp, Homo sapiens
atccctggcaagaaatatgttaaaggaatgggatcttatacacaatatttaatcactgtgatggccataatttactgagtaccaggaatcaccagggaatgtgtcctcaccaaaatcctatgaggaaaktaagtttagtgtctgtattttacaaataagtgccttgaggattagaaacgctaagtaacttaccagatatctcagaatacttgaaactaactctggcattttccaaatttcatgatctctaatttatattacttctaacaggtaaccattaaagattatgaagtagggagtgacataataagccttttaagaagatggctttaataacacagaaataagagagtttatagaaagttagagaaagtcctaatgtcaaaaagggagaagaaacagaactaaag

SEQ ID NO: 221287 - DNA, 439 bp, Homo sapiens
agccaaagagaaatctgttccatggtatccctggcaagaaatatgttaaaggaatgggatcttatacacaatatttaatcactgtgatggccataatttactgagtaccaggaatcaccagggaatgtgtcctcaccaaaatcctatgaggaaagtaagtttagtgtctgtattttacaaataagtgccttgaggattagaaacgytaagtaacttaccagatatctcagaatacttgaaactaactctggcattttccaaatttcatgatctctaatttatattacttctaacaggtaaccattaaagattatgaagtagggagtgacataataagccttttaagaagatggctttaataacacagaaataagagagtttatagaaagttagagaaagtcctaatgtcaaaaagggagaagaaacagaactaaagcat

SEQ ID NO: 221288 - DNA, 499 bp, Homo sapiens
caaagccagacagagcaaatgccccatccacaaaatagactggaaaatatctgtttgacagtctggaacaagcgtgccagtgggtcacatattttgggaagtgtattgaaaaagggtgacctaagaaaaatcaaaacgttaaacctctgttgggagaaggtatacaaacctaatttatactacctgtatggtgttgaaactgtaagcaaagaaaccaacagtaacaacaacaaaawatctccacaatctcaaaaaatagtgaaactagtgggataccagcaaaggccaatggtgacactgttccatgaggacctctttaccacagacagcaagagagggcgctccttcagaagaaagcataagtcagaaagttcacttacttacataaagtacacaatatagatagaaccccatgaccaacagggagagagaaacagagagagagagagagagagagagagagagaggaagagatgacaaacccagtaaatgagaaaac

SEQ ID NO: 221289 - DNA, 558 bp, Homo sapiens
atcaggactcaggccactactcccaatcatgagcctgtggtagtcaatgccagtcaactatgatactctctgaaactgagcccagtctccttggcattaatcccagcactttgggaggccgaggtgggtggatcacaaggtcacgagtttgagaccagcctggtcaacatggtataaccccgtctctaccaaaaacaaacaacaacaacaacaaaaaaactggtcatggtggcttgtgcctgtaattgcagctacttgggaggctaaggcaggagaatcatttgaactcaggagggaggcggaggttgcagtgagctaagatggcaccattgcactccagcctgggcaacagggcgaggctccgtctcaaaaaaaaaaaaaaaaaaaaaaagaaaaaagaagtcttttcaacagagaactctctgaaagtgttaccatttgtcaggagctgtcacttgaaattcattttttcattcaatcgtgtgacaaatatttactgagcttttacttgatgtcaaatayggcagtaagcattggaataaaattctgggtaaaatc

SEQ ID NO: 221290 - DNA, 589 bp, Homo sapiens
tgtgctgtccagatttcccacacagaaccgagctacttgtcccctgactgctgggagtattgatggatggccaacggctcycttctgagtccgtctataaagattacccacagtggttggtgtggaatacaaaggcctggttcctttgtcttgattcaggacaaccttgtggcacatcccagctcccgggcttcctgtaggattcatcttctccttctgcccaatcttactcctctcactcccttaaagatgttatttctgagagtactccccagtaaacatcctgcatacaaatctctgtctcagaatacgtttcctcgaccacctaacccaagaatgatgtcccagtcactgtatggtgcaaagcatgctgaactcggccttggaagctctaggttctggtcagggctctgccctttcatgggttgtctggctggcccaggttccccatgtatgagttggggacagcaaggaaggagtttggaccaggtgatcgaagatcccttccagctgtgacttttcatatgtgtgaaatggacagggaaggatgagttacatgaaaagctggaatgatctttgcgaacccttc

SEQ ID NO: 221291 - DNA, 589 bp, Homo sapiens
tgtgctgtccagatttcccacacagaaccgagctacttgtcccctgactgctgggagtattgatggatggccaacggctctcttctgagtccgtctataaagattacccmcagtggttggtgtggaatacaaaggcctggttcctttgtcttgattcaggacaaccttgtggcacatcccagctcccgggcttcctgtaggattcatcttctccttctgcccaatcttactcctctcactcccttaaagatgttatttctgagagtactccccagtaaacatcctgcatacaaatctctgtctcagaatacgtttcctcgaccacctaacccaagaatgatgtcccagtcactgtatggtgcaaagcatgctgaactcggccttggaagctctaggttctggtcagggctctgccctttcatgggttgtctggctggcccaggttccccatgtatgagttggggacagcaaggaaggagtttggaccaggtgatcgaagatcccttccagctgtgacttttcatatgtgtgaaatggacagggaaggatgagttacatgaaaagctggaatgatctttgcgaacccttc

SEQ ID NO: 221292 - DNA, 620 bp, Homo sapiens
tagttattgattactactgaaaatcaaagtgagaaaattactactattgattcagtagttattgattaatatctcttccagcaccacattacatagcatgtatatgtgtgtgtgtgtgtgtgtgtgtgtgtgtgtgwgagagagagagagagagtgaagagagagagaagagaggcaggctatcaaatagaatagcttttggggggaaatttgtataaggcaagacagaaacatacattattggggactgaggaaagcctttcactttaatttccatttcaatcattgaagctcatagtgaccatgcccagtgaaaaagccatgccattttcttcttctgggaactgagatagatccctcagaagtatcacaatcaatatatacatatgtacctatgatctccattcagttgctagaacggctgtgtgccttccatcgaagcctctcttctggcttctgaggtggggggcaacttcaacaaatcaggttccaatggggagagagagggagctcttcctttgctcctggggcactggaagcatgtggtagaggtgaggagggaggaatcatggtgggggcaggaggtggtgttccagggacatgggaggaaactgcagtat

SEQ ID NO: 221293 - DNA, 485 bp, Homo sapiens
atctcccctgcttgcgcttctccttcctgccgccttgtgaagaaggtgccttgcttccccttccgccatgattctaagtttcctgaggcctccccagccctgtggaactgtgagttaattaagcctctttcctttataaattaccccatctcagatatttcttcatagcagtgtaagaacaactaacacacacgcccatggtgcttcttgactcctgatgtgcacgcgcggctttggtgagcataaaatccaaagcaaaagaccctgacaggacggaaatgcaccgacaggcagctgtggcccccrctctggaggttgtcgattcgtagtttcttatgtgtctgtgtttatgaaaatctctaagacaagcatttactcacggtatcatctgcaaagcgaccttaaagaggcctgaagtgagtctggggttgccagggctggtgatgggcccacctgagtctcctccacctggtgtgtacctctaa

SEQ ID NO: 221294 - DNA, 513 bp, Homo sapiens
atctcccctgcttgcgcttctccttcctgccgccttgtgaagaaggtgccttgcttccccttccgccatgattctaagtttcctgaggcctccccagccctgtggaactgtgagttaattaagcctctttcctttataaattaccccatctcagatatttcttcatagcagtgtaagaacaactaacacacacgcccatggtgcttcttgactcctgatgtgcacgcgcggctttggtgagcataaaatccaaagcaaaagaccctgacaggacggaaatgcaccgacaggcagctgtggcccccactctggagsttgtcgattcgtagtttcttatgtgtctgtgtttatgaaaatctctaagacaagcatttactcacggtatcatctgcaaagcgaccttaaagaggcctgaagtgagtctggggttgccagggctggtgatgggcccacctgagtctcctccacctggtgtgtacctctaacactaagctgaacaaagaagccattcac

SEQ ID NO: 221295 - DNA, 485 bp, Homo sapiens
atctcccctgcttgcgcttctccttcctgccgccttgtgaagaaggtgccttgcttccccttccgccatgattctaagtttcctgaggcctccccagccctgtggaactgtgagttaattaagcctctttcctttataaattaccccatctcagatatttcttcatagcagtgtaagaacaactaacacacacgcccatggtgcttcttgactcctgatgtgcacgcgcggctttggtgagcataaaatccaaagcaaaagaccctgacaggacggaaatgcaccgacaggcagctgtggcccccactctggaggttgtcgattcgtagtttcttaygtgtctgtgtttatgaaaatctctaagacaagcatttactcacggtatcatctgcaaagcgaccttaaagaggcctgaagtgagtctggggttgccagggctggtgatgggcccacctgagtctcctccacctggtgtgtacctctaa

SEQ ID NO: 221296 - DNA, 513 bp, Homo sapiens
atctcccctgcttgcgcttctccttcctgccgccttgtgaagaaggtgccttgcttccccttccgccatgattctaagtttcctgaggcctccccagccctgtggaactgtgagttaattaagcctctttcctttataaattaccccatctcagatatttcttcatagcagtgtragaacaactaacacacacgcccatggtgcttcttgactcctgatgtgcacgcgcggctttggtgagcataaaatccaaagcaaaagaccctgacaggacggaaatgcaccgacaggcagctgtggcccccactctggaggttgtcgattcgtagtttcttatgtgtctgtgtttatgaaaatctctaagacaagcatttactcacggtatcatctgcaaagcgaccttaaagaggcctgaagtgagtctggggttgccagggctggtgatgggcccacctgagtctcctccacctggtgtgtacctctaacactaagctgaacaaagaagccattcac

SEQ ID NO: 221297 - DNA, 420 bp, Homo sapiens
aaaagtgtatgacccctcccccaactcactcttttttcctcctgctctagccttgtaagaagtgcctgcctcctctttgccttctgccatgattgtaagcttccygagtcctccccagtcatgcctcctgtacaccctgcaaaactgtcagccaattaaacctcttttctttaaaaattatccagtctcaggtatttctttatagcagtacaagaacaaactaatacagaaggtgatgactgacatcttaaacacagtgagtttggcaagaggctgaccaaattcattaacagaagtgatcatagaattaattgtccaaatcaggacatttatgatagtgagaagtgggctattaataagagcattaggacagtaggtgcaaactggaagagtcccaggccaagtggcacatatgtccac

SEQ ID NO: 221298 - DNA, 557 bp, Homo sapiens
tgctgttctgcaggcctcccatggcactaccaataccataacctatcttcattttgaaacttttcaggttaccacttctaatttctactactctggtctctcataaatttctttttcctttctagtttctccgtattttgaacttccatacataaaagctgcccttccacaggaaaaaaattattttccttgcggtacaaaatacaaccagagcttgggaaaacttctttactaccaaaactttaaaaaggatgattttttggttctgacccattccatcaacctaatggtttcgaggggctattcagatcttacctgactgtattcataccccttagttggagaaacaaaaacaagaacacaccaaacttattagaataaagagtgcattctggaattctgttatttaactatcatcacagtaaytgaccagtttcaataaatgggtaaaaatctaatcaacgagaaagaaagtcactagaagaactggtaattccatcttaagaaaggaaaaaaggcctccaatcaaaaattatgcttgaacatatctaaaagaa

SEQ ID NO: 221299 - DNA, 526 bp, Homo sapiens
tcttgactcactgcaacctccacctcccaggctgaagcaattctgcctcagcctcccgagtagctgggattacaggcgcgcaccaccaccacctggctaatttttgtatttttagtagagacaaggtttaaccatattgaccaggctggtcttgaactcctgacctcaaatgttccacctgccacagcctcccaaagtgctgggattacaggcatgagccaccatgcccrgcctctggtgtctattcttataagtgcgctaatcggatcatgggcttctcaccctcctgacttcctctaaacctcattacctcccaaaagccccatggccaaataccatcacattggggctagggctttaacatagaattttgggggaaacacaattcagttcatagcactaagatatcagagagatgagttatacaaatataagcttaaactgttgaatatatttagaaagaatttttctagcatatgggacatttccaaaaaatagactgagttattaaaccattaaggaattc

SEQ ID NO: 221300 - DNA, 572 bp, Homo sapiens
gaatccattgaagagggctctgcccttgtgagtcaatcacctcttattagccccgcttctcaacactgctgcatttgagattagatttccaacacatgaatttggggaacacattcaaacaccttcagcatagggttgacaatcaaagaatgtttgctcagttcaacttaattttctaaacttatttttcatctataaaatggggagaaataagagatgttttatgagatgactattaaaaaacaatacattaatattctgaaatagtataaaatacacaaaatattttatatagagttaattaaatgactgtgttaacattatttggatatttactgacttrcaatggctctttgaaatgttctaaatcatatgacttatatgtttatacttgcagtggttatgactttgtgtctaaatcataattggtgaagctaagactcaaattcagttctatgactccaattcacaaattcttgactagtatgaagtgctggttttgctatacattactgagacgtataaacttacagtcttatttctaatgttcctaaagatagcataactgtaat

SEQ ID NO: 221301 - DNA, 411 bp, Homo sapiens
gtacgagattctaaaatcttgtttaggaacctgaaatcactccattctttgcctacagttgtgaaataaataccatcggaggaaagtgatcatttcacaacccttcccattctttcatcttccttcccctcacctaatttttcactgttgttgcactgaagatgtgaacaacgatgtttggcactgaagccaaataaaccagaaacaccacactgcmgttagacaagagaagtttgctgtgtacccagcactgttgggagatgcagagaagccagaggtggtattctcattcacagaagacacctaagcataggaacaaatgcacaacgtcatcagaaataagcatcattaatcgcatgttttctctgtgtgcaaaaaaggcctaatgccccccatagctatgggccagtg

SEQ ID NO: 221302 - DNA, 380 bp, Homo sapiens
tctgcaaatttgggaagcgctggtctggttgatctatttaccaatacagttgtaactcatctcattgtgcggctgtgattgacctgggtagacagtgaataatgaaatgccctataacacttttaaggacatatcctgctgcattgaaatagactatatgaattacaaaataggaaataatgattcatgggttcatcactttctagttaataaaaggtatttgcaaggctgggcatggtggctyatgcctgtaatcccagcactgggaggtagaggcgggtggatgacttgaggtcaggagtttgagaccagcctggccaacatggtgacactccgtctttactaaaataatataaaaattagccaggcgtggtggtgca

SEQ ID NO: 221303 - DNA, 545 bp, Homo sapiens
tcatgggttcatcactttctagttaataaaaggtatttgcaaggctgggcatggtggctcatgcctgtaatcccagcactgggaggtagaggcgggtggatgacttgaggtcaggagtttgagaccagcctggccaacatggtgacactccgtctttactaaaataatayaaaaattagccaggcgtggtggtgcaagcctgtaatgccagcacttcgggaggctgaggcaggagaatctaccttaacctgggaggtagaggtttcagtgagccgagatcatgccactgcactccaggcaggacaacagagcgagactctgtctcaaaaaaaaaaaaaaaggtatttgcagatgtcataatagaggatatacagtgtagtgctcaaggttctggagtcaggccgtttagcttcaaatcccagctccactttttcctatccatgggaccttggactcattttcctggtttcatcatctgggcctcattttcttcatctacaaaaatggtgggagcagaggactctcatggagtttgctgtgaagct

SEQ ID NO: 221304 - DNA, 398 bp, Homo sapiens
agaattccagagacgagacactgagacttgcctagctttatcctaagagtgagtgacaggttactctttctacytcattgggccactttctgagtgatgactgctatgtatcccagatggcaatattcacgtttctgaatctaagcacttttctttcttttctccttgcccgatcagctggacggccaaccgccatgtgatgtaagcctccatacgaaagcactgttgcagatagaagaagaggtggttgctgctcatgtagatctataaatatgtgttgtatgtcttttttgctttttttttaaaaaaaagaataactttttttgcctctttagattacatagaagcattgtagtcttggtagaaccagtatttttgttgtttatttataaggtaat

SEQ ID NO: 221305 - DNA, 414 bp, Homo sapiens
ctgagacttgcctagctttatcctaagagtgagtgacaggttactctttctacctcattgggccactttytgagtgatgactgctatgtatcccagatggcaatattcacgtttctgaatctaagcacttttctttcttttctccttgcccgatcagctggacggccaaccgccatgtgatgtaagcctccatacgaaagcactgttgcagatagaagaagaggtggttgctgctcatgtagatctataaatatgtgttgtatgtcttttttgctttttttttaaaaaaaagaataactttttttgcctctttagattacatagaagcattgtagtcttggtagaaccagtatttttgttgtttatttataaggtaattgtgtgtggggaaaagtgcagtatttacctgttgaa

SEQ ID NO: 221306 - DNA, 407 bp, Homo sapiens
cctagctttatcctaagagtgagtgacaggttactctttctacctcattgggccactttctgagtgatgactgctatgtatcccagrtggcaatattcacgtttctgaatctaagcacttttctttcttttctccttgcccgatcagctggacggccaaccgccatgtgatgtaagcctccatacgaaagcactgttgcagatagaagaagaggtggttgctgctcatgtagatctataaatatgtgttgtatgtcttttttgctttttttttaaaaaaaagaataactttttttgcctctttagattacatagaagcattgtagtcttggtagaaccagtatttttgttgtttatttataaggtaattgtgtgtggggaaaagtgcagtatttacctgttgaattc

SEQ ID NO: 221307 - DNA, 407 bp, Homo sapiens
cctagctttatcctaagagtgagtgacaggttactctttctacctcattgggccactttctgagtgatgactgctatgtatcccagatggcaatattcacrtttctgaatctaagcacttttctttcttttctccttgcccgatcagctggacggccaaccgccatgtgatgtaagcctccatacgaaagcactgttgcagatagaagaagaggtggttgctgctcatgtagatctataaatatgtgttgtatgtcttttttgctttttttttaaaaaaaagaataactttttttgcctctttagattacatagaagcattgtagtcttggtagaaccagtatttttgttgtttatttataaggtaattgtgtgtggggaaaagtgcagtatttacctgttgaattc

SEQ ID NO: 221308 - DNA, 620 bp, Homo sapiens
cagatttcctaaaagaatttggcttgttacccaaaatgataactatgtgaggcaatatatatgttaattagctagctttagtcattccataatgtatatatatatacttcaaagcatcatgttgtacataataaatacatgcaattttatgtcaatttaaataataaaagtgcctagtttctttattctaagtaattccttagccatccatcccacctttctgttgttctcatttagtaagatggttttatatcagctgttgctgttactcttatgctaatgcattgaacatgagttttgcagcaggaaaatgcattgaacatgagttttgcagcagtagggcaatccattttcagtgacaggttgtaatgaackgagagggttacactatcaaatgcacttctggttggagtgatggaagtccagcatatacaatagtcaaatagtcaaaaaatggccttttgcatgctggttagaaatatctaatatgaccacattcagaaaagatggtgtaaggcatgttggaaagaaacctttctactagaggctaattctccagaattttctttagcaacctgtgagtgattgcgctctgtctcagtcaatattgcagggaggca

SEQ ID NO: 221309 - DNA, 480 bp, Homo sapiens
tgctatctcagggcataagaacttggacaacattttttaaaaagttgcttgccactttcctgtgtctcatctgggaggctccagtgcttccactgcagcatacccagggtcaacccctttgctttttggtccaatgagatagaattatcaggagaaatgttcttaagtgaagtcaaggttcccactcaggcattctcacaggtactacttaggcacaccttgctttgacgaacttgtggtttccactgaaacaagttgttctgcatgcttctcactacagctataactacgtgacctcrcagtttcagtttgtcagtaatttcactgaaggcagagcccagatactaatttgtctgaaacattttaggcccaacatctcatgaaacaggctccaggcaagaactcttggacttgggagccaacaaacatgtttcacctagtctttagcctactcaaatataggctacagactttcaaaac

SEQ ID NO: 221310 - DNA, 523 bp, Homo sapiens
gccactgcagaactgaatctaaaccctgccttcccaagaaggactaaggtgagattaaaccacaaatcatataacccagctaactttcttatttgcacaaactactgcaggcatacacctacaccgtgggcacagcatatgggaacctaggtacagaatgaccgtcacctaaagtgatgcggggaaaggagggccacaactggcccatattttacatttggctataaagcattgactctactgcaaatggccctaaaatctcagaagcaagtactcacccccctaaaaaaaggtggagtacagtaaaaagaacctgctagaaatcttgcactcctgttctcaccataacctctttccttcaggcttccaagggagaaccacttagcctggtcacagaaagcmccaggtcagaaaattcatcatgttcccctaaccaaagcccaactggtcccagcctgaggcagacagaatgttcctgggagtaaaggggggggggggtcatcaaaattttcttagcttcaaa

SEQ ID NO: 221311 - DNA, 467 bp, Homo sapiens
tatctctatcagattacttatcacattgttttgtaacaatttattctctgtattgccaactaagccgtaggtgcctcctatatcatagacagtgtctcaattcactgctgtatcccccacacctagcacaaactgtatctggcatgtagtgggtaccccgtagttgtttgttggatgaaggaaacatgtattttatgatgcaggcttttgtgyaaatgaattctttatcatccttttagataccccatcctactttgtgtttaagtccaaaatcaaagctatttttttgtatatatatattttttcatagagatggggtttcaccatgttggtcaggctggtctcgaactcctgacttcatgatccgcctgcctcggcctcccaaagtgctgggattgcaggcatgagccaccgcgcccggccaaagctatttttttctaacatctgtagtcaagtcatcaggcaaa

SEQ ID NO: 221312 - DNA, 534 bp, Homo sapiens
ctccccattgtttaaggtttgtttactttctttgtgcaagtgttctttgttcaaattctttcggtgtaactatgtttattttctctagtttgcaaatattgatggtggtggaaaagatggctcttgaggaagcaagaaggactgagatgctgatgaagtgcagggaaaacgttccagccctgtcccttgatttgctaggcctggctagttaggttgtgtttcctgagatcagccatatctcatcccatatcagggccttggggttgccaccatcagccctccctccctctagttcaatacttagctatgggtctatctgaatctggttcctgattggtaaattataaagtaggatgaaagtagggtttctcaacccgggatccacagactagctgaagtctaccaaattgtgagtgaatatgtgtatttgtattaatttactgaggctgctataacaaattagcacagaaatttattttctcaccrttctggataccagaagtcagaaatcaaagggtcaggagggtcaagctt

SEQ ID NO: 221313 - DNA, 470 bp, Homo sapiens
attgccacttacaaaccatcttcatagttgatggttgaaatcctgagagtggatgatctcatctagggaaaggaatacagtaagaaaagaagaagattgatgataaaacattagggaaggcagagtcatgtttttgttgttgttgtctttttartcagtgagaaggtcctgtgcatgttagtaagcaaagagagagtcaaaacatccaacaggagcaggaagagaagagttacccagcactgcacagttatcctgagaaatagaggacaatgcccctctcttcaggtaggttatgatccagctgtgtagacaagccatggtactagctatattagtcagtagagttgtccatgctgaatgtgacaatacgtgttataaatgttcatagggaagtcaggaaggttgaacttggagaatggctggtgtacatcatgttttgggattggagagaaagatgctttcatgaattc

SEQ ID NO: 221314 - DNA, 470 bp, Homo sapiens
attgccacttacaaaccatcttcatagttgatggttgaaatcctgagagtggatgatctcatctagggaaaggaatacagtaagaaaagaagaagattgatgataaaacattagggaaggcagagtcatgtttttgttgttgttgtctttttagtcagtgagaaggtcctgtgcatgttagtaagcaaagagagagtcaaaacatccaacaggagcaggaagagaagagttacccagcactgcacagttatcctgagaaatagaggacaatgcccctctcttcaggtaggttatgatccagctgtgtagacaagccatggtactagctatattagtcagtagagttgtccatgctgaatgtgacaatacgtgttataaatgttcataggraagtcaggaaggttgaacttggagaatggctggtgtacatcatgttttgggattggagagaaagatgctttcatgaattc

SEQ ID NO: 221315 - DNA, 581 bp, Homo sapiens
aaaaaattttaaaaactcatcacaaaagatggtaatgcacacctgtagtcccagctacttgggagcctgaggcaggagaatagtttgagcccaggagttcaatgtcgcagtgagctgagatgagatcatctcactgcactccagtctgggagacaaagcatgacccactctccaaaaaattaaaaaaaaaaaaaaaagaaaagaaaaacaatattattaatcaagctattcaataaaagtaaacagaattttattctgaaaaagacaatatgtttgaggtcatttaaaacacctattgtttattaagaaaacttattaagtgatagattcagtctttacacagagtgagtcttatttactccatttcaagggtatgctttgaaaaccaaacaatatagcgaacaaaaaacaaaaagcctaaacaatttcataaataacaatatgggtaaagtaacaaacataaatggcacrctctacaagatagagcctcttttaccaatataaatattaaaatataagcaggtcatcttaaccaatgatttacaataagggaagaaaagaaaaatatctatatgattctt

SEQ ID NO: 221316 - DNA, 593 bp, Homo sapiens
ggaaaaaaaaacggtacccttacatgcttgtactctttctctttagttcaaaaatattcatgtaatatagtactttggttatatttagtctgttttttaaaggaaagaatattccttgagcactcatctatgcaaggtgaaagataaaactacaacagaatatactcttacttgccttttgatttttaatagtagggctcaccaaaaagttaaatcatctattactagactatgttgatttcaactttttttttcttctttttcctttgtatttagaaattttaagcatttattaatgctcatattgacttttcttggggttcttatcaaggttctggtctagtatgtagactgtacacatcagtcccaccataatggtcgaccatgtstaaaattcctagttctgtctggttagtgcctgggcctccatggactgtcttttaatattctgatgattatctctacataggctgccagatacttccaagaaaaaatccgcctatctaggcttatgcatgttatataataccacagatatgattaggttatacacacatttaaaatgctgaataatgaattattttagattttca

SEQ ID NO: 221317 - DNA, 496 bp, Homo sapiens
gttgcaaaataaaggtactaagtttttcttaatgccaatgaaatatatacccaagtggctggaatatctggccctgtgagataattcaatccatctcttttcaaaaataaaaaaatccacatttaaatggtacaaacacacacatacaaagtaaatgatgaaaatgatatcaaacacattggttaattcttcttattcttaattttatagtgatttacgtagtgtgccaggttaaaaagaattctatataaatgtttccaatttgctcactttttaaaatcagtgactttatcagggaatcagttgtagaaaaatctatgcctcaggatggaaaaccatctagtgaattwtcagttctatgtattaaaaggctgttttgagtattcatatgcacaaattcatagttccagataaaggtcagcctcaccatacacctgggtacatatgtggtacaaatatctaagtttgaaagctttcacaactggtaaatttaaat

SEQ ID NO: 221318 - DNA, 428 bp, Homo sapiens
tgccttctttaaaacttttatctctggctctctyaattttgaattaaaccagtcccatcctcatctttccaactgctcatgccctgctgagttaattatctctgactccatcctatagacaaacattctttttttaaaaaaattttttttatagagatggggtctcaccatgtttcccaggctggtctcgaactcctggtctcaaacaatcctccagccttggcctcccaaagttctgagattataggtatgagccactgtggctggccctgaacccgtattcttaagttctattctctactagcatctcttgtcctctcttatctggcaaggtcagcccaagctttaactatcaacctccatgcagaatctgtctcttcattaatgttcctaaactcagatactctatgaaatcccagatcttcatt

SEQ ID NO: 221319 - DNA, 436 bp, Homo sapiens
tctagacaatttttccagatttgccttctttaaaacttttatctctggctctctcaattttgaattaaaccagtcccatcctcatctttccaactgctcatgccctgctgagttaattatctctgactccatcctatagacaaacattctttttttaaaaaaattttttttatagagatggggtctcaccatgtttcccaggctggtctcgaactcctggtctcaaacaatcctccagccttggcctcccaaagttctgagattataggtatgagccactgtggctggccctgaacccgtattcttaagttctattctctactagcatctcttgtcctctcttatctggcaaggtcagcccaagctttaastatcaacctccatgcagaatctgtctcttcattaatgttcctaaactcagatactctatgaaatc

SEQ ID NO: 221320 - DNA, 536 bp, Homo sapiens
gcaatgggaggggattatttttaatgtcctttgtattaataagtccaaataaggggaaccccatacccactgtgaatgtaaaaaggcacgatgcttgtgaaatggcataacctggatactgaactcaggcaaatcctgagaaaattgcactgatgtccttggagaggtgctgggtccaaatgagagagtgaaggcaagtctgtgacctgctcaagtcactccattggccacatctccaacaataaaaccaaatcaccaattggccttgatgccaaagatcacagtgatgatcataatgatctccccttaaaagcagatgagttccccaagtttaggaaagaggagggtgtggtggggtgcttcccatagctctggggtacaaagccgcactttctacagtgaacrttgatcacaagattgaaaaccatctacttgaggtttgtttttagtcttcttaggagacatggcaaagaagtttgaagggtctaaattatctacgatgctctcttcaactcaaagcatttaactaagtacct

SEQ ID NO: 221321 - DNA, 610 bp, Homo sapiens
tgagggccctcactcccatactccactgcatctgagacttcagggcacaaccaagacagaggcaatgggaggggattatttttaatgtcctttgtattaataagtccaaataaggggaaccccatacccactgtgaatgtaaaaaggcacgatgcttgtgaaatggcataacctggatactgaactcaggcaaatcctgagaaaattgcactgatgtccttggagaggtgctgggtccaaatgagagagtgaaggcaagtctgtgacctgctcaagtcactccattggccacatctccaacaataaaaccaaatcaccaattggccttgatgccaaagatcacagtgatgatcataatgatctccccttaaaagcagatgagttccccaagtttaggaaagaggagggtgtggtggggtgcttcccatagctctggggtacaaagccgcactttctacagtgaacgttgatcacaagattgaaaaccatctacttgaggtttgtttttagtcttcttaggagacatggcaaagaagtttgaagkgtctaaattatctacgatgctctcttcaactcaaagcatttaactaagtacctaacactgcctgct

SEQ ID NO: 221322 - DNA, 430 bp, Homo sapiens
  misc_feature (1)...(430): n = A,T,C or G
tctgctctgtttttccataatgtttgtcactttctacctcctttgtaacttactttttcattgggtccatcatttacagtctgtctgtctcttgctggaacttaatctccacaagggcagagatttttttttcccacaggtataagcccttgaactagtgcctgaatgtagttgataacttaatattagtgtttgttgagtgaatgaatgagtagtcccagagtgatggagctggaagaacagaaaggtgcattcggtgtagcaacttcactcaattcaacaataacgttttatcaaawgctagttccattcagatcctggcattgggcatagcaaggtaaattagatgttttctcatgtgcaactgttgttgctaactagacgggaaaacagctcaaaaaaggttaagtgnnnnnnnnnnnnnnnnnnn

SEQ ID NO: 221323 - DNA, 590 bp, Homo sapiens
ctattttgtccaagatttgtattgataaggttgattctattatttctttagaatgtacaattaaagctggacgtggtgactcatgcttgtaatcccaagcactttgggaaggtggggtgggtggatcgcttgagcctaggagttcgagaccagcctgggcaacaaggcaaaaccctatctctactaaaaatacaaaaattagccggtatggcagtgcatgcgtatagtcccagctacttgggaggctgaggtgggagaatcgcttgaacccaggaggaggagtttgcagtgagctgaaatccagccattgcactgcagcctaggcggcagagcaagagcttgtctcaaaaaaacaacaaaaaaagtacaattaaatttaacttcaatttatgcctattttaagaagggttggcatagattttctaagtcatatttaaatatttttaatttgtcttgactttttattgaggctggaacactgcaaccatyttatcaagattcttttttttaagaactactcagcacacttttaataattgtcgtgtgttccttagtattttgttacaatcaccaagttaattttaatggca

SEQ ID NO: 221324 - DNA, 459 bp, Homo sapiens
cacacaacatttattgataactttcgctcttatatgggtgtggttcagggcaccctgaaacaattactgtaatagtaacatttaagatctcccatcacaggtcaccattaacagatacagtaataactaaaaagtttggaaattttatgagaattactgaaatgtgaccctgaaacacaaagtgagcacatattgttggaaaaatggcrtcgatagacttgctcaacacagagttgccacaaatcttcaatttgtaaaaaatgcagtatccacaaattgcagtaaaacaaggtatgcctttacatatcagtgaaatgaaccacagggttttttgaaagagacagcatgtgtgtgtgtgcacacacatggacttacacacacacgcacatacttacctgggaattcaaaatatactaaattcctttatatagataggccctttcaaaacagtgaagaaag

SEQ ID NO: 221325 - DNA, 525 bp, Homo sapiens
aattgctgctacctgtcaagaactgcaaaataactgagcttttacccctacatgcaagctaaccaaagagatgcaaggcttgtgcctcagaggcaatactcgattatacacagtagagcaacagaatgagcttcatgttacccaagttccctgctctccaagtcctacaggggcaatgcagagtggtctaagtgggctcaacacatgcaatgggcttgtttcacagtagaggaacatcaagcttggaagaacacatatttctgatactgagtagttygcatacctttgcttgccctgagtggagacattttctttattaaattaggcaataaacaaactggtcctatacttcaaaatgaggcagtatctcattcagcaaaacgtatttgcttgtacaattatccttgaaaaggtatcacagaacaaagcaaccaatccctctgctctcaatacatgcagtaatgtgggagactgatgggaaattttctttcaaaactattaaaaagctataatagaataatccaa

SEQ ID NO: 221326 - DNA, 525 bp, Homo sapiens
aattgctgctacctgtcaagaactgcaaaataactgagcttttacccctacatgcaagctaaccaaagagatgcaaggcttgtgcctcagaggcaatactcgattatacacagtagagcaacagaatgagcttcatgttacccaagttccctgctctccaagtcctacaggggcaatgcagagtggtctaagtgggctcaacacatgcaatgggcttgtttcacagtagaggaacatcaagcttggaagaacacatatttctgatactgagtagtttgcatacctttgcttgccctgagtggagacattttctttattaaattaggcaataaacaaactggtcctatacttcaaaatgaggcagtatctcattcagcaaaacrtatttgcttgtacaattatccttgaaaaggtatcacagaacaaagcaaccaatccctctgctctcaatacatgcagtaatgtgggagactgatgggaaattttctttcaaaactattaaaaagctataatagaataatccaa

SEQ ID NO: 221327 - DNA, 361 bp, Homo sapiens
gaatggaacctccccactcccacattacaaagtgtcaaggccctctcacaaaattaaagaaagaggcagaacttaactgtatcattgcctgtaaggaaaagaacatatcatcatattgagaggtttaatgagtgataattttgtcctttttgtactaagtgttttatgtatttttccattaggttattatctccttgtctaatatctggacgatcaactttgtgtacttgatttacaggcacaagaagtatttcaaaaatgcrtttcagttcaagaagaatggaaacagtttcaccatctctgctactgggagctaatgtggattaatgttttccaacaaaactggatgcaggcatattac

SEQ ID NO: 221328 - DNA, 569 bp, Homo sapiens
gaaaattaaggcactttaataacaaacttcattatgtgaaacttgttgaatattaacatacaatataccttgtatattaatgccatagtttttagaaacactaatttaaacaacaaatttaaggggtgctggcatatcccagtgacaccttcagttttattgctgcttagtattttctagtaaattagttttaattattggtagtctgttgggcaccatttgggaaagaaataaattggtctcagtgtagcagacttgtagccaaaaactttgaataaaaaatragtataataaagaatattatttcatttttaaaggaattgtattattttgaagtgctgtgtggttgatatggtttggttgtgtctctacccaaatctcttattgaattgtagttcccataatccccacatgggagggacccagtgggaggtgactgaatcatgggggcagttttccccatgctattctcatgatagtgattgagttctcacgagatttgatggttttataaggggcttttccccctttgctcagcacttctctttcctgccgccctgtgaagaaga

SEQ ID NO: 221329 - DNA, 569 bp, Homo sapiens
gaaaattaaggcactttaataacaaacttcattatgtgaaacttgttgaatattaacatacaatataccttgtatattaatgccatagtttttagaaacactaatttaaacaacaaatttaaggggtgctggcatatcccagtgacaccttcagttttattgctgcttagtattttctagtaaattagttttaattattggtagtctgttgggcaccatttgggaaagaaataaattggtctcagtgtagcagacttgtagccaaaaactttgaataaaaaataagtataataaagaatattatttcatttttaaaggaattgtattattttgaagtgctgygtggttgatatggtttggttgtgtctctacccaaatctcttattgaattgtagttcccataatccccacatgggagggacccagtgggaggtgactgaatcatgggggcagttttccccatgctattctcatgatagtgattgagttctcacgagatttgatggttttataaggggcttttccccctttgctcagcacttctctttcctgccgccctgtgaagaaga

SEQ ID NO: 221330 - DNA, 569 bp, Homo sapiens
gaaaattaaggcactttaataacaaacttcattatgtgaaacttgttgaatattaacatacaatataccttgtatattaatgccatagtttttagaaacactaatttaaacaacaaatttaaggggtgctggcatatcccagtgacaccttcagttttattgctgcttagtattttctagtaaattagttttaattattggtagtctgttgggcaccatttgggaaagaaataaattggtctcagtgtagcagacttgtagccaaaaactttgaataaaaaataagtataataaagaatattatttcatttttaaaggaattgtattattttgaagtgctgtgtggttgatatggtttggttgtgtctctacccaaatctcttattgaattgtagttcccataatccccacatgggagggacccagtgggaggtgactgaatcatgggggcagttttccccatgctattctcatgatagtgaktgagttctcacgagatttgatggttttataaggggcttttccccctttgctcagcacttctctttcctgccgccctgtgaagaaga

SEQ ID NO: 221331 - DNA, 562 bp, Homo sapiens
ttaatcttgctccaaatctttgcttttttaagatagattcctagaagtggaattattacaaagactatattttaagccaattaatgccaaccaattgctttccaaaaagacgtaagatgatacccacttacatttttatcagcaatgcatgaatactcatcttaccaaaccttcgccagcaccaaatttcttaactcctaaaatggaaaagtgtacttcacacaaaataattgatatcttgacaataaggttattttgtctacttcttggttaaaatttgaatattaatttatgataattcagtcaaagttagttattatataatctctattacggtcagtcttgtggttgaattggttgtgtattcctttatctgttgccaccatcactggtttacgagcctctggaaagcagcaagggatattatgtacctcccacaccacctagaacagtatcttgtacacagttcatgttcaacaattatttgtggagtggaattgattatgctatctagcctttaggaatatrtcagccaatcttgggaaagggtgagatatagatt

SEQ ID NO: 221332 - DNA, 653 bp, Homo sapiens
ctacaaatggccaacaaacttatgaaaaaatgctcaacatcacaaataaccagggaaatgcaaatcaaaaccacaatgtgataccaccttactcctgtaagaatggccataatcaaaacatcaaaaaacagtaatgttggcatggatgtggtgaacaggaaacacttctacactgctggtgggaatgtagactagtacagccactgtggaaaatggtgtggagattccttaaagaactaaacgtagaactaccatttgatccagcaatcccactactgggtatctactcagaggaaaagaagtcattatgcgaaaaagatacttgcacatgcatgtttatagcagcacaatttgcaactgcaaaaacgtggaaccaacccaaatgcccatgagtcaatgagtggataaagaaactgtggtatatatatgtgtgtgtgtgatggaatactcttyggctataaaaaggaattaattaacagcatttgcagtgacctggatgaaattggagactattattctaaatgaagtaactcaggaatggaaaaccaaacattgtgtgttctcactgatatgtgggagctaaactataaggacacaaaggcataagaatgatgcaatggactttgaggacttcaagggaagcgtgggaaggg

SEQ ID NO: 221333 - DNA, 653 bp, Homo sapiens
ctacaaatggccaacaaacttatgaaaaaatgctcaacatcacaaataaccagggaaatgcaaatcaaaaccacaatgtgataccaccttactcctgtaagaatggccataatcaaaacatcaaaaaacagtaatgttggcatggatgtggtgaacaggaaacacttctacactgctggtgggaatgtagactagtacagccactgtggaaaatggtgtggagattccttaaagaactaaacgtagaactaccatttgatccagcaatcccactactgggtatctactcagaggaaaagaagtcattatgcgaaaaagatacttgcacatgcatgtttatagcagcacaatttgcaactgcaaaaacgtggaaccaacccaaatgcccatgagtcaatgagtggataaagaaactgtggtatatatatgtgtgtgtgtgatggaatactcttcggctataaaaaggaattaattaacagcatttgcagtgacctggatgaaattggagactattattctaaatgaagtaactcaggaatggaaaaccaaacattgtgtgttctcactgatatgtgggagctaaactataaggacacaaakgcataagaatgatgcaatggactttgaggacttcaagggaagcgtgggaaggg

SEQ ID NO: 221334 - DNA, 436 bp, Homo sapiens
ttggcagaagaagccaatacattccctttagatctggagcccatgagaaggagatattcacactataaaaggagaatctttagagggtaaccccaggcatgtaattattatcacaagatgtttgaaagctctggcagagattttgacttgcaatcgtctggaatcattgcttggtagactgggcaattctcctgcaacttttaggactaatgagcttggaaacaagagggacactgcccttgctttggcatatgggatkgtaaacagcagcaggatggacatgctgatggtctagcttctacagggcatgtagctattaactgatagaatcaacagcctaaccttgcacaacagcctaaccttgcaagggagagcccccaccacccggccttgcttatctctgctgacccaaggaagcatcttgggtcccctgttt

SEQ ID NO: 221335 - DNA, 437 bp, Homo sapiens
ggggaccctggattctcttgggctctgggaaacacagttagaaaagcactggtagaatctaacacctgaacgagaagagaagtccacagaagcagcgtggtttgccagccacgtggcaggttattgaagaactagagctacacctcagctctcccactccaccctactgcacttctgcctgaccccaacccctaacctaactgttctctgttgcctctccagaattgccgtcyacgctaagccttttgcccacatctctactgtttagagacggaactgaggtctcagacatctctgaggtttgagaagggacattaaattttatacatgtgcaatcagcttcaggcacttaatagagacatttaaactcacatcaggcccaagcagatgtagagggaaatactgtcaattagtgagtggctaattaatctttcttt

SEQ ID NO: 221336 - DNA, 606 bp, Homo sapiens
taagctttggttatttgcaggtaatatgattgtttatatagaaactcctcaagaatatggacataatttaacaaaacagagcacctaaaataccaacaaaatcataatamatccaggaataaatctaacaaaatttgtgcaagacttctttgaaattatatatgttattaaaatacattaaagtaaacgtaaataaatgcatatattatttatctatttatttatttattattattatttttttttgagatgaggtctcactatgttgcccaggttggtctcgaactcctgggctcaagtgatctgttcaccttggcctcccaaaatgctgggattacaagcatgagccaccacacctggccttatatttattttgtatacatataatatttgtgatagaaggacacaatatattaaaagtttggtcattctcttcaaattgctctataaataaaatgcaattcctttcaaattcaatccagagctgtttgcagaacttgataagcagattctaaaatttttatggaaaaatgaagcacaagaatagctgaaacacccctgtagaggatgaacaggatgaggcgagctgttttgccagttttcatt

SEQ ID NO: 221337 - DNA, 428 bp, Homo sapiens
gtcttttagatgtccatttagcaaaagtctacgggaagtaacttgtacttttttgtttaaaaatatctttattttgccctcatgtctgaatgaaaatttaatatggtaagtatttggttgacaatcatttaatttatctatgaagattttgtgaagcctgcatagagggtgggtctctccagaaagggttaaagtggtcacaaggtcctatcaacccagcaccccttgaactaggtatcttggcttgggatcttgtaggtaataygaatttgaatcccagatctatctgagggaaagcctttattactaatgtccaatgaagccttccccaccacccccccgcatctagagcctaggtggatcattttctagtacgtgccttcatcaagattataaccctttcaggttcccagctggatgtggagtgt

SEQ ID NO: 221338 - DNA, 594 bp, Homo sapiens
tgcaagcatccctcctaacccagtggctaaatgtagccacaccaatggcctctgacaagagcagcagggctgctacccaggtgaacccagtccagctacagaatcctgaacaacaacaacaacaacaacaaacagttattgtgtcttaagccacaaagtttgcaatagtttgatatgtagcaatagataacccaaacaaataactggctcctttgcctaagagagagaagttaataaagtttgaatgaaaacacccttaccccaaagggttaagaactaacttcttcattttcaacctagtactttcataagcaactctttcaagtcccacttagagggagtgagrtggttaaaagccaagtgaacttgagtagtgaacttcaatggaatttgttgtttttcagcccacatattttaatcaaagaagtgtctccttcccattaaagctccaaatctttcattttcctctctgtctgctgtttgtatgtgcatgtttgctgagaagtacactcaaacacatgtttattcccttgaacatttctttacctacctttccagctttactattcctcagaaatcccttcccctcagtgt

SEQ ID NO: 221339 - DNA, 509 bp, Homo sapiens
agtaggtaagagcctcatcacttcttcacagtttagacagacacatagggacagaaggctgattacacagtgctgctcagggtagacagcaaggctgtgacattcctaggctgactgataagcgactagtgggagccatttgcagagcatgttggaagatgcaaaactcccttacagataacattgaaaaaaaatcttatttgagaattctattgaaaaatttattatgtgactacatcagccttgaaaaaygtgtaacacattagccagaaaagggttactagaacatggatgactgaagaagagaaatccagcaaaaccaaagagaaagtctcttaaatgtgcatagattccaaccagcagggatggaaaatcggaaattatgagaacactgtcatattgtttcattttataaattattcttaaattaatcatatgctagaatacataaaatatacattttatggagtagattcatgattatctttcatattgtgttcataaagctt

SEQ ID NO: 221340 - DNA, 539 bp, Homo sapiens
ccagctctgccacttatgaactgtgccacctttgacaagttgtataatgtcatggagccctcagctttcttatttgtgacataggcctaaaattgttgatagtgagaagtacataaattttcccctaaaagcttactggccaggcaagtagcaaatgtgtagtaaatggaggctactattatgggtctggagtccatccaggctaaagggtgggaatgtgggtggaggggtagacgtggattttcaagacttttaaatctttttaaaaatttttatattttagagacagggtttcatcctgtcacccaggctggagtgctcacagcagcctcgaactcctgggctaacgtgatcctccaaccttggcctcctaaagtgctgggattttaggcttgagcccctgggtctggccctaaatcatgtttagtaatttactttccttacagaaaatatgcatatgttatacaaaatgcagaaaatgcagataaggatgaagacagcagagagtctyataactccagaagtaagagatgaacact

SEQ ID NO: 221341 - DNA, 417 bp, Homo sapiens
gttggataaatggtgagctaagatgagctaacatcagtgggaacaccaactacttcttaacccagcatgctctgtagttctatggtaggagtcattagcattatggaatagaaatacgattacaagttcatattaacttgttacatgaagttcaccatctcagagagagtgtactgtgaacttgttgataaaaactgaggtcatcaaaaaatgacagtatgtgtgcactcacatgtatacacttctgtgtgagagtttgtgcaggtgtgttagcatgtgtgggtaaatgtgcttgtaactttagaggaaggaaataatagtggtatagacatgatgagaaaaggtaagcttgcctcagagaaaccccattttcaggctctttggcaaygttgataaaatgtgacagtttatacaagg

SEQ ID NO: 221342 - DNA, 587 bp, Homo sapiens
ttgtaaggtcagggctaccaagtaccctgataggacatctgacaaactgctaggaatgagtaggtggctgtattagattgctagggttgcttagagccaaaataaatgagtgccacaaactgggtgccacagactgccacgaagtgccactgggtggcttaaacaacaggaatttattgtctcatggttttagaggccagaagtccaaaatcaagggttcagcagagttggttccttctgaggactgttagggctcccctaacttctggtggtttcctggtaatcattgacattgcccagttggtacaagcattgacctgatcgctgccttcatcttcacatgatcttctccctgtgtgcaygtctgagtccaaatttccctttgttataaagcaactaatcatgtctgtcctactacagtatgaccttatcctaactgaactaattacatctgcaatgaccctatttctaagcaaggtcacattctgaggaattgtggattaggatttcaacatgtgaattttgggggcagaggggacacaacccttaacagtgacagtgggagagaacagagtcaggcatcagac

SEQ ID NO: 221343 - DNA, 618 bp, Homo sapiens
gaatatctttgaaagcctcttgtcctatttttgtaaatgttcacgagagaatctaattcataacagcaagacatggcatgtaaagtttttaatttaaataaaacctttggcccttctagcttatttctaagcttgcttcttggtcattgtgatttcaaccattgggatattgatgttttctgtcttctttcttctcttgctaagaatggaaataaccaatacagtgttttgaattatcaagatatgccaagcagattatcctttgaagtcttcttgtcagaacatgttttcttttcattttaatcaagactgaatcagaattttagctttataactgttgttcctcatcacattcctctgtctctcctcctacctctgatcaaattcctgcttcactrgtttccccattttccatgttcaaacctctttcatcttaaaaaatgtagttcctaaaaatttgatagcctaatcttacaaacctactcagctgacacccttcctctctttccatctcagccaacattctcggaagagttgatgatgcttttcatctccattttctgcttcctatcaccattagttcatggaaacagctctccctaagtcactgatgacctt

SEQ ID NO: 221344 - DNA, 630 bp, Homo sapiens
cataaaactaaactgtgtcagaaagacaacagtctttaaaatgaggttaatttcacatattattataaaatacaaagaataaaactttgtagagtggacagtatgctcaaaagccacacttttaaaaaaatataaaattaatcacaatattggttagtgtaaccacagataatatttatgtgtcagcataattaagagtaagtaacataaaaaaaatccactagaacttccattttcactgtcctactgagcacaaaaatttaatttacctaataatctagaacaatgatattctaaccactgttacataaagcccaataagaaatacattttacatcacagcctaatactgtcttttacagacagccacacacacacacacacacacacacacacacacacacacacasagagacataaattttatgaaataatattcttactacctaagaactctcatattttctattcagttcattctattaatttaagaaaaaatgctgattgccattcactaaattaatgacaagaccctttaatgagttgcaacccacatttgagaaacattagcttagaaaacataaatatatgctatattctaccaccactcctataaaggcaacaccatgt

SEQ ID NO: 221345 - DNA, 572 bp, Homo sapiens
gggcagggcttggatggattggcatggtggcttgaggctggaaaaggctaccatgtggwataaacaaagccagagtatttggaaactacagagagaaaatggtttcccttgatatgaacgtaggataaatataggagtgaaaacagaaataactggaatgtgaggctggagccaggttcgcaagggctttgaatgaggttatatgccattgaatgggcaatgtggatctggttcagtgattgagcagaatctttggaaaaattatggcattgatgggtgataatagtttagtggaaggaaagcctgaagagtgtaagtaaagctgaataactactctaataatctgtgaaggagtcaatgaggttttaaactaggggaaatccgtgtacacatgagggacattttagatgtttaattcgtgcatgcatgatactacttaaggggaaggggaaggagaaggaagaatcaagaattattccagaaaggtgagtctgcaggaattcaagaacagagaagtgaggaacagcacatttgggaaggaatttggatatgaccttggacatcctgagggg

SEQ ID NO: 221346 - DNA, 569 bp, Homo sapiens
atgggcagggcttggatggattggcatggtggcttgaggctggaaaaggctaccatgtggtataaacaaagccagagtatttggaaactacagagagaaaatggtttcccttgatatgaacgtaggataaatataggagtgaaaacagaaataactggaatgtgaggctggagccaggttcgcaagggctttgaatgaggttatatgccattgaatgggcaatgtggatctggttcagtgattgagcagaatctttggaaaaattmtggcattgatgggtgataatagtttagtggaaggaaagcctgaagagtgtaagtaaagctgaataactactctaataatctgtgaaggagtcaatgaggttttaaactaggggaaatccgtgtacacatgagggacattttagatgtttaattcgtgcatgcatgatactacttaaggggaaggggaaggagaaggaagaatcaagaattattccagaaaggtgagtctgcaggaattcaagaacagagaagtgaggaacagcacatttgggaaggaatttggatatgaccttggacatcctg

SEQ ID NO: 221347 - DNA, 605 bp, Homo sapiens
tccttgttgcttagcgcctagatattctgctctgttaatttcccttggctttgaagggaagagagaatagcagtctagagggagctggctttgatgggaagtatgattttcaggtagatttcactgtctcatgcaatcrtgtgatttatgtcatttccctagtaactatttctggtgacagcagtcacttcttcatgccagccattttatagattttatgaatgcaaaggaatattatttagctacttataataacaatcatatgggttattatcaattttaaaaatgctaatatgtaataatcaccaaaaaggagaacaattcaggattaatacacatgccagctgcaattctgcaaaaatttaattttataatcataagatcagaagataatttggtgagagagtttagaatctaataatgttcgttcatttcctttttttccatagaaggctctggtgtgattcaggctttgcttaattttcatgtaaacctggaaatatggaggaggagtggctcttggaaattctgacttggagactctcaggcttattttccaaataagtgtgaaaaactgctggagattccttcctcaggccagaccc

SEQ ID NO: 221348 - DNA, 568 bp, Homo sapiens
gcttgtcactttaaggaaaacaactgatgtaatttgtttacattaatacaaatcaaccttccaagtgaaattagaattttggaaaacttgtatgtgctgccatgagtttaacagcttccccatccttaaagactttttaatgagatcaatggtggtgttcacaaatttgattttaaaatattgtgtaatgaaatgtctcaacccttggaagatctgcatactttgaagaaacagtattttccaaatgaccctttttcaactacrtatctgtgtgaggctgcattttcttcctttacgtcatccaaaataaataaaatgaagaaacaaattatgagaatctacctgtcttctattaagctagacattacaaggatctgcaaaaatgtaaaacaatgatacacttcgcatgaagttttttgtttggaaaatgtatttttcataaaaacaacatattaacatatgatagggttattattggtcatttaaaatgaataatacatatgtttaaatttctgttttaattctatacagtaaatattcacagatgtaaccgacataaacgaatgct

SEQ ID NO: 221349 - DNA, 547 bp, Homo sapiens
ccctctaaaggttcccattggtcacttaatgtacaccctatgcaaatgaagtagtggtccgcaatcagagggttaagtgaaagtacaaaagttacaccctatgcaaacgtctgattggttgtggaaagcaaccaatcagaggctaaagtgaaggtacaaagttacacttctatgcacacaaagacttgacccgcaatcagtctgactggttgaggaaagcaaccaatcgggctgaagcaaagttacaaagttacactcctatgcaaactgattgrttgtggaaagcaaccaatcattgatactttcaattttccatctaccacacagaaaagggggtgggggtttgcaaaaggagtagtctcaggtccttttattacttagatgtggaaagttggggttttccttttgatttagttctaggaagttagcatgaatcggccttaggttccctgcctccagaccctattctcatgtctcagtggcactgcactgccaataatcctccccttgctctacacttccaagctaaaacacctcatcttctgct

SEQ ID NO: 221350 - DNA, 547 bp, Homo sapiens
ccctctaaaggttcccattggtcacttaatgtacaccctatgcaaatgaagtagtggtccgcaatcagagggttaagtgaaagtacaaaagttacaccctatgcaaacgtctgattggttgtggaaagcaaccaatcagaggctaaagtgaaggtacaaagttacacttctatgcacacaaagacttgacccgcaatcagtctgactggttgaggaaagcaaccaatcgggctgaagcaaagttacaaagttacactcctatgcaaactgattggttgtggaaagcaaccaatcattgatactttcaattttccatctaccacacagaaaagggggtgggggtttgcaaaaggagtagtctcaggtccttttattacttagatgtggaaagttggggttttccttttgatttagttctaggaagttagcatgaatcggccttaggttccctgcctccagaccctattctcatgtctcagtggcactgcactgccaataatcctccccttgctctacacttycaagctaaaacacctcatcttctgct

SEQ ID NO: 221351 - DNA, 531 bp, Homo sapiens
agatcttttggggttggaaaagattttgtttcatgttcaagagttcatgctggccccttaagtgctatggtttttaggtaattaacccaatttctgtgaatccccatttcctcatccaaatctatataaccttgacwgggccagtctctgccatggtggattcctctagtgctgggtttctcaactttggcatattaacatttggggccggctaatcaattgtgggggctgtcctgtgccttgtaggatgtttaacagcatccctagcttctacccatcaaatgtcagtagcacctctctaccccagttgtgacaaccaacaatgtcccttgtccttcagttacagggaaagtgactttgaacttcaaaataacactcaaagagaaggaagtaaaatggccctttctgagtatctttaagcaatccggcactgtgccaggtgtcttcactcaggcttcacaacgatcttctcagaaaggcattgttgcattgtttcccccattttacaggtgggaaaatggggtgacgctc

SEQ ID NO: 221352 - DNA, 531 bp, Homo sapiens
agatcttttggggttggaaaagattttgtttcatgttcaagagttcatgctggccccttaagtgctatggtttttaggtaattaacccaatttctgtgaatccccatttcctcatccaaatctatataaccttgacagggccagtctctgccatggtggattcctctagtgctgggtttctcaacttyggcatattaacatttggggccggctaatcaattgtgggggctgtcctgtgccttgtaggatgtttaacagcatccctagcttctacccatcaaatgtcagtagcacctctctaccccagttgtgacaaccaacaatgtcccttgtccttcagttacagggaaagtgactttgaacttcaaaataacactcaaagagaaggaagtaaaatggccctttctgagtatctttaagcaatccggcactgtgccaggtgtcttcactcaggcttcacaacgatcttctcagaaaggcattgttgcattgtttcccccattttacaggtgggaaaatggggtgacgctc

SEQ ID NO: 221353 - DNA, 371 bp, Homo sapiens
tgagaataaggaagtaggcttctcagagaagattgtggttgagtgaatctgaggtgsaatcacagaccccgatgtgtcatctcatctctgtggaggcctccgttattcaagttctttcctattgctttgtttttccacaaaaggctctggtacactagaaaaccagtctctttcagaatcagcatggtgtaggggcagctttataaattactacctcatggggactcactctaggcatactttgctttcagaaattctcattaggcaggagagtgtagagggatcaccgtggttctctgtccccaggtggtgttttttgtaagcttggggaaaaattgccaccgatatacacttttcctcatgacttttta

SEQ ID NO: 221354 - DNA, 533 bp, Homo sapiens
tccatgaatattgtaaatggcaggaactgagaggtatccatgtggctgaggctaaaaagcccaagcagggctttaccgggctatcttgatcttcaccactgagcctgctctcaaatgcacctgtagctttatgagattcaatttcagttccaactgggctttgtccatttctctggctttagcagtcctwttgcatggggtaaactggttcttgatgagtcttgcaccctctaggaccccttatgttgaaggcagctccagggacctcttaacacccattctttacattcattcattccagtagagaggggcctcgacagacaagccacgccctagaacttcagtctcactcctgatgcacagaaaccagatatgagcagatgaaatttgcctggaaatctcaagagccattaacttctctgaagtggggtccatcatgataagtctgaacatcgtagtaaagattgtctcattcttattcctcatgatctgatgattgcatagcagaatataaccacttaattctgaattgt

SEQ ID NO: 221355 - DNA, 533 bp, Homo sapiens
tccatgaatattgtaaatggcaggaactgagaggtatccatgtggctgaggctaaaaagcccaagcagggctttaccgggctatcttgatcttcaccactgagcctgctctcaaatgcacctgtagctttatgagattcaatttcagttccaactgggctttgtccatttctctggctttagcagtccttttgcatggggtaaactggttcttgatgagtcttgcaccctctaggaccccttatgttgaaggcagctccagggacctcttaacacccattctttacattcattcattccagtagagaggggcctcgacagacaagccacgccctagaacttcagtctcactcctgatgcacagaaaccagatatgagcagatgaaatttgcctggaaatctcaagagccattaacttctctgaagtggggtccatcatgataagtctgaacatcgtagtaaagattgtctcattcttattcctcatgatctgrtgattgcatagcagaatataaccacttaattctgaattgt

SEQ ID NO: 221356 - DNA, 572 bp, Homo sapiens
atatgctagaaaaatggtcaataaacttaactagacctgaaagcttcggctaaaggtcttggtttacattataaagaaagaaagcaagaaagctagcttctttagaagatgaatgaatcacccatttggaagttgtgttagttacctggcagatcgatggcatagctgtagccaagttggtctgaggttaaaaagagttcttcattagtcactggagggaagaaaggaaccatgttgtacatccgattgtgaccaataggggccagctcctgaggccaggcatctgcaggaggattaaatcttttcatccactcatcaaagatggcatcagtaaaggaatgaagaacctgcaaaacagttggacacagcatttaacataaatcagtctgttccgatcacaccaacctgactgttgctttctctaaagtggaataacttcttcttgacataggaacttctgtatacccaygtgtggaatacccccttctgtgtaccaccatgaggaagcccaaatcaactcatatagagtgactatgatggcgaggatcaagatttcgggaagaaaaacagtt

SEQ ID NO: 221357 - DNA, 570 bp, Homo sapiens
aagctacctctcaggccattcttgactaaacaatcatgaaaactctaggagagagttgctcaactcaatgctagaaccatcttagatttgtatgtaagttgtggtttgttattatattcatattttatcagaatgaattggatgtaattcataggtttagttcttctcaatatagtatgcatttatccttataaattctagagttgaagagaatccattcaggtgacattyagcacctgtgaaattaaagaaaacaagccagcccccagcctagtccatagaaacactgccaccctggggaaccagagaggggtccagccaccctctctgattcctcagctcttataaaactcatcaagatgttatgccacttaggaggtagtaactgtgtacctgctatttaaaaactagtattgaataagtaaatgtgacatttaaaaagcataaatacatgctcacaatgaaagcaatgactatcatttcaaaagctgtgcaaaattagtcagatctgcccttcaccaattagtgttaattcctattaatatgatctaacgggacttaatttcctca

SEQ ID NO: 221358 - DNA, 552 bp, Homo sapiens
aagttaaaaaaaaagtgggggaaaggcaaagggacagaggggtctataatatgctaccatgtagataaatatataaacatatttgtttgtgtatttataaaatatatctggaaaattagaaaaaaattgtattgtttgctggaagatggtagtgataatacggacttcattttatacattttatattttgaatcttttatgtgcactaagattttaagatgaaaaaatttagaaaactatgcaacaacctaaaaattaaataaattaagtgataatgggatattatacataataggtgccttatagagatggtcctctgaatccaattataagtaatctagacatgatttagagtatacagaaggatgtgcgtaccttatatgcaaatataatgccattttatataagggacttgagtagtcacagattttggtacccatggtggggggtcctggaactaattccctcaagatattgagggatgactataattgcaactgtataaaacataygagaatatgaaaagaaataaacaaaaaaattgagatggaa

SEQ ID NO: 221359 - DNA, 630 bp, Homo sapiens
ctaagcttccagaatagtcctgacacatgatcaatgctcaaaacataaatgtttcacacttgaatggtrtcaaatctgttgatcttttactttttgactcctaattcggtgtggtccttagaaacagtgtttcctatcgttacattataaatatattgacttacattctcttctagtactctcataatattctttcttaaatttaaattttaatccatctgtaatttattttggtgaaaggaataaagttaggaggccagctttataattttttaaatggctagccatttatccaagctccatttattagacaatctgacatcttcttattgaaaatctggtgagatttagttcttattctgatataaatatgagctagtaataaaaaccatttttatgcctactttgccatgatacttatgccccaaagcaaaggcatatatgtaccatataaagtggttaactatagatcattaactaaattacccactaacacagtgaataacagtcgcgaataacagttagtgtccttttacttttctgtaaccaacaattatttccttctgattagaaaattgggagaaagaaaagggataggcaggaaaagaaggagtcacaaaatttcctacg

SEQ ID NO: 221360 - DNA, 391 bp, Homo sapiens
aagccaggtgttctaaaatgcccacttcccttcttcagacacacttgaagagagaggaccccataaagtcttcctgactgtcctggcagggaggaagctgtgtgaacctcttgcaaatgggaaaaaaaaaataaatgttaggcagagctggctgcaaataggaagaagggagcatgtttcttgttcacaacatggcattcctgaaaactggctcgtgagtctttttttcctttctggtctgtagtttgctaactgcaggtctactaagaaakaatgggtttggggagttcctgccaatgaattaagaggccaagtcaaagaattttgctcctgcttactgctgcaatcaatgagctatgtgttctccaaaagcatccccaaaccatttcct

SEQ ID NO: 221361 - DNA, 421 bp, Homo sapiens
catgaactaggattagagaggtaatggtttcaggatgattcaagtgcattacatttattgtgcactttctttctattattattacattataatatataatgaaataattatacaactcaccataatgcagaatctgggagccctgagcttgttttcctgcaaggagacagtcctatctgggggtgatgagagacagtgacagatcatcaggcattagattcttataaggtgtgtgcaacytaaatccctcacttgtgcacttcacaatagggtttgtgcttctgtgagaatctaatgccaccgctgatctgacagaaggcagagctcaggtggcaatgttcgcccacctgccactcacctcctgctgtgcggccggttcctaacgggccacggaccagtaccagtctgtggccagtgggtt

SEQ ID NO: 221362 - DNA, 421 bp, Homo sapiens
catgaactaggattagagaggtaatggtttcaggatgattcaagtgcattacatttattgtgcactttctttctattattattacattataatatataatgaaataattatacaactcaccataatgcagaatctgggagccctgagcttgttttcctgcaaggagacagtcctatctgggggtgatgagagacagtgacagatcatcaggcattagattcttataaggtgtgtgcaacctaaatccctcacttgtgcacttcacaatagggtttgtgcytctgtgagaatctaatgccaccgctgatctgacagaaggcagagctcaggtggcaatgttcgcccacctgccactcacctcctgctgtgcggccggttcctaacgggccacggaccagtaccagtctgtggccagtgggtt

SEQ ID NO: 221363 - DNA, 561 bp, Homo sapiens
tgtctatcacttaatttttataatttaactttttaaaatgtgactttcctgttgtactgaagtagagaacacatctgcttatattgaccatatccaatattttactctcagtattgacaaaaggattaaatgattcatttttaatcctttatgacgtcttgaaagtagttttaaaatatatcctgccatttcagtacacaagcagaaaaatccctaggaaaaagcatatttgattcttaaaactagtactagttttttttttttctacttgtttggtgtgctgaatactctagcaagtaaaatgaaagccaagttgtctattttttcccttgtgtatttatttttacattgtatgtgtgattgctgtcataagtctttcacaagattatccagcacagatagctataatttctttttacaactcttaaaaaggaaaaagaacctttatcaacattgcctttctaatgaaaattgcaaaagatttcarcagggtctgcctaaacatttgtttacactacagaagtggggatcgttccaaaaacctaataacacattacagtc

SEQ ID NO: 221364 - DNA, 476 bp, Homo sapiens
cctctcagtatcctagcaactgacacagtaaaggtttttgcacttgmaattacaagtaatctacttgtagttagccctcagttcacctgatactctataccatttgttcctagaaaactatacaatacatgataggaacttggtaaatatttaatggtaataatggaaaagaagaaaaaattgcatttcatatgctgtgtttaagaagaaaggtctacaccaggcatggtggcttacatatgtaatcctagtgctttggaaggctgaggcagggggatcacttcagcccaggagtttgaggctgcagtgagctatgattgtatcatactctaacctagacaacagagtgagaccctgtctctaaaaaaaagaaaagaaaggtgcatgaataaaccatttaagaaaaactcaggaatacagtatttcaatattgaaaaggttgaaattatcagaagaaatttatttttttggcatag

SEQ ID NO: 221365 - DNA, 439 bp, Homo sapiens
gaattcattctacacagccacacctaatttcaagggatgcttttcatccatgaagaagagtaagtgggtttggtaaacagctagttgatctgtaattctatgatggatataaaatttctaaaatacttagattcattttttgtaaaataaaaagagcaaagtcacaggtctacttttaaagttagtatctaaactgcaaaaaaaaaaatgtattttttgtgagggcagtccattgagatttgggtttgaaacatctttagttatagcaagcaggcagtagcaatctgacagacttttctggtttatagttggtgtgtcgcaaggttgtttatacatgagcttcagctcatagaacttcagrataaagagagtttcaattttagtgagtccaagtcagaaaaatggaagaaaaatttagaaacattagtttggagactta

SEQ ID NO: 221366 - DNA, 428 bp, Homo sapiens
tctacacagccacacctaatttcaagggatgcttttcatccatgaagaagagtaagtgggtttggtaaacagctagttgatctgtaattctatgatggatataaaatttctaaaatacttagattcattttttgtaaaataaaaagagcaaagtcacaggtctacttttaaagttagtatctaaactgcaaaaaaaaaaatgtattttttgtgagggcagtccattgagatttgggtttgaaacatctttagttatagcaagcaggcagtagcaatctgacagacttttctggtttatagttggtgtgtcgcaaggttgtttatacatgagcttcagctcatagaacttcaggatraagagagtttcaattttagtgagtccaagtcagaaaaatggaagaaaaatttagaaacattagtttggagac

SEQ ID NO: 221367 - DNA, 572 bp, Homo sapiens
tgttttctttttgcccccatttgtcttcatttggattggttatttcctcacctattttgtttctttttttttttttttttttttttttttgagacggagtctcgctctgtcgcccaggctggagtgcagtggcgggatctcggctcattgcaagctccacctcccgggttcacgccattctcctgcctcagcctcccaagtagctgggactacaggcgcccgccactacgcccggctaattttttgtatttttagtagagacggggtttcaccgtttttagccgggatggtctcgatctcctgacctcgtgatccgcccgcctcggcctcccaaagtgctgggattacaggcgtgagccaccgcgcccggcctattttgtttctttattaacttaaacactctrtttctattcttttagtagttaacctagaagcttaaacatgtgtattaatttaacaaggtctaaagttaattaatatcttttccctcattttatacaatatatgtaattagaatccaagttttctaagcctggcttaacatgacattattatccatacttttctacatt

SEQ ID NO: 221368 - DNA, 205 bp, Homo sapiens
aagagagctagcctggacctgttgcagagccttctcctgttctgggccccactcaaaaccagcagccatttgggtcactcrataaatgggctggagtaaaacacccaaatgaggaatgtgttgcctccaaaatccaaataggcctacttggcattgtgcctctttcttggttgtaggaggggccaaatgtagcaacttatccttc

SEQ ID NO: 221369 - DNA, 508 bp, Homo sapiens
aggaagatgatttcatgcagcaatcattataactcagtgatgccgcagcctcttttgccaatcaaataactttatytgcccctaagccagttagtgtggggattgcacatgttgtctggcttcagcctgccactaccaagaaaaataaacagtgccagaacaggttggtattggtgcttaagctttcctctgcattttgagaatcttttaaatgaattttgcatgtactctaaagggtcactctgttgtattcaaaatgacctcttttatagctttgttacaaacactaagccagctcccttctcaatttctcagaggtattttggtaaaactaatggaatgggagccaggaagagaggaaataaatgctttcagttggtaagattgtctttattgcccttttgatttattatctacctgtaatgtagcaattgtggacattcagatagcacatttaccaaaaagcaactatttaaatgtatgtaaatgcagtctacatggatatttc

SEQ ID NO: 221370 - DNA, 561 bp, Homo sapiens
ctgaacttctccctaggaagatgatttcatgcagcaatcattataactcagtgatgccgcagcctcttttgccaatcaaataactttatttgcccctaagccagttagtgtggggattgcacatgttgtctggcttcagcctgccactaccaagaaaaataaacagtgccagaacaggttggtattggtgcttwagctttcctctgcattttgagaatcttttaaatgaattttgcatgtactctaaagggtcactctgttgtattcaaaatgacctcttttatagctttgttacaaacactaagccagctcccttctcaatttctcagaggtattttggtaaaactaatggaatgggagccaggaagagaggaaataaatgctttcagttggtaagattgtctttattgcccttttgatttattatctacctgtaatgtagcaattgtggacattcagatagcacatttaccaaaaagcaactatttaaatgtatgtaaatgcagtctacatggatatttctagagctattttatatttcacaaaaactcaagatctgtt

SEQ ID NO: 221371 - DNA, 579 bp, Homo sapiens
cctgaatgagggtatactctttaagtctgattaaattaatagaaaagaaggttgtcttcaactgaccaatatttgaagaacaatgygcttattctgctccatttggaggaggccaatctcttgagaagcaaatcatacatacataaaaccatgaattttagaggcaaatttaataacaggaactacctctgtcttgttcaccagtatgtgcctaacccagtgcctggcacataacgggaacacagcaatgtttcttgagggaatgaatgaataggagcagggtgttccaatatcatccaatatggcagagatcctcagagaagacagtatttccaaaaggcttcttcctctgtagatgcctttttctaaattccatgtttaagcttctaatggagaataatttcaataataacaatgatgtaacaaacctgatataagcatatgattaggaaattcagcaacagatactattctctaagaggaaaaaattaatgataatagtatactggtattaatacttctggtattaatgtttagtagtattaaacattactttaaaactagcatctttctaataga

SEQ ID NO: 221372 - DNA, 579 bp, Homo sapiens
cctgaatgagggtatactctttaagtctgattaaattaatagaaaagaaggttgtcttcaactgaccaatatttgaagaacaatgcgcttattctgctccatttggaggaggccaatctcttgagaagcaaatcatacatacataaaaccatgaattttagaggcaaatttaataacaggaactacctctgtcttgttcaccagtatgtgcctaacccagtgcctggcacataacgggaacacagcaatgtttcttgagggaatgaatgaataggagcagggtgttccaatatcatccaatatggcaragatcctcagagaagacagtatttccaaaaggcttcttcctctgtagatgcctttttctaaattccatgtttaagcttctaatggagaataatttcaataataacaatgatgtaacaaacctgatataagcatatgattaggaaattcagcaacagatactattctctaagaggaaaaaattaatgataatagtatactggtattaatacttctggtattaatgtttagtagtattaaacattactttaaaactagcatctttctaataga

SEQ ID NO: 221373 - DNA, 608 bp, Homo sapiens
agcatctttctaatagaaacaaaaggtattcaccacatagtttccaaaatggaaaaacatgaatgctgtgttttcaactttttcatatttaaattgctgtgcaatacagtatttagattttaygggaaaacacaccctacactgaacaggagatatatcttattttcttttgaatattgctcatgattattctactacaacgcaggtcaatgtctgtttccttgggatctgcgggctgatgagaaacaagcaaagcacctgaagacaagaggctggaagagaatgatgcctgtacctatggtactgtaggaaagcagaggaattgagaaatagaaattagttcaaagtaaaggggaaaaaaatcactatccaagttggagttcagcaaaagaatcacaaagcagaggaagaaaaatactaatttgctatgaaaagtaattccattgggtaagtgaaaagatgcttgtgtacgtatgaatgatgaatgagaaacaagaagaaattgacatagaaagttacttatgacaattaactaaaaatccatattttgccaataaccaacaggcaaagaaatgagcctctctaagcctcagcttctttctcctaaa

SEQ ID NO: 221374 - DNA, 608 bp, Homo sapiens
agcatctttctaatagaaacaaaaggtattcaccacatagtttccaaaatggaaaaacatgaatgctgtgttttcaactttttcatatttaaattgctgtgcaatacagtatttagattttacgggaaaacacaccctacactgaacaggagatatatcttattttcttttgaatattgctcatgattattctactacaacgcaggtcaatgtctgtttccttgggatctgcgggctgatgagaaacaagcaaagcacctgaagacaagaggctggaagagaatgatgcctgtacctatggtactgtaggaaagcagaggaattgagaaatagaaattagttcaaagtaaaggggaaaaaaatcactatccaagttggagttcagcaaaagaatcacaaagcagaggaagaaaaatactaatttgctatgaaaagtaattccattgggtaagtgaaaagatgcttgtgtaygtatgaatgatgaatgagaaacaagaagaaattgacatagaaagttacttatgacaattaactaaaaatccatattttgccaataaccaacaggcaaagaaatgagcctctctaagcctcagcttctttctcctaaa

SEQ ID NO: 221375 - DNA, 581 bp, Homo sapiens
tatttctatcaccacatactagttcttttttarttttaggctttacaattcttcatactgatgcatttattagttcattattcattcccattgatgtctaatattccatagtattaagaatcaagggtacctgcatcagcctgaacttaactatgggactgagagctgagaccacctgtgtcaatattattgcttttattccccaagaaattcttgccaggaaaaatgtgattgcagaacaataaagtactatactgtttgtatcagcaaattctgcaaaccaatttatacaatcagtttgcttactgaggtaaacagctcacttaatcaggacaatagtttgctcttcataaaactcatctccagactgtcaccttactgtgtccaccagtcctaaaatactgtgtcatgaacttcacacattcctatcaattccccaccttgaaatacctgccttaacctcatgaatccagaatcccaaaccctgtatatattcctctgtgatttctctttttagagacactaagactgtgtaagctttgcttggtcaacaggtttttctggtggtctttgtgaggagg

SEQ ID NO: 221376 - DNA, 581 bp, Homo sapiens
tatttctatcaccacatactagttcttttttagttttaggctttacaattcttcatactgatgcatttattagttcattattcattcccattgatgtctaatattccatagtattaagaatcaagggtacctgcatcagccygaacttaactatgggactgagagctgagaccacctgtgtcaatattattgcttttattccccaagaaattcttgccaggaaaaatgtgattgcagaacaataaagtactatactgtttgtatcagcaaattctgcaaaccaatttatacaatcagtttgcttactgaggtaaacagctcacttaatcaggacaatagtttgctcttcataaaactcatctccagactgtcaccttactgtgtccaccagtcctaaaatactgtgtcatgaacttcacacattcctatcaattccccaccttgaaatacctgccttaacctcatgaatccagaatcccaaaccctgtatatattcctctgtgatttctctttttagagacactaagactgtgtaagctttgcttggtcaacaggtttttctggtggtctttgtgaggagg

SEQ ID NO: 221377 - DNA, 581 bp, Homo sapiens
tatttctatcaccacatactagttcttttttagttttaggctttacaattcttcatactgatgcatttattagttcattattcattcccattgatgtctaatattccatagtattaagaatcaagggtacctgcatcagcctgaacttaactatgggactgagagctgagaccacctgtgtcaatattattgcttttattccccaagaaattcttgccaggaaaaatgtgattgcagaacaataaagtactatactgtttgtatcagcaaattctgcaaaccaatttatacaatcagtttgcttactgaggtaaacagctcacttaatcaggacaatagtttgctcttcataaaactcatctccagactgtcaccttactgtgtccaccagtcctaaaatactgtgtcatgaacttcacacattcctatcaattccccaccttgaaayacctgccttaacctcatgaatccagaatcccaaaccctgtatatattcctctgtgatttctctttttagagacactaagactgtgtaagctttgcttggtcaacaggtttttctggtggtctttgtgaggagg

SEQ ID NO: 221378 - DNA, 499 bp, Homo sapiens
aaagtgctgggattacaggtgtgagccaccacgcctggccggtgatctttttmtctttctcttttttcttttcacttgctgctattctatacatgcggaggagtttttggaaggaaaagagggcgccttattaatggtcattttctactaatggtgattttgatactattagatacctactatgggcattgaaattggtctctagttccattgagaagagtagaaaaatttctagtataagtacattcataatgtttagataatatcttgagaaaaaaatagacaaattcacaagttcttctttgacttgatagatttctgagttctcatgtgtttgtccatcttcattctgctttaacgcatttacacacacacacacacacttccttttctatttgttcagctttactgagatgtaattgtgctatagttggtttgtgtgacccctccgaatcgcttgttgaaatttgatccccactgttagaggtggagcctaccg

SEQ ID NO: 221379 - DNA, 627 bp, Homo sapiens
cccactcaaatctcaactcaaactgttatccctgtgtgtcgagggagggacctggtggaagatgattggatcatgagggcagtttaccccgtgctattctcataatagagaaggagttctcacgagatttgatggtttattgagattttatggtttaaaagtggcagtttcccctgcactctctctctcctgctgccaagtaagatgtgccttgctcccccttcagcttccaccatgattgtaagtttcctgaggccttcccagtgatggagaactgtgagtcaattaaacctctttccttcataaattacccagcctcaagtagtatctttatagcagtgtgagaacaaactaatrcagaaaattggtaccagcagagtggggtactgctataaagataacctgaaaatatggaagtgactttggaactggaaaacaggcagagattcaaacagtttggaggactcagaagaagagaggaaaatgtgggaaagtttggaacttcctagagacttgttgaatggttttgaccaaaatgctgatagtgatatggacaatgaagtccaggctgaggtggtcacagatggagatgaagaatttattgggaactgaagcaaaggtcactct

SEQ ID NO: 221380 - DNA, 442 bp, Homo sapiens
tctgtttccagttgttacctccacagctcgtgtctatgctcattggtctgttgagtcttccttttggtgactgcattgccacagtggtggataatttttcattgcgagctcatctatattaggggttgcrttttctgtgagtcccatgtacgagattatgcaagtgttcatgtttttacatttgctttggcccgggccccaagggtttccttttcattatctgagactaatgctttcccttaatttctgggcttttgatttcctaggtttccatttctcagaggaggtttgtcccaccgagagctttgtcaaacaccaggctgtctttctgtttccacagacagatttgaagagatttttccagtttctttttcacaggtgaggcagcccttcaagtgtcctggttgtatgcgggagtctcggattagttcccttctctcac

SEQ ID NO: 221381 - DNA, 442 bp, Homo sapiens
tctgtttccagttgttacctccacagctcgtgtctatgctcattggtctgttgagtcttccttttggtgactgcattgccacagtggtggataatttttcattgcgagctcatctatattaggggttgcattttctgtgagtcccatgtacgagattatgcaagtgttcatgtttttacatttgctttggcccgggccccaagggtttccttttcrttatctgagactaatgctttcccttaatttctgggcttttgatttcctaggtttccatttctcagaggaggtttgtcccaccgagagctttgtcaaacaccaggctgtctttctgtttccacagacagatttgaagagatttttccagtttctttttcacaggtgaggcagcccttcaagtgtcctggttgtatgcgggagtctcggattagttcccttctctcac

SEQ ID NO: 221382 - DNA, 459 bp, Homo sapiens
aacaatctctctcctcaataaaagtgagaacagtagcaacactgcagccacagggggccatgggaaaaatctctacacacagggaaggaagtattgtgcacaatcggaggaaaagaatacctcaacaacatctggcatatgaaccagaagaaacttgtagaaacttgtttgacatcctcaggattcaggaagacgtggcctctgagaaacagaagcagaaatccagaagaggagattagactcaaataaaaagaagtcyattttgaacaggacaaggcaaactgaaaatgccgtagtagaactaaaatctccatagaagtatagagaataatcaactgcacaagatcaattataaatgcaacgttaaggcgctctctcagaaaagacaagtgtataaaaataaggccagaaaagatattaaattggaggacatagaacacaaaagagttaaaagttagt

SEQ ID NO: 221383 - DNA, 212 bp, Homo sapiens
tttaaattaatagagtcacctccacaagtctcattcttctctcttatcctgccatagttttatttcactacacttacttgtttatctgcgatatatggtttggctctatcctsacccaaatctcatcttgaactgtagctcccataattcccacgtgtcatgggagggacctggtgggagataattgaatcatgtgggcggtttcccccata

SEQ ID NO: 221384 - DNA, 212 bp, Homo sapiens
tttaaattaatagagtcacctccacaagtctcattcttctctcttatcctgccatagttttatttcactacacttacttgtttatctgcgatatatggtttggctctatcctgacccaaatctcatcttgaactgtagctcccataattcccacrtgtcatgggagggacctggtgggagataattgaatcatgtgggcggtttcccccata

SEQ ID NO: 221385 - DNA, 235 bp, Homo sapiens
tttaaattaatagagtcacctccacaagtctcattcttctctcttatcctgccatagttttatttcactacacttacttgtttatctgcgatatatggtttggctctatcctgacccaaatctcatcttgaactgtagctcccataattcccacgtgtcatgggagggacctggtgggagataattgaatcatgtgggcrgtttcccccatactgttcgcgtggtagtgagtaag

SEQ ID NO: 221386 - DNA, 451 bp, Homo sapiens
gatggttttgtaggggaaacccctttcacttggatctcattgtctctcttgtctgctgctatgtaagacatgcctctcaccttccaccatgattgtgaggsctcctatgccacatggaactgtgagtccattaaacctttttttctttataaagtaccaagtcttgggcatgtctttatcagcaacatgaaaacagactaatacagtctgtctccccactggaatatcagctccatgaaggtagaagtctcactagttttagtcatcattatattcccaatgtcttgaacagtaaatggaatacaatcatcacgcaattattatttgttgatgttgaatgaatgctgctccttttgcctaatctgccttacatcaggcacaggggaaactcctactcaactttcaaacccaattaaaatgtcacttcttatatgaagcattctcttctgct

SEQ ID NO: 221387 - DNA, 451 bp, Homo sapiens
gatggttttgtaggggaaacccctttcacttggatctcattgtctctcttgtctgctgctatgtaagacatgcctctcaccttccaccatgattgtgaggcctcctatgccacatggaactgtgagtccattaaacctttttttcyttataaagtaccaagtcttgggcatgtctttatcagcaacatgaaaacagactaatacagtctgtctccccactggaatatcagctccatgaaggtagaagtctcactagttttagtcatcattatattcccaatgtcttgaacagtaaatggaatacaatcatcacgcaattattatttgttgatgttgaatgaatgctgctccttttgcctaatctgccttacatcaggcacaggggaaactcctactcaactttcaaacccaattaaaatgtcacttcttatatgaagcattctcttctgct

SEQ ID NO: 221388 - DNA, 332 bp, Homo sapiens
ggttttgtaggggaaacccctttcacttggatctcattgtctctcttgtctgctgctatgtaagacatgcctctcaccttccaccatgattgtgaggcctcctatgccacatggaactgtgagtccattaaacctttttttctttataaagtrccaagtcttgggcatgtctttatcagcaacatgaaaacagactaatacagtctgtctccccactggaatatcagctccatgaaggtagaagtctcactagttttagtcatcattatattcccaatgtcttgaacagtaaatggaatacaatcatcacgcaattattatttgttgatgtt

SEQ ID NO: 221389 - DNA, 451 bp, Homo sapiens
gatggttttgtaggggaaacccctttcacttggatctcattgtctctcttgtctgctgctatgtaagacatgcctctcaccttccaccatgattgtgaggcctcctatgccacatggaactgtgagtccattaaacctttttttctttataaagtaccaagtcttgggcatgtctttatcagcarcatgaaaacagactaatacagtctgtctccccactggaatatcagctccatgaaggtagaagtctcactagttttagtcatcattatattcccaatgtcttgaacagtaaatggaatacaatcatcacgcaattattatttgttgatgttgaatgaatgctgctccttttgcctaatctgccttacatcaggcacaggggaaactcctactcaactttcaaacccaattaaaatgtcacttcttatatgaagcattctcttctgct

SEQ ID NO: 221390 - DNA, 332 bp, Homo sapiens
ggttttgtaggggaaacccctttcacttggatctcattgtctctcttgtctgctgctatgtaagacatgcctctcaccttccaccatgattgtgaggcctcctatgccacatggaactgtgagtccattaaacctttttttctttataaagtaccaagtcttgggcatgtctttatcagcaacatgaaaacagastaatacagtctgtctccccactggaatatcagctccatgaaggtagaagtctcactagttttagtcatcattatattcccaatgtcttgaacagtaaatggaatacaatcatcacgcaattattatttgttgatgtt

SEQ ID NO: 221391 - DNA, 453 bp, Homo sapiens
tgatggttttgtaggggaaacccctttcacttggatctcattgtctctcttgtctgctgctatgtaagacatgcctctcaccttccaccatgattgtgaggcctcctatgccacatggaactgtgagtccattaaacctttttttctttataaagtaccaagtcttgggcatgtctttatcagcaacatgaaaacagactaatacagtctgtctccccactggaatatcagctccatgaaggtagaagtctcactagttttagtcatcattatattcccaatgtcttgaacagtaaatggmatacaatcatcacgcaattattatttgttgatgttgaatgaatgctgctccttttgcctaatctgccttacatcaggcacaggggaaactcctactcaactttcaaacccaattaaaatgtcacttcttatatgaagcattctcttctgctc

SEQ ID NO: 221392 - DNA, 306 bp, Homo sapiens
catgattgtgaggcctcctatgccacatggaactgtgagtccattaaacctttttttctttataaagtaccaagtcttgggcatgtctttatcagcaacatgaaaacagactaatacagtctgtctccccactggaatatcagctccatgaaggtagaagtctcactagttttagtcatcattatattcccaatgtcttgaacagtaaatggaatacaatcmtcacgcaattattatttgttgatgttgaatgaatgctgctccttttgcctaatctgccttacatcaggcacaggggaaactcct

SEQ ID NO: 221393 - DNA, 332 bp, Homo sapiens
ggttttgtaggggaaacccctttcacttggatctcattgtctctcttgtctgctgctatgtaagacatgcctctcaccttccaccatgattgtgaggcctcctatgccacatggaactgtgagtccattaaacctttttttctttataaagtaccaagtcttgggcatgtctttatcagcaacatgaaaacagactaatacagtctgtctccccactggaatatcagctccatgaaggtagaagtctcactagttttagtcatcattatattcccaatgtcttgaacagtaaatggaatacaatcatcackcaattattatttgttgatgtt

SEQ ID NO: 221394 - DNA, 582 bp, Homo sapiens
tttattaagctctgtgagaattaaagatatgccacaagtgattcagtataacaaaaagacaattttcctataaactttatatatttattgtttgttaatttttggagagatggagtcttgctgtgtcttccaggatggagtacagtggcacaattatagctcactgtaacaattactaggctcaagcgagcttcctgcttcagcctcccaaacagctagaactacaggtgtgcaccaccacaactgttatttttattactattttaaaggcagggtctacctatgttgcccagggtggtctccaactcctggcttcaagcaatcctctcacctyggccttccaaagtgctgggattacaggcatgagccactgtggccagccccaatttttctattaaaataggacatagcacaccattataagcccatgaaacaaagtacaacttgaaaatttcatgtgcatctttccacaatagaaaaaacttcttctgagaaacaaaccatttcaggccaatgagagattttactgtcaatattttgaacacatattctcaattttttttttttttttttttttttttg

SEQ ID NO: 221395 - DNA, 582 bp, Homo sapiens
tttattaagctctgtgagaattaaagatatgccacaagtgattcagtataacaaaaagacaattttcctataaactttatatatttattgtttgttaatttttggagagatggagtcttgctgtgtcttccaggatggagtacagtggcacaattatagctcactgtaacaattactaggctcaagcgagcttcctgcttcagcctcccaaacagctagaactacaggtgtgcaccaccacaactgttatttttattactattttaaaggcagggtctacctatgttgcccagggtggtctccaactcctggcttcaagcaatcctctcacctcggccttccaaagtgctgggattacaggcatgagccactgtggccagccccaatttttctattaaaataggacatagcacaccattataagcccatgaaacaaagtacaacttgaaaatttcatgtrcatctttccacaatagaaaaaacttcttctgagaaacaaaccatttcaggccaatgagagattttactgtcaatattttgaacacatattctcaattttttttttttttttttttttttttg

SEQ ID NO: 221396 - DNA, 576 bp, Homo sapiens
aaggtaagttagcattttatattaaacatttattcagacatgtaaaagaaacaattttattaactcattactaaaatatttaagcaatttgaaacctcctgtttgctgcctcttgtcactcccttctctgctcattcatttctattgtgtgtttattagatttaggttgacttaatagaaatatgttattgattttattatacatagttaaaaattgtcaattcacttcttgtaagttctacatttactggtggcccaatacctctttttttttttttttttttttgtctttcatttgtttcttgctataaatttccacaaagcagttaaaatgtacctttaaagcaaaacatttccttgtgtatggaaataggataaaatgtttccagagcaatctaggatataatgtcttgaagtttaraaaactcactctattagtgttttttctccctctccaaagcagatatgctgttcaattctttcaaatgtgtgagcagttgtcttaaactataaaatgaaactaccaatctatctatgtataaaaatactcaagaatgtgactctttctaacctcac

SEQ ID NO: 221397 - DNA, 569 bp, Homo sapiens
aatttaaaatctcaatatatttaacagtggattagacacaacaataaagagagcattagtgaactaaaatatagctcagtagaaaattgtcatgaactctgagcgttctgagattttagcctacttgcaagctaagttaggctgtcacaatttcacagatgctgaaagaaagcatcagactgctgtttcagagacaaagatactactcaacgctttagttcccctgtaacccactccccatccccagtcccatgggagtgwtacagaggtgagtctaagtagagtctgtggacacaatagatctgtgtcactgctgaggaatctcatgcttaggaaatccccaatcttacgcaggacttctagcaaacctgaccaatctttgtctcagaggaggacattatctttatgatgctgatgaaacaaagtaccctccaccctacaaggaaacactacttctatcttggtttgctatacaaacatccttgaaaatatctacaaaatatatagaaatgtcatggagaattatccctcaataaaaatatatgaactaaaaaacagaaagtaaaaag

SEQ ID NO: 221398 - DNA, 416 bp, Homo sapiens
gaaggtggaaaatcacagtcaaggttaactttagggtttctgtattgacaaaataagtgagaaacagatgagagaacaggtttgatytttgaacaaattaaatttgagatacttgtgggatatcctaaaaagagatccaagagatagctggatagatggacctgtgctcagagaattctcagctggagatacagatttggggattatttgcatatggatggaaaaaaataccataggggtgaatgagttcactgagggagactcatgaagtagaagtaagaagagaaccaggcaggaactctacggacaaccaagagttaagggtgatagagcattgtttaaatcacagtttaattcttgccaatgaaagggaaaagagaagtatgtatcactatgtcatttttaatcagtaatga

SEQ ID NO: 221399 - DNA, 416 bp, Homo sapiens
gaaggtggaaaatcacagtcaaggttaactttagggtttctgtattgacaaaataagtgagaaacagatgagagaacaggtttgatctttgaacaaattaaatttgagatacttgtgggatatcctaaaaagagatccaagagatagctggatagatggacctgtgctcagagaattctcagctggagatacasatttggggattatttgcatatggatggaaaaaaataccataggggtgaatgagttcactgagggagactcatgaagtagaagtaagaagagaaccaggcaggaactctacggacaaccaagagttaagggtgatagagcattgtttaaatcacagtttaattcttgccaatgaaagggaaaagagaagtatgtatcactatgtcatttttaatcagtaatga

SEQ ID NO: 221400 - DNA, 457 bp, Homo sapiens
tcacagtttaattcttgccaatgaaagggaaaagagaagtatgtatcactatgtcatttttaatcagyaatgaagaccttggtatcccatgactcaaatagaaggtaagatctcttaaaaaaatgtgtgggagtaatcggggaaatactcacaagatggtcagtcttaaatgcagtatttgttgaatttatttttccctgtgctttcagtgcaaaactaaacaaaaccttaaaaagcctcatagtttcagtgtggtgaatgaatacctagaaatgcaaggttaaattgaaaaacccattatatatttattagcagtgtttcactaccttgtcatcaatgttcaaaaacagtactgcaatggaaagctcaagggaaatgcaggagctttatataaagacatattctttagcctctgataaggttctacagtgataattctggaaaaagtaaaatgtca

SEQ ID NO: 221401 - DNA, 457 bp, Homo sapiens
tcacagtttaattcttgccaatgaaagggaaaagagaagtatgtatcactatgtcatttttaatcagtaatgaagaccttggtatcccatgactcaaatagaaggtaagatctcttaaaaaaatgtgtgggagtaatcggggaaatrctcacaagatggtcagtcttaaatgcagtatttgttgaatttatttttccctgtgctttcagtgcaaaactaaacaaaaccttaaaaagcctcatagtttcagtgtggtgaatgaatacctagaaatgcaaggttaaattgaaaaacccattatatatttattagcagtgtttcactaccttgtcatcaatgttcaaaaacagtactgcaatggaaagctcaagggaaatgcaggagctttatataaagacatattctttagcctctgataaggttctacagtgataattctggaaaaagtaaaatgtca

SEQ ID NO: 221402 - DNA, 457 bp, Homo sapiens
tcacagtttaattcttgccaatgaaagggaaaagagaagtatgtatcactatgtcatttttaatcagtaatgaagaccttggtatcccatgactcaaatagaaggtaagatctcttaaaaaaatgtgtgggagtaatcggggaaataytcacaagatggtcagtcttaaatgcagtatttgttgaatttatttttccctgtgctttcagtgcaaaactaaacaaaaccttaaaaagcctcatagtttcagtgtggtgaatgaatacctagaaatgcaaggttaaattgaaaaacccattatatatttattagcagtgtttcactaccttgtcatcaatgttcaaaaacagtactgcaatggaaagctcaagggaaatgcaggagctttatataaagacatattctttagcctctgataaggttctacagtgataattctggaaaaagtaaaatgtca

SEQ ID NO: 221403 - DNA, 457 bp, Homo sapiens
tcacagtttaattcttgccaatgaaagggaaaagagaagtatgtatcactatgtcatttttaatcagtaatgaagaccttggtatcccatgactcaaatagaaggtaagatctcttaaaaaaatgtgtgggagtaatcggggaaatactcacaagatggtcagtcttaaatgcagtatttgttgaatttatttttccctgtgctttcagtrcaaaactaaacaaaaccttaaaaagcctcatagtttcagtgtggtgaatgaatacctagaaatgcaaggttaaattgaaaaacccattatatatttattagcagtgtttcactaccttgtcatcaatgttcaaaaacagtactgcaatggaaagctcaagggaaatgcaggagctttatataaagacatattctttagcctctgataaggttctacagtgataattctggaaaaagtaaaatgtca

SEQ ID NO: 221404 - DNA, 459 bp, Homo sapiens
acatgttgaatatttccttggctgtgcagatgccttttagtttgatgtaatgccatttgtctaactgtgcttttgttacctgtgcctttgcagtctgtaaaaaaaaaaatcaccaagaccaatgtcatgaagattttgcctatgatttcttcttgtagttttataatttctggktttacattcaattccttaatctgttttgagttgattttttcctgagctatattttttttaaataattttatattttattttagattcagggggtatatgtgcaggtttgttacctgggtatattgtgtgatgctgaggtttggggtatgaatgatcttttcacccaggtactgagcatagtacccaatagatagtttttcagcccttgaccactccttccatctctccactagaaatcccccatgtctattgttgccatctttatatccataattaccaagtgtt

SEQ ID NO: 221405 - DNA, 459 bp, Homo sapiens
acatgttgaatatttccttggctgtgcagatgccttttagtttgatgtaatgccatttgtctaactgtgcttttgttacctgtgcctttgcagtctgtaaaaaaaaaaatcaccaagaccaatgtcatgaagattttgcctatgatttcttcttgtagttttataatttctggttttacattcaattccttaatctrttttgagttgattttttcctgagctatattttttttaaataattttatattttattttagattcagggggtatatgtgcaggtttgttacctgggtatattgtgtgatgctgaggtttggggtatgaatgatcttttcacccaggtactgagcatagtacccaatagatagtttttcagcccttgaccactccttccatctctccactagaaatcccccatgtctattgttgccatctttatatccataattaccaagtgtt

SEQ ID NO: 221406 - DNA, 364 bp, Homo sapiens
ttcattaatctaaaacaagttttaaaaattggcaatagtggcaatacttgagggaataatcaataggagagatattacaaaagcagatttgagaaataaaaaccactccttmctttttggtgattatgccacaaactcaatgtttaaatctaattttcatatcttatttttataaaaagaggttggataatagacttcacttgtgaaaattctgaggcctcttaattaaaagcatccacaaatgattaaagaacaataggaaattaaaactctcaagcggagcaaccaaattaaagaatgcagtctccgagagagtgactcatataaacctggtgttgccaaacatggcttatctggcgagatt

SEQ ID NO: 221407 - DNA, 364 bp, Homo sapiens
ttcattaatctaaaacaagttttaaaaattggcaatagtggcaatacttgagggaataatcaataggagagatattacaaaagcagatttgagaaataaaaaccactccttactttttggtgattatgccacaaactcaatgtttaaatctaattttcatatcttatttttataaaaagaggttggataatagamttcacttgtgaaaattctgaggcctcttaattaaaagcatccacaaatgattaaagaacaataggaaattaaaactctcaagcggagcaaccaaattaaagaatgcagtctccgagagagtgactcatataaacctggtgttgccaaacatggcttatctggcgagatt

SEQ ID NO: 221408 - DNA, 364 bp, Homo sapiens
ttcattaatctaaaacaagttttaaaaattggcaatagtggcaatacttgagggaataatcaataggagagatattacaaaagcagatttgagaaataaaaaccactccttactttttggtgattatgccacaaactcaatgtttaaatctaattttcatatcttatttttataaaaagaggttggataatagacytcacttgtgaaaattctgaggcctcttaattaaaagcatccacaaatgattaaagaacaataggaaattaaaactctcaagcggagcaaccaaattaaagaatgcagtctccgagagagtgactcatataaacctggtgttgccaaacatggcttatctggcgagatt

SEQ ID NO: 221409 - DNA, 520 bp, Homo sapiens
gaaatccaggctcaggatcagtggatgcaaactagggccagaggactgaattggacttggagatgtgttttgttggcctgcagagggcctcacaatttgtcaatgtgaatgcctctaatagggcaaacatgtttagtgcaccataattctgctrtactctgtggtactaatctcaggcagcttcacttttttgggctatatgcccaatctctgtaggcctctgagtttgtgacattggctttacacacttcaaaatctattctgtgccagactgggtcatcccactcttactctaataatcaagcaggcttttttgtactaaggaagctggcaagataaaaaccaaacacatttccctgactcgtgtatagttaggggtccacatgcaatctaggttttgccatgcagataagtatgagacttgggaagtggattacagtaacatcaggtggcagccacaagtacaaggatcagattttctgcatggaagatggcaaaagccttggttcttctaggcagc

SEQ ID NO: 221410 - DNA, 588 bp, Homo sapiens
gtagagttgagtagctgtgacgcagaccatatggaccatgaagcctacaatttttacactctggctctttacagaaaaactttattgacccttgggctcatccctagatatggagtggtgggtgacagctgtagtaaagattttctcatgaggtagcttctcctagttacaaaatattcctggttctgcagcatccaagcttagttgtctggtcgttcaataaatgctgtargttacttaataccatgcaatccccttttctgctgaaaatagctagagtggtttccattgctgcaactaaaaaccctgaatgtgacacagtaacaaaagacaaataattaggatataaagttaaaaaaatacttacattgtgtatcatctcaaagtatttttgacaggctacctggtaatgtgtcccctttactaaatccaaaatctaaaatgaatgaggaaaaagacaaataaaaattagaaattaagttttcttctaaaccactgtagctcacagctgttggccttttcataatcttcattccagacaggaaatgcaataaatcatgtagcatgttgtacttctgcagcctggac

SEQ ID NO: 221411 - DNA, 588 bp, Homo sapiens
gtagagttgagtagctgtgacgcagaccatatggaccatgaagcctacaatttttacactctggctctttacagaaaaactttattgacccttgggctcatccctagatatggagtggtgggtgacagctgtagtaaagattttctcatgaggtagcttctcctagttacaaaatattcctggttctgcagcatccaagcttagttgtctggtcgttcaataaatgctgtaagttacttaataccatgcaatccccttttctgctgaaaatagctagagtggtttccattgctgcaactaaaaaccctgaatgtgacacagtaacaaaagacaaataattaggatataaagttaaaaaaatacttacattgtgtatcatctcaaagtatttttgacaggctacctggtaatgtgtcccctttactaaatccaaaatctaaaatgaatgaggaaaaagasaaataaaaattagaaattaagttttcttctaaaccactgtagctcacagctgttggccttttcataatcttcattccagacaggaaatgcaataaatcatgtagcatgttgtacttctgcagcctggac

SEQ ID NO: 221412 - DNA, 588 bp, Homo sapiens
gtagagttgagtagctgtgacgcagaccatatggaccatgaagcctacaatttttacactctggctctttacagaaaaactttattgacccttgggctcatccctagatatggagtggtgggtgacagctgtagtaaagattttctcatgaggtagcttctcctagttacaaaatattcctggttctgcagcatccaagcttagttgtctggtcgttcaataaatgctgtaagttacttaataccatgcaatccccttttctgctgaaaatagctagagtggtttccattgctgcaactaaaaaccctgaatgtgacacagtaacaaaagacaaataattaggatataaagttaaaaaaatacttacattgtgtatcatctcaaagtatttttgacaggctacctggtaatgtgtcccctttactaaatccaaaatctaaaatgaatgaggaaaaagacaaataaaaattagaaattaagttttcttctaaaccactgtagctcacagytgttggccttttcataatcttcattccagacaggaaatgcaataaatcatgtagcatgttgtacttctgcagcctggac

SEQ ID NO: 221413 - DNA, 538 bp, Homo sapiens
aaataagtaaaggtgtgatgagaaaaaaaggcaatagaggtttttgaggtaaacaagtattattggtagatacttttatcttcacttcagaaatgaggaaatatattaaaattggagtatctgtctcctgagggtgagggccattaaccgcagaaagaattttaaaaatcacatacaaattaataatctttcttttaaaggaagataacttacatgcttttaaaattaaggtagaaaacataaaacattactccaaaaaatccaactaatgaatatatagtttcatttcagattatgatctatawtacagagatataggaaaagaaaagatggaccaaggaatgaagtttgactttttctctgagtaaaatggggagctaatacaatattctatgtgcaggactaaagtgaactgacatttacagagggttcatttttgcctgctgtgctgggaacagattggaaaggacagaggtagaaacagggagctcattacaggaattcagggaatagatggtagatccatggaccagggtgg

SEQ ID NO: 221414 - DNA, 419 bp, Homo sapiens
gtaacatggccactgatctgacaggaggtggagctcaggcagtaatgcttgcttgccctggctcacctcctgctgttcctaacaggccatgaacaagtaccagtccgtggcccaggggttggggamctctgatataatgaacagccctggaagacaatggttccttccactggattaaagagcagacatatggcaggagaattgcttgaacccaggaggcagaggttgcagtgagcagagatcgcgccattgcactctagtctgggtgacaagagtgaaactctgtctcaaaaaattaattaattaattaaaaataaagaaagagtagacatacttactgtccataataaaaggttcagattccctaaattcagcgtttccctcctccaacacaagccactgcatgtgcaggtagtacc

SEQ ID NO: 221415 - DNA, 524 bp, Homo sapiens
ggaaaatgtgtctccactttgtttttcattttcatcagtctttcatataaagatcttatgtatattttggatttctggtactgctgtatatggtattaggttgctacaaaagtatttgcagtaaaagccacaattatgtttgcagcaaactaatactttttgaaatgtttaatttccaattgttcactgtaagaaatagaattgatttttgtatattgagttagtatccttccacctactagttacagtagcatcttgctaggttctttgagattttttacattgataatcactttgagaatagaaaaaggttttctttcttcttttctaatcttttgtttttcttgctttattgctctgctttaaatcctactttataggatttcaaattatttacatttgtaatggattttaaagacctagactatgatctacctggtttactatttcatgtctcctgttgttgggtaacatgttctacagatgttaattrggtaaagttggttgacagtattgttcaaggc

SEQ ID NO: 221416 - DNA, 621 bp, Homo sapiens
tctacttggttagagagttattttctttcttttatatcttcatcaagcccaccctctctgacagttctttcttctcctcctctttctacagataggctcaggtcttaaacccagaaatgaacaatcctatgatgcttaagctaataccactctagcatcccctttactggcactttttttttttttttttcttgagacagggtctcaatccattgccaatgctggagtgcagtggcatgatcacggctccctggaggctcaacttcttgggctcaggtgattcttccacctctgcctcctgagtagctaaggctacagttgaatgccaccacacctgctaattttttgtagagacaggtttttgccatgttgctcaggctggtcttgaatgcctgggctcagcagtctgcctgcctcagcctccctactaagtgctagcattacaggtacaagccactgcacctggcctgacacattytttgaaaaggttatttactgtctttcattaattttttaagcaagtataatcttgcttttggtttccaccattttactgacacctcaccaaagtcaaagtcaaataatcctctcagcatatccaaccaccttttcttagttcct

SEQ ID NO: 221417 - DNA, 433 bp, Homo sapiens
tatgttagcagcagtttataaccactaaaattaagtcactcaaactgaaaccaactatacttcctttaagttacctattagtatttatgtattggtgccaccattatcctaagcttgaaatcttaayactcctatagtctttcatttgtgcattctctctccctaattcccaaccttcatgcaaggcctaattcaaagggcatctcttccataaagggttccttgacctcttcagctggttatagtctttccctcatcagaagacccaagacagtctatgtgtacctctcatgacacttggtttatgtttttattttcagacactggttttgcgggagcaggatttatatctgattcttccttgcatactctatggcaccttgaacactgctttgctcaaagtactaaaaaactatgtaagatttgttatctg

SEQ ID NO: 221418 - DNA, 435 bp, Homo sapiens
aatatgttagcagcagtttataaccactaaaattaagtcactcaaactgaaaccaactatacttcctttaagttacctattagtatttatgtattggtgccaccattatcctaagcttgaaatcttaacactcctatagtctttcatttgtgcattctctctccctaattcccaaccttcrtgcaaggcctaattcaaagggcatctcttccataaagggttccttgacctcttcagctggttatagtctttccctcatcagaagacccaagacagtctatgtgtacctctcatgacacttggtttatgtttttattttcagacactggttttgcgggagcaggatttatatctgattcttccttgcatactctatggcaccttgaacactgctttgctcaaagtactaaaaaactatgtaagatttgttatctg

SEQ ID NO: 221419 - DNA, 435 bp, Homo sapiens
aatatgttagcagcagtttataaccactaaaattaagtcactcaaactgaaaccaactatacttcctttaagttacctattagtatttatgtattggtgccaccattatcctaagcttgaaatcttaacactcctatagtctttcatttgtgcattctctctccctaattcccaaccttcatgcaaggcctaattcaaagggcatctcttccataaagggttccttgacctcttcagctggttatagtctttccctcatcagaagacccaaracagtctatgtgtacctctcatgacacttggtttatgtttttattttcagacactggttttgcgggagcaggatttatatctgattcttccttgcatactctatggcaccttgaacactgctttgctcaaagtactaaaaaactatgtaagatttgttatctg

SEQ ID NO: 221420 - DNA, 430 bp, Homo sapiens
tgttagcagcagtttataaccactaaaattaagtcactcaaactgaaaccaactatacttcctttaagttacctattagtatttatgtattggtgccaccattatcctaagcttgaaatcttaacactcctatagtctttcatttgtgcattctctctccctaattcccaaccttcatgcaaggcctaattcaaagggcatctcttccataaagggttccttgacctcttcagctggttatagtctttccctcatcagaagacccaagacagtctatgtgtacctctcatgacacttggtttatgtttttwttttcagacactggttttgcgggagcaggatttatatctgattcttccttgcatactctatggcaccttgaacactgctttgctcaaagtactaaaaaactatgtaagatttgttatct

SEQ ID NO: 221421 - DNA, 550 bp, Homo sapiens
tgaattcttttttgcatgagatccaagaaccctctcttgtggtctggagcaggacccctttgtggtaacaaaaccatatccaaacgatagccgagggtgtcattttagtaggagtgtgggtgattgatacagttaggatgctgccctaacaagggcaaaaatcgcagcaaatgggagggttatttctgtctcatatgcagtcygagtgtgtgcactgctgctggggcacctcatggggtcagactcccagcctccttggatttttttttccctctcaggcttcatgtgtgacttctatcctcccggtggttctagctcacgagagcaagagcacgcagccaccagtgagaggagatgaaggagggtgtgcacattctcttcaagggcacaccctgggcgtcacacacgtcccttctgctcatatctctgtaaaccaaacataaaattctaagcccccaactgactaaatgagcccctttttggccaagggcatccccaagaaactgaaaaactagttcaggtcatgacaagaagtgggggggttgacacg

SEQ ID NO: 221422 - DNA, 537 bp, Homo sapiens
tctggagcaggacccctttgtggtaacaaaaccatatccaaacgatagccgagggtgtcattttagtaggagtgtgggtgattgatacagttaggatgctgccctaacaagggcaaaaatcgcagcaaatgggagggttatttctgtctcatatgcagtctgagtgtgtgcactgctgctggggcacctcatggggtcagactcccagcctccttggatttttttttccctctcaggcttcatgtgtgacttctatcctcccggtggttctagctcaygagagcaagagcacgcagccaccagtgagaggagatgaaggagggtgtgcacattctcttcaagggcacaccctgggcgtcacacacgtcccttctgctcatatctctgtaaaccaaacataaaattctaagcccccaactgactaaatgagcccctttttggccaagggcatccccaagaaactgaaaaactagttcaggtcatgacaagaagtgggggggttgacacgcctcattgtaatcccttcctttggaattc

SEQ ID NO: 221423 - DNA, 527 bp, Homo sapiens
gaattcctcccaatcatgtaaccataggagcttctcatacaccccaagccatttccttttaccatgctgatatgtccttttaggcctcttgacatagtaccccttgctgggaatcctgcccctgcccatgagccaggcaacagaatgaaggctgctcttaactataaggtgcctgaaaggtgggtgggagttcaactggmaggttaggcacgtcaggccattctggcagagaatgtgtaaaagtgtaaaacagcatcatcatatggaagatacaagagactacaggtagaatgttttgctgaagcatgaatcgtgagggtatgaaggatggaaatatgaggatcagttgaaataacataagtgacattgaaatctgtaaaatgctccacaaattttgattgttgctacaatgacctcttgagcggtgttgtttttagaacccaatgataaaatatatagttactttctaagctgaaaaacaataattaaagcgttcattgcttaaagcttgattgtgtcacaacgag

SEQ ID NO: 221424 - DNA, 352 bp, Homo sapiens
cctctcagagaaatcccttttgcagagtatttgtctttagggtatttccagtggtcaaagtacttgagcagtggaacataatgggatatcaaattctgcttgtgtttataacctcacaggacatgatagcctcataaatgctaggtaactcacataaggattgaaaagacctgatttttcagcaaacttcctaaacgtacagctatgacctaagtgttatgaagcagggctgcayttgtaactcccatcttcccaatgatgaaggctccagagctgctgtgcatgtctgtgattgttttggagatgaagacagtgcctttcacagttgcctctcttcgtgattgccaattag

SEQ ID NO: 221425 - DNA, 550 bp, Homo sapiens
agactttgtcttaaccatgttagttctctcagtgcttagcatatggctggctgactctcagcaagtgaaggaatgggtgaatacctgcatagtgaataattattcaagagcagagaaaygagaccatagctctggtattaacaagttgtatgactttcagaatcacttcaccgatccaggccttcagataaaaaagatgagtagcaattgggtaggcagtcaggaaagagaatgccccagatggcagaaagggaatttgaaaacggagatttaagcaagcaaagtacattaatgaaacagcaaattatttggtaatcttagatgttcctcaaactttctgcttttgacttttcatacaaccctcaatattcacactatatgtcctagatgtgtgcaattcagtggtctaatctggacttccagataaaaggccagcaaggctgacttccagctcttccaagatggccccgcaggacagtagccaaccattcaccagcttggctcccattgcaatgtgtgtgtgatgattggaagatgtgatgaattaatt

SEQ ID NO: 221426 - DNA, 551 bp, Homo sapiens
agactttgtcttaaccatgttagttctctcagtgcttagcatatggctggctgactctcagcaagtgaaggaatgggtgaatacctgcatagtgaataattattcaagagcagagaaacgagaccatagctctggtattaacaagttgtrtgactttcagaatcacttcaccgatccaggccttcagataaaaaagatgagtagcaattgggtaggcagtcaggaaagagaatgccccagatggcagaaagggaatttgaaaacggagatttaagcaagcaaagtacattaatgaaacagcaaattatttggtaatcttagatgttcctcaaactttctgcttttgacttttcatacaaccctcaatattcacactatatgtcctagatgtgtgcaattcagtggtctaatctggacttccagataaaaggccagcaaggctgacttccagctcttccaagatggccccgcaggacagtagccaaccattcaccagcttggctcccattgcaatgtgtgtgtgatgattggaagatgtgatgaattaatta

SEQ ID NO: 221427 - DNA, 575 bp, Homo sapiens
agactttgtcttaaccatgttagttctctcagtgcttagcatatggctggctgactctcagcaagtgaaggaatgggtgaatacctgcatagtgaataattattcaagagcagagaaacgagaccatagctctggtattaacaagttgtatgactttcagaatcacttcaccgatccaggccttcagataaaaaagatgagtagcaattgggtaggcagtcaggaaagagaatgccccagatggcagaaagggaatttgaaaacggagatttaagcaagcaaagtacattaatgaaacagcaaattatttggtaatcttagatgttcctcaaactttctgcttttgacttttcatacaaccctcaatattcacactatatgtcctagatgtgtgcaattcagtggtctaatctggacttccagataaaaggccagcaaggctgacttccagctcttccaagatggccccgcaggacagtagccaaccattcaccagcttggctcccattgcaatgtgtgtgygatgattggaagatgtgatgaattaattacatctttttcctttttttagatct

SEQ ID NO: 221428 - DNA, 575 bp, Homo sapiens
aaaacaacctaaaaacagtagccattaacatattaaaaatgatataaaaattaagaatacatgctaagctggaaatttaaaacatcatttagaaaccagacactttgactggaggcagctgttgcctctctttttgacttaaacttttatttaactcattctactaaaattaatatccccacgaaaagagagttataaccataacttttaatgaggctcagttttgcccctttcttttttctctgttttacatattttgtttgtaaagtgactgttagaaacatttatagaaatttacacatttgaaatgcagagtgctataattacgtgagtgtakgttctttgctatggtttgaatgtcagatcctccaaaattcatgttaaaaccaaatcaccacagtgacagcattgaaagacagggcccctggaaggtgattaggtcatgaggctccttcaccataaatggataaggcccttctgaaaagggctttcaggtctctgccatgagaggacacagccttcctcccctacagaggaggcagccctcatccaacaaccgaacatgcctgcacctt

SEQ ID NO: 221429 - DNA, 575 bp, Homo sapiens
aaaacaacctaaaaacagtagccattaacatattaaaaatgatataaaaattaagaatacatgctaagctggaaatttaaaacatcatttagaaaccagacactttgactggaggcagctgttgcctctctttttgacttaaacttttatttaactcattctactaaaattaatatccccacgaaaagagagttataaccataacttttaatgaggctcagttttgcccctttcttttttctctgttttacatattttgtttgtaaagtgactgttagaaacatttatagaaatttacacatttgaaatgcagagtgctataattacgtgagtgtaggttctttgctatggtttgaatgtcagatcctccaaaattcatgttaaaaccaaatcaccacagtgacagcattgaaagacagggcccctggaaggtgattaggtcatgaggctccttcaccataaatggataaggcccttctgaaaagggctttcaggtctctgccatgwgaggacacagccttcctcccctacagaggaggcagccctcatccaacaaccgaacatgcctgcacctt

SEQ ID NO: 221430 - DNA, 583 bp, Homo sapiens
gaatccattgaagagggctctgcccttgtgagtcaatcacctcttattagccccgcttctcaacactgctgcatttgagattagatttccaacacatgaatttggggaacacattcaaacaccttcagcatagggttgacaatcaaagaatgtttgctcagttcaacttaattttctaaacttatttttcatctataaaatggggagaaataagagatgttttatgagatgactattaaaaaacaatacattaatattctgaaatagtataaaatacacaaaatattttatatagagttaattaaatgactgtgttracattatttggatatttactgacttgcaatggctctttgaaatgttctaaatcatatgacttatatgtttacacttgcagtggttatgactttgtgtctaaatcataattggtgaagctaagactcaaactcagttctatgactccaattcacaaattcttgactagtatgaagtgctggttttgctatacattactgagacgtataaacttacagtcttatttctaatgttcctaaagatagcataactgtaatagttgatgaat

SEQ ID NO: 221431 - DNA, 583 bp, Homo sapiens
gaatccattgaagagggctctgcccttgtgagtcaatcacctcttattagccccgcttctcaacactgctgcatttgagattagatttccaacacatgaatttggggaacacattcaaacaccttcagcatagggttgacaatcaaagaatgtttgctcagttcaacttaattttctaaacttatttttcatctataaaatggggagaaataagagatgttttatgagatgactattaaaaaacaatacattaatattctgaaatagtataaaatacacaaaatattttatatagagttaattaaatgactgtgttgacattatttggatatttactgacttgcaatggctctttgaaatgttctaaatcatatgacttatatgtttayacttgcagtggttatgactttgtgtctaaatcataattggtgaagctaagactcaaactcagttctatgactccaattcacaaattcttgactagtatgaagtgctggttttgctatacattactgagacgtataaacttacagtcttatttctaatgttcctaaagatagcataactgtaatagttgatgaat

SEQ ID NO: 221432 - DNA, 603 bp, Homo sapiens
tttgaaaactttgattacttaaaatacattagggtgtgcaccacacagttatgccatgcacaagacctgtggagtggacatgtgtatccactgggtgataaacactgtgcaagattttgttatttacctacaagaaacaaattttaaaaagagtgcctatgttgaaccaaccttggattccgcagatgaagcctacttgatcatggtgcataagcttttggatatgctgctggattcagtttgctagtgtttttttgaggatttttgcrttaattttgatcaaggatattggcctgaagttttctttttttgttgtgcccctgccaggttttggtatcaggatgatgctggccttatagaatgggttagggcggactcccttttttcccattttttggaatagtttcagtaggaattgtactggctctttgtacatctggcagaattcagctgtgaatttgtctggtcctgggcttttcttggtggtaggctatcactgcctcaatttcagaactcattattggtctgtccagggttttaatttctttctagtccagtcttgagagtgtatgtatctaagaatctatcaaattcttatagatt

SEQ ID NO: 221433 - DNA, 613 bp, Homo sapiens
caaccacttgaatgctggcttggagagatccaaagcagagcttacttaagctggtctaggactcctaatccagacactgtgagatagtaaatgaatgttgttttaagccactgaatttgtggtaaattattacacagcaataggtaaccaatacagtgtctttcattattcactggttttctttcagttatgtatgttgtcacatggttttaacttatgtgtakgttagctggaggtattctgcatcattaaaatacattttcattgagagatgccactgaaaaatacaggctttggagtcagagaagaaaaatccatattcctgtgcaaagaatttaacctctcttggcctcagtttccttgcctagaaacgggattacattattattacttcagggttgtagcagatatatgaactgaccatatgttcacttaacagggtgtctgaaattaccactattaaagttctgaagaaaacatgataatcaatgacttttaggatttttccttattggtagccactctgtcattctaccaggccaactcatcacctcttccacacaatctattacctcagcaatagatttttaggcctcagccaggactctgtaag

SEQ ID NO: 221434 - DNA, 298 bp, Homo sapiens
ggatgtccacaggcctggtgatttagcctctgacttgatggattgcagctttttggctcacaaaggactagtgtccacacttgaccccacattttagtactcacttctgcttggtttctcttgttcgggcttttttttttttttttttttttttttttttatcattttcgtaatcccttatggtttggatgcagagaggggtgattgtgaaaacaactcaaaatacaatttctagttcttaaaaactyttttaagccaatttttggttgcctggtatgcagctctcctgtggaatgca

SEQ ID NO: 221435 - DNA, 661 bp, Homo sapiens
cttaacaataataacatttaatgtaaatagattaaactttccaatcaaaagacatcaagtggatgaatggataaaaaaagacccaatgatctgttgccatatagaaatggtagtgatttgccatatagaaacaccaatagtgagcaacctgaaaacaaaatcaagaaagtaatcccatttaaaatagttacacataaagttaaatacctgggaattaaccaaagaagtgaaagaaccctacaatgaaaactataaaacactgatgcaataaattaaagatgacataccaaaaaatgaaagtatattccatgttcatggattagaagaatcaacattgtcaaaatgtctatactacmcaaagcaatctacagatttaagacaatctctatctctattttgatagagattaatagaatgccattctttacagaaatagaaaaaacagtcctaaaatttatatggaaccatctctattcatttctattttgatagagattaatagaatgccattcctcactgaaatagaaaaaaaaatccaaaaatgtatacgaaatcacaaaagacccagaataaacaaagctatcataagcaaaaagaacagaatgggagaaattgtattacctgacttcaaactatactacagagctacagtaaccaaaac

SEQ ID NO: 221436 - DNA, 501 bp, Homo sapiens
tttatttactcaacaaatagagatgcaagaataccaggctctatgctagatgttgsagatacaatgatgaaccaaacagaactgaaccctctttgagtttgtggtcttgggaagaaattaatcagatcatcacaataaataatgcagaattgcaaactgtgagaagtgaaggaaaggtagagggaaatacgggaaagaataatgaaaggatccggcctgttagagagaattcttggaggactggtgatgcttgagccaaactatggaagacgaatgggtgtgaatcagtgaggaacattggggctcaaaaatcagtgtgggacaagatctcagagtgagagacaatgtgggtacattcaaggaagtaaaaggacatcagtcgtggtaaatcagatttgggaactgaacctacactagagccttgtgcatgttgtctcatttgacaatcacaatgaccaatcaaattggtgttaatatgattttcattatgcatatgtagga

SEQ ID NO: 221437 - DNA, 501 bp, Homo sapiens
tttatttactcaacaaatagagatgcaagaataccaggctctatgctagatgttggagatacaatgatgaaccaaacagaactgaaccctctttgagtttgtggtcttgggaagaaattaatcagatcatcacaataaataatgcagaattgcaaactgtgagaagtgaaggaaaggtagagggaaatacgggaaagaataatgaaaggatccggcctgttagagagaattcttggaggactggtgatgcttgagccaaactatggaagacgaawgggtgtgaatcagtgaggaacattggggctcaaaaatcagtgtgggacaagatctcagagtgagagacaatgtgggtacattcaaggaagtaaaaggacatcagtcgtggtaaatcagatttgggaactgaacctacactagagccttgtgcatgttgtctcatttgacaatcacaatgaccaatcaaattggtgttaatatgattttcattatgcatatgtagga

SEQ ID NO: 221438 - DNA, 587 bp, Homo sapiens
tgttcagggctatggctatttggcacagagaactggatttccttttcagacccaatcaccaagcttcctcttttgagtagcctaacaagagttgttcataagctggctgagtgtttccttcaagaaatatgaagcctccatctaaatactattgaggatagaaaaaaagataaaagctacctmtaaagttcaatatcctaaagaacaatgcaattcaatttcacaagcatgtatttaacttgaaatattctatagggcctattgcacaaagaaccttacttagggagaaagacatctagttatttaaagcagaatgaagtaattggcaagacagaattttgagggaagaagcaattgaaattggtttgaaagatctcttcgaaaagagggaggatgagctcatccttgaaggagtgaagtagagcaattttaataaaacagagctgcctctggctagcaagtggtgtttcccatgagcagggccctatttcaagcctttcataactattaacccaagttaagccctgcaacagctctgtgaggtcagggatattattgtcccattttagagataataaaactgagat

SEQ ID NO: 221439 - DNA, 549 bp, Homo sapiens
gaggatgagctcatccttgaaggagtgaagtagagcaattttaataaaacagagctgcctctggctagcaagtggtgtttcccatgagcagggccctatttcaagcctttcataactattaacccaagttaagccctgcaacagctctgtgaggtcagggatattattgtcccattttagagataataaaactgagatttagaaacgataagcctcatgcccgaggttgcactgctgctgtaaacaacttaaccaggactggaagacttgcaatctagacccagcatttgggagctttgaggcgatctatgctgccttctgtatgggaaatcaggaaatgtggattcattaacatatctgtaaaaagttgttctctggatttcaattctatctataatttgagcagtgtatgtgactrtattatttgtaggttctcctccagccctaaaattctgaggacagggcctcccagaatcaggaaacagccctagagaaggtgccaagcaacagaacaataggaaatgttaggatggagagacagtggtgtat

SEQ ID NO: 221440 - DNA, 604 bp, Homo sapiens
cagttgatggtcacctcctcagagaagccttcctcgccttactcaacagcttgctatgatatcctatccatactctggaactgcaattctacagtatttttctaattggctatttaattttctctcttcctacttttctatcagttttgcactgtctgtaaataggatttttttaataccaaaaggaataaactatgattgaaaaaagattaacttataagactttgataatggctgtacatcatggataggcaagaatagatatttctgtwtttctttagacataaaactggttcaatcagaactccaaggaaaaaaacgtacacaattttgttttctttgaaaataaaacatctgtgaccaaaaaaacacagctgttgtaatgacttcacagggatattaatatgtagaataattatgaaaaacagagcaatctgttattaagaacaagtgtggctgaattagaatttgttgctagaattttgtgcaacagtggatcatccactgttttatcatctttagaattgttggaagtgctttcataaccattattacagcttgatggctttatcttctcatgatagccctgatatgcccaaaaaga

SEQ ID NO: 221441 - DNA, 604 bp, Homo sapiens
cagttgatggtcacctcctcagagaagccttcctcgccttactcaacagcttgctatgatatcctatccatactctggaactgcaattctacagtatttttctaattggctatttaattttctctcttcctacttttctatcagttttgcactgtctgtaaataggatttttttaataccaaaaggaataaactatgattgaaaaaagattaacttataagactttgataatggctgtacatcatggataggcaagaatagatatttctgtttttctttagayataaaactggttcaatcagaactccaaggaaaaaaacgtacacaattttgttttctttgaaaataaaacatctgtgaccaaaaaaacacagctgttgtaatgacttcacagggatattaatatgtagaataattatgaaaaacagagcaatctgttattaagaacaagtgtggctgaattagaatttgttgctagaattttgtgcaacagtggatcatccactgttttatcatctttagaattgttggaagtgctttcataaccattattacagcttgatggctttatcttctcatgatagccctgatatgcccaaaaaga

SEQ ID NO: 221442 - DNA, 604 bp, Homo sapiens
cagttgatggtcacctcctcagagaagccttcctcgccttactcaacagcttgctatgatatcctatccatactctggaactgcaattctacagtatttttctaattggctatttaattttctctcttcctacttttctatcagttttgcactgtctgtaaataggatttttttaataccaaaaggaataaactatgattgaaaaaagattaacttataagactttgataatggctgtacatcatggataggcaagaatagatatttctgtttttctttagacataaaactggttcaatcagaactccaaggaaaaaaacgtacacaattttgttttctttgaaaataaaacatctgtgaccaaaaaaacacagctgttgtaatgacttcacagkgatattaatatgtagaataattatgaaaaacagagcaatctgttattaagaacaagtgtggctgaattagaatttgttgctagaattttgtgcaacagtggatcatccactgttttatcatctttagaattgttggaagtgctttcataaccattattacagcttgatggctttatcttctcatgatagccctgatatgcccaaaaaga

SEQ ID NO: 221443 - DNA, 361 bp, Homo sapiens
ttgaggttttcataattaaagttgtggttactgttcagtttcctcaaaacataaagcatcatttttttgaaatcacacataggaagaagatagcctttgtagacaagatggttatcattgttgycagccatagaaaatgtgttaaaatactgatctgccataagatcatactttcagagtttgagacaagaagggtgtccctcactaatctgatgttcattgaggataagaataaagaaaattactagagtaaaaaccagaaacctacatgctgcttctccaaaagtgtctgatgacctttgaagaggcaaggagacttgagagggatgaactgtctacatctttgttcaatgttatgtgt

SEQ ID NO: 221444 - DNA, 552 bp, Homo sapiens
tctttatattctagtataaaacagccagagctgggctgttctcttaacctctgatcaaataagcctgtttagaaaaatctatgtgttttgcttatatcattgggcaaagtaatttgtaatatatgattgacataataaatcatcacttctaataaagcacatttttagaaaaataaaatttctgtgcacctgttttaaaaagctccagtgcactttccagctcagtcagaatcctcatttggaattaactgggggtccctggttcctgctgaagttacatattgacctgaatgaaasaggctggcctccagcatagactccaagctctgtgtttattgagtcaagagtaaggatcttctctctcttaaatctagtggtgggcagggagaggacaggggccaaagataattgactgaccttttaatttatattgccatttgcagacacttttcttgtatttttgaattcttattttgtcacaataatttgaaattatataatgcttcctaggttagtgagcattttcagaaacatcatttgatatccatatca

SEQ ID NO: 221445 - DNA, 589 bp, Homo sapiens
attggtacttttggaaatcaggttggatttgtgaagctggcagaaggagatcatgtaaactcacttttggagatagcaggtaaaacagcaacacactcatatgaaatcttgtctgttggagaagcaatttttttcaaytttgtaacagagacttgacatttttaaattttaaaagatgatggactagactcaagtattttttaggactgtcccaatcataagtctgaaggatttcagtgcttatcataacatttgacatacagttggcacttggtaggtactgaatcaatgaataggagttattggttgcctattcagaggcttgtgggagttgtcatccccattgcagagagccagttggtgaatcagcaaggtttccatttatgctgctcccctccacccagtcccctggagggactactctctgagcagaaggaccattggtgttagcagaagacctcatatgtgttggagaacatgttgccttgtgcagcacaattgaaagtgtcagggaattggaagcagaaaaaaaatcataacctggatgagtgacttcagtttgatccagagataataggttgggtattag

SEQ ID NO: 221446 - DNA, 525 bp, Homo sapiens
gatgtgatcattattggacgtacattagaaaaggcagtgaagtctggatgggactaatatttggaaggagaatagagtaatagggctgaagattagagttagtagaagttcaagagtgagacaggaaaattaggaggtgtgatcagagagcagtatattggattttatgaattgaggagatttctggttcatagagagtatgaagaaactttgttcgttgacgtcacaaagaaaaacaaatgatagctagaagttttaaaatcgagagaaagacaaattattaggttgcataggagaaacttatagcttcagtgaagtccctaggtacatgatcagtatacaaaaacctataaataattraagtattttttaagaggcacaatttttaataacaagaacagtagagacatgtaggaataaatcaactaaaggatatgcaagacttctatggaggaaatattttggctattacatctttactaggtatgtttatcataacatttttcccctttccttttttaaaga

SEQ ID NO: 221447 - DNA, 242 bp, Homo sapiens
gagttaatttttgtatatggtgtaaggtgtaagggactaacttcattcttttgcatgtggatatccagttttcctagcaccatttgttgaaagactgctgatgtagtttgtatgttatcccttctcaaattgtatgttgaaatgtaatccccartgttggaggtggggccttgtgggaggtgattggatcatcatcctcttggtaccatcctcatgctagtgagtgagttcttgtgagatct

SEQ ID NO: 221448 - DNA, 572 bp, Homo sapiens
ctacatatctatgtgacgccagatccttatcatatacttcaaccaaataactaattccatcagcttaaatgcacaagaagatgagagaatccagttatgtttctgttcagcaagacattaaagaagtttgcaaaaatgcaaaacagtctcactctgctttctgattttttacacaaaatgtattttgtaaaaatatgtagtttattaacattttaaattaaatatgtaattgatgtaatttatgttagtaacgggttattgttacagttaaatcaataaatattttaaaaatttatcagcttcgatctctattatagtaaatattcataggtataacccacataaaccaaagctctctggggccttcaamctttttttttaaagtataaagggatctcaagaccaaaaaaactcatgagttaaacagctccctaaactgtgtaatgagtattaacaaaatcaataaatatacaaaacattctcttaaaagcattttgctgtttatccactaacttctaaaacctaacacagagaaggtgcctttgtctcctctcccaccccctgtgaagctt

SEQ ID NO: 221449 - DNA, 518 bp, Homo sapiens
gggacttgctcagcgtacttgaagcatattgaggattctttagtagaattcacattttccaagagcaaagagtccaagtacaygctctttctaaagggcactggaggacttctctacttctcccgacccagaggggagactactgtccccacaggaggtcctcaaaacagacttgtggcaggccccttcttccccattgcgtttgagggccagcaatcaaggtggagaaagtcaccccatgcagatggaaagagtggctaaggaatggccattaattctggctggaaccttctcaagactctacttggggcggggtataaattggtactacatttcaggaagcaactggcaatgtatctcaagggcattaaatatgctcgtgccctctgactcaggaattcccctttgactcaggaatgaataagaaattcatttgcccattcattgatgctgctctatctcatgcacaaggttgggtgaacaagacaaacattgtccctgaccttatactgttaaca

SEQ ID NO: 221450 - DNA, 494 bp, Homo sapiens
gaaactgcttgaggcaggactagaaagagtttatgttcccgccaaccgggggaaacaccttgtaattcatagggaaggattttgcctccmtaatgtaggtagaaaacaatcaatagaaactgacccagaaatggcacacaatcagtagacatggacagtaaaacaagtattataattctttaaaaaaaattttttgtgagacagagtctcactctgttgcccatgctggagtgcagtggcactatctcagcttactgcaacctccgcctccgggttcaagtgattctcctacctcagcctctggagtagctggaattacaggcacacgccaccatgcccagctaatttatgtattttttttaccagagacggggtttcaccattttggccaggctggtctcgaactcctggcctcatgtgacccgcccccctcggcctcccaaagtactgggattacaggcataagccaccgtgccccgctgagtgttggaatt

SEQ ID NO: 221451 - DNA, 494 bp, Homo sapiens
gaaactgcttgaggcaggactagaaagagtttatgttcccgccaaccgggggaaacaccttgtaattcatagggaaggattttgcctccataatgtaggtagaaaacaatcaatagaaactgacccagaaatggcacacaatcagtagacatggacagtaaaacaagtattataattctttaaaaaaaattttttgtgagacagagtctcactctgttgcccatgctggagtgcagtggcackatctcagcttactgcaacctccgcctccgggttcaagtgattctcctacctcagcctctggagtagctggaattacaggcacacgccaccatgcccagctaatttatgtattttttttaccagagacggggtttcaccattttggccaggctggtctcgaactcctggcctcatgtgacccgcccccctcggcctcccaaagtactgggattacaggcataagccaccgtgccccgctgagtgttggaatt

SEQ ID NO: 221452 - DNA, 598 bp, Homo sapiens
aaaggttacggaagcaactgatgtgacttgctttattatatctaataataaayttgcaatgggaatcaaatcattaaatggcacagaagattcttcttttaggcttaaaacaatcacgtttgtttaaagatcacttttcactccaaaatctactaatggaaagagttgtaagaataattcaagtctttaggccaaggtcccacagtcccaggcagcctcatgcatttgcttatcatacatacatgcactgtcgctggagaagccattttgctgagtgctgttgacatactgcttaagcactggaattggaaggtaattgttgagatggccatgtacacatgtccatgttatctggctagcacttgaccaattttccccgaagacttatttctcacttttcttgtgatagtgctcagcccatttgttaagaatttccatggacatcacagagtaatgccatgagtttccggagtgtgacactgtcactcagagacacagcctccagcccccagcaacagcatagttatttttgaggcattccctccatttacccagatacaaggcctgaattgaggaagtggtaatacatgcacattac

SEQ ID NO: 221453 - DNA, 593 bp, Homo sapiens
accgacattttttaatttcaatagcttttggggtacaagaggtttttggttacatggatgaattatatggttgtgaattctgagattgtagtgcacctgtcacctgagtagtgtmcattgtgcccagtatgcagtcttttatccccctcccccttctgagtctccaatgtccattgtaccactctgcatgcctttgtattcccatagcttagctcctacttataagtgagaacatacagagagcctacatctaaaggagtcttcttttcttgaagtttgttcctaagaaacagaaaataaagaagagaaaaataagaaaaagaagggaaaggaggggtgagaggccaggggaaggagaaatatctaatgtagataacaggttaatgggtgcagcaaaccaacatggcacgtgtatacctatgtaacaaacctgcacgttctgcacatgtatcccagaacttaaattaaaaaaaaaaaaaaaaaaaaaaaaagaagggaaaggaaaggaaaagaaaagcagggtggattgttgtatatttcaggcctgaggttgcagtggcttattcagcccttattctcaacagcgtatgcag

SEQ ID NO: 221454 - DNA, 593 bp, Homo sapiens
accgacattttttaatttcaatagcttttggggtacaagaggtttttggttacatggatgaattatatggttgtgaattctgagattgtagtgcacctgtcacctgagtagtgtacattgtgcccagtatgcagtcttttatccccctcccccttctgagtctccaatgtccattgtaccactctgcatgcctttgtattcccatagcttagctcctacttataagtgagaacatacagagagcctacatctaaaggagtcttcttttcttgaagtttgttcctaagaaacagaaaataaagaagagaaaaataagaaaaagaagggaaaggaggggtgagaggccargggaaggagaaatatctaatgtagataacaggttaatgggtgcagcaaaccaacatggcacgtgtatacctatgtaacaaacctgcacgttctgcacatgtatcccagaacttaaattaaaaaaaaaaaaaaaaaaaaaaaaagaagggaaaggaaaggaaaagaaaagcagggtggattgttgtatatttcaggcctgaggttgcagtggcttattcagcccttattctcaacagcgtatgcag

SEQ ID NO: 221455 - DNA, 593 bp, Homo sapiens
accgacattttttaatttcaatagcttttggggtacaagaggtttttggttacatggatgaattatatggttgtgaattctgagattgtagtgcacctgtcacctgagtagtgtacattgtgcccagtatgcagtcttttatccccctcccccttctgagtctccaatgtccattgtaccactctgcatgcctttgtattcccatagcttagctcctacttataagtgagaacatacagagagcctacatctaaaggagtcttcttttcttgaagtttgttcctaagaaacagaaaataaagaagagaaaaataagaaaaagaagggaaaggaggggtgagaggccaggggaaggagaaatatctaatgtagataacaggttaatgggtgcagcaaaccarcatggcacgtgtatacctatgtaacaaacctgcacgttctgcacatgtatcccagaacttaaattaaaaaaaaaaaaaaaaaaaaaaaaagaagggaaaggaaaggaaaagaaaagcagggtggattgttgtatatttcaggcctgaggttgcagtggcttattcagcccttattctcaacagcgtatgcag

SEQ ID NO: 221456 - DNA, 614 bp, Homo sapiens
ccctttataatatttcagttgattaaaacattctcaaaaccctccccagatgtaactgatttgatctggctatatgaatgcaaatttttaaaaacagtataattttgttttctgacatttgtaattgattttrcttatatgccttgttcataataaaacctcaataaatgctaagtaaatagatggatgacttaaaaagttaaaagaaatgatattggaaagacactattggatgttggaagtgataatgagattgggatacgctccaaggtcctcagatggtagccaacaaaatcagtactgatcaatgagatcaatacttcccaactttggggatggaggtgagggaaaagtgggagaagccttaatctttgctcaatccttcaggaaaaataaggaggtatgcggtaggagccttgtaccctctgccccaaaggtaacacataccttataatggaatttgcaataaactgcctccccatttgcattaaccagcttgaaagtatgtgatccatatccattcatgtggcgatgtccatctggaatcccccgatcactgaacaagaaagaaacctaaagaacagaaatataaagcctaaaatgttttcatttaa

SEQ ID NO: 221457 - DNA, 614 bp, Homo sapiens
ccctttataatatttcagttgattaaaacattctcaaaaccctccccagatgtaactgatttgatctggctatatgaatgcaaatttttaaaaacagtataattttgttttctgacatttgtaattgattttacttatatgccttgttcataataaaacctcaataaatgcwaagtaaatagatggatgacttaaaaagttaaaagaaatgatattggaaagacactattggatgttggaagtgataatgagattgggatacgctccaaggtcctcagatggtagccaacaaaatcagtactgatcaatgagatcaatacttcccaactttggggatggaggtgagggaaaagtgggagaagccttaatctttgctcaatccttcaggaaaaataaggaggtatgcggtaggagccttgtaccctctgccccaaaggtaacacataccttataatggaatttgcaataaactgcctccccatttgcattaaccagcttgaaagtatgtgatccatatccattcatgtggcgatgtccatctggaatcccccgatcactgaacaagaaagaaacctaaagaacagaaatataaagcctaaaatgttttcatttaa

SEQ ID NO: 221458 - DNA, 525 bp, Homo sapiens
tggattatagtattaatgttttaaagatagcaaatgtctctgaaatgggataggttattttactgtaataaataattaattttaatccacctgattctccaatttcagttacatcagaagacactcagctgtccctcctctagggttagagcggcattcttctagccccacatgatcctggaagctcatagcttcatctagttccatggtcagagaatacttttgaccacagacaactgcctctgcagtgtcttccccgggtcactggaaatcaggagagacacgtaagtgacgcaaagctacgccacctccacctgggagaggaactcaacgctgtctatgacaaaactcaacagaccaacttcacacacagagaaaagcactakttttagtatttccacacacctagagtggagtctgtagttttactccccatgcatgtctgtcctgtacattaaaataaattcctgcctcttctctagaaggcaatacggtggggagtaggcacttacaaaaccacaaaag

SEQ ID NO: 221459 - DNA, 552 bp, Homo sapiens
gtttgtaaaggagtgtgtgtgtgtgtgagagagagagttttacaatggatcctatagaatacataatcttatatcctgctttttccacctaacattatcagataaaactttttccaagtcattaaatctttttccaaaatgtgatatttttctcctatgcctacacaatttgcaatcaaaggactattcctttatttacatactcctttactgagaacatttaaattgttttcttctataacagtacagtgacatccttcctctacatttgtatttatttccttaggacctgttttcagaggtcatttttggttcaagtcatttgaactttttaaggttcttgtgacatgttgttgattgttttctgcaatgctcragctagtttatactgtcacgggcactgagagtgtggattggaagtgcaattttcaagacaggtgaatatctggattctggatgttcatcaattgcatatttcatcacattcttctgagagagaaggcctctcatgttatgttcagccataaccactaacccatgggagtcatccaa

SEQ ID NO: 221460 - DNA, 533 bp, Homo sapiens
caaaatgcaatagctaacataatactgacctctcactgtggggaagcccaagaccagctccttcaatgactgtgcagcattgaacatgttacttggcttctctgggcttcagtatcctcgtttataaactggggataacaatctataacatcgaatttgctgatttaattctgtggactaaattgcatattgtgtatacaagagycttagcttagcacttggtgcataatgggtgccccaccctttgtacacatcaagtcatttaatcctcacagcaatcctatgtcctaatgtttcagtctgaaactaatgctcagagaagttcctccactgacccaacatcacacaggtgcctccagcacccttctcagcttaaacaggggctccttatttctccaggtgttggtgcccatggttcattttcagaaccgagagcatgccagtttcacaaggagattgctggcaggccccacagtctctgttactagaaactgaattgtcagtgaaagaggcccattgtgctgcctctgaat

SEQ ID NO: 221461 - DNA, 519 bp, Homo sapiens
tttaaagacaaaaaacttaaaaaaaatggacaaaattatgactgcagacatgtggagagtcctatctacaccctgtcagatggtccaaacactccactcccaaccatttagccacactttgcatctgtttatggctacatctaggaaatcaaaagcagatgacaacatcatcactgcagccaatgtttgtagcaaatattccttctctccaaaggcttagaaatttgtgaacgtggagccaggaagayggaatcataattaaatgcagatgtgctatcatgttatgctattatgcacctaaaagaaacaatgacctggagtgcaaaaccagtgtctccctgagagagccccagatggcacagtcgggctaaggacagatttcactgtggggacctggctgtgaaggaaggcctagaaggaaactaaagagataaacattgagattagagagtctaccttcgtcaatttaaaaaaagaagaaacaaagatattagagaaaactcatattgatcaagacta

SEQ ID NO: 221462 - DNA, 391 bp, Homo sapiens
gtgcccacagtacagggagaccaaccatcctggtttacctgggacagaggggtttcctgggatgtgggactttcagtgttaaaatgggaaaagtccctggcaaatcaggatagttggtcaccttaccaccatagttgccacaactgccaccgccactgactgtgtctttgaagtcgaggtgggaacagtggagcatacttctgtcctatgaaacagtgcyagggcagcttttacttccaccttgagtgccctgccaagccctcaggggaaattcacacatctccatttccttgaatggaatcacgcaaccctaggaggctgcactgccttccctcaggccatttctcggtgacagctgtgtccaccccactgtcaccccagcgatgttggc

SEQ ID NO: 221463 - DNA, 391 bp, Homo sapiens
gtgcccacagtacagggagaccaaccatcctggtttacctgggacagaggggtttcctgggatgtgggactttcagtgttaaaatgggaaaagtccctggcaaatcaggatagttggtcaccttaccaccatagttgccacaactgccaccgccactgactgtgtctttgaagtcgaggtgggaacagtggagcatacttctgtcctatgaaacagtgctagggcagcttttacttccaccttgagtgccctgccaagccctcaggggaaattcacacatctccatttccttgaatggratcacgcaaccctaggaggctgcactgccttccctcaggccatttctcggtgacagctgtgtccaccccactgtcaccccagcgatgttggc

SEQ ID NO: 221464 - DNA, 391 bp, Homo sapiens
gtgcccacagtacagggagaccaaccatcctggtttacctgggacagaggggtttcctgggatgtgggactttcagtgttaaaatgggaaaagtccctggcaaatcaggatagttggtcaccttaccaccatagttgccacaactgccaccgccactgactgtgtctttgaagtcgaggtgggaacagtggagcatacttctgtcctatgaaacagtgctagggcagcttttacttccaccttgagtgccctgccaagccctcaggggaaattcacacatctccatttccttgaatggaatcacgcaaccctaggaggctgcactgccttccctcrggccatttctcggtgacagctgtgtccaccccactgtcaccccagcgatgttggc

SEQ ID NO: 221465 - DNA, 533 bp, Homo sapiens
ctaatattcagaagcatgttctaggattgccttgctggctgctaaaattktaacaaatacatgccatctctcactgtgccctgcttccctgacttctatccctggaaccccctggactttcccacaagccagctggtaaaagttgcctgttccatcgggggggcttccagaatctccaggataagttctgattggtccatgcttgcgcgagtactatttgtcaaatattttgaatatcacctctgcttacaaaaactctgcagttcagtttgagtaagttatgtgacattaatgctataattactatatgtatacgctttccaccaaccaggtacaaatatctattgagaatccacaagggtcaagcccggtcctcaagcaccaaaagcaacagggaataaaatctgacatgggtctgtgcagggtttgtggagtttccccactagtggggaaagttctaggctggacccccattgccaaacaaggaaacctactatagacatacagtattagctagtgattctcaactgggg

SEQ ID NO: 221466 - DNA, 552 bp, Homo sapiens
agttttaaggggagcctctatttccttttttgtggaatagcccaattacacctactggataggattgttgaggggacctgagaaacttgagacgacaagaacgcgtagcgcctcggytggctgagggtgctgagtgagtagtagcacctgacaggcagaggacccacctcctgcctggaatcatcagcaactgacaatggtgcgagttctactcacctttaaacgctgcaaatcgcaccactgctatttgctgtggggtataacatgttagggaccctttctgtcatcgtcaccttaagccactctctgctctctgcctttcttttaaggccctcgtgttgtgttctctccagctttccccgtgcctcagccactcttcacgttccatctctgctctgtgctgacccggtatggtggtgtggggagagcaatggctttcaagttcaggctagggttcaaatccagctctgccacacgctggcgtgggttcttgggaaagtccttcatgactttcaagttcctcttctgtgatctcctgggggacgggggacc

SEQ ID NO: 221467 - DNA, 602 bp, Homo sapiens
tgaaacttaaccttggcaatcagggtaccttctaatgatttacacatctgcattttccttcttatttggtcttaattttctattttgctacttaagaggatttgtattgttttaatttatatgcaaatttgtcacagaatgaagcaaagtgtaactatttctttaaaaatatgtactgatgttcaaaattttagttatcaaaaagatataaattaaaagctcaaagaatgttccttagctctcagtcatgtaatgtgattaacaggctatctcgtggttagttttaagccatgtaaaaactctctttaaaagagttgcctctaatgaaaatgtttttgtgtatatttatatttaatatgattataatgtatgtctatatgtatatactatgtatgtgtatacatacacacacaatggaatatcacacagccataaaaaagaaggaaatcctgccatttgcaacaacatggatgaacctggaggacaytgtgcaaagtgaaataagccagacacagaaaggctaatactgcgtgatctcacttatatgtggaatctaaaaaagtcaaactcacagaagcagaaaggagactggaggttgccag

SEQ ID NO: 221468 - DNA, 476 bp, Homo sapiens
aagccatgaagagtacaggaagagccaaagagagaaagtcttggcatttagccaaattcacctcaccaatatttcccaaaaaaatggccaacaaaatcctgtggagagcattttaaaaacacagatttstgcaccaaaatacacccatccccactcctgatggttctaaattcaacggattaaggcagaaccagagaaacagaatttccataaagcttcccacaagggtccactcgggagccaaggttgggaaccactgcttcaggctggtatatttcactgtgatgaccatcccttcatagtaggaaagagtgaatgaacacctcccttcactttcactgtcaaaattcttaatttattttaaaattttttttacaatgataataatgaatttcagttttttaaattacttaatggagattatctagttggaggtattatgatgccagtttcatggaagaatatgccctgaattc

SEQ ID NO: 221469 - DNA, 476 bp, Homo sapiens
aagccatgaagagtacaggaagagccaaagagagaaagtcttggcatttagccaaattcacctcaccaatatttcccaaaaaaatggccaacaaaatcctgtggagagcattttaaaaacacagatttctgcaccaaaatacacccatccccactcctgatggttctaaattcaacggattaaggcagaaccagagaaacagaatttccataaagcttcccacragggtccactcgggagccaaggttgggaaccactgcttcaggctggtatatttcactgtgatgaccatcccttcatagtaggaaagagtgaatgaacacctcccttcactttcactgtcaaaattcttaatttattttaaaattttttttacaatgataataatgaatttcagttttttaaattacttaatggagattatctagttggaggtattatgatgccagtttcatggaagaatatgccctgaattc

SEQ ID NO: 221470 - DNA, 476 bp, Homo sapiens
aagccatgaagagtacaggaagagccaaagagagaaagtcttggcatttagccaaattcacctcaccaatatttcccaaaaaaatggccaacaaaatcctgtggagagcattttaaaaacacagatttctgcaccaaaatacacccatccccactcctgatggttctaaattcaacggattaaggcagaaccagagaaacagaatttccataaagcttcccacaagggtccactcgggagccaaggttgggaaccactgcttcaggctggtatatttcactgtgatgaccatcccttcatagtaggaaagagtraatgaacacctcccttcactttcactgtcaaaattcttaatttattttaaaattttttttacaatgataataatgaatttcagttttttaaattacttaatggagattatctagttggaggtattatgatgccagtttcatggaagaatatgccctgaattc

SEQ ID NO: 221471 - DNA, 551 bp, Homo sapiens
gaattcttgagagccagtattctgagtttttcttcagtgacccaatgttaatcactttgaaagaagagaggcaaagaagtctgtttttcattccatctctttgcctgtgtaaataattactatcagtttctaggctttaggaccagtgccataaagacattttaaggttcaatttcacagactcatttctgactatctcaggacaccatgggaatgatctgtgtactgtgttgttttctggagtgacttggccatgcagcccttttgctatgacacagcagcagaaatcaggcctgttttatttagtgcctccttttttcttccattgttctcatgtgtttcagaccctcaccacctggtgaccggctgtaaccccctctccagcttccttagggggcaatatccctataagaatgtgagtcagaaacacagtggccactggatmcagcactgctagagacaagcgaagatcaagcaagctgaggtcagcacaggtagacaggttcagctggaaaaaggactgggtgagctgtgcttggaatgagactggc

SEQ ID NO: 221472 - DNA, 389 bp, Homo sapiens
ttagtgttgcctgacgctctctttccattatgtgaatttatatttttatcttctwgactttcagttgctgataggttctccgtgattgacttattacattcctgtttggcctacatttacttggagtacacctgtatcattttgagagagaccttcttagtcttgctaaattgaaagcttcatttatttacttttttatttttgtctagagttggactggcaaggcctctgaagttgtgagttgacttcgcctaggctgcttgttcttcagtctcagaacatccttagccacaggtcatctttaagagcaatttacttatttcatcttggtgagaaagagcacttaacatgagatggacccacttgacacataggtgaaatattgcgta

SEQ ID NO: 221473 - DNA, 567 bp, Homo sapiens
agccatcaaaactgccttcagaagcaaaaggcaagaggaaaattatagtcgtgttagagatgaagttttaaaaaagtgatttttgtcttgatttcctgcgattctctttccctatctaattttgactctcaacagaaaatagagagtgaaatgagacaagtaggctgccattttgacctggtaatttggagttgtggcaattctccgttctgtgagaatcaactttgctaatgagaaaaaaaagctgtcgtgttgcgtcatgtacactttttactttgattatggtcttcttgactctaggtgagcagccccgccamggttccttcctttctctcggctgcatttattttccacagcagtggcctgagagcagccaggtcaggtccctgttcaccatcctgagcagggtctgcataatctgtttaaagatttgtgtactttccagagatgaagcactacccagtcttacccaagttcgaagagaaaacgacctctatgttttgcctcctttacaagaggaagaaaaacacaggtaaatgtttaactatttaagaatattattttagt

SEQ ID NO: 221474 - DNA, 584 bp, Homo sapiens
tgggtgagcaggtcattttttagggagtgctgttgaaatgaagacctatggaagggagtggaaggaagtaggacagaaacaggtcgagctgcaatgcaggcccggtaacagtttgaggtgacccccacatggagcactgtcctgagagtggcctctggagttgtcctgactggggagatacgtctgggcctttatgaccccrtgtggcccagtcattggatatgggctgccctgggaagactctgtgaccttggatgaggtgacttcagctgaggcagtcctgaacatgttgacagctgtgggctgcctgccaccagctccagcagctggggttaggtcaccctcaagaggatctgggtggcttatcatagggtccagcatgatctttaggccccagaaagagctctggctgttcttctggtggaatggagaatctctgaatggttttgtgagtagaggagtgaaataaactttcctcatgtaaggaccactgtgcctggcattttgagactagaatggggagagatgagaccagggagaggctgctgcaatctgatgtggcagcctgcattggagtgacaaga

SEQ ID NO: 221475 - DNA, 591 bp, Homo sapiens
cacttgtttttctcttagagacagggtctcactctgtcatccaggctggagtgcaatggtgtaattataggtcactgctgcctcaaactcctggcctcaagcaatccttctrcctcagcctcctgagtggctagaactacaggcatgcaccaccatgcccagctcataaaattttttaatttgtgttttctatagagacggggtcttgctatgttgtgcaggctggtctcaaactcctggcctcaagtggtccttattcctgggcctcccaaagtgctgggattacaggtgtgagccaccacacccttcctgaaaagtaatttttacatttattataaaacagttgcaaaggattttatagactatgtcacagtgcctcatccaacgtcccacatgaacaatatattacagaatctagtgtcaagaagattgtcacaactgagtaaattaaaaagcatcttcttttcttaaagtgaagaatatggaatttgtctgggttccccctttgtcctgattgcaaggaagctctgagccaatttttatttccaatgtcagaaactacatgactttcatggttatatttcttttttg

SEQ ID NO: 221476 - DNA, 591 bp, Homo sapiens
cacttgtttttctcttagagacagggtctcactctgtcatccaggctggagtgcaatggtgtaattataggtcactgctgcctcaaactcctggcctcaagcaatccttctacctcagcctcctgagtggctagaactacaggcatgcaccaccatgcccagctcataaaattttttaatttgtgttttctatagagacggggtcttgctatgttgtgcaggctggtctcaaactcctggcctcaagtggtccttattcctgggcctcccaaagtgctgggattacaggtgtgagccaccacacccttcctgaaaagtaatttttacatttattataaaacagttgcaaaggattttatagactatgtcacagtgcytcatccaacgtcccacatgaacaatatattacagaatctagtgtcaagaagattgtcacaactgagtaaattaaaaagcatcttcttttcttaaagtgaagaatatggaatttgtctgggttccccctttgtcctgattgcaaggaagctctgagccaatttttatttccaatgtcagaaactacatgactttcatggttatatttcttttttg

SEQ ID NO: 221477 - DNA, 450 bp, Homo sapiens
gagcagtggacaaaggagacaaaaatccctgccttcatggaacatgtaktctatcagagaaaaaaaattctcaaggaaaaaaggcaattttagcatctgctctgctctgttctctcaaaaaataagcaaaggatttcacaggtatgccaccggaggtatatatccccaggaaatgtccacatacacacaagaggtaggcataaggaagttcactgaaatttgttcatgatatggaaaattgcaaataagtatcactagagaaaatacataaataaatgtggttattttatagcgctcaagcacagcagtttagtgtgcggctctggggccagaagcctaggttttaatccagttgtaccactcgttggccctaatttctttgtctgtaacatggggattggggattcatagcagtgcttatctcccaggtctatttgagcattacgtaaa

SEQ ID NO: 221478 - DNA, 428 bp, Homo sapiens
gagacaaaaatccctgccttcatggaacatgtattctatcagagaaaaaaaattctcaaggaaaaaaggcaattttagcatctgctctgctctgttctctcaaaaaataagcaaagratttcacaggtatgccaccggaggtatatatccccaggaaatgtccacatacacacaagaggtaggcataaggaagttcactgaaatttgttcatgatatggaaaattgcaaataagtatcactagagaaaatacataaataaatgtggttattttatagcgctcaagcacagcagtttagtgtgcggctctggggccagaagcctaggttttaatccagttgtaccactcgttggccctaatttctttgtctgtaacatggggattggggattcatagcagtgcttatctcccaggtctatttgagcatt

SEQ ID NO: 221479 - DNA, 570 bp, Homo sapiens
tttctttttttgaagacaaagtctccctctgtcacccaggctggagtgcagtggcgagatctgggcttactgcaacctccgcctctttggctcaagcacttctgcctcagcctcccaagtagctgggactacaggcgcccaccaccatgctcggctaatttcttgtattttagtagagacagggtttctccttgttggccaggctggtctcgaattcccaaccgtaggtgatccacctgcctcagcctcccaaagtgctgggattacagatgtgagccactgtgcccaaccaagaataacaatttttttcttcctttacagtccttgtatcttttcaktattttccttttctattttgtctgatatatctttcatgaatacagagggactatacaatgttgaatggaactggtgataataggcattcttgtcttgtttctgatttaaagaaacgtttttaatatttctcatattagaaattatgtttatgataggatcatagtactcattgttaattaaggaagttctcatctattcctggtttactaagagttgtgtgtgttattttta

SEQ ID NO: 221480 - DNA, 502 bp, Homo sapiens
gaattctctgaagtaagaaaatctttctttcttttgttctctgtgtctaataggtctttttctgaaatattttggtcacatgaagaaatatgcaataggggtattttctccatctgggctccatttagacctgaaagggttagttgagaccattcacaggccaaagacggtacaacttccttggagattttgtcacttccactctcaaagggcttctgatktgctacatttgaatctaatggatcagtatcatttggttccacttcagatacaaatgagtatttttctttcacttggtttttagatttttcacattcatcagcgtttgcttcatggaaaatttttttcctagtcttgctagttcttactttttgtagattttttgttctacatttagaaaaacataatgaaaaactatcttcttcagaggtatctacaactgtttcatatacttcatcttctaggacatttggcattgactttccaatgtggtctttgcagc

SEQ ID NO: 221481 - DNA, 543 bp, Homo sapiens
tttgataaattctaggatttgtatttaaacatatgatcacagtattcattagtccaatatcaggaacaatttacattttaagaaaggtagacatatgctaacaatatttgcttctcttcactatgttactttaatacacatacagccaattcataaaaacaacccaaaatagtttaggaagattacttactgaaaaatgccagcatgaaaatgccatcattccccactctgagctggtctgcatcactgaagtcatctcttggtggacactcttcctcctgaatctgtaaatatgtaacattggaatagctcactaaaaattacaactttatcatcttaaatgtaagcataagaacttcagcaacatctaatgttctcaatttgttgtatagacaaatgcaataatgagtacaatgtctggcacagagtaatcaataagcattagcaastaatattttttcacagtcacatttgaaaagagtaactttaaagataaacacaaaaaagataaaagatgaataacatcaaactcataaaaatggt

SEQ ID NO: 221482 - DNA, 630 bp, Homo sapiens
aatatacagtatatacaaaggaacaggaaatatttaccagatgaactatattctgggtcacaaaataagtttggacaacttttaaataattatttttaaacagaatatattctctgaccctgtaatagaattaaattagaaatcaacaacaaagacctctagaaaattcctaaatattttgaaagtaaatcattaacataaataawcaatggatcagaaaagaaatcaaaaggatacttaaaaatctgttttgaaccaaatgaaagtgaaaacatagagtataaaattttgtgaaatggttcaaaaagggcatacggtacttttcatagtactgaaatactatgttggaaaagtagaccttatgataggtctgctaaatgactaaagttatcaccttaagatactagaaaaagtagatgataggaatcccaaacaatgaagaacaaaggaaatttaaaaatgagtgaaattaactaaatagtaaacaagcaacaataaatcaatgaaacttaaaaactcattttttgtgaagaccaatacaatgaaaaaactaacagtcagatttatcacaataaaaagagaaaaaagagagagaaggtacaaattgtcagtatcaggaaaaagagtgct

SEQ ID NO: 221483 - DNA, 392 bp, Homo sapiens
ggggctgtctgttttgttctggagtcacgactgatacaatctgctgtttccttttgcttcttcttacccccgacatcctggatgttgatctcaccaaaatcagatctcctatcataatttccctttgggtatcctggccattgtctattgccctctgagccagctttatgaccaaattagtcctccttactccacagttactcacactttaaaacctttaaaacgtttgaagtggrggttttagaacattctccactgctatgatttccgcacatttgctaccaaggtttccaaagatttagatcaattcttgttagtacttcatcaaagtcttttactagagtgtaaactccatgaatggagagattgtaaacgcatcttcgtgttctcca

SEQ ID NO: 221484 - DNA, 443 bp, Homo sapiens
tgtgaggaataaagaaaacagcagagtggtgttttaaagattgagagacatgactgtgtagtcagttcacaataaatgtggcaaaacggatcagtgggataattagaattatgaaatcattcatgcagaactgattttgtgacaccatgtgtatttcgttttgattcactgatagcctgagttggagcygaacctatttgagttttgtagctatagtacattggtttctgtctgtgtagctgcttacattatttgggtaattttttaatcttaggatgttggaatggaggtcaaactttattctttgtggcatatgtcctatgtgcaggattcttaatctctatccctaatctttacaataccctctatagtatatgccaagaaatgtaaccagaggcctttatggtctaggaatttcattttttttattatgtcgtatgaga

SEQ ID NO: 221485 - DNA, 590 bp, Homo sapiens
attccaacttggagggaaactctgtgtagcaggtggtgtctctggggaccctgttttcatgttggggatgtccagccttgtatcagggatggtgctggcacaacagcacctgaaacatggcctcccatagggtagctacttgattaatatcaagtgaatgagtgaatgatttaatcaaygatgttcaggttcatcagactccttttgacctgagcctctgtccagaaacctaaaaatatatctcatcggacacttcagtaggcttgcttcaactgtcccttgttcctctttttttcttcaacttcttaactgtatgtgggtttgtggaagatacaggaagaaggcacacttcattgctcagcctgagaagactttgcaaacctttgagagccacctctcattctactttctctccagtctgagccctggaatatgctggcaacccagggagcatctctctgccctgtgaaaactgggactagcaaaggagtgggtgaggaagctgccgtaagcactccataacttctgctggttctcggctccagggatgacaggtggagtcgtgtctctgggatttgccaggtggctcc

SEQ ID NO: 221486 - DNA, 590 bp, Homo sapiens
attccaacttggagggaaactctgtgtagcaggtggtgtctctggggaccctgttttcatgttggggatgtccagccttgtatcagggatggtgctggcacaacagcacctgaaacatggcctcccatagggtagctacttgattaatatcaagtgaatgagtgaatgatttaatcaatgatgttcaggttcatcagactccttttgacctgagcctctgtccagaaacctaaaaatatatctcatcggacacttcagtaggcttgcttcaactgtcccttgttcctctttttttcttcaacttcttaactgtrtgtgggtttgtggaagatacaggaagaaggcacacttcattgctcagcctgagaagactttgcaaacctttgagagccacctctcattctactttctctccagtctgagccctggaatatgctggcaacccagggagcatctctctgccctgtgaaaactgggactagcaaaggagtgggtgaggaagctgccgtaagcactccataacttctgctggttctcggctccagggatgacaggtggagtcgtgtctctgggatttgccaggtggctcc

SEQ ID NO: 221487 - DNA, 590 bp, Homo sapiens
attccaacttggagggaaactctgtgtagcaggtggtgtctctggggaccctgttttcatgttggggatgtccagccttgtatcagggatggtgctggcacaacagcacctgaaacatggcctcccatagggtagctacttgattaatatcaagtgaatgagtgaatgatttaatcaatgatgttcaggttcatcagactccttttgacctgagcctctgtccagaaacctaaaaatatatctcatcggacacttcagtaggcttgcttcaactgtcccttgttcctctttttttcttcaacttcttaactgtatgtgggtttgtggaagatacaggaagaaggcacacttcattgctcagcctgagaagactttgcaaacctttgagagccacctctcattctactttctctccagtctgagccctggartatgctggcaacccagggagcatctctctgccctgtgaaaactgggactagcaaaggagtgggtgaggaagctgccgtaagcactccataacttctgctggttctcggctccagggatgacaggtggagtcgtgtctctgggatttgccaggtggctcc

SEQ ID NO: 221488 - DNA, 590 bp, Homo sapiens
attccaacttggagggaaactctgtgtagcaggtggtgtctctggggaccctgttttcatgttggggatgtccagccttgtatcagggatggtgctggcacaacagcacctgaaacatggcctcccatagggtagctacttgattaatatcaagtgaatgagtgaatgatttaatcaatgatgttcaggttcatcagactccttttgacctgagcctctgtccagaaacctaaaaatatatctcatcggacacttcagtaggcttgcttcaactgtcccttgttcctctttttttcttcaacttcttaactgtatgtgggtttgtggaagatacaggaagaaggcacacttcattgctcagcctgagaagactttgcaaacctttgagagccacctctcattctactttctctccagtctgagccctggaatatgctggcaacccagggagcatctctctgccctgtgaaaactgggactagcaaaggartgggtgaggaagctgccgtaagcactccataacttctgctggttctcggctccagggatgacaggtggagtcgtgtctctgggatttgccaggtggctcc

SEQ ID NO: 221489 - DNA, 447 bp, Homo sapiens
ttctgtttcaataaggaatgtacgtatttcactcggctgatagtcacaaatgaaatcattcattaatattttccaaataggtaaatatgataaatgtataaatgagaatagaaaacttcttagttaaccatgtgtatctgagtctaggagcaattttaattttcaagctcagggataatatcagcaaattaggatctgttttataaaagtggtagacaacgtaagatacggcattctggagaaaaatggaacagacggcctcatatcctcaaaaatattttgattttaaacagctttaaacaaaatctcaaaatacttgcactctttcattgagaacttaggtcttaatctgttcttttttcccttctaggtgtggctggatctcctaaaacccattgtgaaacagattagaagtgagtatatrccatatgtttaatagtgatgtga

SEQ ID NO: 221490 - DNA, 562 bp, Homo sapiens
ttaactttgtaacataccacaaactaaccttcagggccacgcctcatattttattcccatgaagctcccacttaaaacaattcacaccttctctgctttgaagtccattcttcagctttgccaatttcaaagctgtttcatcagttctcaaagggatggtcaagcttgaggaatgtgactagcgctggtgagactcacaagagctcctgttcacagactagaaataatttgtaatgaattaatttgtaatgtggctaccaggccaaaacatatagttttgggcacccttttttagtttcacaatacttcataagcctaattatcagacaattatttcctgactagaaaattgaaagggaatttgataatcacatgtaataaacacattaaactatagaaaacttcctaggagatatgaattcaacagaataatcctaatggttaagaacatayatagatgctcaaagttatgattaatagaaatggaaataaacataaaatactgttatagctaagagattggtgaaagaaagttttatagtatcaatgttgccaagaacgt

SEQ ID NO: 221491 - DNA, 625 bp, Homo sapiens
ttaactcttcttgggatgtgatttgtaataattatgctgtcataaacttctggtgcatgaatagagaatcactggaactcttttgataaaagataagggggaaatataagcaaacctggaagagctcaataaagggttttaggtcctgaacatatttacaacttcctaactgggtgaaatctgatcctatttcatgagaaaggcrggtgctttctctatatccctttgaaactaaaagcacaggttacccacttgtgttgaaaaggaatgtactgaacagccttttgggggtgatgaatacattcattctgttggttttgtggggaattttacaggatatacatatatataataaaaacctatcaaactatgcacttcgagtgtgtgcactttattgtacgtcaacaatacttcaataagtctactaagagagaagcattgatcaatgaaacagtccaatagcagaatgatcaatagagcacacattttagagtgcagagaatcattatgtctttaagtagaatacaagtaagaattcaagtgcagtatgtgttttgctacaaaattgcaagaatgtggcttttatgaatttataaaactgctgtatcttaaaagtgtgcctaac

SEQ ID NO: 221492 - DNA, 625 bp, Homo sapiens
ttaactcttcttgggatgtgatttgtaataattatgctgtcataaacttctggtgcatgaatagagaatcactggaactcttttgataaaagataagggggaaatataagcaaacctggaagagctcaataaagggttttaggtcctgaacatatttacaacttcctaactgggtgaaatctgatcctatttcatgagaaaggcaggtgctttctctatatccctttgaaactaaaagcacaggttacccacttgtgttgaaaaggaatgtactgaacagccttttgggggtgatgaatacrttcattctgttggttttgtggggaattttacaggatatacatatatataataaaaacctatcaaactatgcacttcgagtgtgtgcactttattgtacgtcaacaatacttcaataagtctactaagagagaagcattgatcaatgaaacagtccaatagcagaatgatcaatagagcacacattttagagtgcagagaatcattatgtctttaagtagaatacaagtaagaattcaagtgcagtatgtgttttgctacaaaattgcaagaatgtggcttttatgaatttataaaactgctgtatcttaaaagtgtgcctaac

SEQ ID NO: 221493 - DNA, 625 bp, Homo sapiens
ttaactcttcttgggatgtgatttgtaataattatgctgtcataaacttctggtgcatgaatagagaatcactggaactcttttgataaaagataagggggaaatataagcaaacctggaagagctcaataaagggttttaggtcctgaacatatttacaacttcctaactgggtgaaatctgatcctatttcatgagaaaggcaggtgctttctctatatccctttgaaactaaaagcacaggttacccacttgtgttgaaaaggaatgtactgaacagccttttgggggtgatgaatacattcattctgttggttttgtggggaattttacaggatatacatatatataataaaaacctatcaaactatgcacttcragtgtgtgcactttattgtacgtcaacaatacttcaataagtctactaagagagaagcattgatcaatgaaacagtccaatagcagaatgatcaatagagcacacattttagagtgcagagaatcattatgtctttaagtagaatacaagtaagaattcaagtgcagtatgtgttttgctacaaaattgcaagaatgtggcttttatgaatttataaaactgctgtatcttaaaagtgtgcctaac

SEQ ID NO: 221494 - DNA, 625 bp, Homo sapiens
ttaactcttcttgggatgtgatttgtaataattatgctgtcataaacttctggtgcatgaatagagaatcactggaactcttttgataaaagataagggggaaatataagcaaacctggaagagctcaataaagggttttaggtcctgaacatatttacaacttcctaactgggtgaaatctgatcctatttcatgagaaaggcaggtgctttctctatatccctttgaaactaaaagcacaggttacccacttgtgttgaaaaggaatgtactgaacagccttttgggggtgatgaatacattcattctgttggttttgtggggaattttacaggatatacatatatataataaaaacctatcaaactatgcacttcgagtgtgtgcactttattgtacgtcaacaatacttcaataagkctactaagagagaagcattgatcaatgaaacagtccaatagcagaatgatcaatagagcacacattttagagtgcagagaatcattatgtctttaagtagaatacaagtaagaattcaagtgcagtatgtgttttgctacaaaattgcaagaatgtggcttttatgaatttataaaactgctgtatcttaaaagtgtgcctaac

SEQ ID NO: 221495 - DNA, 495 bp, Homo sapiens
tggtgcttcgtaccaatgaaaaataccatcttgtactcaggacaaagcttcagccatcagtgggaaagaacagttacaatggacagtttttacagcatgatacctgttaggacaagtaaaagccccttcagtttagatcaacaagagatatattaataccgtgcatacactgtgacatgagcttggccttccatgctcaaagaaccacyaagctcattgttactggagaagccagcattcttcccagtggtatgagtccatgctttattgacgtacttcattgttccgccatggagagaagaagaaaccagacagcatctgtgagaacctacatgttgggtgcccaccaaaatgaaaaacagctccttggccatcagaagccaactgggaccaagtcaggtgaggccttttctacattcccacccacttccccacccagcaacacacacacgtatctacatatctataagctaaattctcttacagatatgacat

SEQ ID NO: 221496 - DNA, 495 bp, Homo sapiens
tggtgcttcgtaccaatgaaaaataccatcttgtactcaggacaaagcttcagccatcagtgggaaagaacagttacaatggacagtttttacagcatgatacctgttaggacaagtaaaagccccttcagtttagatcaacaagagatatattaataccgtgcatacactgtgacatgagcttggccttccatgctcaaagaaccaccaagctcattgttactggagaagccagcattcttcccagtggtatgagtccatgctttattgacgtacttcattsttccgccatggagagaagaagaaaccagacagcatctgtgagaacctacatgttgggtgcccaccaaaatgaaaaacagctccttggccatcagaagccaactgggaccaagtcaggtgaggccttttctacattcccacccacttccccacccagcaacacacacacgtatctacatatctataagctaaattctcttacagatatgacat

SEQ ID NO: 221497 - DNA, 549 bp, Homo sapiens
accaaccaagagcaaccatgctggaaaacagtccttctctgcgctgtacacaattcaaaggcaggcatttagtttgttgacctactggtgacaacagtgcctatttcaaggtgttgctcttccctgcatccacactcaataggatttcagtttcaccaagagattctgagaggcagaattgtacttcttaaaacataacaatatgatccaccaatgcaaacctaaaccaaaccagcaatccctagtagatcacaattcatgaagatttgacaacttttctagtatttcacaggaagcctgggaagcagaaataaccccaaattcttcccattaaaatattcattattcttgacgaaagatttcaccaacataatctcaactagctatcaatttacayttggccttgaatagtgccaattcctcacttcatgaggcatggacaaagcagccctccttttaaagaaggggagaatgggaaacccttttctgtaatctcaaggatgcttcagttcaaactctcaaccaacaggagggtgagctgcataattg

SEQ ID NO: 221498 - DNA, 521 bp, Homo sapiens
tgcaatctatacatctgacaaaggactgatatctgtaatctacagggaactcaaacaaatcaagaaaaaaacaatcccatcaaaagtgggctaaggacataaatagacaattctcaaaagaagatatacaaatggccaaaaagcatatggaaaaatgtacagcatcgctaataatcagggaaatgcaaatcaaaaccacartgtaataccacctcactcctgcaagagtgaccataatcaaaaaattaaaaaaaaaatagttgttggtgtggatgcagtgaaaagggaacagttttacactgctggtgggaatgtaaactagtacagccactgtggaaaacagtgtggagattccttaaagatctgccattactaggtatctaccagaggaaaataagtcattatatgaaaaagatacttgcacacccatgtttatagcagcgcaatttgcacttgcaagaatatggaaccagcccaaatgcccatcaatcaatgagtggataaagaaaatgtggtgtata

SEQ ID NO: 221499 - DNA, 549 bp, Homo sapiens
aatcgtactcaagtttcagttgtcaaagctgagtttcttttttatagagttggcagacatagatatctttgcagtgtcttccatattaacttaaactggttctgtttaatctaaaatactagattctgaggtaacttagttaatttgggggagttctggtacattgaatttaatgtttgcccagtcgttctgctgcggtaataaagcaatcaattatggacttgaatgagttaccaataaaaactagttsactatttgtatgagtccagctcaccttttaaatgtggcaaaataatatgattttgaagctacctttaaaaatgatcagtttgagaaaaacaatcaatgaaaactattagtagaaaatagtattctttgggtgaagtgagataaattatgatgaagagattcttaaactggcagttgaagcagaacgaaatattacttttctttaatgtgaaactaactctttgaaggatggctttggatatagaagtgggtctgtgtctccacataaaggatatagactatggagaacaactcaccatt

SEQ ID NO: 221500 - DNA, 412 bp, Homo sapiens
ttttctaatttggattttgtgcattgccacataagtctaatcagtctcttagtacccagtattctttaaattaatgtttcccaaaagtagcttaagtaaatctgaagccatggtaatcagcaattgtaatttactgtgggacaccaaagtcctgcataatatttttattaaaaaatctttctctaaattgtgaatcacgttgttcatagtcactgtttgatgacgacacattcatctaaaagctgtggtgttaacgaataaaaagcccagataaccatatttagtatgaaacctgtaactgaggaaagcctggctggttgcactctgaaatgattaagcaggcactgctgtttgtggccacatccacctgtgttatatataatgcctgasaggaaaacaaagtcagctgttc

SEQ ID NO: 221501 - DNA, 604 bp, Homo sapiens
atggtaaattaaatatcatcaagagcaccaaaaattaagtgtagccattaagattaagggcaaccaggggaaagatatagcaactattgccagagtgtgtattgttagaaagttcaaatgaaagtcgaatcccccctcccataaaagcagcaatcaaactatcatattattttataaaaatataacttaataaactgtgaaattgagaagaattctgtgtagtgtttaggtatatgtttaaaaatatcaatgacaaatatatcctaaatcaagctggtattgttaacatgcagataaatatttttttggccatctccttgcaatatgtgttagaatttcatcagccataattttaagaaaactatttcttagtttsaggaacccaagtaatggacaatatgctagatgtagctttagttctttattgcagagcaaggcctggtcatgttggagtaggccattgcctttaagtaatgaattgaacctaggaagcctcttttgcctcaaaatttatttcctgttctactatctctctgggtggaactttactattagatatttattcctttgggtcagcatatgtattcttttgaaaggctagtta

SEQ ID NO: 221502 - DNA, 591 bp, Homo sapiens
attgtagaatggctagatcaagctaattaagctatgtattaccttgcatactttttttwaaatggaaagaacacttaaaatctactctgtcagcagttttcaagtatacaataaatccactgtcatcaccgtagtgtacaataggtcttttcaacttttccctcccatctatcagaaattttgtgtcctttgaccaacatcttccttatttaaatgtagaactctttaaaaaggagcttaatgaataaaggtatttgcataatgctgtggaaagtcttctgattcagtttggagaagcaatggtcacttaccttttaaaactccacttaaaggagtgagggatgatatatttgtagagcaaaccttttattttaatttaaaagatatatacagacattttattatcaatcttatgatgtagggctaatgttttcttgacatgttggtctgccgattgcagccctgcattacctttcttccataagcaacatctaaaatgcgccctttacaaattccatctctagtttctttaaaatgtagaaagatctctttaattaattaattaatttatttatttattgaagagatggg

SEQ ID NO: 221503 - DNA, 536 bp, Homo sapiens
caagcattacagtgatttatacttattttcttgtctttgcaagtgaataatggcatttactttctttgaagtataattatgcccaaggaaataattctattaattaggaggatatggatttctaagactttacttttaaatcttacacattcaaaatatttttataacgataattttgatctgagtgtttaaaaaatcaagctgtgtagctcctcttttrcactgctaagagcaatcaaaattagtctatgaagtttttggtgcataaagatttcgtgccacgacagtgagcaactttgttagatccttaagctcagatggacttatattgtttattctgtgttacttgaaattcaagacttttggctgccagaaaataagcagctgccacaagtaaatccagaggaatcaggaatactgaaatttcttttctgtggagacctgttctttgatgtctctgagacaatactaaacacgagtttcacttaatttcaaaaaagtttgcttcatagttacaatcagctttgcaatgagaa

SEQ ID NO: 221504 - DNA, 538 bp, Homo sapiens
caagcattacagtgatttatacttattttcttgtctttgcaagtgaataatggcatttactttctttgaagtataattatgcccaaggaaataattctattaattaggaggatatggatttctaagactttacttttaaatcttacacattcaaaatatttttataacgataattttgatctgagtgtttaaaaaatcaagctgtgtagctcctcttttacactgctaagagcaatcaaaattagtctatgaagtttttggtgcataaagatttcgtgccacgacagtgagcaactttgttagatccttaagctcagatggacttatattgtttattctgtgttacttgaaattcaagacttttggctgccagaaaataagcagctgccacaagtaaatccagaggaawcaggaatactgaaatttcttttctgtggagacctgttctttgatgtctctgagacaatactaaacacgagtttcacttaatttcaaaaaagtttgcttcatagttacaatcagctttgcaatgagaaga

SEQ ID NO: 221505 - DNA, 597 bp, Homo sapiens
ttgcattaaaaggatcagaacattccattctgtctgtttgcatttgaggaaatagaagaatgggaggaatctaccctaactagaggatgcaagcccaatgaaccagcagaaccgtgtcacaaacagcaaggccaagagatgatttgtttggttttatttatgttgctttgagataattccagaatctttaaattgagatgctttgctgtcaattgactgtcacctaaaagggtcaagaagtaaaatggagaagaagcatacagaagaggtgctttgaactgtacaaccaagtaaattttctaatgagataaattgaaaaggagaagatacagggagctaaggatgggatcatggaaaagagtaaagaactgcagacaggaggaggaatggtcagtgaggtaggagatraatcaggcagaaggcaaagtggaagggtctctttcttttgttttaataaaaaaaaattgtgtatacttgtaagtattcagaatgacaacaaaagagctgcgactatttttttgcaattaaagtggtattcagttaacagaacaatgattattttgcataagttgcatcagagacaaccgaaatgtaaag

SEQ ID NO: 221506 - DNA, 676 bp, Homo sapiens
agaatctgaaatttcaagtctgaagtctaggttactcatcaattgggtgaccttgcgtaaattacttaacttttggggggatattttcctcctttaaaaaaatgataacaacagtgagttgattgtaacaattaaatgaagtctaagaaacttgttgagagcatgtacttcattttgttcattgttgtgttctcaggaattgtcacgtgtgaacagcgagtggcacatagtatgatcaataaaataaatatttgttgaatgaatgaaagaataacatgtgcaaagaacccagacaagtgcctggcacaatgtaggcacttaaaaaatggtagcacaggcacagcgtctcttgtctgtaatcctagcattttgagaggctgaggcaggagtattgcttgaatccaggagtttgagaccatcctgggtaacatagggagagcccatctctataaaaaaatacaacagttagccaggtgtggtggtgagtgcctgtagttccagctacttgggaggctgacatgtragtttcgtttgagccagggaggttgaggctgctgtgagccactgcactccagcctgggtaacaaagcaagactctgtctcaaaaacaaaggtagctattataataggtattagtaaattaactgtatttctttagttatactatattgaagag

SEQ ID NO: 221507 - DNA, 553 bp, Homo sapiens
tatggcgactaaggcagtgtagtgaaattgtatcatgcttatgaagacctttcaactatgactgggaatatcctacctcatggctccatcctttccgtatttataaatcagatgctcattttctcagctttcttattgcatataggatatagcaatatggcttaggttctaagtcagaaactaccacccaagactttgatttggaaataagtaatgtgaaaaagcaaacacctgtgtggaatccctttttgtgaggtcarcagcagagtatcaaacttcttgaggcagtaggggcagagagccattctcagagacagcggtgtaatttgtcgggtctgtgtcctgtgccttggctgtggtgcctccagtcgagccatcttatggtttaatttggtttccttggggaagtagccttgaagccagtatttcttacatttacatagaatcagaaccacctcttatccctttctgcttcaacccttcacagagagtttttggtgtttgtacttgtatcagtttgctagagttgccttaacaaagtacaacaaaacag

SEQ ID NO: 221508 - DNA, 601 bp, Homo sapiens
tacataattgttttgagataagttagccatggctacaaagatcaattacaaaggtgacaccagtccaagattagataggcagttgctgggcagatatcctcacagaaatactgttttkcgtgcaaggttgctgtggtgtttgtgcaatgttatggtttttgcagcatcttttgtgatagtttttgttaccaggcatttatttgtgagaacccttccttcatggccctttgaggctctattttttatttttgttttttaacacaagtgactccattttgatcttgacaactttcacataatgaacagaaatgtattagctcatgggttcttgaggctgggaagtccaagattgaggggctggcatctggtgaaggccttcttgctacatcatcccatggcagaaggacaaagagaaggtgagagagagagagaaagagagagagagagcaagacggggccaaactcatcattttataaggaacccattcccaggataacagcattaatccattcatgaaggcagaggcctcatagcctaatcacttctcattaggctccacctctcaacatcatgacattggagatcaagttttcaacatgt

SEQ ID NO: 221509 - DNA, 601 bp, Homo sapiens
tacataattgttttgagataagttagccatggctacaaagatcaattacaaaggtgacaccagtccaagattagataggcagttgctgggcagatatcctcacagaaatactgtttttcgtrcaaggttgctgtggtgtttgtgcaatgttatggtttttgcagcatcttttgtgatagtttttgttaccaggcatttatttgtgagaacccttccttcatggccctttgaggctctattttttatttttgttttttaacacaagtgactccattttgatcttgacaactttcacataatgaacagaaatgtattagctcatgggttcttgaggctgggaagtccaagattgaggggctggcatctggtgaaggccttcttgctacatcatcccatggcagaaggacaaagagaaggtgagagagagagagaaagagagagagagagcaagacggggccaaactcatcattttataaggaacccattcccaggataacagcattaatccattcatgaaggcagaggcctcatagcctaatcacttctcattaggctccacctctcaacatcatgacattggagatcaagttttcaacatgt

SEQ ID NO: 221510 - DNA, 554 bp, Homo sapiens
gggtaatacaattggggtgagacatcactacttcccttgtcaatcctttccttgagctatccccttggccctcactccttataactttaaccccagacctggatccacctcacttaaccctcctctgtcctgggcctgctcgctggacctgaattttacttcatatggaattccttccaccatgccactgccagaagacagaaccagtagtggagaatcttactctttccccagtttccccatcttggtaaatattaacagcatccattaagtagctaacattaaaaaacttaatagttattctttctttccctcttcctctctctattagtttctcatggatgccataactttacaacaaatttggtggcttaaaacaatagaaatttattctctattrtggagccagaagtctgaattagatgccaccagagttgattccttctggtggttctgaaggagaatcagttccatgccccttctagctttgggcgcctgtgggcaattgtggcattccttgacctgcagatgtatcattccattctctgcctctg

SEQ ID NO: 221511 - DNA, 329 bp, Homo sapiens
ttgggctttcaggcctttcaggccaggtagattgcctttaacttgctcaactgcacccccacctgttccatatatttaaaaacatgctccaacttacacaattgatcagcttattttctttgggaagaaaatatttttgttgtagtttcagtttgtggcctgtgacgtttattggcaagacaaygtttgatacaattaacagttttagaactaccattttaaaatgaatttcattttaagctcttccctttccaattttttttttttttggaagttcaagagtatttctgaagaaattaagatggataccaactttacaacatctgggc

SEQ ID NO: 221512 - DNA, 231 bp, Homo sapiens
ctcccactgagtaggatgcagaataaggggtagaagttacaggagtacgataaagtgtgataaaactgactttctgaaacataagttgttatatgttctctttatggttttattttatgattgtatgtaaaaaagtmtcctattgtctaagataacttcaagcttcctgttatatttacagcaaccctaacaaccagctcaatatggtaagatcaaacgggaaatgccatg

SEQ ID NO: 221513 - DNA, 498 bp, Homo sapiens
gttctgttctttgtaccatgctgcttcaatgaatttagatttgagatttcaggggatttaaaaaatttctagcttaatattcagtctagtgggctaaaatgtttctgctgtattgcaatacatacagccttgtgtttaaaaagactttactctgtatattacttatgaatataactgagagcacctaaagggaagttggttttcagacaaaatgcaatttcagagatttgcacatgacttctcttggcagagatgtgaacaagtacagggagtctgggtataacgtgatcaggcagctcagttttaacaagagtgacrcacagtaggaacaccactgaaccctttataaactctttataaatcacgaattttataacataaatgaatgccataacatatagtttataaagcatagaactcaataagcttttcgttcttatttaatttgtttgcaattatatgtggccattagataaacggaagaagcttggtgataga

SEQ ID NO: 221514 - DNA, 388 bp, Homo sapiens
attcagtcccacatcatctgacccctctttatcacagatgtcttaactgttcttcctcctgtatccctcactccttcccataacccttgctgtgtgtatcacttctcatctcctgrctggtggtggggtcggaagagtcattataaaatagaaatttggttcagatagtaagttattcccaagccaaaacctgccttcatcaacatagccttcagtataaagtacaaactacttgtttgaatatatttgacaaggtcaagagcctaggatgaattaaattggattgctgtctatttctaagcctcatctcttaccacttagagtggtaagagacccctttgctctagctatactgcacatcttgcaattccagggaatgtcacaatat

SEQ ID NO: 221515 - DNA, 388 bp, Homo sapiens
attcagtcccacatcatctgacccctctttatcacagatgtcttaactgttcttcctcctgtatccctcactccttcccataacccttgctgtgtgtatcacttctcatctcctggctggtggtggggtsggaagagtcattataaaatagaaatttggttcagatagtaagttattcccaagccaaaacctgccttcatcaacatagccttcagtataaagtacaaactacttgtttgaatatatttgacaaggtcaagagcctaggatgaattaaattggattgctgtctatttctaagcctcatctcttaccacttagagtggtaagagacccctttgctctagctatactgcacatcttgcaattccagggaatgtcacaatat

SEQ ID NO: 221516 - DNA, 487 bp, Homo sapiens
tgcccttctcagacagatagggatctatcctacagctggataaaagggctgttcagtagctaatctgatggacttttattccagtgattataattaatttatcaaattatccccatttagatagagaagtatttaaagacataaaaagacagtcttcctagatttcttcttgttactcatactccaccctgtggatactgaaacctgtggattctatctctagagttctcctccctgtctgtcccctcccctgtcccacagccagagccaccattcaggctgttgtcatgtcatcacctgctaaatggactataccaatgactttcaatgtcttcccttctatttaccttcccaaatccagacctggcaatatcactgccttgtttaaaaagagcctctctccattatccttaagctcctcagctagtggcacaaagtccmctgcaccctggctcctgctggcttttccagctctcccttggctggt

SEQ ID NO: 221517 - DNA, 487 bp, Homo sapiens
tgcccttctcagacagatagggatctatcctacagctggataaaagggctgttcagtagctaatctgatggacttttattccagtgattataattaatttatcaaattatccccatttagatagagaagtatttaaagacataaaaagacagtcttcctagatttcttcttgttactcatactccaccctgtggatactgaaacctgtggattctatctctagagttctcctccctgtctgtcccctcccctgtcccacagccagagccaccattcaggctgttgtcatgtcatcacctgctaaatggactataccaatgactttcaatgtcttcccttctatttaccttcccaaatccagacctggcaatatcactgccttgtttaaaaagagcctctctccattatccttaagctcctcagctagtggcacaaagtccactgcaccctggctcctgctkgcttttccagctctcccttggctggt

SEQ ID NO: 221518 - DNA, 435 bp, Homo sapiens
tagggagataccagagaaagatgaaaaacaacttaaattaaaaaaaaaattcaagatatgcattaaaacgtctccagagaaagagatattataatgaaaaaacaattacaacttctggaaatgaaaaacacacttaaagaaatgcaaaatatgcaagaaaatttcaacaatagactcaagtagaagaaagaacttcagagcttaaagacaaggctttcaaattaacccaatccaacaaagacaaagaaaaaagaattttaaaaaaataaagcctccaagaagtttgggattatgctaaaccaccaaacataagaataactggtgttcctgaggaagaagagaaatctaaaagtttggaaaaattstttgagggaataatcgagaaaagcttccctggctttgctggagatctagacatccaaatacaagaagccc

SEQ ID NO: 221519 - DNA, 479 bp, Homo sapiens
caaccacattggtgcctttgaccaactccagattacacagaattgtaataaacacatttatgaactgtattatgaccaaaatagatggcatatatttaactstaaattagttcttaaaaaattaagttaatataaaatattcaatgcttatagtcatcactacctgcctgtcacctgttactgtcagcatttatagattagctaaaatagttttccctttattactatgtgcttgtgtcttcattgacttatgtaattcttgtgacagtcacattcagctgaaccttagctaagagtaggaaggttataaaaaactgaacttaaggccaggtgtggtggctcacacttgtaatcccaacactttggaaggctgaggcgggtggatcacctgaggtcaggagttcaagaccagcctgggcaacatggtgaaaccctgtctctgctaaaaataaaaaattacctgggtgcagtggcccatg

SEQ ID NO: 221520 - DNA, 461 bp, Homo sapiens
caccaaacaggagttttttgcctctctattagacgaaaatgtgcaagtgatcctgtgtccctaccgagctgtagaaaagctcttgtcaatagagggccaaacccagcactgcatgatggaatatacagcatcctcatttgcctatttccaagttttcgatcatttttatgacaagctgaagttagtgaaaatatcacagctgaggaactagtgccgtcaataagtgagtgagtgagaaatcttttcagaagcctgctctgctaagaggctcttcggtaccacagttaccaaggagagtgttgaaaatgggaattcctagccccagtctaagactgagtctggacctttacagggtgggtctagtaatgcagaaatgtatgcggctgtgtgtatgtatgtgtatgaatgtgtgtgtttgtgtgtgtgtgtgyacgctttgtgaactttaacatgttcttaag

SEQ ID NO: 221521 - DNA, 472 bp, Homo sapiens
gactgagtctggacctttacagggtgggtctagtaatgcagaaatgtatgcggctgtgtgtatgtatgtgtatgaatgtgtgtgtttgtgtgtgtgtgtgcrcgctttgtgaactttaacatgttcttaaggcatgtgtcattgagtctgggaaccattgctagagagatcattgtatagatggggaagctgagatctgcaccaggccaggacgtttgctgattttgcaattgtcacatgctgaaggacggcactgtgagctttcagagccatatgatccttgcaaatctctgtggagagggagtgagctgtagtcttatcctaggggaccatgttagcctggtctaaacttaaaccttctcacttttttcaagctactttatgtgtttgtctgccctccgaagaactcttcctctctgggagtgaaaacaccagtaggtataaacttcctggaagacaaattggcttccaa

SEQ ID NO: 221522 - DNA, 588 bp, Homo sapiens
ttcatccagctttccttctgcctcttcctaaaatattccagtctccaaaattacctaaatttttttcattaaaaactcaaaatgtgactatttatggatctgagtcagaaatttacattcttttttaaaattaataggctttgctttttagagcagttttagatttacagaaaaattaagcaaaaagtatacagttcccacattatccacatttatcctacagttcctattattgaygacttgcttttgtatggtacatttgttaaaactgatataatattgatatattattgttaacccaagtacatagttaacattaaggtttattctttgtgagacttacatgtaaaacccaaaactatagaaaccatggaagacaacctaggcaataccattctggatgtaggagcaggaaaaggtttcatgatgaaaacaccaaaagtaattacaataaaagcaaaagttgacaaatgagatctaattaaactaaagagcttcagcacagcaaaggaaactatcaagagagtgaacagacaactgacagaataagagaaaaattgtgcaaactacacatctgacaaaggtcta

SEQ ID NO: 221523 - DNA, 588 bp, Homo sapiens
ttcatccagctttccttctgcctcttcctaaaatattccagtctccaaaattacctaaatttttttcattaaaaactcaaaatgtgactatttatggatctgagtcagaaatttacattcttttttaaaattaataggctttgctttttagagcagttttagatttacagaaaaattaagcaaaaagtatacagttcccacattatccacatttatcctacagttcctattattgatgacttgcttttgtatggtacatttgttaaaactgatataatattgatatattattgttaacccaagtacatagttaayattaaggtttattctttgtgagacttacatgtaaaacccaaaactatagaaaccatggaagacaacctaggcaataccattctggatgtaggagcaggaaaaggtttcatgatgaaaacaccaaaagtaattacaataaaagcaaaagttgacaaatgagatctaattaaactaaagagcttcagcacagcaaaggaaactatcaagagagtgaacagacaactgacagaataagagaaaaattgtgcaaactacacatctgacaaaggtcta

SEQ ID NO: 221524 - DNA, 477 bp, Homo sapiens
tggggttcctggcaactctttctttaagttctttcttatcctgggatgtgtcttttctaattctaggggcctaaatacgtaaaaggcttcaaacttgattttacttcaataaacttgaaattatgttggttctaccacctccagtataataatcatcctgcttggcaaatcagtaaagattttaaaattgatactcttcaaggttagcgaagctgtggaagaacctggactctcatgtaccacgagatcaacacatcctcttgaaaggccccatgcactataaacctcagaagtgggcatgtattttaacctayttcttagaatttatacttaggaaataatcacacactttttaaagcagtttggtataaacttttcattgcagcattatttatattagttaaaatgttagagtaacctaaatattttaaactatggtttggaaataatctactagtaggaaaaagatgtgttcaa

SEQ ID NO: 221525 - DNA, 375 bp, Homo sapiens
agggggttggtggctggggaggtaaagtgaaagtctctagaggacattaaagtgactctgtgcatttaagggaagctggaagacttggaggtacaagcaggcagcaaattcttgggttccacaagaaaaaagcatactacttctcaaagtttcatagcataaatacaggaaattataggaatgctttgaaaaagtagtgactgtgactgtactaacttatagagtcatcaccccaaaacaktggaaatgacaataataatccaataaaaaaaaaagaagtttccaactcctgaagtactttctaaattctttggtatcaatgacctacctagtgcaatatcatattcaagtcctgtttccatttttgatatttga

SEQ ID NO: 221526 - DNA, 550 bp, Homo sapiens
aaaataacttcttccaaatgccagttctaatgaaaaatgccaattagaaatgaggaagagactattataaacaaatcagtagatgctagaaaggagtaacaacttgaaacctgacccagaaagtaaaaaaagaaaataaatcatcaacagaccttgacattttcaaaagcaaagcaatctgaatccatttggagttttttataatggcctgaatatgtttcaattcactgtggcagggctattgttatcactgagactgatgatcaatatcagtaagtaatcagtgaaagttttcacctatttaagatgattagcacacatatatacatttgagaaatatttcccaagaacgtaggccccttcctcagcactgtgtccccaggatcctgatgagtggctgacacaggataagtgctaaattaagaaagattgactaaatgaatgagtaacccttcaaaacggttatttttcttcttcaaatgttttgctacttcattaaagttgtaaagtaagtaaacttgcaytggatctttcccatgtctgcaaaagc

SEQ ID NO: 221527 - DNA, 586 bp, Homo sapiens
tccccttgtggtaacactgttagtggtgtgtagctcactcattcatttgataaatatttattgagactctctttgtcccagggacagtttagatttgttgtgtatccattggtgaagataggacaaaaatccccgacttcatggagggagagagagaataaacatggaatgtaattatttaattaattataataaaagagaataaggctatgaaaaaaataaagcaggataagagagactrggaatgtgggggtggggtcatgtcatctttactaggatagttaaagtagacctccttgaggagcattttaaagaaggtgagatcatttctgtgtgtgtattccttctatttctctatcactttagtttcttttcttgttttattttatttaatttatttatttatgtttttcagatggagttttgcctttgttgcccaggctggagtgcagtggcacaatctcaactcactgcaacctccacctcctgggttcaagcaattctcctgcctcagcctcctgagtagctgggactacaggcatgtgccactacaccaggctaatttttgtatttttagtagagacag

SEQ ID NO: 221528 - DNA, 586 bp, Homo sapiens
tccccttgtggtaacactgttagtggtgtgtagctcactcattcatttgataaatatttattgagactctctttgtcccagggacagtttagatttgttgtgtatccattggtgaagataggacaaaaatccccgacttcatggagggagagagagaataaacatggaatgtaattatttaattaattataataaaagagaataaggctatgaaaaaaataaagcaggataagagagactaggaatgtgggggtggggtcatgtcatctttactaggatagttaaagtagacctccttgaggagcattttaaagaaggtgagatcatttctgtgtgtgtattccttctatttctctatcactttagtttcttttcttgttttattttatttaatttatttatttatktttttcagatggagttttgcctttgttgcccaggctggagtgcagtggcacaatctcaactcactgcaacctccacctcctgggttcaagcaattctcctgcctcagcctcctgagtagctgggactacaggcatgtgccactacaccaggctaatttttgtatttttagtagagacag

SEQ ID NO: 221529 - DNA, 559 bp, Homo sapiens
ctcatggaggaatgttatgctcctcctaagccaaactctaactacagctaaaacaggaagctctgcaagcagaagagaattttggagatgagcaatatgtctcctgtagtaggccaaaagggaaaagagaaaacagggaaggcaaagaaataggggaaacaccattggcaaccctaattggaactcctttctaaagtgtttttacttcttttgtggtttaaaatggattctctctcttttataatgttcttccaacctaggaaaggttaattttccaaaccttaaaatgcttggcttagagttgagctagggggaagggaacccagaagcctgatatgttggcaaaagggtaaaaatttcttactagtcaggcttttggcttctctctccctgtgcaaaccagtaaacgggataataaggatcatagtttatattctctgtraatttataattaatgaaaaaggatttgtgaggttggtcttaagctgtagacaatctgatgtgctttgcatgtctttctgtatggttctgtcaaagaaagggtacccttaggttagga

SEQ ID NO: 221530 - DNA, 618 bp, Homo sapiens
ttccagcaaggaaatgacaagctcctggattaagcagggaaaatatcttactgaaatatttaacactatagcacctagcttagagactttcaagttttgggtgctcagatagtctcttgtataaaagaaagaacaatggatttacccagaagagtcagtaaatgagagccagaagagacagctaaacacccctacacttgaaatgtaaagggtagggatactcacccactttaccwtaaagccatccagagtaggccacaaaacgtagaacattttgtcttttaaaaaatttattaggtatccataatgttactgtgagcaacgtcacaaagaatgctgagcaaagctattcatgtgttctggtgtacagcaggcctaaacttgaccaagtaaaaattaaagggtaaaatggaatgccatataatgatgaggcagtaactgcaacagttaagaacttttcctcttgattatgtaagaaatgtgatcagggcagtaaccatttgtagcaaagactactggtgccatccctagtatccactttcctctccttcattagtaatggaaccctctatttttaactgggccattggccacctgcaataaaggtttcacttctca

SEQ ID NO: 221531 - DNA, 406 bp, Homo sapiens
agaattcatccttcacaactgagtgtcccctatttaaatctgcaaactcttagagttaaagtagggctcacagaaatgagaaatagaattgccaactaaaaatatgcttgtatccagatgactctgtaaagtgtgacctggttagcctttaccatcatgttgaacaaaagctctcagttgaaaaaccttatttctgagactgctacaatgtgaagcatctcaagaacaggcactgagcactcggtaatagcctttgttctgcaggacttttaaagtcatrgatattggggatactggacatttaagtgaaatgtgcttttagagagtaaatgtaattttcatagattttctattgctataacacaatacgtgagactagataattcataaagaaaagaatttattt

SEQ ID NO: 221532 - DNA, 522 bp, Homo sapiens
tccacagttagaataagaacccagagtggtcttggtctcaaagtaacccaaaccttccacctgccaaggatggggtggcgtcaggctaatcccgccaccaagccagcctgtgaaaaataatgattacgtaaagaaaacatcccggaaaaagaaccccgactaatctgtgctggactggaacacatgcctcttgttctgacctgcctccagagtgaaatgagccacttctgccttgcattgttgcccctttcttctcattcacgtgcttgctcagcagacacccaaacaaagcgtttggggtttgcccagctgttctatttccagcctgttcggttcattttaggccccgcagcctctgcccacagccgggtgcaggccctcctccttcccctcctctgcccctcccccttccctrcctgctttttctctccctgctccgcgggctactgctcctctctctgccactctcccttctccctcttcctcctcttcatcttcctcttctcagcttctgagatctgc

SEQ ID NO: 221533 - DNA, 564 bp, Homo sapiens
taatcgtccttggatcaggggctcaatatgaggagctgaggggaggggagctgaggggagtctctagggatctcagggatggagctgggcctcaggttaaggaatcctgggctctcgtccctgcagaagtctcttcaggagcagtctctcctgctccgggcagcctggggtctgagctgagttcagggtgcccttggtgtcagtggcaggctggaggaaccctgctgtcccacctaaggctggggcaggcctgggaggctccgagtccaggaagactggaaggagtggggtagggtgctggctkgaggtggacaccgggccagggttctctttccccgtttcccactccctgacctcacttccctccctctgcttcttcactcttcatcaacccctttgcccctccctcctcttcctctttccttctttctcactcttccttcttactcattgcttcctttctcaccatatccttcattcacttcaacatttcgctgagcacctactctgcatggaccactaagctaggccctcgagtgggagctgggatgaaccagcacctct

SEQ ID NO: 221534 - DNA, 349 bp, Homo sapiens
ttgttgagttatcaggtgagccaaacttggagctgcaccaccttggaacatcttgtcatatgtgattatacatctctaactgacaaggacgttggagtcagggatttctgttcctcgaagccaaagccattttaattaggatttttaaaatttyttctttgaaatgcacacaattatacatataaaattaatatatattgaccaaatatttatggcatcaaacatcagtttgattttttttctttttttttttttaaattatacttcaagttctgggatacatgtgcagaacgtgcaggtttgttacataggtatacacgtgccatggtggtttgctgcacccatcaac

SEQ ID NO: 221535 - DNA, 529 bp, Homo sapiens
taaagtgggaggtaaagaggggattgatcaatgtgggggagtaacagagtgagaggggaatttctctgcccttttggacaaggaaaaataattagtcatcccccctctgcccacttcgtaacatacatacatgtgtgttacaccacaaatgggtaaaaaaataataacactaaagtcgaagtttccaccagattggtaaagtagctgtgaagaattttaaatggttttgagtaaagtttccaaggaaaggagagacataccctcacagtagtttttctccagaaggactttgggcccgtttacaatctccctctttcaacttctcaacaaaaatatcagtttgaagtctgatcaggcacctgcagtagagtgtccttgcagatggtcccaggatacacagcagcctgtccaagggtttatgtgtttattctctacttcgttctcctcacaaatcatacatttgtgatgtttctcctcataaatcatacattytctacttcgttctcctttgtatctgagaataacgttc

SEQ ID NO: 221536 - DNA, 561 bp, Homo sapiens
cttcctaacattcaataaagccagcattacttttgataccaaagccagaaaacaaaattacaagaaaactacagaccaatattccttatgaatattgacacaaaagtgcctaacaaagtactagcaaaccaaatttggcaacatattaaaaaaaatacgctatgaccaatggggtttattcttggaatgtaagaattgttcaacatatgacactaaatcaatgtaatatgccacattaatagcatgaagagaaaaaaaaccccacatggtcatctgaattgatgaagaaaaaccatttgacaaaattcaayacccatttatgatttttttaaaatgcccaaaaaataaggagtaggaagaaattttcccaacatagtagagtccatatatgaaagtgcaccaccagtatcataatctatggtgaaagactgaaagcttttagcctaagatcaggaacaaaacacgggttcccatttttggccgtatgttcaacacagtactggaagttctaactgaagcaattaggcaagaaaaagaaggaagaaaggaaagcagtaataa

SEQ ID NO: 221537 - DNA, 450 bp, Homo sapiens
gtgtctggtgaaggggaggtagaaagttataattgcatttctgaagggctaagtaggaagtggggagcagggagaaatagagaaaagagaaaagaagagaaataataataataacaactcattcactatctcttagaaaaagggggttactcagttacacctacacatctatttcgagatttcttcttcagcaaagcattccytgaccacacgccaggctctgccttaactgaatgtttctctggctggtgggacccgaggaccccacctcttccaaacaccctacctatgtggagatgcctcctggggactccagctttgtcttcacagcggggcatcctttggctggtgctaggggagtaggtgccagggcaggtagagtaggtgatttttactgcagaagggcaggcaggcactgaaaatgaaggaagaccttccaagcatggttcc

SEQ ID NO: 221538 - DNA, 613 bp, Homo sapiens
gtgatttttactgcagaagggcaggcaggcactgaaaatgaaggaagaccttccaagcatggttcctacagcagcagaggctgtttttctagatatcacagtgatattctcatgtaatctgatgataactgaaatgagtgactgaagcaaaagtctcagtcaatcaaggtttattaagccagctkgagggagcatccagggaaaacactgacacatctgtggctgtttttttctaaaaaggttttcagaaggtttagtctttgtacatttccttaaaggggggaaggcaggtaggaagacaggcaggtaggcagtaaggtaaatggtcacattcttgtaagactttaattagtgctcactaaatctatattttacataagataaagggaatgtttgaagagaaaaaagggagtaaatgaagaactgattatgcagacttctctgggtaggtggaggaatgactggtctcatcttgtctatgttctgcacctgggaagataagcttgtaactcacattatcaatacagaatgaactgactagtttttggcgctagccttagactgtagatccaaagttacaattgacatgtgcttatttataggaggctagcaa

SEQ ID NO: 221539 - DNA, 591 bp, Homo sapiens
aaataaggtctgctatgagcacgtataagtcagtcagttaattaaacaattagatcctgaattcactaagaggcaatgaacgtataagcccataaagttaggagagtggacacatttgatggagattaaaatattacaatgcgccaggttcagtggctcacgcctgtaatcccaacactgtgtgaggctgaggcaggcggatcacaaggtcaggagattgagaccatcctggccaacatggtgaaaccccatctctattaaaagtacaaaaattatctgggtgtggtggtgcacgcccatagtcccagctactggggaggctgaggcaggagaattgtgagcagagattgcactactgcactgcagcctggtgacagagcaagattccatctaaaaaaaaatacaatgcacaggatttggataatgagtaaatatgaatgaaagaagaggggagataagaaagacattttcatgtttctagttagacaaggtagagaacctaggtagaaaatcagatatggaggtgggggtagcatgttctattataagmaagttaattttgaggtaatcatgggatcctaaatacaggca

SEQ ID NO: 221540 - DNA, 331 bp, Homo sapiens
ggaaacacccaaaacagtcttttcaaggactcatggaacatctatccagaaataagttgaggagtttaataagttttctggatatataattaatatacacaaatatactaagcatacatttagaaaatataatttaaaaaatataatatttattataagcagtaacaatataagtaaataaaaatagcaaaaaactgtgtacaatctatccataaaaaatatagaattttgaaaatctcttcagaacacctaaaaaatgagatacmatatacctggacaggataattcaatattttaagatgtcaggttttccctgactttaaacattttc

SEQ ID NO: 221541 - DNA, 609 bp, Homo sapiens
aagctttattgttttttaccattaagtatgatgttagttgtagattttttaaaaatcaaggtgagaaatttcctgtctattcctagtttgcagagagtttttgtatttaaaatcattaatgggtgttagattttgtcaaatgccttttccacattcattgatatgtggaaaaatcatatgatttttcttctttagcctgttaatgtgatggattacattaaytgattttcaaatgttgaatcagctttacatagctgggacaaatcccacttggttgtgatgtgtaattctttttatatattcttgaattcaatttgctaatactttcgttgagaattttcacatctatgttcatgagagatattggtctgtagttttcttgtaatgtctttgtctggttttggtattagagtaatgctggtctcataaaatgagttagtaagtctttcacttgcttctatcttctgaaagacattatagataattgtgtaatattttccttaaatttttggtagaattcagtgaacctatctgtgcctggtgctatatgttttggaatgttgttaattgttgattgaatttctttgatagatataggcccattaagac

SEQ ID NO: 221542 - DNA, 621 bp, Homo sapiens
ctgtttgtcctgtagtgatcactcagttttcagacagtgaggaacattagaataacattttggtctataactagaatctgttagaaatatatgagacagaatttttaaatgtttgttctaagaaacattaaacaaaaaaagaaaaaggctttgacatttttcctttacctttcacatkaagtcatttcaaataaagataaaataattttcttcataggggttctctgttattgtgggttaactcatattttcctcctctcctctatctagaatgtcttaaaccattctaccttatgagaaattggatgttcttgcagatagtcattgtgggagaaaacgtttcatttaagtcccagatgaggaccgaaaacttgaaatcagaggagcatctgaaatcaagtaatattaggtaggatgaaaattacaagggatttctacatgtttttattccttttggagatgtgtattattcatactctgtgaatactaataaaattagaaacttcctgaaacatttgattttggccaagatcgggatggggcatgctaaagttttattatttatgtgacttcttgagaaccttggcttatgtttatactttgtcttgagcatttttatct

SEQ ID NO: 221543 - DNA, 602 bp, Homo sapiens
ttgtgactccttgtacactcccttgttcccagttgctgtcctggggaaaaggcatttttcacatttcaaagtgaacttgaagtaaaaccagtttgtttcttatctattacagtattccttaattttttgtttgagttgaagggaagagatttttattccatttttttctgtacatgaactgtttgatgttgccttacagtaacactcaatttgaataatatttgtttatttgaagcataaagattgaaagttattttgattctcaccattttctctgtcatctctactcacagtaattctgacagctcttaggaaccattgattttacaatgacaaatgaaaactttcagtgtacctttgattatagaaataaatacttccaaggtggcttggcaccaaataggaagttcctcccctgcatattttgatggtatatttaaggagaatctctttgaaagttttgctttgtggcccagcatgtatattgaccarggtcacaacttagaaaatgccttttttaagccacatttaagaccctgtgggccaagcactgtggctcatgcctgtaatcccagcacttggggaggctgaggcaggcggat

SEQ ID NO: 221544 - DNA, 574 bp, Homo sapiens
cacatgccaagtttagacaaagactttggagttttgggtgcaagtggctagacttgtctcctggccagctctgtcattagtcaagcaagcagacaatgtggaggtgaaaggaaaatggggtgcagtgaaaaccaaatgaggctctgcagcagaagcagctctaggtggctgggcatggtggctcacacctgtgatcccagcactttgggaggctgaggccagcggatcatgaggtcaagatatcaagaccagcctggccaacatggtgaaaccccatctctactaaaaatacaaaagattagctgggcgtggtgacacgcgcctgtagtcccagctacttgtgaggctgaggcaggacaattacttgaacccgggagacagaggttacagtgagccaagatagcgccactgcctggtgacagagcgagactccgtctaaaaaaaaaaamaagaaaaaaaaagaagctccaggcatgggagcagagcttatcacttctcaatttcgtcattaaccaccctctctcgacactttaaataaacctaaaattattgtgaaagaataacatgcttactg

SEQ ID NO: 221545 - DNA, 568 bp, Homo sapiens
ttgtcaggtttgagaaataaaaataagccctaggccctacaaccaactgaatggactccctcttggctgacaggaccacagagaaacytcgaaagcagtttctggatgtggcaggctaggaggttggacatgccacctcaaaaccctcccctcactaactgccattatgatgcaggagaacagcagagggaattggaagttggataaaaggcagagtgagtgaaagcagagaaagaagcaaggtgatggggtgggagagcaagaagcaagatataaggcagaagttgagcagccaaaacaaaaagtaagatttaaaaaagcaagcaaggctgggcacggtggctcatgcctgtaatcccagcactttgggaggccaaggcaggcagatcacctgaggtcaggagtttgagaccagcctggccaacatggcgaaaccccatctctactaaaaatacaaaaaattagctgggcgtggtggtgcactcctgtactcccagctacttgggaggctgagacaggagcatcgcttgaacccgggaggcagaggttgcagtgagccgagattgca

SEQ ID NO: 221546 - DNA, 527 bp, Homo sapiens
gttgattagaagaaataatccaaagcccaagaatacttctcagtgtaatgaatataaactccaatagattaagattttagcacagaaaacatttactaaaatttcagaagagagtagagtgtggatcctcctccaactgtacacagccacagttgagctctttcttcctccttgaatctaaggtaatagaaaagcaagtggaattcactcacactatagcacagcgaagagaaggcctaaacaaaactgctgtattttaaaagataaaaagaagggacacaataactttgcaaacacattatcagcaaaaataaatacatatgagaaagaaggatacaaatacagatgaaaaaccatgctgraagtaagcagaacttcacaaagaaataatttccagccagtgcttcatgatataaaagttaatgagaacataaaatcaatttttaaagaaatgaggtgtaaaacagtattgaagatgaaagggaagaacgcaaagctgagaaaacaaactgagaaccacacaacac

SEQ ID NO: 221547 - DNA, 404 bp, Homo sapiens
tcttacatgtttaaagcatttaagaacactactgttaaaaaagagtccataggcttcagactgccaaagatgttggtggtgcaaaacatgaggaatctcttaacattagtatcgtctccgggcataaactcttcatgtgtatatgagcttgatttttgtacattgctttgtggagaataagcactacttctactgccaatctttctaaagagtctttgacttccactgccagcagaagttgggtaataaatgtaaacattgtgatcttctgcactgactggcttttctacaaatggcttttgaaaaacttcctcatttacttctacatgatcttccccttcaatcagattacattctttgggattatttgggtcayggttcaaaattgcataacaaggaagtaa

SEQ ID NO: 221548 - DNA, 511 bp, Homo sapiens
ccctgtcactctaaaccaggggttttaggaaatctgaagatacagttcagggaatcctgaactttgatgggaaaaaaaaggatttttttgacatcctgactaaaacttaacatgtccttggattatgagcatgggcaaacaaataaataaataccactgtaatattagtagtgcctatgattttgtctcaaatgggaattatggatattttataatatattacagctgttgcagaggttgaaatatattttagattcatgttattttgaaattacaataatttttagatcacgagctatatcaaatgtgattgcagtctttttgtcaatagatgctcttgtgatgtagctgggaaactattgggtaactaactctgtgcctagtagttgttcagcagcaaaatggtaatgttgcatgtctttacaatgatgacccagaaatccctatctataattgactgttgattaacgacacaaagggagaagcatmattttcattctccgttagtatt

SEQ ID NO: 221549 - DNA, 568 bp, Homo sapiens
tgtagacttcatcaatctgccacagggtccatgataaaaaatgtttagaatttctgctctgaaccaagtctaattatttcttgcctttaggcatatatgccctatatataagtcttattagaatgacagctcctcagacaaatcttcaggctggagtgcagtgacacaatcacagttcactgtagccttgatctgggctcaagtgattctcccacctcagcctcctaagtaactgggaccataggcatgtgccaccacacccagctaatttttgttttgttgagactgatctgaaactcctgggctcaagcagtcctctcacttcagccttctgaagtgttgagattacgggtgtgaggcacttcacccagcctagatattgcttttaccgaattcaggmcacaaattcaaaataataaaactgctcagatgtcctttatacccagactgtctttgatacttcccagatgaccactgataaacccaaatttgttccatcaccctataaaaaagaatgttgaaataaatcaatgtttgatatttgccataatttaattggcttaactgc

SEQ ID NO: 221550 - DNA, 637 bp, Homo sapiens
ctggtagcacgtacctgtagtcccagctactcagaagccgaggtaggaggattgcttgagcctgggaagttgaggctggtgacagagtgagaccctgtctcaaaaaaagaaaagaaaactacagaccaataattcygatgaacatagatacaaaaatcctcaacaaaatactagcaaaccaaatgtaataatacattaaaagaatcattcattatcatcaaatgggattcatcccacaatgcaagaacacacatgcaaatcaataaatgtaatatatcagattaatagaatcaaagcaccttggaggccaaggcaggcagatcgcttgaggctaggagttagagaccagcctgggaaacacggtgaagccctgtctgtactaatattacaaaaattagcctggtgtggtggtgcatgcctataatcccagctactcaggaggctgaggtatgagaattgcttgaacccaggaggcaaatgttgcagtgagctgagattgtgctactgcactctatctagcctgggcaacagagcaagattctgtcagaaaaaaaagaatcaagaacaaaaacaaaatgatcatttcagtacattccaaaaattattatataaaattcagtatcttttcatgatgaaa

SEQ ID NO: 221551 - DNA, 556 bp, Homo sapiens
tcaaggccagcctgggcaacatggtgggaccctgtctctaattagttaattaattaataattaaaaataaacttggaaaacaaaaccagggagaaactaatgaatcratgtgttacacctgcatatactgaacaaaagtataaaccaagtatatctcaaaataaaacccagccctaaaagctctttctggaaagtaacaaattctatacaaccataggattattaggtataaggtataaaaatcaggatattaatatagtcaattgttatgcccataggcttctgagaattcatttaaacatacattatcagtgattactcaatataagctctctttaacaacaggaaaataaagctcggcagaacatgatggctcatacctgtaatcctagcactttgggaggctgacgggggaggactgcttgagcccaggagttcaagtacagcctatgcaaaataccgatacctcagctcaaacagacaaagattcttatgttctggttagtttgggtttctttattcaaagcaataaaatttgtaattttctccctaaaaa

SEQ ID NO: 221552 - DNA, 573 bp, Homo sapiens
ctgacagccacgtttattgcccttcattagcattggtgcttaatttaatatagatctgaatagacattagggagcctgcaggaggttaaatggtgaaaatataataaattaaatcagagattattgaatttactgtttagtttctgtgacactcaacagacataattcattagacttatcctctcaraaaatagttcaaagttttaagtatcatttattcatttacactcttggtcttttttcagatagtatcaacataattatgaaaatgtggccaataatgaacatacatttcttatatacatatgattctcctaataacgtatttcataagaaatgttccagcttgattattttttaaccttaaaatgtataatataatcctacacatattttcaattaaggttttccaaaaagttcatttcttccaacatttcagaaatgtggagattttctaaaatttaaaaaaataacatttttctttcctcagtggaaaagaatacattttaagggagaaataaaagcactactatctaagaatattcttccaagcatgttgtacccagagtttgg

SEQ ID NO: 221553 - DNA, 592 bp, Homo sapiens
ccacgtttattgcccttcattagcattggtgcttaatttaatatagatctgaatagacattagggagcctgcaggaggttaaatggtgaaaatataataaattaaatcagagattattgaatttactgtttagtttctgtgacactcaacagacataattcattagacttatcctctcagaaaatagttcaaagttttaagtatcatttattcatttacactcttggtcttttttmagatagtatcaacataattatgaaaatgtggccaataatgaacatacatttcttatatacatatgattctcctaataacgtatttcataagaaatgttccagcttgattattttttaaccttaaaatgtataatataatcctacacatattttcaattaaggttttccaaaaagttcatttcttccaacatttcagaaatgtggagattttctaaaatttaaaaaaataacatttttctttcctcagtggaaaagaatacattttaagggagaaataaaagcactactatctaagaatattcttccaagcatgttgtacccagagtttggtatctagtgctatgtatgataattgg

SEQ ID NO: 221554 - DNA, 551 bp, Homo sapiens
tgtggttcatagtctgatttcttttttatcattattctttcatctctaatttaaattcaatttaatgcaattaaatcaaaatttaaatcaacacatttttattgagtacctactatgtgtgccccagcatagggatagaagtcctggcctttaaggaacttaaactgagtagataagttatgaatccttcaaactgagaatactattttacaacataaatcaaatggatcttattttatttctggcattggaaggccaaacaagccagtatatattttggcaattatatatctatacttcagtggttttccttattcattggaaaagcagtgtagatggagaaaattgcctaagaacgatttccagatttactaagacagaaaaaatcctatagaacatctctgatattttaactattttactacgccttttgagcatmactgttgacaaccagtggcattggatctaatagaaagccggagagctattcatcacataccttgaaacacaaagctttcatacggaggtcaggccaaggtcaagactgacat

SEQ ID NO: 221555 - DNA, 398 bp, Homo sapiens
tggctttataaggggctttttgcctctttgctctgcacttctccttctttccacactgtgaagaggatgtgtttgcttctccttccaccatgattctaagtttcctgaggcccycctattcatgctgaactgtaagtcaattaaacctctttttaaataaattacccagtcttggctatgtctttattagtggtgtgaaaatgcactaatacagtaaattggtaccaggtagtggagcgctgctgtaaagatacccaaaaatgaagcaactttggaactaggtaatgggcagagattgggacagtttggagggctcagaagaagacagaaagatgtgggaaagtttggaatgtcctagagacttgttgaatggctttgaccaaaatgctgttgttgat

SEQ ID NO: 221556 - DNA, 567 bp, Homo sapiens
ttaaagtatgtttctctatcctttatagcacatctcttataatatttaagacactggtactgcaatttttttatttatttgtgtattactctctctccactaagaactctgtgacgataaggaccacatctcatttgactttatttttcagcatataacagtgctagtatataaaatcctcaaataattggttaatgaatcaataaattaatgaataaaggaatggaatgcctctttttattcatctctttccttttctgttctccacatcttcccttgttttacttttgtttctgcccttcttccactgtgactaaatttttgcaatatagaaataataygggctttgtgacctttagcgttttcttagctctacaaatgttggaaaatggattttgaaccttagcaaacaagctgaaacagtttaaacatttgtttgtgggtgcagcaatggaagaaagacttcattggcatttgttatgatggtgagtacatttgtgagataacattctttgctcaagactgagaggcctctggtcaggcgcccccattctaaagcaacacaga

SEQ ID NO: 221557 - DNA, 433 bp, Homo sapiens
cattaggtattacatttacatctatatgattcattttcagttaatttttgtatatggtgtaagggatgggtcaaagttcttttttttttttcttttgtatacaagtattcaattgttatagtaccatttgttgaaaaactaatttttttctttgagacagaatcttgctatgttgctcaggatggagtgcaatggtgcaatctcggctcactgcaacctctgcctcctgggttcaagtgattctcctgcctaagcctccggagtagctgggattacaggcatgcaccaccatgccgggctaatttttgtattttcagtaragacggggttttgccattttggccaggctaatcttgaacacctgacctcaggtgacccacctgcctcagcaagtctattattttttaattgcctttgtatctttgacaaaaat

SEQ ID NO: 221558 - DNA, 603 bp, Homo sapiens
tgtcagtggagtattgaagtcccccacgattatcgtgttgctgtctatctcatttcttaagtctattagtaattgttttataaattttggaactccagtgttaggtgcatatatgtttaggattgtgatatttttctgttggacaaggccttttatcattacataatgtccctctttgtcttttttaactgctgtttctttaaagtttgttttgtctgatatgagaataactactcctgctcgcttttggtgtccttttgcatgaaatgtctttttccacgcctttaccttaagtttatgtgagtccttatgtgttaggtgagtctcttgaagacagcagawggttggtgaattcttattcattctgcaattctgtatctcttaagtggagcatttaggccatttacattcaatgttagtattgagatgtgaggtaccattccattcatcatgctacttcttgcttatatgccttgggttttgtttgtaatattgtatttttgttttataggtcctgtgtgatttatgccttaaagaggttctgttttgatgtgtttccaggattcaagatttagagctccttttagcagttcttgtagtggt

SEQ ID NO: 221559 - DNA, 546 bp, Homo sapiens
gttaaggctctttcaaaacacactgaaaaccagatcatgtgtatgaaaatataactaggaatgcgaagtatatgaaatggatatcgtgagtattgtaaaagttcagatgaatgagtatttgattaattcattcaataaatattaagtgcccattatgtgccaggcattgttcttggaattggggctaactggagcttagattttagtggaggacccagccaatacacaaattaacaggccagtgaaagtctgggtaatacgtgctgtaaagaaaaaatagagcaggtcaggcgatggtgaatgactgcagcacaggccaggatgccacaagcagatgcttccctcttctttggtaactaggcccttgagatgatggggagatatgtaaggagttaccatttggccagactctgaataaaacacaagagccatgtgygggaagtggagcataaccaaactgcagcaatagttctgtttgtaaagtccttttatcaccttaattgaatgggactgtcctgtggcctcagggctacctaggatgcaaat

SEQ ID NO: 221560 - DNA, 605 bp, Homo sapiens
tctagtgctgtagaacactgtaacttattcattccatctaactctattttttatcttttaaccaacctttccttatacctgttgtattagcctgttttaatgctgctgataaagacataccagaggctggacaatttacaaaagaaagaggtttaatggacttacagttccacgtggttgggaggcctcaggatcatggcagaaggcaaggagaagcaagtcacattttacatggatggcagcagacagagagagcttatgcaggggaamtcctttttataaaaccatcagatcttgtgatacttattcactatctgagaacagcacaggaaagatttgcccccatgattcaattacctcccacaactcgtgggaattcaagatgagatttgggtggggacacagccaaaccatttcatctgcctcctccctacctttcccattctgtagtatccattattgtattctctacaagcatacttcagagatattgcaggttttgttccagaccactgcaataaagtgcgtcactcaaactttttggttttccagtaaatgtgaaagttatatttatactatactgtagtctattaagtgtgcaataa

SEQ ID NO: 221561 - DNA, 605 bp, Homo sapiens
tctagtgctgtagaacactgtaacttattcattccatctaactctattttttatcttttaaccaacctttccttatacctgttgtattagcctgttttaatgctgctgataaagacataccagaggctggacaatttacaaaagaaagaggtttaatggacttacagttccacgtggttgggaggcctcaggatcatggcagaaggcaaggagaagcaagtcacattttacatggatggcagcagacagagagagcttatgcaggggaactcctttttataaaaccatcagatcttgtgatacttattcactatctgagaacagcacaggaaagatttgcccccatgattcaattacctcccacaactcgtgggaattcaagatgagatttgggtggggacacagccaaaccrtttcatctgcctcctccctacctttcccattctgtagtatccattattgtattctctacaagcatacttcagagatattgcaggttttgttccagaccactgcaataaagtgcgtcactcaaactttttggttttccagtaaatgtgaaagttatatttatactatactgtagtctattaagtgtgcaataa

SEQ ID NO: 221562 - DNA, 504 bp, Homo sapiens
tgagagtctatcatttacttcggggaatcccagaagaaattaaaagatgaaggcagaggtaggcttttctctttgttgcctctcaggatgccggttcctatcaccttcctgtttgrtgtgaggtatatacagagaacagtgaagcctacattaacattacatattctcaaactttgacactaaagaataatgtgaaaattacctgcatatataagttgccatgtttctgacaaatacactaatttcttctgctctttataatttatttttagaatgctttggaaaaaatattttggagaatgtgtttatatattcctgagaaagcaacagaaaagggactggttgtagaggaagatggtactaattatttaaaaagtagtatttaaattaagtacatgcttatgttggatgtctatctcacataactgccaagagaatgattaggcagctacgggtgtcccaggtcactgctctggagaatttcctcgggtttaaagtgaattc

SEQ ID NO: 221563 - DNA, 504 bp, Homo sapiens
tgagagtctatcatttacttcggggaatcccagaagaaattaaaagatgaaggcagaggtaggcttttctctttgttgcctctcaggatgccggttcctatcaccttcctgtttgatgtgaggtatatacagagaacagtgaagcctacattaacattacatattctcaaactttgacactaaagaataatgtgaaaattacytgcatatataagttgccatgtttctgacaaatacactaatttcttctgctctttataatttatttttagaatgctttggaaaaaatattttggagaatgtgtttatatattcctgagaaagcaacagaaaagggactggttgtagaggaagatggtactaattatttaaaaagtagtatttaaattaagtacatgcttatgttggatgtctatctcacataactgccaagagaatgattaggcagctacgggtgtcccaggtcactgctctggagaatttcctcgggtttaaagtgaattc

SEQ ID NO: 221564 - DNA, 591 bp, Homo sapiens
ttccaattcttgtatggtttaagaaagtaactctatttggaaagttatgagtgtatgtgaagtcaaatagagaggggcatacacaccgtctaccgaatcgatctgcggctcacctcttttcccactatctttctcccttttctagctcacagtggtcttgggccaggcctttttacagctattacagaacccattttcacattgttcggttgagcrtttatctttttgattctgtatttactcttctgttcaaaagcccggggcaaccgaacaaaaggataatgcttcgtatcacatttaagagtagaaattacagttcaactatcagaaatgctctgggatggagctgcccccgtgggacctgggctgcactgtttccatcctcccaggaagaaccttgggaacctattcacccgctttggttttggcaaactcactagcctgaggctatgcagtgaagatgaagttagttgaaatatagttgtttacatctgttttcataaggatgattaagacaccttttctcatgggggctacagcagctaacattttttaaaaaggctttagcttctgcaaaagcattgttctagg

SEQ ID NO: 221565 - DNA, 481 bp, Homo sapiens
accactatatcccagactaacacacagcagttgttcagctaatatttttaaatgaatgaaaataaagatggattataaaatgtgatggatatggtaagtttgtggttagaatgcagaagctgaataaagagaaaaggtaaattgaatgtagcactgcaagtactgtagtaagtgagcaaaattgataaggggaagtgattagaaggcagcatgcctaaaactgggatttgagagttgtaaacaaagaactgtatggcttattttggcttgagaaaaatgatcagtgrcaataagaaggtcacccaacaggaaggccagagtgttggacagttcatgtcagcaaaaatgatggaaataggagaaacggaataaatcaagtactacagtcttaagttaatatgagtagggatggtggtgattaggatgtgggtagatgatgacaagtgaaagtatggtcttactacatacatttcaaaggagg

SEQ ID NO: 221566 - DNA, 514 bp, Homo sapiens
tttataattgaatcatcccaagaagaggcatcttctgtgttgactgggcaaatatgagaaccacagccttcccttatagtatattctagatacaatttttatttcattccattctgaagacaagcaatgtctaarcagatatttgtaatagaaatccatctgtgattcccccttagctttatcttctgagttgcaggctggcatccacttgccaaaaaaatcagggtcaaggcccgaggattaactgtggcatgaaaaagataagatggcacagaccattaccaatgggctggagctcagggatgaacaactgaccagaattgaagagtagagactaaaacagaagtacagcttataaatttgccaactcgggaatgaagtgtatgtggaacagagataaattactcagtatgtctatctgggagaccagaggttcgccctgggaaaggccctgggaccaaagcttttctgtcaatagcagacacttgaaagctcaggcgtggctgatgtaaat

SEQ ID NO: 221567 - DNA, 579 bp, Homo sapiens
aataacacatgttacactcattaagtaattaatcatccaccctcctccctcccttgcactcttgctagtctccattgtctatcattccacattctatgtccatttatacacttttgagctcccacttatgagaacatgtggcayttttctttctgtgtctgagttatttcatttaagataatggtctccagctccatccaagttgctgcaaaatgcgtgatttcattccttttttatggctaagtagtattccattgtgtacatataccacattttctttatccaattatccatcgatggacttataggttgattccacatctcggctattgtaaatagtgcagtgataaacatgccagtgcaggtgtcctgttgatataatttcctttcctttgggtagattcttattagtggaattgctggatcaaatggtagttctagttttagtctatctcctggggactttttgaagttttcagtatttgttgaatgaagccattcagaataacgggcagactaagtttgttctttctctcacatgacagcccttcagggatctgaagacagtgatcatttccc

SEQ ID NO: 221568 - DNA, 579 bp, Homo sapiens
aataacacatgttacactcattaagtaattaatcatccaccctcctccctcccttgcactcttgctagtctccattgtctatcattccacattctatgtccatttatacacttttgagctcccacttatgagaacatgtggcacttttctttctgtgtctgagttatttcatttaagataatggtctccagctccatccaagttgctgcaaaatgcgtgatttcattccttttttatggctaagtagtattccattgtgtacatataccacattttctttatccaattatccatcgatggacttataggttgattccacatctcggctattgtaaatagtgcagtgataaacatgccagtgcaggtgtcctgttgatataatttcctttcctttgggtagattcttaktagtggaattgctggatcaaatggtagttctagttttagtctatctcctggggactttttgaagttttcagtatttgttgaatgaagccattcagaataacgggcagactaagtttgttctttctctcacatgacagcccttcagggatctgaagacagtgatcatttccc

SEQ ID NO: 221569 - DNA, 290 bp, Homo sapiens
gttttatgtatttcagtgctctaatatttggtgtgtatatatttaggatagttaagttttcctgttgaattkaaccctttatcattatgtaatacccttctttgtccttttgtactattgttggtttcaagtctattttttatgatataacaacagtgatgcctactatttttttgtgttacatttgcatgatagatgtttctccaacccttcactttgagcctgtgggtatcattacatgtagatgggtcttttttttttttttttttttttttttttttgacagcact

SEQ ID NO: 221570 - DNA, 553 bp, Homo sapiens
gtgctctaatatttggtgtgtatatatttaggatagttaagttttcctgttgaatttaaccctttatcattatgtaatacccttctttgtccttttgtactattgttggtttcaagtctattttttatgatataacaacagtgatgcctactatttttttgtgttacatttgcatgatagatgtttytccaacccttcactttgagcctgtgggtatcattacatgtagatgggtcttttttttttttttttttttttttttttttgacagcacttgggcgcgtcctgcttttatatccaactttccctctgtgccttttaagtggggtgtttagagcagttacattcatagttaatatggatgtgtgaggttttgatcctagtgtgtagttgttagctgattgctttgtaatttcttttatgtggttgctttatagggtctgtgtgctatgtacttaagtgtgttttggtggtagcagatacagttctttcatttccatatttagaacttcattaaagatctcttgtaaggttgttctagtggaaataaatt

SEQ ID NO: 221571 - DNA, 545 bp, Homo sapiens
tatgtatttcagtgctctaatatttggtgtgtatatatttaggatagttaagttttcctgttgaatttaaccctttatcattatgtaatacccttctttgtccttttgtactattgttggtttcaagtctattttttatgatataacaacagtgatgcctactatttttttgtgttacatttgcatgatagatgtttctccaacccttcactttgagcctgtgggtatcattacatgtagatgggtcttttttttttttttttttttttttttttttgacagcacttgggcgcgtcctgcttttatatccaactttccctctgtgccttttaagkggggtgtttagagcagttacattcatagttaatatggatgtgtgaggttttgatcctagtgtgtagttgttagctgattgctttgtaatttcttttatgtggttgctttatagggtctgtgtgctatgtacttaagtgtgttttggtggtagcagatacagttctttcatttccatatttagaacttcattaaagatctcttgtaaggtt

SEQ ID NO: 221572 - DNA, 553 bp, Homo sapiens
gtgctctaatatttggtgtgtatatatttaggatagttaagttttcctgttgaatttaaccctttatcattatgtaatacccttctttgtccttttgtactattgttggtttcaagtctattttttatgatataacaacagtgatgcctactatttttttgtgttacatttgcatgatagatgtttctccaacccttcactttgagcctgtgggtatcattacatgtagatgggtcttttttttttttttttttttttttttttttgacagcacttgggcgcgtcctgcttttatatccaactttccctctgtgccttttaagtggggtgtttagagcagttacattcatagttaatatggatgtgtgaggttttgatcctagtgtgtagttgttagctgattgctttgtaatttcttttatgtggttgctttatagggtctgtgtgctatgyacttaagtgtgttttggtggtagcagatacagttctttcatttccatatttagaacttcattaaagatctcttgtaaggttgttctagtggaaataaatt

SEQ ID NO: 221573 - DNA, 556 bp, Homo sapiens
aaaaacccttctagacattggcttaggcaaagacttcatgaccaagaacccaaaagcaaatgcaacaaaaacaaagataaatagattggagtttattaaaattaaaaaaaatacttctgtgcagcaaaataaataatcagcagagttaacagacaacccacagggttggaggaagttttcacaatctatacatctgacaaaggactaatatccacaatctacaaagaactcaaacaaatcagccagaacaaaacaaacaattacatcaaaaagtgggctaaggacatgaatagaaaattctcaaaagaagatgcacaaatagccaaaaagcatatgaagaaatgctcaacatcactaattatcagggaaatgcaattsaaaaccacaatgcaatagcacctcactccagcaaaaatggccataataaaataaaaaaatctatagatggtggcatggatgtggtgaaaagagaacacttttacgttgttggtggcaatgtaaactagtacaaccactatggaaaacagtgtagagatttcttaatgaactaaaaaca

SEQ ID NO: 221574 - DNA, 521 bp, Homo sapiens
gagctagggcttataacgggagcctcacaactctgaccagtgcactatcctactgtgactgagctggtatccaagatgcaaaaaaaatcctgcccattctttcctctcctctcctcaagtggaaagaagtgggcatttttggagttstgagctttgcagcttggggttaggtgaggaatgatgtcatcactcccttagctgccttagcttctgtctcagtaggccatgtgtttcctccctactctctgccaagccactgtttctgggaccagtttagcactaggatttgcctaagagttgcagtccttatgccctagactgcctttaaagtttatttagagcacagagcactttagcccatggtggtgaggtttgtgggaactcaagttctgactgctgggatgggcaattcccctcttgctaaggctggtttaaatgctccctgcttgggtagatgtcagctgagtctggtcgggttttcctttctgctctaacaggatagtactgagttcagtgcctca

SEQ ID NO: 221575 - DNA, 521 bp, Homo sapiens
gagctagggcttataacgggagcctcacaactctgaccagtgcactatcctactgtgactgagctggtatccaagatgcaaaaaaaatcctgcccattctttcctctcctctcctcaagtggaaagaagtgggcatttttggagttgtgagctttgcagcttrgggttaggtgaggaatgatgtcatcactcccttagctgccttagcttctgtctcagtaggccatgtgtttcctccctactctctgccaagccactgtttctgggaccagtttagcactaggatttgcctaagagttgcagtccttatgccctagactgcctttaaagtttatttagagcacagagcactttagcccatggtggtgaggtttgtgggaactcaagttctgactgctgggatgggcaattcccctcttgctaaggctggtttaaatgctccctgcttgggtagatgtcagctgagtctggtcgggttttcctttctgctctaacaggatagtactgagttcagtgcctca

SEQ ID NO: 221576 - DNA, 589 bp, Homo sapiens
gggaagggcacagcatcatttgtgtagtattctgaccaacactgcgtaacccgaatttaatcaggaggaaatatcaagcaaactgagtgaagaacattccacataataactgtcctgtatttgtcataggccaatgtcatgaaaagcaaaggctgaggaactgttcyaagttaaaggagactaaagagacatggtcactaaatgcaatgggtaaccctggactgggttttgtgctggagggtagaaaaacaaatgctctgaagtacattattgaaacaattgaaaaaactgggatatggcctctggattagatatatataaatattatacacatatatttaaaaatacatactgaaatattaaggggcaaagggatatggtatatgcaacttattcatctgtagttcagaaaaaataaatacacacacagaatgatacagctgtgctgaaatgttgaaattcacaagtctgggtagataaaggatatataggagttgtctggattactctggcgttgtctggattgttctctaagtttgaaataatttcaaagtaaaaggttttttaagtattggagtacagtaaataa

SEQ ID NO: 221577 - DNA, 629 bp, Homo sapiens
taactgcaataattcaaaagttgctcaaacttcaactcccattcctatcccacctgcctggaagaaaagtccacagcccggctcagggtgagctgacggttctgatttaggctggatttgtgccagtgtggaggtgggtggtcagtattgaagggttttctcttctaatagtttaaataaagccgctatggaagaaagagagaaatatgagctctagtagaaaaactttcttctcttaatctaagggaaaatgatgtagcagcaacccttcacattttgaaggagaagatgcagagacctttgcacacctcagttagtaagtgccaggaactgagtgtggagattgggtgatcagctaagttgactcaccagccatgtgactccttctggccaaatccttgcctcagcagaattataaattaccgggtgccacagaccttcccggatccctggcaagtagcaaaaaccatgtgtrtaatatccataataccagggcccaagaacaagaatgtttgtgctaagaagggaccttaagaaccatgcattgcaaccacctcattttccaaaaaagaatgcagcccatatgaaatggtctaacacaggggtccccagcttccagggccacgact

SEQ ID NO: 221578 - DNA, 539 bp, Homo sapiens
taaattaatgataatgacagatacagaattagtttcacagaaatcccaatgttccttatcagtaaaaattatttctggatatggaccatggaaaatgagatcactgttagtattagataaagacttacattagatttctttaagtcaatggagccaaatagaattctcttatttggtacataataaacatagattactttgaagaattgaatttttgtctctaaaaaaggaatttattaaatatttagtaaaataagccaaaactaaactgtgtagtcaataactttataactttagtgtggttgataaatgatctgacataatagtatggccaatgccaagtgataagcaataaaatctagaaataatgatgattcctcaaaatcagcacttacaagtagatcactattcagtggaatcaaagcatatagtgcacagaagatgaagagtggttttcactctcaactcctgggcatgttcctatgtcaacatgattgcctaacttgactattytatgtacatattcaattaagcttgag

SEQ ID NO: 221579 - DNA, 456 bp, Homo sapiens
tattcttttgccaactttggtttgagaaccgcttctctaaagcagtgtgaattattgcacgactctaagcattcttattattccagcaccattactatcacctaggatcttagaaatgccacattctcagatgcyactccagagctactgaaccaaaaactctaggggtggggcccgccaatcttcgttttagcaaggtcttttggtgattctgacacacactaaagtttgagaactgctgtgctaacatagagacgatatacccagaaatagctaacataaaattattagcttaccagacaggagtttgttctatttctgacaccaaataattttactcaatctttcaaactgtgttaactaccctagctaaaattattttttaaaaaacgattttgtatcatgcctggctttcataagaaaacacatttattgtcatgcttacattttggcaga

SEQ ID NO: 221580 - DNA, 456 bp, Homo sapiens
tattcttttgccaactttggtttgagaaccgcttctctaaagcagtgtgaattattgcacgactctaagcattcttattattccagcaccattactatcacctaggatcttagaaatgccacattctcagatgccactccagagctactgaaccaaaaactctaggggtggggcccgccaatcttcgttttagcaaggtcttttggtgattctgacacacactaaagtttgagaactgctgtgctaacatagagacgatatacccagaaatagctaacataaaattattagcttaccagacaggagtttgttctatttctgacaccaaakaattttactcaatctttcaaactgtgttaactaccctagctaaaattattttttaaaaaacgattttgtatcatgcctggctttcataagaaaacacatttattgtcatgcttacattttggcaga

SEQ ID NO: 221581 - DNA, 393 bp, Homo sapiens
tggccgggacgccgctttggaatsctgcttggacggcagagaggcctggacgcccctccgtggtggaggagcagggctgcagacctcctggcctccagtcacccttctgtctgggatgtgctcgagagacactgggtgacaagatgggtgtctgaggccctgacaggcaggagtcagattccccttgtccctctgacatctcagatcacacaccagcttctctgagccctcctggtgggggccagggcccacccacccccttttcctcggctatatgtcaccctgatgacaccagagagaagggcttggcatttgaggagcagcgctgagagccgtggcctcggcagttctaacgaggccccagacagtgagtcctctctatttcgaccagtc

SEQ ID NO: 221582 - DNA, 579 bp, Homo sapiens
ctcttatattgtaactttttttcttataaacataatgtacatttattgtaggaaatttagaaaatactgaaaagcccaaagaacaaaatgaaaactttgccattcagggagcatcactcttggtttggtgtatgttattccagtcttctgtctyttaagttcttcccttcctctcttccttttatattgctagtacatgttcatggtaaaaacaaaacaaagctggaagatatgaacaaaaagaatgtaaaaaactacctggattcctgccacccacgagcagttagtgctaagagattgttacacacccttcaaggttttaaaaataagttcagtaatatttagaaaatgggattatagttgtactgactgtagtatagcctagtcttctcacctaacagtgcatcttgaatgggttctatactagggcatttcaaaatgaaaataactttttaaaattataaaaataatataattgtaaaaaacgtagacactagaaacctggatagaaggaagtaaatgccacctgatgttctgccacttagacacatacactgtaaatttttgaagatctgtttt

SEQ ID NO: 221583 - DNA, 635 bp, Homo sapiens
agacacaagtgtgctgcttccagccattcagtcttgttaacccagggagttaattattagcttcaaattccaccctgacactgtcacaaaaactggaatctttgacaagtatcaggtgaagttcagaccaatccaccgacattggcaccacatcagaagtgttttgtttatggtcataaatcttcctttgactagatcatcaaaattggtagtttcccacacacatatcascactgtcattcaacaaccaaaaattacactgtaaatcagaggaaatctgtgattaattaacaaaattgcgatttaagtataatttcattaaaacatcttcaataaggctatttaattcaaaagtaattatctagtaaagaattacatcatcagaattagtgtaaacacttagacaaatatatccaaattttggtttcaattaatcaactacattatcattagcaaaatggtcaaacagactagtaaaatagaatataaaaatctagtaaaaaataaatatgtgcaagtatttgggtgatttacgtttggtgaaaaaagttagattctctaactttggaaagaaacttaaatttttatttttggataaacaaaacatgatatatccatatcatggaatgtgccat

SEQ ID NO: 221584 - DNA, 635 bp, Homo sapiens
agacacaagtgtgctgcttccagccattcagtcttgttaacccagggagttaattattagcttcaaattccaccctgacactgtcacaaaaactggaatctttgacaagtatcaggtgaagttcagaccaatccaccgacattggcaccacatcagaagtgttttgtttatggtcataaatcttcctttgactagatcatcaaaattggtagtttcccacacacatatcaccactgtcattcaacaaccaaaaattacactgtaaatcagaggaaatctgtgattaattaacaaaattgcgatttaagtataatttcattaaaacatcttcaataaggctatttaattcaaaagtaattrtctagtaaagaattacatcatcagaattagtgtaaacacttagacaaatatatccaaattttggtttcaattaatcaactacattatcattagcaaaatggtcaaacagactagtaaaatagaatataaaaatctagtaaaaaataaatatgtgcaagtatttgggtgatttacgtttggtgaaaaaagttagattctctaactttggaaagaaacttaaatttttatttttggataaacaaaacatgatatatccatatcatggaatgtgccat

SEQ ID NO: 221585 - DNA, 453 bp, Homo sapiens
ttttttggtttgagggattaccaacttcaaagtatcaaactgctgttcacttcctctcacctccctcacccctgtcaaaaaatgttttgtttacagtgacttgaatgaaaacattatttggagatattaacgttagggaaagttggatgaatggtatcagtaattttctgtagtatttttgcaacttttctgtaaatataaaattatttcacaatagttttttaaaagctagatatgtggccaagaagcatatttwaaaaagctcagtagagagctttagatgatcattagagaaatgcaaatcgaaaccacaatgagataccatctcacaccagtcagaatggccattattgaaaagtcaaaaaataacagatgctggcgagattgtggagaaaaggggatgcttatacactgttggtgggagtgtaaattagttcagtcattgtggaaagc

SEQ ID NO: 221586 - DNA, 453 bp, Homo sapiens
ttttttggtttgagggattaccaacttcaaagtatcaaactgctgttcacttcctctcacctccctcacccctgtcaaaaaatgttttgtttacagtgacttgaatgaaaacattatttggagatattaacgttagggaaagttggatgaatggtatcagtaattttctgtagtatttttgcaacttttctgtaaatataaaattatttcacaatagttttttaaaagctagatatgtggccaagaagcatattttaaaaagctcagtagagagctttagatgatcattagagaaatgcaaatcraaaccacaatgagataccatctcacaccagtcagaatggccattattgaaaagtcaaaaaataacagatgctggcgagattgtggagaaaaggggatgcttatacactgttggtgggagtgtaaattagttcagtcattgtggaaagc

SEQ ID NO: 221587 - DNA, 471 bp, Homo sapiens
tctattatcacatcagcacaggccatggaaaccacggaaagactgatctgcagagagattttgcagaggttattatgggcatgttgatccctcatcacacagagcttttagagttgagccagacactccctccttcctcaagtgtcagtaagaagaagaggagtaagaggatattataatgctcttacttcagggaacaacaacgtaggctatgacttaactaattcaggtaccaagctcactgaggccctgctatgagytgacattgctttagaccctgggatacagcagtgaacacaacagacaaaatcacctcttccttgatggagcttacattccagtggagtgagacaaaaaagatgatgattttttaaaaaaatttattttgaatggctggtgccattcaaccatggttctgtaataagaaatcttggaagtcaagttttaaaaattcctcctgagaccacagat

SEQ ID NO: 221588 - DNA, 471 bp, Homo sapiens
tctattatcacatcagcacaggccatggaaaccacggaaagactgatctgcagagagattttgcagaggttattatgggcatgttgatccctcatcacacagagcttttagagttgagccagacactccctccttcctcaagtgtcagtaagaagaagaggagtaagaggatattataatgctcttacttcagggaacaacaacgtaggctatgacttaactaattcaggtaccaagctcactgaggccctgctatgagttgacattgctttagaccctgggatacagcagtgaacacaacagacaaaatcacctcttccttgatggagcttacaktccagtggagtgagacaaaaaagatgatgattttttaaaaaaatttattttgaatggctggtgccattcaaccatggttctgtaataagaaatcttggaagtcaagttttaaaaattcctcctgagaccacagat

SEQ ID NO: 221589 - DNA, 607 bp, Homo sapiens
ttctcactgtaaacaataacagcatgaagacccattgtcaggaaattgtactcatgtataattagtatcactgtatacttargacctcagaaacccagaaactagtacttgaattgaaaaaaataaacccttagtgtgtgggtgtatgtgtgtgtgtgtgtacatatatttatatgtatgtatatatgtatataaaatcagggtccagtgagagatatgaaaaatgtgtgataacaataacaacaaaataataacagtagctgttaacacatagcacttaatgctttgaaaacagaagacagataggttaagtaacttgcccaaggtcacatagctgtagataggaaagccagaatttcagcccaagtctactggtttcagagttcttgtttttcttaactcttggatatattacctctcacttttaattatttagctggctctgcattgtcataaccaatgtatagctcaagttgtatttttagaacccaaattcataagccattaattcaaacacaaataaactggtctgcccatggaaaagaaaatatctgaagccaaacagaaaaaagaaaaagttttacaattatgatttgcaattacttaa

SEQ ID NO: 221590 - DNA, 620 bp, Homo sapiens
agaattccgtccccacttgcaggtcgggcactgagtgcctggacagagagttaggtcccccgcttaccccgccctaaggctgcggaaggcggcgccatcggtcgccatggaaatcgcggcggatgggcggatcctgggcaggttggctgggtcgggctgcccgggcgacgccggagttgcagttggaggctgcgggaatacaaaggtaagagagcaactcctgggttcccttgactcgcaagggcttgacccctgcccgggktctgggaaagtgaagcagaaagtcgcctcccagcgcagaatattcaaatttgccagatgatcagaattacgctgatttaaaacccaaaccctccctagtttcccactcctgccctgctaaatcaaaatctcccagccaggatccggaatctggatttaaccaggggccgtttatagagttgggagattggtagatacgaggttcgcctattcttatttctcaacgccataccactaccccgtaatggtaaaagaatttgcaccccaaaatcctccccagcggctctgaaatggagtgcttggagctggaaatgcggagcccattcctctccttgcaatactgaaagttgtgagctgat

SEQ ID NO: 221591 - DNA, 620 bp, Homo sapiens
agaattccgtccccacttgcaggtcgggcactgagtgcctggacagagagttaggtcccccgcttaccccgccctaaggctgcggaaggcggcgccatcggtcgccatggaaatcgcggcggatgggcggatcctgggcaggttggctgggtcgggctgcccgggcgacgccggagttgcagttggaggctgcgggaatacaaaggtaagagagcaactcctgggttcccttgactcgcaagggcttgacccctgcccgggttctgggaaagtgaagcagaaagtcrcctcccagcgcagaatattcaaatttgccagatgatcagaattacgctgatttaaaacccaaaccctccctagtttcccactcctgccctgctaaatcaaaatctcccagccaggatccggaatctggatttaaccaggggccgtttatagagttgggagattggtagatacgaggttcgcctattcttatttctcaacgccataccactaccccgtaatggtaaaagaatttgcaccccaaaatcctccccagcggctctgaaatggagtgcttggagctggaaatgcggagcccattcctctccttgcaatactgaaagttgtgagctgat

SEQ ID NO: 221592 - DNA, 620 bp, Homo sapiens
agaattccgtccccacttgcaggtcgggcactgagtgcctggacagagagttaggtcccccgcttaccccgccctaaggctgcggaaggcggcgccatcggtcgccatggaaatcgcggcggatgggcggatcctgggcaggttggctgggtcgggctgcccgggcgacgccggagttgcagttggaggctgcgggaatacaaaggtaagagagcaactcctgggttcccttgactcgcaagggcttgacccctgcccgggttctgggaaagtgaagcagaaagtcgcctcccagcgcagaatattcaaatttgccagatgatcagaattacgctgatttaaaacccaaaccctccctagtttcccactcctgccctgctaaatcaaaatctcccagccaggatccggaatctggatttaaccaggggccgtttatagagttgggagattggtagatacgaggttcgcctattcttatttctcaacgccataccactaccccgtaatggtaaaagaatttgcaccccaawatcctccccagcggctctgaaatggagtgcttggagctggaaatgcggagcccattcctctccttgcaatactgaaagttgtgagctgat

SEQ ID NO: 221593 - DNA, 583 bp, Homo sapiens
agttttctctttgtcatcgatctctctccctgtatcatttcccttcccaagtcccttccaaactcatagaatctctctccctggtagattatcaaatcaatttgcattttttgttgctatttggtatagcacctttcttaggaagggggaagatgggatgatttgggatcaaatgcgttcactgtaaaaatgaagtcctggcattttgtggcctagggtaaaggacatttctagggagggatgggctggggcamgtggtgtgcatgtccaagccattcatgttttttatacaggtgaaatctagctacgatgaccttaagggggaaaaagcaatgttaccaaagtgcaatgtggccatgaagaaggagagagggttatattattgaaagtaggagtcagccattacttaatacattgtctgattatatctcacatgtgattctaacttatgcatagagctaaagattctttgaactttcaatgagactataacagtgaatttatccagaggatatttatccatccttctatccatttatatttcatccatccatccatgcatctttccatccatccattcata

SEQ ID NO: 221594 - DNA, 612 bp, Homo sapiens
tgcatgaggggcatatatgttgtgtctattcaaagacacacatatatacagattcatatataaacacacatataccaataatatggaatatacatatactcacacacttgctttaaactctatatctcactctataatatactgtccatctctggaagcaggcttttcctcattcgattcaggcaactggtgactatcttctaacaaaacttaaatggatgtttctaaaaggctctgattctatgccgagcaaatggcatttcaagattccagtttaacttttgatggctgtttaaattcagcagaccctattctgtcaacttcttcacttaaaaacatttctattcaacaatgaagtttccacctaagagaaaagagatgttagctggaaatgttaaaataatatatttattactccttaagataaatctgcatcgttggattacatgtgatatttatactatcatatttwttaagtattttacaatggaaaatatattagttccataatttaaaaaatattatataatattattttgaaagactgagggccagatgatttgtcatagtcagaactttagagaaaattatatgacgcatgatcagaagggg

SEQ ID NO: 221595 - DNA, 640 bp, Homo sapiens
acaggctgctatttgaagatccacatagatattacattggaaatgaaatatttcattgatatttaaaaaaaaaacatatcaatgacagaagcagcagaatgtgcacagctgaagaataaattagcaggctggacatttgaattaagaaataattcagagcatagtaccaaaagacagagatataaagaatgaaacaaagattaaaagacctaggacctagragtttcaagacccatttattagggcctctcaaaggagataagagagagagtgggagagagagagagtggtggaggaagtggggaagggaagaaaagaatcaagaaatagtcaaagaaagatatgcattgttggattaaaaggatctacactgtgcggatcatgatgaataaataaagatgctccctagacataccacagtgacttcagacgtatcagtgtaactccagtgcactaaaggtaaagagattgtgaagggctctaggaataaagtagatgggatactgttttgatttagaggtatgatgactctttgctatcttgagggggtggggggacaatccgtctttgggaaggaagttaagtggagatagatttaatattgcaatataattttacattttgaaaataaaatgaattc

SEQ ID NO: 221596 - DNA, 612 bp, Homo sapiens
cagcacctaacacagtgcttgccacatagtagaggtcaatatatagctgttgaatgaatgcatgagctaggagtatgggatgacagcarcacctgtcattttctttgatgtgagatctgtccaaggtgctgccccggggacctcaatctccccagagacagcattgtggtcaaagccatagtgatgtgtgaaaccttcattcaggcaactcctccttccatcccagtagctggttgtgtggtagaaaattgttcctcttggacacttgtttggttttcaaagtatttcagcttctttgaagctgctgtcaaaagtgagaatgtagtaataagctctcctcttgtggtgggcgttcagaggtgatagtctacaatggtggtgataatactttaattagtgaattttcttcacattctgatattctactcttcaaataatgccaagttcacagactcctacatctgctgaggtgtgtgtgtttatgtagagaaacagaagcagactgagaacactttcttggaatttttcttcttcaaaaagaggagcagaagctaactctgatgttttcatgctgatcatcattgatgacaagatacccaagccaaaccctcc

SEQ ID NO: 221597 - DNA, 540 bp, Homo sapiens
gatattaagtttttcactcaatgaaactgttgtatttctccactatatgataactaattttttctcctttggctccaatatgcaatctgtggggacagacttgatgaccacacaattactactctttattaatatttcttcctcaatttagcatctatgattattcctaccttatctactctctactatgatgtttgcaaaatgatgatttttcaactytagcacttcctccacatttctcagtaggcatttggcattatgcttaagaaatagatcaccattctctatgtatgtatatgtatccatatttataatatgtatggattcattcatttcttttttttccaacgatttataatttcttaatcttattttggtgctcaaagtgtcccggatttgatcagagggaatctctttaagccggctcctgaatccatgtgttaattccttattatatttttgagcacttcctcatattctgtcattaaaagattttccaggctcacaatatacctgtcctgccctaggtgtagattcagc

SEQ ID NO: 221598 - DNA, 411 bp, Homo sapiens
aggttctttctattttccataagtgtcggctggctgagaaataaagagaaagagtaaaaagagaggaattttacagctgggccgctgggggtgacrtcacatatcagtaggaccgtgatgcctgcctgagtctcagaccagcaagtttttattaagggtttcaaaaggggagggggtataagaacagggagtaggtacaaagatcacatgcttccaagggcaaaaagcagaactactaataagggtccaacaaagatcacaaggcaaagggcaaaagcagaactactgataagggtccatgttcagcggtgcacatattgtcttgataaacatcttaaacaacagaaaacagggtttgagagcagagaaccggtctggccacaaatttaccagggcggagtttttccccac

SEQ ID NO: 221599 - DNA, 562 bp, Homo sapiens
gcctagtggaaatctaaagattgtgtttggcaaagggcaagttatattcttaataagaacccaacattggcagtgaaaaatctagctttcttgtactatagtagttcctcaacacagaaacagaatagtttcacaacacagttgtgaaaaaagtggrattatggagtaatgaaaatattctaatatctgatgctgattaggaaaaacataaactcaaggtctgttgggaggtgctcagaataaagacctaaacatctagaaagaaaagcaagcccctttccaataacacagcctactcatgaagggctgaaatattttttaggaatcagaaacatatgacttaaagcaaaagaatgatgagatttaatgcaaaatttaaggagttttttttttattcatttgggttcaataaacatttaattttcagctgcccacattgggctatcactgagaaaaggtgcttggctggttgagacagacatgtgcagtactgccacaatacagctgaaaagcatgtgcacctgcccatgtgagggaggtgcaaaggtggttgagagcaagt

SEQ ID NO: 221600 - DNA, 647 bp, Homo sapiens
ctatccggcttaggtggattgattagcaccactttctagggctttgtacccttcatttcttcttgccagctccatctacctagacccctctcttttccagttctcagaaactggaccctctcttttctccccagaattaaaggggtgctggattctcttagtcttgcctccctcccttggcacatatgcccactttggtactactactactatgacctctactagtattgctgccactgtcttctcgtagtccttctagtcctttactacgaccctgccaatgcttctactattactgctggcacttcttactatgaccaccacaaccagtacttctactactattgcttctactgcctctactgcatcccccgacaaatctcatcttgaattgtaatccccatgtgtcaagagagggacctggtgggagctgattggatmataggggcagttccccccacactcttctcctgatagtgagtgagttctcatgagatttgatggttttaaagtgtggcacttcccctttgctcactctccctctctcctgccatcttgtgaaggtggtgcttgcttccctttcgccttccacatgattataagtatccggagtcctccccagacatgaggaactgtgagtcaattaa

SEQ ID NO: 221601 - DNA, 647 bp, Homo sapiens
ctatccggcttaggtggattgattagcaccactttctagggctttgtacccttcatttcttcttgccagctccatctacctagacccctctcttttccagttctcagaaactggaccctctcttttctccccagaattaaaggggtgctggattctcttagtcttgcctccctcccttggcacatatgcccactttggtactactactactatgacctctactagtattgctgccactgtcttctcgtagtccttctagtcctttactacgaccctgccaatgcttctactattactgctggcacttcttactatgaccaccacaaccagtacttctactactattgcttctactgcctctactgcatcccccgacaaatctcatcttgaattgtaatccccatgtgtcaagagagggacctggtgggagctgattggataataggggcagttccccccacactcttctcctgatagtgagtgagttctcatgagatttgatggttttaaagtgtggcacttcccctttgctcactctccctctctcctgccatcttgtgaaggtggtgcttgcttccctttcgccttccacatgattataagtatcckgagtcctccccagacatgaggaactgtgagtcaattaa

SEQ ID NO: 221602 - DNA, 540 bp, Homo sapiens
cccagtcatccacagccatttgagtctgcccagttgaggccccagacatcatggagctgagacgagcccttccactgtgccctgcccaaattcctgacccatagaatctatgagcatagaactggctgttgtgttgtgctcctcaattcacaatttttttttatatagcaattggcaatgttaacaagccccatatttctcttcatattgaatccacttagcctgctttgtttttcttcatggtacttataaaattacattatacatttatgggattcctttattttctgtctccaactagaatgtaaggtcagggcaatcaatacttgttgctgtattcttcttcttcttctttttttttttttttttagacagagtctcgctccgtcgcctaggctggggtgtagtggcacaatctcrgctcactgcaacctgtgcctcccaggttcaagcaattctcctgcctcagcctcctgaatagctgggactacagatgcatgccaccacgtcctgctaattttttgtgttttagtagagatg

SEQ ID NO: 221603 - DNA, 482 bp, Homo sapiens
gaaaggttggaattactgttagctgaataaaaaatgatggtggttatttgattgtrttgtcttagatggcaggttttagccagaagagtgctgggctaggaagcagaattgttttcctctcttgggagaagagatgtagcagcagggttttggggcttgttaaatacgaggtgcctgttaggtatccagatggatgtttcaagcagttgggggtttatgcaggtctggagttctgtggggggccagtccaagctggagatacaatttgggattcaacaccctgtagttaatatttagaactaaagagtctagctgtatagtcccagctacttggaaggctgatgtgggaagaccgcttgagcccaggagttcaagaccagcctgggcaacatagaaagactctctttaaaaaatgaaaattaaaaaagataaataagaaataaaagtacaagtctccatgagatcgcttaggaaatgagtgt

SEQ ID NO: 221604 - DNA, 479 bp, Homo sapiens
gaaaggttggaattactgttagctgaataaaaaatgatggtggttatttgattgtattgtcttagatggcaggttttagccagaagagtgctgggctaggargcagaattgttttcctctcttgggagaagagatgtagcagcagggttttggggcttgttaaatacgaggtgcctgttaggtatccagatggatgtttcaagcagttgggggtttatgcaggtctggagttctgtggggggccagtccaagctggagatacaatttgggattcaacaccctgtagttaatatttagaactaaagagtctagctgtatagtcccagctacttggaaggctgatgtgggaagaccgcttgagcccaggagttcaagaccagcctgggcaacatagaaagactctctttaaaaaatgaaaattaaaaaagataaataagaaataaaagtacaagtctccatgagatcgcttaggaaatgag

SEQ ID NO: 221605 - DNA, 491 bp, Homo sapiens
agcaggagctgaaaggttggaattactgttagctgaataaaaaatgatggtggttatttgattgtattgtcttagatggcaggttttagccagaagagtgctgggctaggaagcagaattgttttcctctcttgggagaagagatgtagcagcagggttttggggcttgttaaatacgaggtgcctgttaggtatccagatggatgtttcaagcagttgggggtttatgcaggtctggagttctgtggggggccagtccaagctggagatacaatttgggattcaacaccctgtagttaatatttagaactaaagagtctagctgtatagtcccagctacttggaaggctgatgtgggaagaccgcttgagcccaggagttcaagaccagcctgggcaacatagaaagactctctttraaaaatgaaaattaaaaaagataaataagaaataaaagtacaagtctccatgagatcgcttaggaaatgagtg

SEQ ID NO: 221606 - DNA, 486 bp, Homo sapiens
gaaaggttggaattactgttagctgaataaaaaatgatggtggttatttgattgtattgtcttagatggcaggttttagccagaagagtgctgggctaggaagcagaattgttttcctctcttgggagaagagatgtagcagcagggttttggggcttgttaaatacgaggtgcctgttaggtatccagatggatgtttcaagcagttgggggtttatgcaggtctggagttctgtggggggccagtccaagctggagatacaatttgggattcaacaccctgtagttaatatttagaactaaagagtctagctgtatagtcccagctacttggaaggctgatgtgggaagaccgcttgagcccaggagttcaagaccagcctgggcaacatagaaagactctctttaaaaaatgaaaattaaaaaagataaataagaaataaaagtacaagtctccatgagatcrcttaggaaatgagtgtggat

SEQ ID NO: 221607 - DNA, 474 bp, Homo sapiens
tgtcaaaactcagttgaccataaatgtaggtgcttatttctatatttccagttgtattcctttgatctatatgtccgtcctgtgccagtattacactgtcttaattactatagctttgtagtagtttggaaatcaggaagtatattcctccaacgttgtcctttttctaaattgttttggctattctgtatctcttgcatttccatatgaatttcaggatcagcttgtcagtttttgcagaaaaacaacaacaatatggattttgwtaaggattgtgtttaatctagatgagttgggacattccatgttcatggactgaaagacttaatattttaacagtaagtcttccagtccatgaacatggaatatcttttcatttacttaggtcttatttgagttctttcaacagtgtttttagttttcagtgtttaattcttacactttaaaatttaatggtaagtaattattttcaaa

SEQ ID NO: 221608 - DNA, 600 bp, Homo sapiens
gaagtattcagtacagtaacgcactgtacaggtttgtagcctagaagcagtaggctataccgtatagcctaggtgtataataggatataccatctaggtttgtgtaagtacactttatgatgtttgcacaatgacaaaatctcctaacaacacatttctcagaatatatgtccaacatgactctacatgttgaatagaagaaatgagagtgagagtgaacattcttaccttgttcctgatcttagggagaaagctttcagtgtttcatcattaagcatgatgttcgctgtgggggttctggtagatgctctttattaggttggaaaacttcccttcgattcctagtttattgagtgtttttatcatgaaaaaggtgttagattttgtcaaatgctttttccgcatctattgagatgaccatgtgatttttgtcttttactctattagcgtggtgtattacatttatttgtgtatgtttaatcaactatrttcctggagtaaatcccacttggtcatggtatggaatcctttatctatgttgctggattattacatcacaggatcacaattaggcagccaggttcatagcagaacagtaat

SEQ ID NO: 221609 - DNA, 361 bp, Homo sapiens
tttcatatgaagatacatagctacactctcgagactttatctttagagaaattaagcccttaaaactactataaataattgtttctaaatatgtaaatcaagttattataaaataaattcttttcaggtaacttagctcatgagagtgaaattctttcaacatatagcaatcatgggtatcaaaacatggtgtacataaagagttaccagacgagtttgcagctaggtggactatgtcaaggagttctggttttgtattgtgaagacagagcatggaaacttatttttaagaaagctaccmagcttgttattctgccaaacaccaactaaaccaaatgaaagaaaaatgaaactgaaaggt

SEQ ID NO: 221610 - DNA, 511 bp, Homo sapiens
ctttctgcccatattatacaaaatgtaaatggtagttaagtcaggcagcagacagaagttggctactttttgagcagagatgtcttaaatgtctgtttcagggcaaacactcctcacggaccacacagatatttattaagaagctaatatggctgtgctcattctaatcacatttagtatttgtcttctgaaagagtataagtctggttgaagaaagagaacattaatatcttttaaatgagcatagttgattaatactctacttttttcataaagtaaatgaaaaaaattcaaayggaaagaaataattttaagtgagtgaaaagtgaagatatgaagaatgcattatcatgctataatgaaccattatctatgtcaaaagattcactccttaacaccaatcagaacttgatactcttttcctttaaccagacattcaggaactgtgctatatagtctgtgcaattgttttagtgaatagagagccacaggccctgaattataaaaatac

SEQ ID NO: 221611 - DNA, 511 bp, Homo sapiens
ctttctgcccatattatacaaaatgtaaatggtagttaagtcaggcagcagacagaagttggctactttttgagcagagatgtcttaaatgtctgtttcagggcaaacactcctcacggaccacacagatatttattaagaagctaatatggctgtgctcattctaatcacatttagtatttgtcttctgaaagagtataagtctggttgaagaaagagaacattaatatcttttaaatgagcatagttgattaatactctacttttttcataaagtaaatgaaaaaaattcaaatggaaagaaataattttaagtgagtgaaaagtgaagatatgaagaatgcattatcatgctataatgaaccattatctatgtcaaaagattcactccttaacaccaatcagaacttgataytcttttcctttaaccagacattcaggaactgtgctatatagtctgtgcaattgttttagtgaatagagagccacaggccctgaattataaaaatac

SEQ ID NO: 221612 - DNA, 484 bp, Homo sapiens
actagttcctttggattcaaaagagagctacacaagtttaacattgtaacatttattcagttttaacaatggtttacgttcattgtattggttactttattgaattcttacaaccaccatataaggtaaaagccatttctatctatataggaataagtgggaaactgagcctcaaagagggtaagcagaaggtccacacaacttattcaagtggagcagatagggggtgggggttggaggaatggrgaacaactgtttagtggatacagagttttcctttggggtaatgaaaatgttttggaactggatagagtttgtgaatacattgtgaatgtactaactgccactgcattgttcactttaacatggttatttttatggtatatgaattttacctcaataataaaattagtagagcaagcaattaaaccctgtcagattccagagaccacagtcttaaagattacaaaatactgcctcccat

SEQ ID NO: 221613 - DNA, 484 bp, Homo sapiens
actagttcctttggattcaaaagagagctacacaagtttaacattgtaacatttattcagttttaacaatggtttacgttcattgtattggttactttattgaattcttacaaccaccatataaggtaaaagccatttctatctatataggaataagtgggaaactgagcctcaaagagggtaagcagaaggtccacacaacttattcaagtggagcagatagggggtgggggttggaggaatggggaacaactgtttagtggatacagagttttcctttggggtaatgaaaatgttttggaactggatagagtttgtgaatacattgtgaatgtactaactgccactgcattgttcactttaacatggttattttyatggtatatgaattttacctcaataataaaattagtagagcaagcaattaaaccctgtcagattccagagaccacagtcttaaagattacaaaatactgcctcccat

SEQ ID NO: 221614 - DNA, 643 bp, Homo sapiens
gaattcttacaaccaccatataaggtaaaagccatttctatctatataggaataagtgggaaactgagcctcaaagagggtaagcagaaggtccacacaacttattcaagtggagcagatagggggtgggggttggaggaatggggaacaactgtttagtggatacagagttttcctttggggtaatgaaaatgttttggaactggatagagtttgtgaatacattgtgaatgtactaactgccactgcattgttcactttaacatggttatttttatggtatatgaattttacctcaataawaaaattagtagagcaagcaattaaaccctgtcagattccagagaccacagtcttaaagattacaaaatactgcctcccatgtggttaagctagctccacatttttctagactgaacattagtaactttctactgcagaagttttcaatgtctttgttgtgctgaaaaacatgctagtcgttttcaaattactttttctgtgaagctcattttacctggaaagtttccacaagaatgtgtttcataaaatacttttatagaatcactgttttcttcaaaccaatgaaaagaatgtttattacagaattattttatcttagatggtctacttagtatgacag

SEQ ID NO: 221615 - DNA, 643 bp, Homo sapiens
gaattcttacaaccaccatataaggtaaaagccatttctatctatataggaataagtgggaaactgagcctcaaagagggtaagcagaaggtccacacaacttattcaagtggagcagatagggggtgggggttggaggaatggggaacaactgtttagtggatacagagttttcctttggggtaatgaaaatgttttggaactggatagagtttgtgaatacattgtgaatgtactaactgccactgcattgttcactttaacatggttatttttatggtatatgaattttacctcaataataaaattagtagagcaagcaattaaaccctgtcagattccagagaccacagtcttaaagattacaaaatactgcctcccatgtggttaagctagctccacatttttctagactgaacattagtractttctactgcagaagttttcaatgtctttgttgtgctgaaaaacatgctagtcgttttcaaattactttttctgtgaagctcattttacctggaaagtttccacaagaatgtgtttcataaaatacttttatagaatcactgttttcttcaaaccaatgaaaagaatgtttattacagaattattttatcttagatggtctacttagtatgacag

SEQ ID NO: 221616 - DNA, 575 bp, Homo sapiens
ttagagaccttactgaattctctagcctggcttcaaagatgtaaaacggatgatctatctcttagaaacctttgtccatggatcttagttctattaacgacctaagaaaataatctgatacattcttttattgtcatattttaagttatttctttgcggtgcgttataaaccacaaaagatttgcaaaaatagaaatgtatacagctcaataaattatcacaaagtcaatgctcatgtaattattacacagataaacaccttgaagttaaccagtacatagaagcctgtggcttgttctgtcacactgggtaagtgtatatgtatatacaaagatacatgtgcagagatctgtaatcatgctgcattaatgtctcatgttcatcacaatttttcaagtcatttgactgtgtgttaccagggagggacaacaccttgaacatatcataggatgtcattgaatatattgtacactgtaatctcagtaaactattaattatctgtatttgtcaaagtatctggattttttgtccagcctatggttctaacytaagttttaaactttatctacttggaa

SEQ ID NO: 221617 - DNA, 555 bp, Homo sapiens
tgtattcatctgagaaggtttttttaagttatttttatgcattttatatgggtagtctttccttatcgattcacagaagtgctttatgtattctagatgcgagtcctttgttggttatatattgtgaaaatctgttccctactccatggcttccttttttactcacttattgtttcttacgttgaacacctattgttaattttaatgcagtcctattgaatcatctttacttatgtgtcctgtttattacataaaataatcatatatacacatctgtatttgcttctaaaaatctttttatgttatgattactttgcctttcacgtctaatccaaaaatctacctgaaatttacattttgagttggggtaaaatttcattatttttccaaattggtccagcaaaatttattgaaaatatgacattttcaaactgctctacaatattagtcatgaattcagtacycatggatgcttggctctgtttctagacatttgtgtgttccactgaacaatttgtctatattgtactgtcttacacaatatgcctaataata

SEQ ID NO: 221618 - DNA, 555 bp, Homo sapiens
tgtattcatctgagaaggtttttttaagttatttttatgcattttatatgggtagtctttccttatcgattcacagaagtgctttatgtattctagatgcgagtcctttgttggttatatattgtgaaaatctgttccctactccatggcttccttttttactcacttattgtttcttacgttgaacacctattgttaattttaatgcagtcctattgaatcatctttacttatgtgtcctgtttattacataaaataatcatatatacacatctgtatttgcttctaaaaatctttttatgttatgattactttgcctttcacgtctaatccaaaaatctacctgaaatttacattttgagttggggtaaaatttcattatttttccaaattggtccagcaaaatttattgaaaatatgacattttcaaactgctctacaatattagtcatgaattcagtacccatggrtgcttggctctgtttctagacatttgtgtgttccactgaacaatttgtctatattgtactgtcttacacaatatgcctaataata

SEQ ID NO: 221619 - DNA, 444 bp, Homo sapiens
tttgttggactaagaaaagtagttttacctgcaattctgaaaattcattttattaactgattggtcaataattgttttgagtttatagggtaataatttcactgttggaaattattggaggacacatttcagctaactattaaaggttaaattcaccaaacagraggatactaattaactgcctcttaagaaattgacaaggccactgcaagttcttttatccgttgtctataaatcagaaggatgccctttaaggcatttccatcaggatacatgttggcacaaaactcaggcaagcagtgcttacaatcagaagactataatgataacaaataaaggttattgttctgtttatacaagaatggagtcagcttggataattttcaaaattcaaggatatatggcaagttggtgagtattgagaaaaaaatagtctgtttcatc

SEQ ID NO: 221620 - DNA, 444 bp, Homo sapiens
tttgttggactaagaaaagtagttttacctgcaattctgaaaattcattttattaactgattggtcaataattgttttgagtttatagggtaataatttcactgttggaaattattggaggacacatttcagctaactattaaaggttaaattcaccaaacagaaggatactaattaactgcctcttaagaaattgacaaggccactgcaagttcttttatccgttgtctataaatcagaaggatgccctttaaggcatttccatcaggatacatgttggcacaaaactcaggcaagcagtgcttacaatcagaakactataatgataacaaataaaggttattgttctgtttatacaagaatggagtcagcttggataattttcaaaattcaaggatatatggcaagttggtgagtattgagaaaaaaatagtctgtttcatc

SEQ ID NO: 221621 - DNA, 496 bp, Homo sapiens
aagttcttttatccgttgtctataaatcagaaggatgccctttaaggcatttccatcaggatacatgttggcacaaaactcaggcaagcagtgcttacaatcagaagactataatgataacaaataaaggttattgttctgtttatacaagaatggagtcagcttggataattttcaaaattcaaggatatatggcaagttggtgagtattgagaaaaaaatagtctgtttcatcttatgcatttcaaattgaatgtrtttagcaccaattgcttaattgcgactcaagttgcttaaggtttattagaatattgtgtttcatctccttgaattggtgcagacacagtctggtccaggtgtgaggtccaatatgataatttaaactcagtttaaaattgcttttactttactcctgaaatgcaaatgtaatggaagtgtttgagatcaagattcctatgggttgataggaatcctgttgtttccctcgtttttcatc

SEQ ID NO: 221622 - DNA, 593 bp, Homo sapiens
taaacacactgcacttgtggcccctcccaagtgctggcaggccactgagtatgtgaacagcccactccaaaggaagaacctggggaaaagaaatgcaaacctcagaacaaagacaatatgtaaaaaccccaagacaagagtcagatggaatactcggatctctcaagtcacctacttggccctcttccaagtatatttctttttgtttctgctctaaaatyttttaataaactttcactcccgctgcaaaacttgcctcagtctctatcttatgcccctcagcagaattatttccattgaggaggcaagaattgagttgctacaggagttactaaagattttgagcaagcaggtaacaatctgagtggtgtggtggaagataccctacaaatgtgcttaattaccaaatacacgttttctattccctgtcctcttcttgttaacacatgcaagcacacttcacatacttatgtgaagataagtattgaaaatcctgatttcaggaaacaggtgggcatgagttcagttatggttatcaaacaagatgcgatgttggctaggaagcttgtgggaagatttcagagaaaaggcaa

SEQ ID NO: 221623 - DNA, 593 bp, Homo sapiens
taaacacactgcacttgtggcccctcccaagtgctggcaggccactgagtatgtgaacagcccactccaaaggaagaacctggggaaaagaaatgcaaacctcagaacaaagacaatatgtaaaaaccccaagacaagagtcagatggaatactcggatctctcaagtcacctacttggccctcttccaagtatatttctttttgtttctgctctaaaattttttaataaactttcactcccgctgcaaaacttgcctcagtctctatcttatgcccctcagcagaattatttccattgaggaggcaagaattgagttgctacaggagttactaaagattttgagcaagcaggtaacaatctgagtggtgtggtggaagataccctacaaatgtgcttaattaccaaatacacrttttctattccctgtcctcttcttgttaacacatgcaagcacacttcacatacttatgtgaagataagtattgaaaatcctgatttcaggaaacaggtgggcatgagttcagttatggttatcaaacaagatgcgatgttggctaggaagcttgtgggaagatttcagagaaaaggcaa

SEQ ID NO: 221624 - DNA, 593 bp, Homo sapiens
taaacacactgcacttgtggcccctcccaagtgctggcaggccactgagtatgtgaacagcccactccaaaggaagaacctggggaaaagaaatgcaaacctcagaacaaagacaatatgtaaaaaccccaagacaagagtcagatggaatactcggatctctcaagtcacctacttggccctcttccaagtatatttctttttgtttctgctctaaaattttttaataaactttcactcccgctgcaaaacttgcctcagtctctatcttatgcccctcagcagaattatttccattgaggaggcaagaattgagttgctacaggagttactaaagattttgagcaagcaggtaacaatctgagtggtgtggtggaagataccctacaaatgtgcttaattaccaaatacacgttttctattccctgtcctcttcttgttaacacatgcaagcacacttcacatacttatgtgaagataagtattgaaaatcctgatttcasgaaacaggtgggcatgagttcagttatggttatcaaacaagatgcgatgttggctaggaagcttgtgggaagatttcagagaaaaggcaa

SEQ ID NO: 221625 - DNA, 513 bp, Homo sapiens
gggcacagagaacgattctccaaagtatagagctttggtctgatgagcatttygaattaaattaaattggaagtccctacatcttcctcagatacaagaactttttaatctcttgttcttcttgcccacctccacctgaagccctgaaaggaactttggaatttccttatctgaccaggaaactcctttccatagaaatgaaattgtcttaaaaccccctttctaggaacctaatcaactgaccagaaaagattaaccactggagaaaagaaaagacaaaatatcaccaccgtacccggataggctttgtatctatttttctgagggcagcacagagagagactgcctgggagactttatctatataataagaccatcgttgtttacagtgcagttttgcccctcattttcctttaacttgcttatcccattcagttttttaaataaaatcgtttgaaagataatgtctgcctcctggttccatttatttcctctaaaaattatttactatcc

SEQ ID NO: 221626 - DNA, 513 bp, Homo sapiens
gggcacagagaacgattctccaaagtatagagctttggtctgatgagcattttgaattaaattaaattggaagtccctacatcttcctcagatacaagaactttttaatctcttgttcttcttgcccacctccacctgaagccctgaaaggaactttggaatttccttatctgaccaggaaactcctttccatagaaatgaaattgtcttaaaaccccctttctaggaacctaatcaaytgaccagaaaagattaaccactggagaaaagaaaagacaaaatatcaccaccgtacccggataggctttgtatctatttttctgagggcagcacagagagagactgcctgggagactttatctatataataagaccatcgttgtttacagtgcagttttgcccctcattttcctttaacttgcttatcccattcagttttttaaataaaatcgtttgaaagataatgtctgcctcctggttccatttatttcctctaaaaattatttactatcc

SEQ ID NO: 221627 - DNA, 513 bp, Homo sapiens
gggcacagagaacgattctccaaagtatagagctttggtctgatgagcattttgaattaaattaaattggaagtccctacatcttcctcagatacaagaactttttaatctcttgttcttcttgcccacctccacctgaagccctgaaaggaactttggaatttccttatctgaccaggaaactcctttccatagaaatgaaattgtcttaaaaccccctttctaggaacctaatcaactgaccagaaaagattaaccactrgagaaaagaaaagacaaaatatcaccaccgtacccggataggctttgtatctatttttctgagggcagcacagagagagactgcctgggagactttatctatataataagaccatcgttgtttacagtgcagttttgcccctcattttcctttaacttgcttatcccattcagttttttaaataaaatcgtttgaaagataatgtctgcctcctggttccatttatttcctctaaaaattatttactatcc

SEQ ID NO: 221628 - DNA, 513 bp, Homo sapiens
gggcacagagaacgattctccaaagtatagagctttggtctgatgagcattttgaattaaattaaattggaagtccctacatcttcctcagatacaagaactttttaatctcttgttcttcttgcccacctccacctgaagccctgaaaggaactttggaatttccttatctgaccaggaaactcctttccatagaaatgaaattgtcttaaaaccccctttctaggaacctaatcaactgaccagaaaagattaaccactggagaaaagaaaagacaaaatatcaccaccgtacccggataggctttgtatctatttttctgagggcagcacagagagagactgcctgggagactttatctatataataagaccatcgttgtttacagtgcagttttgcccctcattttcctttaacttgcttatcccattcagttttttaaataaaatcgtttraaagataatgtctgcctcctggttccatttatttcctctaaaaattatttactatcc

SEQ ID NO: 221629 - DNA, 519 bp, Homo sapiens
aagccacatgtgacaagccaaaagtaaacattagactcaatgatgaaaagttgaaaggttttcttttaagatcgggaccaagacaaatgtgtctctcttaccacttctattcgatgtaataacgtcctaacctgagcaattaggtaaraaagaaaaaaaaaaaaagcatccaaatcagaaaggaggaagccaaagtatttgtttgaaaatgacttcattttatatagataaaaccctcaaccccccactataaaaccgttagaataaacgatttcagtaaagttttgtgatacaaaatcaacataaaaaatcgtgttgcatttttatacactaacaattaactatctgagaacaaaattaagaaaacaatcccatttgcaataacttcagaaaggataaaatacttatgaataaatttaaccaaggaggtagaagatctgtacaatgaaaactgtcaaacagtggtgaaataaattgaagaagacacaagtaaataaaatgttcaaatgtccatactac

SEQ ID NO: 221630 - DNA, 519 bp, Homo sapiens
aagccacatgtgacaagccaaaagtaaacattagactcaatgatgaaaagttgaaaggttttcttttaagatcgggaccaagacaaatgtgtctctcttaccacttctattcgatgtaataacgtcctaacctgagcaattaggtaaaaaagaaaaaaaaaaaaagcatccaaatcagaaaggaggaagccaaagtatttgtttgaaaatgacttcattttatatagataaaaccctcaaccccccactataaaaccgttagaataaaygatttcagtaaagttttgtgatacaaaatcaacataaaaaatcgtgttgcatttttatacactaacaattaactatctgagaacaaaattaagaaaacaatcccatttgcaataacttcagaaaggataaaatacttatgaataaatttaaccaaggaggtagaagatctgtacaatgaaaactgtcaaacagtggtgaaataaattgaagaagacacaagtaaataaaatgttcaaatgtccatactac

SEQ ID NO: 221631 - DNA, 574 bp, Homo sapiens
ggatatctaagtgactttggttacctcattcatacttctagggtaatttaggtttgggggtctgtgataaaattatgaaacataagagagaacttccaggacttcctggaaaggaagcttttaaaaagagtttttaaaataaatgcaaggaagacatagacactttcctatcagtggaacataacctctctggatgatgcctagaactgcagcagccatccagtgatgatgaggcaactagccaatggaccaggattacatgctgactgtagcagagcaaaaatatacaaagactcctcaatgagtttttgtaggaattcaattaaagaatgggaagctttttttctatgttttttttttcccatatgasagaggaaaaaaagtccttattgttttagaaattttaagtaatattattttatacttgtgggaaaataattccaggcctgttttgctggaagaaagatgctttactggagccaaaatggtagaaattcatggttcctctaataatacctgacaaacatagaacctctgtaatgaagagaaggggcaaggccaggtaatagcaata

SEQ ID NO: 221632 - DNA, 487 bp, Homo sapiens
aactactgagaaaatcagttcaaatgagaaaaaggaatgttgagttgcgtaaacggtgttgtttaaacataaaaaatgtgaatgccagacttttgccccagtagctcgctgactgcaccataaaaccaattttccaaatcatagttaggtagctaagatgagaatggcttagttttagggctattcatgtataattggcaagactttggtgtgtacaagaattaaaattctggaagttaaaaaccacctgtacggctaagtggctttccaaatgcttstaacaagtgtaaactcatcagaaaactatgaaaacaccatttcaatccacttttgatattattgcaggttattaagtcttgattgtttaatttttttatataacaatatcatcgtgtttcagtttgctttgttttgatggctaagttttcctttcattattaattgagctcattctctgcttcacttctgtacttcactaagtacactt

SEQ ID NO: 221633 - DNA, 456 bp, Homo sapiens
attcttttggtgaactggcaaagcagtgatcccccaacgtagtgtgtttgcatgttgatttatttatttaataaatatttgctgtgtacttactagatgtcaggccctgctgtgatggtatgtgcattctagtgggataaaactgtcaaaaaatacattttaaaaaccaggtaatggtaagtgctatgcagaaagttgaaataggataaagtatttgataatacttcactgggtggctacatttttgttgttgttttgttttgtttttgagaygcagtcttactctgtagcccaagctggagtgcagtggcgccatcttggctcactgcagccttcgcctctggggctcaagcgattctcctgcctcagcctcccaagtagctgggactagaggtgtgccccaccacacctggttaatttttttgtatttttagtagagacagggtttcatcatgt

SEQ ID NO: 221634 - DNA, 554 bp, Homo sapiens
tataacttggtttgatcaattgaatagggcagatacaattggcaattgtatctccaagtaaaagtttcatactcaagagcagaaaagtcacagtgacgccctgtgactatgcagcctaggccagtatcacttggagcagagacaactttcccccaggcccctgaccaaattaaagtagtgtgagcaattaaatcattttcttcttgytttatgtcatcaagattttggttaacctgtttcgcagcaatagataattaaaacttcttcagcttcatcccaaatactgcctcatcatatcctgtcttctatgctgaattattgtagtcctacaaatgcataattgacctttgaaccacataaattcaaattgtgtggatccacttatacctacaatttatattaaaaattttttttcaataaaagttacactgagtgtgcccgcctctcccaccttgcctttaacgtccttcatctcttcttcctcaaacacccctgagacagcaaaaccaaccctcttttttctcctcctccctcagcctattcaacatgaagat

SEQ ID NO: 221635 - DNA, 373 bp, Homo sapiens
ggagaatctggcttttgcctcttccrgcttctagcagttgccagcattccttggctctggccacatcgctccaatctctcttccatggtcacattgccttctccttttcttctatcaaatctccccatttctcatttgtaagtacatttgcttttgcacttaaggcccacctgataatccaggataatcttcctattgtaagatccttaacttaatcacatctgcaaagtgtcttttgccctattagataactgatatggtttgaatctgtgtccccacccaaatctcacgtcaaattgtaatccccaatgtcgaaggtgggggctggtggaaggtgattagatcacgggggtggtttctcacgaatgcttta

SEQ ID NO: 221636 - DNA, 570 bp, Homo sapiens
tgcattaggtcctgaagagtttttccaggcaaaaaggagacagtctggaccacaatatggagatgcctacttaagaatctgtctggtttgggaaatggttggtagtgtgacatgcctgaagcacatggtacttaactaagtcttgtaggagatggggctagataagcaggctgggacccacttgtgaagcacagaaatatgatgcagagctgcagagcttgggctttatacagctgtgataaggtggctcagggaacagccatcactattcctctgaggtttaagaccgattttattgacttccatgctcagtggcctggctgcctacctaccattacacttctgtcactatataagctcagggatgatttttttagttctacccaggactagctaaaaacagacattcagcttttaaatcacaggaggaaaaaaaaaaactacaaagataagatagcctagatagaagaaaaaaaaggaaaacaaaggaagtcccaagaaagcataaagaagagaaagcataaaacaaaaagacaggaataagacmaaacatatcagttatgacagtaa

SEQ ID NO: 221637 - DNA, 475 bp, Homo sapiens
tgggttccaagcacaatatggagaccacaggaggttgagaaggggagtgacatgatctgagttaatttgaaattattactttgactgctctggagagaaccaactgcaggttgacaagggtgaatgaatagagacctaggaggctgctgaaaaggtcccaggaggcaagacgctagcttgaatgagagtagatgggatgtgaagagggaagaatcagaatatattctaatgatagagttggcaggatttactgtcagataaatatacratgtgaaagaaacataggagtagagaataattaccaagacttgggtctgagctgctactgcctgggacttatcagcagagagtcggtatccacagccctgggactggctgaggcccctggagagcctagaaaagagaagtgtagctagaaaagagaagaagctggggggttgcttcacaagagtctgaggaggtgagtaagatcatg

SEQ ID NO: 221638 - DNA, 497 bp, Homo sapiens
gttgtgaccattaaataagtcagtatgtgtaaagagcttaattatgtgcatattatcatatacagtcaataaatggtaactatgatggtggttataattattttggcatgatgataggcttgaaattgttgtcacttctgtagtatggaatattcttagttttatctacaaaatagacctatgcagtgcccacatcatgcagagtattatatctaggccacagtaataaatctgcattgtttcattttgttttttctaattgcagggggatgccactgaggtggttttcagcagaggaattaaatgaccagattaacattctacaggattattcyacctactctttggggaatagactaggcagaggtgatgttaagaaaccagttaggagctagaataggtgagacatgatagggacattgaccatggtggcggtgaaggaggtgcaacaaaatgggctcaatgtgtaacttacacgcaattgtgcaggcaggtaa

SEQ ID NO: 221639 - DNA, 519 bp, Homo sapiens
acttgatattctccctccagctatttgaaactatatatttactatagtcctcctacaatgatgaatataggaacactggaacttatttctgctatctggccaaaatgttgtatcttttaacaaatctctccctatccgtcttgtcctcctacccttcccagcctctagtatactctgttctactttttacttccataagatcagtggttyttagcttccacatatgagtgagaacatgaggtatttaactttcttttcctggcttatttcatagccctgagtttttgagacatcaagattgagtgttgttccccacaatttataactattcaaagtaatagaagatttacaaagatgatcaaatggttgcaaaatatcccttattcctgttgtaagaggcatctgtagttaacataaagaaaagaagactgagataaattaggaactttggaaactttatgttttagaaataatcagagaatgtgagatttaaaacaaaatttagaagttatttagcca

SEQ ID NO: 221640 - DNA, 634 bp, Homo sapiens
catcaatggatattcattttggcaatggcaaaggaaagtaaaatagaacaagtcaggccaccagagtatggatgttggactcaaaccaacttggatcagagtatggatgttggactcttgcaaatgtgcagcaaacactcatcccatgttttagcctagtaatcatgaaaagaggagtttcttagttaagaaaatgtaagaagaagaagtgtcagagacataaaaactacattacataactgacaggggaaatgtttctttgtttgctgagcttccagattgtctgtctatattgatttattcattcattccacctacatctgttcctaagcacctgttatatgtcaggcacagtaccaggcactcaggatacaagatgatacaactacattccagccctcagagaactctcagtctggtgggggaagtagatgataaacaaatacaataaagttatacagataagaactaaaatatatcaataatgagctatgcatttactacttgccagctcctgttttatgtaatttacaygttacctcatttaattctcataaacagcctatcaggtaagtataattatttttacccattttatgacgggaaaaccaaggagtagagaggctgagtatct

SEQ ID NO: 221641 - DNA, 446 bp, Homo sapiens
cctgtttgtacaacgtaaattgaatttcaccaatatttattgagtggatatgatatgccatatgttgtgygaagcagaaatagagaggatattctctgactgcctacatctcataattttcttgggaagtcagacatatgccaagtaactgtggctgtttctttaccattattgagcagagtatagaaaaatccttagtgagctgaaaactgatgctaagtctgaaaactttctacccacagacagttcccccatcacactttacctctccagtttttccatggatactaggctgtgtgccattctccatcaagaagagaggcctgaggccaccaaagccattttctatttttcttacctgacagtctgctttccccaccttgcttacaaatgactaatcttgagataggagaacgatgctttaagtaaaataagaaaaagtcgta

SEQ ID NO: 221642 - DNA, 446 bp, Homo sapiens
cctgtttgtacaacgtaaattgaatttcaccaatatttattgagtggatatgatatgccatatgttgtgtgaagcagaaatagagaggatattctctgactgcctacatctcataattttcttgggaagtcagacatatgccaagtaactgtggctgtttctttaccattattgagcagagtatagaaaaatccttagtgagctgaaaactgatgctaagtctgaaaactttctacccacagacagttcccccatcacactttacctctccagtttttccatggatactaggctgtgtgccattctccatcaagaagagaggcctgaggccaccaaagccattttctatttttcttacctgacagtctgctttccccaccttgcttacmaatgactaatcttgagataggagaacgatgctttaagtaaaataagaaaaagtcgta

SEQ ID NO: 221643 - DNA, 517 bp, Homo sapiens
gaaatcctgtctctatttcatggaggtaagaggcaaacctgacaacagctattatttagagacacctattttattcctggcattctactaaaagctttacctacttaatctcttaaacctyacaaaaaaacctagaaagtggagtcattcccaatttacagatggagaaagtgaggctcacagaaagtaaactaagtaacacagttgtgtaaatagcagggagaaattttaagcacaggtcaaaatgattccaaagcttctaaatagttcccaatatggaatagttatcaaggtaggactttgcatctggttaaagcaattgagaaaaaaaaaaaaaaaaagcaaaactgttgtgggtaatttggtgctgattaaattgggcaaattatttacattaaaataatagataatttggtaccttgaagacagtaaaactgatttggatctttacctttctggggcaggtttatgattcaaatgtcttcaaggtacggttttccttattatgtaaaaacat

SEQ ID NO: 221644 - DNA, 517 bp, Homo sapiens
gaaatcctgtctctatttcatggaggtaagaggcaaacctgacaacagctattatttagagacacctattttattcctggcattctactaaaagctttacctacttaatctcttaaaccttacaaaaaaacctagaaagtggagtcattcccaatttacagatggagaaagtgaggctcacagaaagtaaactaagtaacacagttgtgtaaatagcagggagaaattttaarcacaggtcaaaatgattccaaagcttctaaatagttcccaatatggaatagttatcaaggtaggactttgcatctggttaaagcaattgagaaaaaaaaaaaaaaaaagcaaaactgttgtgggtaatttggtgctgattaaattgggcaaattatttacattaaaataatagataatttggtaccttgaagacagtaaaactgatttggatctttacctttctggggcaggtttatgattcaaatgtcttcaaggtacggttttccttattatgtaaaaacat

SEQ ID NO: 221645 - DNA, 517 bp, Homo sapiens
gaaatcctgtctctatttcatggaggtaagaggcaaacctgacaacagctattatttagagacacctattttattcctggcattctactaaaagctttacctacttaatctcttaaaccttacaaaaaaacctagaaagtggagtcattcccaatttacagatggagaaagtgaggctcacagaaagtaaactaagtaacacagttgtgtaaatagcagggagaaattttaagcacaggtcaaaatgattccaaagcttctaaatagttcccaatatggaatagttatcaaggtaggactttgcatctggttaaagcaattgagaaaaaaaaaaaaaaaaagcaaaastgttgtgggtaatttggtgctgattaaattgggcaaattatttacattaaaataatagataatttggtaccttgaagacagtaaaactgatttggatctttacctttctggggcaggtttatgattcaaatgtcttcaaggtacggttttccttattatgtaaaaacat

SEQ ID NO: 221646 - DNA, 562 bp, Homo sapiens
aaatgctatcaaacagcatcacatgtatagaaaaatctttcacaaaacgaagagtcaattgatgcagcaaacttcattgttgtcttatttgaagaaattactgcagccaccccaatcttcagcaattactaccctgatcaatcagcagctatcaatatcaaagcatgactctccaccagcaaagaagatcacgactcctcttactgaaggttctgatgaacattcacggtttttagcaacaaastattttctaattaaggtattcacactgtcttttaaagacataatacttttgcacacttaatggactacagtatagtataaagataacatttacatgcactgggagccaaaaaattcatgactctctttactgagacatgaacttcgttgtggcctggcactgaacccacaatacctctaaggtatgcctgtatatgtccaacagtgtaccaatatagatgctattaatggctaccattaatcagggcttactatgtgccaggcactgtatgctgtcttttcaagtcttaattttaatttaatcatcaacacaatccta

SEQ ID NO: 221647 - DNA, 617 bp, Homo sapiens
taataatttccccaaactggaaacaatgcaagtgtctatagcctgaggaatgggtaaaaaaacactgggtgcattcacatgatgggataccacccagcaataaacaggattgtatgagtgatacttgcagcaacaacatgaataaccttaaaatcattatgctaagtgaaagaagccagacacaaaaggctacatgctgtgtgatgacatttatatgacattctacaaaaggcaaaactgtacagatagaaatcaaattagtggtttccaggaactggaggtcagggagagcactaaccacaaagaagtatgagggaaccaacttttgtggygacaaaagttattctatgtatttcccacccatgcttaagagagagagtctctttactcaggatggactctagagtcaggcagacccagtttggacgccagctctgttacttcctgtgaggaacttgggacaactcacttttccttttctgagcctgattcttctaactatgaaaagaggagaagttttacttcatagagtacacatgtgtatgttgtaaatatgtgtaaatggttgttgattgagactctatcttgcttcaaaattggcagctggaactcagtgt

SEQ ID NO: 221648 - DNA, 579 bp, Homo sapiens
acaattctaggcagcacagaggaggggcaggtatgacatctggtatcagatgggaggtgtatattggatgaacttttaataacagaaaatgattgaaaagttatagattctgcccaagatatctatcgctaaagaatgagaaaaggagattttaccagcatgttgcaaacagtgaatggcgaataacatcatgtttatayatgtttgagtttgggttcctcaataaactggttttacatgtatataaagcacctggtgcattactacacacacactcacactcacatgcatgtgtactcatatgtgtgtgtgtattttaaacatggtagatagctattaggactaataaaataatattagtgacaatagtcattgtaaagggaaatatgacatttttatactatttagtcctaatctgcattcatttgcacttgcccacattcaataaatccacattggcttcattatgtgtaggattctgtgaaaaatacagattaattaggcaaatttctaccctctagtagcttatagtctaatagaggaattcaaacagatagaaaacttacaaagaaatatgac

SEQ ID NO: 221649 - DNA, 487 bp, Homo sapiens
ccatccctaagtcacaattctaggcagcacagaggaggggcaggtatgacatctggtatcagatgggaggtgtatattggatgaacttttaataacagaaaatgattgaaaagttatagattctgcccaagatatctatcgctaaagaatgagaaaaggagattttaccagcatgttgcaaacagtgaatggcgaataacatcatgtttatatatgtttgagtttgggttcctcaataaactggttttacatgtatataaagcacctggtrcattactacacacacactcacactcacatgcatgtgtactcatatgtgtgtgtgtattttaaacatggtagatagctattaggactaataaaataatattagtgacaatagtcattgtaaagggaaatatgacatttttatactatttagtcctaatctgcattcatttgcacttgcccacattcaataaatccacattggcttcattatgtgtag

SEQ ID NO: 221650 - DNA, 574 bp, Homo sapiens
cagtcaccattgttgaatatctacttcactcatttcaacaaatatctataagtgcccactatgggcctggcactggggctccaacagtgaaccccacacagctggcaatggcagagacgggccagctgggctccctgtcctggctgctgtggctgctgtcactgttgtcatgtgagagcttcccttccatgctcttgctcttctgctgctcaatttcaggcattctttcttccccccatgatatgttggtattattatttaatttcctcagacctggtataaagggaaaaagcagataaatggaggaaaagccacaaagccaagtagagaagttcttcctgtttattcccataagaaataaccaggtcaactcaaattaattcaaggctggtcataactgaagaacaaaaataagctagttaacttcatgcttttagtttaggattaatctattcatcagcttagctcacggggaggaaacatgcttcttcagtagttttcaaactgaaaataaatgcctcattagrttaaacatattagcctgagaacagtattgatgtcagatagactaatg

SEQ ID NO: 221651 - DNA, 531 bp, Homo sapiens
ggtaaaatgaggataataatattacttactgcaatgggttactatcaggttttaatgagagggtacatgtaaaacatacatcaaggcttccagtggctgagagccgagggcagtgctacttccacactatattcttttatggaggggattctggcattaatgaggccacaggccctggtccacttcctgcatttagagtctttagatggtatctctattaatgtgtcagaattaggacactccccctctccttgctccctkccaatccctagccctctttggatctctacaaatggtctctataggttcggaatcctggcgttgaggtgggatttccagttctcttgctccccactgcccctgtgcatgtgaggatgcctgatgcccaaaccatggggactgcgggagccagaggctattcctcaacacactcctgagatttgaggaacagaggccccttttcattgggggtgacctggaaggggcttctcagtccactgcacgaggctgatttgctctctgatgagactt

SEQ ID NO: 221652 - DNA, 531 bp, Homo sapiens
ggtaaaatgaggataataatattacttactgcaatgggttactatcaggttttaatgagagggtacatgtaaaacatacatcaaggcttccagtggctgagagccgagggcagtgctacttccacactatattcttttatggaggggattctggcattaatgaggccacaggccctggtccacttcctgcatttagagtctttagatggtatctctattaatgtgtcagaattaggacactccccctctccttgctcccttccaatccctagccctctttggatctctacaaatggtctctataggttcggaatcctggcgttgaggtgggatttccagttctcttgctccccactgcccctgtgcatgtgaggatgcytgatgcccaaaccatggggactgcgggagccagaggctattcctcaacacactcctgagatttgaggaacagaggccccttttcattgggggtgacctggaaggggcttctcagtccactgcacgaggctgatttgctctctgatgagactt

SEQ ID NO: 221653 - DNA, 496 bp, Homo sapiens
agatcttgcagctggcaaggtggagattcagggcttacatcatgttctcttggactctgactctgtggtttttccacagctccactccccagagctttgccgtggctcccgcatctgttccactgccacacttaattctgctgagatgaccagagcaggaagcaggaaagctgacttccctgaaagaggtaacctgcctggggctgtcaggaggaaggcccatgggaatgctcccagcatcaggggactttgtggttttctaccagaagaaggcactgtactggtgtcttccagagaagtccrggcagtcaatgcaatttaaccccatgctcaattattcaacacaaataagagtcgaattaagattcatgatttcatgattattgttgcattacccaaatatctaactgatggtggacatatttacgtgagtccaccagtctgatccctaaaatcttcctaagactttcaacctccataaatcatttttggtagc

SEQ ID NO: 221654 - DNA, 573 bp, Homo sapiens
ggcttctaccagatgcctcagaagtttcaccagcctataaccaattataggtaaattgcctagtttgggagtttacaaaaaaaactctgtaggctgggcacggtggcacacacctgtaatcccagcactttgggaggcaggcagatcacaaggtcgggagtttgagaccagcctggccaacatggtgaaaccccgtctctactgaaaatacaaaaaattagctagrtgtggtggcacatacctataatcccagctactcgggatgctgaagcaggagaatctcttgaacccaggaggaggaggttgtggtgagaggagatcacgccattgcaactccagcctgggtgacagaacaagacactgtcaaaaaaaaaaatctgtaatataaattaaagccacaagtaaaccctgtagtcactataacccaaggaggttctctgtcctctcataggccaagcagaaactgacaagctccccttttgtttcccagatcttgggaataaactatttttctggtatactctatcactgaggttcagccctttaatgctcccagctttatacaactccttg

SEQ ID NO: 221655 - DNA, 388 bp, Homo sapiens
atgtgagcaatcatttaagcaaattctattttaactaagatgagttcagtccacttcctaatgcaccagccycaccatgtcctgtgatccatgctgggtaaggacggcatgtgacccaattactcacgactgctgggtgacccgtccagctccaccacacatgtcaggctcatctgcagatggcctatggcctctggttccattctgattgtccaggcagctgtgagcagagcagccagacgttgttcccatcctccagcaaatgcagggtttgttccacactggcccatgtcctgtcccctgtccctgtcattccctccctcaccccacagggacctcttgcctcccagcatcctcaacagatccccaaagaggccgggtccccagt

SEQ ID NO: 221656 - DNA, 388 bp, Homo sapiens
atgtgagcaatcatttaagcaaattctattttaactaagatgagttcagtccacttcctaatgcaccagccccaccatgtcctgtgatccatgctgggtaaggacggcatgtgacccaattactcaygactgctgggtgacccgtccagctccaccacacatgtcaggctcatctgcagatggcctatggcctctggttccattctgattgtccaggcagctgtgagcagagcagccagacgttgttcccatcctccagcaaatgcagggtttgttccacactggcccatgtcctgtcccctgtccctgtcattccctccctcaccccacagggacctcttgcctcccagcatcctcaacagatccccaaagaggccgggtccccagt

SEQ ID NO: 221657 - DNA, 665 bp, Homo sapiens
ttcaactaccagccattgctagcacctcccttatgctaggctggtggctcagaaagacctctgccctcaggagttgcagttcagtgtgggagatacgcttgtaccagctgacaagggctgtgacaaaggtaagtgcagaattctagggggatgcacaaggggagttctgacagtgtcttgcaggagtggtccaagaaagttcctgttataggtgataacagtggtgtcctaaaraacaaatgagtgcttatacctagaacatctgtttggtttttctttatgtgtttgctggctatttgttgctgattttcaccctgtttaccgagcctcctccttcatctggtaatggtcttttccatgtttattcggtcaattacagctcttccgccccactctagcccacttacatcacaggggtgggcatgtgacctagcctggcccaatcagagtctgcatccctaaagcacagtaactggttcaggatgggccaatccaggcttccctgggattttctgctggagttgatgggagacacttcctttgcctttggagttcatggagctcaaagtagatgcttgggatcacctgccctggcctcatggggcatgcccaggtgcagtgggagaaactgaggccactttgcaaaaagaaccagacacaaagag

SEQ ID NO: 221658 - DNA, 574 bp, Homo sapiens
tgttaagctttctttttaaagtaaagatgtcaatgacatctgataaacagaaattattgtgacatattggtagtgtttttccacttcagattgacaataataaatgcctgaactgtaagggagtggaaaaagaaggacgcacaaaccaagagctacaacatgccaaggtctgtgctaaacaggttgtgtacgtagtattcattttctctggaaacagcttctgtaacttttactggagtcattgctagatattttatacttgcttttttttttctgttgtatatggtgttttttwaatttactgatgcatggaaatttaattcaatatatatattgattttgtatccagtaaacatgttaaacttctttattgtttacttatctgtagattatttcacattttccacatagacaaccaaatagtgacaggtttgtttctttttgctccttatacctttaatttttttctttctaactttcctagcagtgatactagcaggtacccttgtgttgttcctgatttcaaatggaaagctatgagctttgtgtcataatgtacaatgtaggtaggttt

SEQ ID NO: 221659 - DNA, 641 bp, Homo sapiens
cacctctaaagtctggctctatcttagaacttctgtgattttggcgaagccacttccctaccaggggcctcacttgcttcctctgaaaaatgaggagattgtatgacataatgttttaaacaattgtttaaaacattggggcattttccacagtacctgtaaacacaacaatatataaaatagataaaagtagagttgttccttttgaaggagggtctagagcctgtactcttgtcctctggaaccccaaatcctcttatgttcctctataaatagctccaaaaaatcccatggatccaaagaatataatttgataaatatgtcttgggccttgagggcccacccagttataacattctaggactcagtgagyggtcaagaaaggcagtggggtagccacttgcttctcttgcattcagcctttgcagctactgggctggccgctggtcttgtgagtatgcgcatgcctgtgtaacctcacgcatcactgaatcggggatacaggatgtggcatggctgggagcttcttggaagggcctccacatcctgtgaatgttgggtctttacctgccaactgctgagatgaaccagtaatcctttcggagagcacaggcttttatcaatgaggaggattcaaggct

SEQ ID NO: 221660 - DNA, 641 bp, Homo sapiens
cacctctaaagtctggctctatcttagaacttctgtgattttggcgaagccacttccctaccaggggcctcacttgcttcctctgaaaaatgaggagattgtatgacataatgttttaaacaattgtttaaaacattggggcattttccacagtacctgtaaacacaacaatatataaaatagataaaagtagagttgttccttttgaaggagggtctagagcctgtactcttgtcctctggaaccccaaatcctcttatgttcctctataaatagctccaaaaaatcccatggatccaaagaatataatttgataaatatgtcttgggccttgagggcccacccagttataacattctaggactcagtgagtggtcaagaaaggcagtggggtagccacttgcttctcttgcattcagcctttgcagctactgggctggccgctrgtcttgtgagtatgcgcatgcctgtgtaacctcacgcatcactgaatcggggatacaggatgtggcatggctgggagcttcttggaagggcctccacatcctgtgaatgttgggtctttacctgccaactgctgagatgaaccagtaatcctttcggagagcacaggcttttatcaatgaggaggattcaaggct

SEQ ID NO: 221661 - DNA, 641 bp, Homo sapiens
cacctctaaagtctggctctatcttagaacttctgtgattttggcgaagccacttccctaccaggggcctcacttgcttcctctgaaaaatgaggagattgtatgacataatgttttaaacaattgtttaaaacattggggcattttccacagtacctgtaaacacaacaatatataaaatagataaaagtagagttgttccttttgaaggagggtctagagcctgtactcttgtcctctggaaccccaaatcctcttatgttcctctataaatagctccaaaaaatcccatggatccaaagaatataatttgataaatatgtcttgggccttgagggcccacccagttataacattctaggactcagtgagtggtcaagaaaggcagtggggtagccacttgcttctcttgcattcagcctttgcagctactgggctggccgctggtcttrtgagtatgcgcatgcctgtgtaacctcacgcatcactgaatcggggatacaggatgtggcatggctgggagcttcttggaagggcctccacatcctgtgaatgttgggtctttacctgccaactgctgagatgaaccagtaatcctttcggagagcacaggcttttatcaatgaggaggattcaaggct

SEQ ID NO: 221662 - DNA, 629 bp, Homo sapiens
aataatccatacaaaaattgtttatttcattttcttggactttatatgcgatacctttcagggaggctgcctacctcataatagccctctgttgtctgatagctgctttcacgacccatcatgaggggccttcagcagccatgtttgaatttataaccctgtccttctggtgagagttgattggaccagggagaggacacctggcccaggttacgccagagtctctttcccaggaatttgcaattggaactcagaggtagcctgttagtgtttgtcagttgctgttagtgccaagagatcaatctgggggccrtagagtgttgatcttctactgtgtgcatagaaaagccaagaaagctggttttcaaagagagatttaagcagattcataaagagaattagagtctgggggtggagggagattcctgatctggttcccggcagctttccagttcttggttctcgttcctcccgaaacctggccagacatcttgccagagtttcacaagaaacccttgcatcctgtgttaaattccccatccacctcgtctgcttttcctcaccctcttacactggcttgagttagttcctgttgcatgtaatcaaagagtcttaacaaagacagattg

SEQ ID NO: 221663 - DNA, 623 bp, Homo sapiens
attcagtaagccctgtgtgactagtggctatcaatcagacagtgcagattatagaacatttccatcatygcagaaagttctggtggataacactgctagacagtagtatacactgaggatgcagtgatgaccagaacattcccatccctgcccttatggggctgatagctctgctgaacaagttaccccagacttggacctacggaaggacataggacaatgagaaagtatggcaggggatctatccaagaaggggtgcttaggaaaaatgaaaccaaagaaagctccctacccatgaataacagagcacgtttttaaaagaaatcaaacttaattaaaaataaataaataattttatctgcaattggattctacaactaatattaatattgatgtttaaatacttgattgaagaataagcttaaataaaacttattttgttattaaaattcatagtgcaataaatcttaagaggagccaaagcaaaatatacatgcagcatgattccatttatatgaagttctgaaacaggcaaaattaacctatggtaatagaaattagaaccttagttgcttcaaggtggggtgggagggagtggttgggagcagggaccaactacaaaa

SEQ ID NO: 221664 - DNA, 497 bp, Homo sapiens
ctgtcttccttcacactttcaaatgccagccagtttctcccattaggggaatgctgcaagaaactatatgacacagggagcctgagaatcacagcctgcagaggtcatctgccttgcagatgctgacccaagcaggaaacgggcaaggaacggatctgaagacaaataggtgcagcaacagcactcataccccagattgatttccatgccactagaaagccgagcctgcagacagccttgaagaaacaggctggggagaagacaaagcattcaaagctgcaattcctgcccaaccttcaggtagaacattcagtggacagtttggattgtggaactgaggccyggagcaaaggtcaaggctgagggggcagacatggtggtacatttggctaagttggtggacaaactttgaagggagtaaaactccccaagagaaactaaaaaggaacaagaataagcagacctcttttatttatagtactgtctgtaattttcag

SEQ ID NO: 221665 - DNA, 425 bp, Homo sapiens
ccccgcaggagtcaggtttcctgacttcaggatttcacgggaccctttctccccaccccctccccaccttcttcttctcctccttctccttatccttcttctcctcctccttccttctttttttttttggttgttgttgtttagttttttgagacgtggtctcgctatgttgcccaagctggtcttgaacccctgggctcaagtgattcacccgcctcggcctcccaaagtgcagggatcacaggcgtgagtcaccgcgccgggccattccccctcttttggktcaagttttctcatgatcacagggctgcttccaagtgagctcatctccagccataaattcagccattcactgattcaatcaatctttgatttgacaaagtgtccaggccccaagtcgtattcctgaggctctccaggaattc

SEQ ID NO: 221666 - DNA, 326 bp, Homo sapiens
ggagaggaggctagaaagagttatattaaaagkcttagcaataatactaatcttgttggataggagtaatttttcttttcttttctccagtcttcaagaggtggttctattatctccataatatgttaagtataatgacaatcaagtctccagcattgggatggggagtggggacagaagaagacaaatgcacaaagactctttgcacatataaaatttcatattaaaatataaaatatgaagttaataaagattatagcaactacttttacagcacctatttgcctaagttgatccagccactaagtagccaagctgcatttaca

SEQ ID NO: 221667 - DNA, 567 bp, Homo sapiens
gtacaatgataagaataatgatagttacaatagttttataacaaccctgtgagagatacactattactattctcgttttgtagatgaggaaattataaaactgaggcacagagaaaccaattctcttgcttaaagtaatgaattagtaggaagtagaactgaggtttgaattcagttctgcccgacttctttactatatatactcaacactgtatattgtataaactaccttctatatgctgcgcccatattaggtcctcaataaatgttcctgaaattaatgaattaccccagttcaaaagttgcataamcaaaagagagatggaaccaaaactccgtaggttagtttcaaagggttaaaaggaccaagggccatggggactacaggacttaaattactgccccccccattttaaagttctaacctttgtctcctattgcgaccctaggacaattcattttgtctccaaggcttcatccacctcatgtcatattgttactttgacctgtcttgagtctggttctctagatgggtccaaaaaatggctgaaggatgtttagtgacaa

SEQ ID NO: 221668 - DNA, 567 bp, Homo sapiens
gtacaatgataagaataatgatagttacaatagttttataacaaccctgtgagagatacactattactattctcgttttgtagatgaggaaattataaaactgaggcacagagaaaccaattctcttgcttaaagtaatgaattagtaggaagtagaactgaggtttgaattcagttctgcccgacttctttactatatatactcaacactgtatattgtataaactaccttctatatgctgcgcccatattaggtcctcaataaatgttcctgaaattaatgaattaccccagttcaaaagttgcataaccaaaagagagatggaaccaaaactccgtaggttagtttcaaagggttaaaaggascaagggccatggggactacaggacttaaattactgccccccccattttaaagttctaacctttgtctcctattgcgaccctaggacaattcattttgtctccaaggcttcatccacctcatgtcatattgttactttgacctgtcttgagtctggttctctagatgggtccaaaaaatggctgaaggatgtttagtgacaa

SEQ ID NO: 221669 - DNA, 611 bp, Homo sapiens
gtggggtgtaaagatttttaagaaaattcctaattaccaaggtgtaccaaaactggaccatgcaaagataataaactaatccatatctcctctgaaatattactgttttctgccttattagagtaagaaaacaggaaagtgattcccatattaacctctatatcatgactaagcaagtatgatctgagaactrcaggagtgtttccagggttcattttttagaaacttctcactttctttaaaatagctttccatttagttccttgaacttttaaaagctctcaagttgtctttatatgaaatcttgaaactctgtatataaactgataaaagtcctgctttcacctgggatgtagaaagttgcaaaagaaagctgttcccatcctgacagggtgaaagaaaaagcaggataaattacaaaatcgtaacttttcttgagctcattagggagcggaggttacaaagcaaacaggtgaactgaatgccaaagagtgataatccactcagaggagagacaaacacaggaagtaaatacccactgtcagagtacaggagtaaagagggcagagtatggtacaacatgcataaacagatggcgactagcagcagag

SEQ ID NO: 221670 - DNA, 447 bp, Homo sapiens
tggcttttcttatatctgaatatgtgaagaagtccactattgaccaatagtttgaattatgagaaaaagatgagacggctgatttttaaaaagtaattgtaaatgttcccctaacttagattcttgctattgcttgtgggtgaaacttacaagctgcctccaatgtgagccacataatttctccctgccctcaccctagttcctttccttggtgcgatagacagttaggaaacagaatgggtcacagagacctcatttttgaggtaccagactccaaccgctaactggcaagtgtcacctggggcaagttacccascctctttggtggccctcaccttcaccagcaaaatgggaataattgtcgcacctgcctcctggggttcttgtgaggttaaataaaaggcagatgaggcaaagcataccaagagctaagtgcaatacctggcg

SEQ ID NO: 221671 - DNA, 546 bp, Homo sapiens
gttatgctcagaaaggcaactgtttacatacatatttacatttacacaaataacaaaaccaagaagactggaaggaaatacaccaaaatattaacaatggtggaaatagcaactcatttcctgccttgaacttttatggattttccctattatctctacaggcatttcttttgtaataaaaagcataattttacatgattaggtatgagacagtctcagtatttacatcattctctggtactgtagaagttagtataagggctagaccactatgagctggagaggccagggaagttttcatgaagtagcgaggaatctgagcaaggcctgaaaggatattgatatggtttggctctgtgtccccacccatgtctcatcttgaattktaatccctgcgtgttgaggaagggacctggtgggaggtgattgaatcatggggtggtttcccccatgctgttctcattacagtgatccgatggtttaaaagtgtttggcaattcccctcctctacttcttctgccaccatgtaagacatgccttgcttcc

SEQ ID NO: 221672 - DNA, 546 bp, Homo sapiens
gttatgctcagaaaggcaactgtttacatacatatttacatttacacaaataacaaaaccaagaagactggaaggaaatacaccaaaatattaacaatggtggaaatagcaactcatttcctgccttgaacttttatggattttccctattatctctacaggcatttcttttgtaataaaaagcataattttacatgattaggtatgagacagtctcagtatttacatcattctctggtactgtagaagttagtataagggctagaccactatgagctggagaggccagggaagttttcatgaagtagcgaggaatctgagcaaggcctgaaaggatattgatatggtttggctctgtgtccccacccatgtctcatcttgaattttaatccctgcgtgttgaggaagggacctggtgggaggtgattgaatcatggggtggtttcccccatgctgttctcrttacagtgatccgatggtttaaaagtgtttggcaattcccctcctctacttcttctgccaccatgtaagacatgccttgcttcc

SEQ ID NO: 221673 - DNA, 604 bp, Homo sapiens
agtgtgatactagcaaaagagtagacagatcagtgaaacatgatgaagagcctagaaatgacccaggtacatatgtcaactgatctttgacaaaggagcaaaggtaatacaatagagaaaagatagttgtgaacaaatggtgctggaacaactagacatccacatgaaaaaataataataatctagacacagaccttaccaattttcaccaaaatttattcaagatggattatggacctcaatgtaaaatgcaaaactataaaactcttagaagataacattttaaaaaagctagatgaccttgggtatagtgataactttttagatgtaacatcaatgttagtacccatgaacaaaacaattgataagctggacttcattaaaatgaaaaacctctgctctgtgaaagagaagagaaaccacagactgggaaaaatactaataaaagacatatctaataatggactgttatctaaaatatactaagaaccataaacactcaaaaataagaaaatgaacaacctgattaaaaaacagacacctcactaagaagatatgcagatggcaaataagcacaygaaaagatgctcaacatcatatatca

SEQ ID NO: 221674 - DNA, 467 bp, Homo sapiens
cttctccttatgctcacagatctcaataatatgttaatggtgtgatgggtttttattttagctcattttctgttagactggaccaatccctygcctactctaatgtctactgaaacccccacaactgcagaaagtcaagtttcacctctaaaacccggactggctaagataaaaatcaaaatcaaaatttgactacctgagaggtcttatttacataacaatactgttttcctaacccctctctgtgtgtgtgctattaaggattttagagatcgcctattgtaaacaattaatggaaagatcaagttttaaaacacactaacagtttcatggctagccttaaattctcctgactaaattaagagcaaaatctgacccaaacagttctggtagttaaaatgtctgccgtggcctgggcttgcttcctgattagggaacaacaaagaccactctactttgtggcctgg

SEQ ID NO: 221675 - DNA, 457 bp, Homo sapiens
ccaaaacaattggtggagtcagtgaagaaagaaaaaaaaaaaaaagccaagatgattgtctggcattgtgaagccattgattcaattctgcttcattaaagccattagaagcagacagatcctggattctctttaactttgggcatttttaaattgctrtctattctgtcaaggaaatacctttaattgtaaaaccattatcttgtgggatatttagttttacttcggcaaactgcaactatttcttctgctttagaaatatgacattctgtattaaaaatgcaaatgaaaccatgatttttctatcttaaaatgaataacttttttccttcacaatttttcacgaaatgtatttgcaaacttgaaaatgtatgttagcctaaatcagctgacacatagttactatttgaagatttttagacaaataactgagttgctcattattactatatgaaga

SEQ ID NO: 221676 - DNA, 422 bp, Homo sapiens
ggtaaccagaggctggagggtgagagaattaggaagatgttggttaaaggacacaaaatttcatctaggaggaataagttcaagaggtatattgcacatcatggtaactttagttaataataatatattgtatacttgaaaatctctaagggaatagatggtaagtgttgtccccattaaaaaaaaaaggatgtaaggtaatgcatatgttaaatatcttcatttgaccattgcataatgtacacacatattgaaacatcatgttttgtgccatacacatacacacaaatttgtacttgtccattaaaaacactttaaacawatgagtcagtgtcaaaatactttggggcagttgaacttttgagcaccttataggtattaccatgcggctgatggctccactgcaagtatatagagaaaac

SEQ ID NO: 221677 - DNA, 394 bp, Homo sapiens
gtaagaatacaaatacatgcaaatatgctactaatcataataaatgagaacacatcaaatctacccattaagagattctgaaactaggtaaaaggaaaaccagacatttctttccactcaaaatctactttaaacaatgacacagagatgttaaaattaaatgattaaagaaatgtcatgtaaatactaaccaaaaaaaactggtagaggaattaytagaatcagacaagatagtcaaaaaagaaatcaagctaaaaaatcattaaatacaaaaagtagtatacttcatattgataaaatctatcctaaaatgtaggcttcccttagtctcattggtcaaaactgtatcacatgtccacagagaaaccaatcacagtcaaggagaatggaattc

SEQ ID NO: 221678 - DNA, 636 bp, Homo sapiens
cccctgctctaccttacaaaacatccatcttagtctttgtaactgttccattgtattccattgcgctgatggtctcacttatggtacaagtgttttgttggtgggcattaacatgtttccctgaacttttacagtttcartaatataactgtgaatattcatatacatacatctttgaacacttctgcaagagatgtatacgtcttacgttttgatgcttattgctaaattgacttccaaaaactaaattaggtttcactaatttagatgctataccagagtgttttctgtcaaacttttctgattttcgtcaatacaatagaaacactttatctcatcgttttaatatttctttgattttgagtgaagataatgaccattttgaactgacaggcaacctgtagtttatctgtgaactgcctgttcctatcccttggccctttttctttttggttgttttttccttattggtttatgtgaagtccttacccactttctgggacatttcctgagtctcagcctaaaatagtcactgaaccactgaatctcacatcagtgtgttttaatcctctgcctgggattattgttggatatttttctcacttgtttatgggtttcctttctctagaatataaa

SEQ ID NO: 221679 - DNA, 636 bp, Homo sapiens
cccctgctctaccttacaaaacatccatcttagtctttgtaactgttccattgtattccattgcgctgatggtctcacttatggtacaagtgttttgttggtgggcattaacatgtttccctgaacttttacagtttcaataatataactgtgaatattcatatacatacatctttgaacacttctgcaagagatgtatacgtcttacgttttgatgcttattgctaaattgacttccaaaaactaaattaggtttcactaatttagatgctataccagagtgttttctgtcaaacttttctgattttcgtcaatacaatagaaacactttatctcatcgttttaatatttctttgattttgagtgaakataatgaccattttgaactgacaggcaacctgtagtttatctgtgaactgcctgttcctatcccttggccctttttctttttggttgttttttccttattggtttatgtgaagtccttacccactttctgggacatttcctgagtctcagcctaaaatagtcactgaaccactgaatctcacatcagtgtgttttaatcctctgcctgggattattgttggatatttttctcacttgtttatgggtttcctttctctagaatataaa

SEQ ID NO: 221680 - DNA, 615 bp, Homo sapiens
ccatcatcattcatgaaactctgtcacctgcattggtttagcacaaccttatggtaaactacatttccatatgtatcatgtctcttcctagactcraattgttttaattactatagttttattttcttcaacttttaagctcagggattcatgtacaggatgtgcaggtttgttacataggtaaacatgtgccatggtggtttgctgcacagatcaacccagtacctaggtaataagcccagcatccattagctctccctccccctgcatcctccactccaacaggccccagtgtgtgttgtccccatccatgtgttctcatatgatatctttcaatgtttgatgaagctggttctttctcattttttgttttcttttccagtatttttgtatggctgtgattgtattttttttctcagacaagttgcatgatcattttgccaagtctgaaaaaattatcttaaaaattttaaagtaacatgtcatagtatgcatatatatatatgtatgtattttatactttttttgtctttgtgtcatactccagaactaatgagagttagtttgttcagaatgcattgtattaaactcacaatgggccagataccagaagtt

SEQ ID NO: 221681 - DNA, 615 bp, Homo sapiens
ccatcatcattcatgaaactctgtcacctgcattggtttagcacaaccttatggtaaactacatttccatatgtatcatgtctcttcctagactcaaattgttttaattactatagttttattttcttcaacttttaakctcagggattcatgtacaggatgtgcaggtttgttacataggtaaacatgtgccatggtggtttgctgcacagatcaacccagtacctaggtaataagcccagcatccattagctctccctccccctgcatcctccactccaacaggccccagtgtgtgttgtccccatccatgtgttctcatatgatatctttcaatgtttgatgaagctggttctttctcattttttgttttcttttccagtatttttgtatggctgtgattgtattttttttctcagacaagttgcatgatcattttgccaagtctgaaaaaattatcttaaaaattttaaagtaacatgtcatagtatgcatatatatatatgtatgtattttatactttttttgtctttgtgtcatactccagaactaatgagagttagtttgttcagaatgcattgtattaaactcacaatgggccagataccagaagtt

SEQ ID NO: 221682 - DNA, 462 bp, Homo sapiens
cctttgcctagtaggagaaaattgttttatactgtgtgtttccttaggaagttgcacaagtttttattatagtttattaagatacatcaaaattatttatatttgtataagcacctatggtgtgaagtcctcagggaaaacacttgtatctgtatctgtgattggcattgtaattggcacatgatagccatttaattatttgtctatgaaatagctattaacttctattattattgagcaacttaataaataaacatggatatttgattttaatatcattgacacctgtattttttccttgtagggtcctcttatatgttagcctctaagggagagcaagagtctgtgtctstcttgctcactgctttttccccagaacttagcataagtcctggcacatgccaaataaatgtttatatatttatatggtaaaagttaaataagtatttgttgaatgagtga

SEQ ID NO: 221683 - DNA, 542 bp, Homo sapiens
atcctagcaggtatagatactgctaatattataaccctctacttgtagakgaataaattgaggcttaaagcactgaaataatttgtgcaaagtcacacatttgagaagtagatgaatcccagaggtactctgctttgttgcctctgtgctcttattcagaatattctctttgtttctctttccccttcaacttcttaaattatgtcacggtctaactaggaaaacatataacttaaataatataaaacaagggaaatgtaattcaaggaattggcttcatagctagtggagttgttgagaaatgaaactaggatggtgaagcaatccagagattgggaacagcaaggaaccactagcactcctagagctgtagggccaaagggaggagttggtgtttttcaaaaccactctacattaattggaaccacggatgtctgttcagggggagctggagccactgctgctgctggagcagttgctaaagacggagaggaaggggcggtaataccgtggtttcttccttgttttcactgtccagtctt

SEQ ID NO: 221684 - DNA, 576 bp, Homo sapiens
aagagacagaccaaggaagaaacacaaagacagaaatttcacgggcagaagacgtagcccggccattctctgtgatctaagtagcttgaagtaacaacctataatcatggtgaggtatagcacaaacaatactgtaatttgcctttcatcataattttgtgttccagagttcagactgaaaaatggtaactgtttttgttctctgtaatttcaatacaatttagctaaaaagagaagaatctgtaagaatcaagaaggaagctgaagaagctgaactccaaaaaatgaaggcaattcagagagagaaggtaaggaggaggaggattagttcacatttgctgatcaacaattatagtttcgttgtagaagatttttattatagtaactttaaaaatttatccatctttctctctctctctctttctattccccactcttcttttcctcatccagtttttttccttccattttatccttcaaaggaagattcatgcttaggtcttgtgattytagaggaggcactctctttacggagcatagcctgtatttcaggtagaacaaagacaattgttaagt

SEQ ID NO: 221685 - DNA, 581 bp, Homo sapiens
aagctttggaacatatataattgtgaggtttgcaatgtgtacaaaatcaaaactaaagaccataggtcttacagtttaattgaagcccaagtgtataactaccttctctctctctcactcactccctttatatacacacatcagatagaaatctgtaaattggtcamaatacaacaaaataatcaagtgcttgctgacctagaaaatctagagaagatcttcctttaataaatacttgacagacaaaagatcatgtttgagaagtcaatctgttagaaatcttacagcatgtacctttgaaagacatctagtaatctagtagtttacattgatgagtggattttataaatgtatacatatttaagataattgaacagaagcaaatttgcagagaacactgcctggatgtgtctatttatccgtaatatatgctcatttgttacactctggcattcagaatagggacagtatggaacagagaaaataattgaaacgcaggatctttgcattgtgtgatacaaagtacacatagtgtcttgtaacagtatgtgagtaggagtcatgtggaaaatgggccattg

SEQ ID NO: 221686 - DNA, 581 bp, Homo sapiens
aagctttggaacatatataattgtgaggtttgcaatgtgtacaaaatcaaaactaaagaccataggtcttacagtttaattgaagcccaagtgtataactaccttctctctctctcactcactccctttatatacacacatcagatagaaatctgtaaattggtcacaatacaacaaaataatcaagtgcttgctgaccyagaaaatctagagaagatcttcctttaataaatacttgacagacaaaagatcatgtttgagaagtcaatctgttagaaatcttacagcatgtacctttgaaagacatctagtaatctagtagtttacattgatgagtggattttataaatgtatacatatttaagataattgaacagaagcaaatttgcagagaacactgcctggatgtgtctatttatccgtaatatatgctcatttgttacactctggcattcagaatagggacagtatggaacagagaaaataattgaaacgcaggatctttgcattgtgtgatacaaagtacacatagtgtcttgtaacagtatgtgagtaggagtcatgtggaaaatgggccattg

SEQ ID NO: 221687 - DNA, 562 bp, Homo sapiens
tattcgtaaaagatatgtacaagaagttaatatccaaaattcataaagaactcatacaactcaataatgggaaaacaaataactgaattaaaaaataggcaacagacytgaatggacatttcttcaaagaagacagaaaaattatcaataggtatatgaactggtcctcattattattttatttatgtatttatttattttgagatggagttttgctcttgttgcccaggctacagtgcaatggcgtgatcttggctcactgcaacctccgcctcccaggttcaagcgattcttctgcctcagcctcctgagtagctgggattacaggcgcctaccaccacgcccagctaattttgtatttttagtagaaacggtgtttcaccatgttggccaggctggtcttgaactcctgacctcaggtgatccacctgcctcagcctcccaaagtgctgggattacaggcatgagccaccacacccggccctcactattaataatcatcaagaaaatgcaaatcaaaaccactatgagatacaacgctggatggctattttcaaaaagt

SEQ ID NO: 221688 - DNA, 565 bp, Homo sapiens
acaaatggctgtggagctaactgtcatggtgtttggagaatcccaaaaggccagggattttactaaagcattgagagtgttccttccatctgagacatctgcttgcagaaaaggaaacagtcaggtgacaaggggctattttctccagtggccacaggattgctacagctaggatgagggaggaatatgatgtctcttggtggggtgtggtgggggagattcccctcccctctataacatctttttatgtgcaatttaccaactgtcartatgacacagagtgtcaatagctaatgactattatatatacctatctcctgggagtccttttatcccatctgtttaggtgagttgattccatttttcactttggaaatgtgagtggcatcaactttatctgtagcagagggaatttgggttacacctttattctgtgacactctagttcaggggttgacagtcttcctctgtaaagagccagatagcagatattgtaggcttggctgtccctagacagtctctgtggtatattacttgttcatttatgatggttaaacatgtcaaa

SEQ ID NO: 221689 - DNA, 603 bp, Homo sapiens
ttgtttcatccagtccaagaaggctaagtggagtctatcactgttgaccccgactgagcttccattagcatggcaattcttaagttgccacatcttttgatcttttaaaaagggtcctgggtttttaaccagttgtcaggaatgactgaaattattggtaaaaaaaaaaaaaaaaaatctggctttcgtaactttgttggtagctgcagacaaaggaaaggttttcaggaattcatggggccagtataacttaatacattttatatatgttttggagaaaatayacaactactgaagaacaagtgagtagtaaagcagattttacgacagtccaagggctaatgtgaatcattcatgactagatttgctcttagttattcaacgaagagtgtctattggttgtggacagtcatgtctattatctgatgtaaaacttaccttcaggagatttttaatataagggagaagagagggccatacaaatggcaaaaaaaggagaaacatgcataaacatatgcagatacatatatgcgcacatagaaatggtggtaaaaatatccagctgttacaagcattatacaaggaatgggagtgagtggagtt

SEQ ID NO: 221690 - DNA, 536 bp, Homo sapiens
ctcattctctggtgaaattttccatattttcgtctgttgtttccatctctctctttcttttcttgaacattatttttaaagttcctatctactaattctaatagttttatcatgtggtctggttctgctgtcttttttgtctctttattatcatgcacattttcttgtacttttgtatgtctatatattgttaattgttatgccagacattgtgmataaaagtggagccaccaaaccatgttatattccaccagagaatgtgtctttttttttccttcttttagacagactgggtgagaagctatgcaccttaatccaatcaggaattgaattgaggtggggcttggttacagttttagtaagacttcatagatctttggttcatccctgtcccttgggtatacccctctcagacctttgatggagagtctggtgggtatcaatttcctcaatcatgaaagattgtgagaaatgtatctctacccttcagaggttttcaaacaagctcaccagtctcctggccccggaaaatttca

SEQ ID NO: 221691 - DNA, 421 bp, Homo sapiens
gactgtacctaaagcagttcctaattactggacattctcagatctgctagagctacatgtccaattacgagaatatactggaaaaagccctggattagaaatgagaggatgtaggttttagtaccaggtcagccaccttgttaatgcaaatttgagtaaattgttacttcttttaggccttgtttttgctgttttgtttttctgacagtmtggtctctgtggtccaggctggagtgcagaggcacaatatcaggtccctgcagtctctacctcccaggatcaagccattttcatgcctcatcctcctgagtagctgggattacaggcatgtgccaccacaccctcgaactcctgacctcaagtgatctgcttgcctcagcctcccaaagtgctgggattagaggtgtgagccactgtgcct

SEQ ID NO: 221692 - DNA, 420 bp, Homo sapiens
gactgtacctaaagcagttcctaattactggacattctcagatctgctagagctacatgtccaattacgagaatatactggaaaaagccctggattagaaatgagaggatgtaggttttagtaccaggtcagccaccttgttaatgcaaatttgagtaaattgttacttcttttaggccttgtttttgctgttttgtttttctgacagtatkgtctctgtggtccaggctggagtgcagaggcacaatatcaggtccctgcagtctctacctcccaggatcaagccattttcatgcctcatcctcctgagtagctgggattacaggcatgtgccaccacaccctcgaactcctgacctcaagtgatctgcttgcctcagcctcccaaagtgctgggattagaggtgtgagccactgtgcc

SEQ ID NO: 221693 - DNA, 420 bp, Homo sapiens
gactgtacctaaagcagttcctaattactggacattctcagatctgctagagctacatgtccaattacgagaatatactggaaaaagccctggattagaaatgagaggatgtaggttttagtaccaggtcagccaccttgttaatgcaaatttgagtaaattgttacttcttttaggccttgtttttgctgttttgtttttctgacagtatggtctctgtggtccaggctggagtgcagaggcacaatatcaggtccctgcagtctctrcctcccaggatcaagccattttcatgcctcatcctcctgagtagctgggattacaggcatgtgccaccacaccctcgaactcctgacctcaagtgatctgcttgcctcagcctcccaaagtgctgggattagaggtgtgagccactgtgcc

SEQ ID NO: 221694 - DNA, 579 bp, Homo sapiens
ttgacttcacaaacgcatttaacaagaggatactccatatttgtaacgattttcttctaaaacatacatggagattattgactcctggctcctcatttaccaccttttcccactgtctgcattggtaactcttttgaagacacccctttaattgctatttgaacctgggcctcactctcttgtgttatcagtctgcacacactccctggacaggctcactggcttctgtgactctgtaagcaggtaagtatcaaatctgaagatatgtgggcgaatgtgaaaaatatggcctgaattttaagtgagatttggaatgtgggatacagaagataatgaagcttaatttacaaaaatcaaactttgttagttatcccttctctccattgagctttgcttatcctctctacttctggtatttcaatggtgtcaccacctagccagtcgctcaactttgaaatcatcaaagttgatttgataaatcatctttatcatttgtaaatcatcagacttacccttctttgytgctatttctctcaatgactgatttctaatctattttgcttaccaccatcacaatta

SEQ ID NO: 221695 - DNA, 464 bp, Homo sapiens
aaacaaaactcattaaattatatcaataacagaccaaactgtacattaaagatgttccatattataaggtgttcattcagaggagaaaaaagatggaagaaaaaaaaaagaaacaaggggaagatgaagaggagaaatagtaacaacagtagctctggttgctgtagttttttgtgcctcagcacttcagacaagtgaaacctgcaggcaactattagctcatgtattaatctaaactctattaggaagccaccagaagctgatctgggtattttacctacaattactggataatttaaagagacaatgggaaaacacttggttatttagatcaagagktgtagaaatttaaattctgttgaaaactgaagttgatattaacaaaggttgaccaaaaattggtgattactaaaaagcaaacatttgtatcagagttgggtaactacagtaatgctcaatggcca

SEQ ID NO: 221696 - DNA, 579 bp, Homo sapiens
tgaataaataaaaacacaaaccaatgtacattgtataatacggatctatattttactcactgcgctctgggccacacatgatagaaccaactctgaaggaaaattgtgcccatataccatggccatgttttggtctatgyttttatgctagaaagtccttccatttctttcttttttttttttttaacttttagttccaggggtatatgtacaggtttgttctttaaataaattgtgtgtgtcacgagagtttggtgtacacattatttcatcacctatttcttaaaatttagtctgttcaaaaattgttttaactatttgaattattactaaatgcctataagttcagtgacatatcactgctgaaagtttagacaatttgcataactctttaagacaagccaagaatgatacatcatgcctatgaaaaaaaaaagcatgtgattgctttatgaatatcatggtcccaaaatatggcagttgttcagaaatatggtagcatgtacatgtatatacatgtgcatatatgcacatctgtgttatataatgcttaaagaaaaggaaaagaggattcaattg

SEQ ID NO: 221697 - DNA, 412 bp, Homo sapiens
cccatgtggttgaattatgtttataaagttgacatacagctttcagtttcttaagtgaacacttacagctgttcatcataacctaatgtttctcttactttgtgagtcttttaaaattaaactcagaaattagacttctatgaaaacaaatactgcttaaagaaataaatatataattatattaaatttaaatgatatagtataattttataattaaaattatattatatactaaattttgacttgttaaaaaaaatgartagtaataataaggcacccaaggtaaatgtgaacataaacgaacttttcttgagatcaaggtctctccccagcaaactccacaactattcaaaaagctgaaaagataaatataaggaaatctttcactatctttaaaagatgctcagcttgc

SEQ ID NO: 221698 - DNA, 572 bp, Homo sapiens
ttcactgcattgccctcgtcagggccatggtctagtctaggacactaccactgataaaccaaaagctgtaattgaacttataactacacatacttttcctcccgccacaaaagtattcctataaatgagagcgaatagactttcatgctttgaagatggtgggtaatcttaaatagcaataacagyatgcccatgatcaatgtcaaatagaaacactgtgtaactgcctcacatctgactctcaaacaggtacaagtaattgtactcatacgttagcacatctttgaaaagcacttttagatggtggagatggagaccacctggcaagggaagcccatatcctgaaattaatcaaatacagctagactgcaaatatatgctttctaataattgtaaacacatgtactctccttgtttttaggtgtattttttaaaaagaaaggtctttcaatatttattgaataaagactgcttaaggggcattttagtagataaccacagcataagttagggccttccaactgcacctgacttcatgctgccctcttcttcctcttcttacatagctgttc

SEQ ID NO: 221699 - DNA, 572 bp, Homo sapiens
ttcactgcattgccctcgtcagggccatggtctagtctaggacactaccactgataaaccaaaagctgtaattgaacttataactacacatacttttcctcccgccacaaaagtattcctataaatgagagcgaatagactttcatgctttgaagatggtgggtaatcttaaatagcaataacagtatgcccatgatcaatgtcaaatagaaacactgtgtaactgcctcacatctgactctcaaacaggtacaagtaattgtactcatacgttagcacatctttgaaaagcacttttagatggtggagatggagaccacctggcaagggaagcccatatcctgaaattaatcaaatacagctagactgcaaatatatgctttctaataattgtaaacacakgtactctccttgtttttaggtgtattttttaaaaagaaaggtctttcaatatttattgaataaagactgcttaaggggcattttagtagataaccacagcataagttagggccttccaactgcacctgacttcatgctgccctcttcttcctcttcttacatagctgttc

SEQ ID NO: 221700 - DNA, 559 bp, Homo sapiens
atatatatatatatatggcattacatggagacatatatatatatatatgtctaacattcaattttatatgtccataaatttaaaagaaggaattctgcccacttaacatttgcatataaaatgctttgtggtatgttttgctttgggtattgcatcagtccattcttgtatttctacaaagaaatacctgaggctgggtaatttataaagaaaaaaattttaattggctcatggctttgtaatctgcacaggaaacatggcactggcatctgctcgggttgtggtgaggacctcaggaagcttccaaccatgagagaaggcaaaggatgaactgacmtctcacacggcaggaatggaagcaagaatgagaaggtggaggcacctcacacttttaaacaatcgaaatcatgagaactcactcctatcatgaggacagcattaagccatgggagattcacccctgttacccaaacacctcctaccaggccccacctccaacattggggattacatttcaatctgagattttggtggggataaatatccaaactacatgatt

SEQ ID NO: 221701 - DNA, 540 bp, Homo sapiens
ttgttggcctttatcctcagggcagtggaacatcagtgaaaggatttcagtagggaagtgacataatctgcctttcaaagaacactgtggaaaatggtgggaggtggcaaaagaggaagtagggagacccgtgagggggctgctgccactggccacatgagacgggactgtggctttgacccggatggttgtggtggagataaagagagatgggcttgtaccagatatattttgaaatctagccgacagaacttaacactgggttagactgaggttagatagaggagaacagacatgtgagtccgggatggtatgcagtaattaggggcgctagtacccaagtgaatggcagtgcctcttgcagagacaagaaratatggggaggatcagatttggactgagtgaagggcttcaaaattcctgttttcatgtctgaattggagatgtctataagacatctaggtggaaatgctgatcactgaaactacttaaagggagcacatagacagacaccataagagaaaccaggacccaaccttg

SEQ ID NO: 221702 - DNA, 238 bp, Homo sapiens
gtgtgggacaaccccctccccamcttgctccctctcttgccatgtgacacacctgctccccctttgctttcttcaatgagtaaaagcttccttaggcttcagaagctaagaagatgctgatgccatgcttgtactgactgcaggaccatgagccaaataaacctcttttctttataaattcttcagtctcaggtattcctttatagcaatgtaaaatggactaaaacaaatgttattg

SEQ ID NO: 221703 - DNA, 238 bp, Homo sapiens
gtgtgggacaaccccctccccaacttgctccctctcttgccatgtgacacacctgctccccctttgctttcttcaatgagtaaaagcttccttaggcttcagaagctaagaagatgctgatgccaygcttgtactgactgcaggaccatgagccaaataaacctcttttctttataaattcttcagtctcaggtattcctttatagcaatgtaaaatggactaaaacaaatgttattg

SEQ ID NO: 221704 - DNA, 584 bp, Homo sapiens
cagatctgttggttaaaaagagtgtgggacaaccccctccccaacttgctccctctcttgccatgtgacacacctgctccccctttgctttcttcaatgagtaaaagcttccttaggcttcagaagctaagaagatgctgatgccatgcttgtactgactgcaggaccatgagccaaataaacctcttttctttataaattmttcagtctcaggtattcctttatagcaatgtaaaatggactaaaacaaatgttattggtgatttatgcaatggccattttaagggtgtggtggggggaagccatatttaaatatattggaggtgagaaagacatgaggaaaagatgaagattccttacggtctctcaagtatggcagtcatgctcctgccttgtggcccgtatgcatgccatctcctctgcctggaatgctcttttcccagatatttatatttctttcccccacactcccttcaaatctttgaccaaatatcaccttttcagtgaggcctttcctgactagctattgaaaattccacccaggggaattgagagatatcggtcaaaaggtacaatgtttcagc

SEQ ID NO: 221705 - DNA, 413 bp, Homo sapiens
catgagccaaataaacctcttttctttataaattcytcagtctcaggtattcctttatagcaatgtaaaatggactaaaacaaatgttattggtgatttatgcaatggccattttaagggtgtggtggggggaagccatatttaaatatattggaggtgagaaagacatgaggaaaagatgaagattccttacggtctctcaagtatggcagtcatgctcctgccttgtggcccgtatgcatgccatctcctctgcctggaatgctcttttcccagatatttatatttctttcccccacactcccttcaaatctttgaccaaatatcaccttttcagtgaggcctttcctgactagctattgaaaattccacccaggggaattgagagatatcggtcaaaaggtacaatgttt

SEQ ID NO: 221706 - DNA, 551 bp, Homo sapiens
cccctccccaacttgctccctctcttgccatgtgacacacctgctccccctttgctttcttcaatgagtaaaagcttccttaggcttcagaagctaagaagatgctgatgccatgcttgtactgactgcaggaccatgagccaaataaacctcttttctttataaattcttcagtctcaggtattcctttatagcaatgtaaaatggactaaaacaaatgttattggtgatttatgcaatggycattttaagggtgtggtggggggaagccatatttaaatatattggaggtgagaaagacatgaggaaaagatgaagattccttacggtctctcaagtatggcagtcatgctcctgccttgtggcccgtatgcatgccatctcctctgcctggaatgctcttttcccagatatttatatttctttcccccacactcccttcaaatctttgaccaaatatcaccttttcagtgaggcctttcctgactagctattgaaaattccacccaggggaattgagagatatcggtcaaaaggtacaatgtttcagc

SEQ ID NO: 221707 - DNA, 413 bp, Homo sapiens
catgagccaaataaacctcttttctttataaattcttcagtctcaggtattcctttatagcaatgtaaaatggactaaaacaaatgttattggtgatttatgcaatggccattttaagggtgtggtggggggaagccatatttaaatatattrgaggtgagaaagacatgaggaaaagatgaagattccttacggtctctcaagtatggcagtcatgctcctgccttgtggcccgtatgcatgccatctcctctgcctggaatgctcttttcccagatatttatatttctttcccccacactcccttcaaatctttgaccaaatatcaccttttcagtgaggcctttcctgactagctattgaaaattccacccaggggaattgagagatatcggtcaaaaggtacaatgttt

SEQ ID NO: 221708 - DNA, 302 bp, Homo sapiens
aaatatattggaggtgagaaagacatgaggaaaagatgaagattccttacggtctctcaagtatggyagtcatgctcctgccttgtggcccgtatgcatgccatctcctctgcctggaatgctcttttcccagatatttatatttctttcccccacactcccttcaaatctttgaccaaatatcaccttttcagtgaggcctttcctgactagctattgaaaattccacccaggggaattgagagatatcggtcaaaaggtacaatgtttcagctaaacaggatgaataagttttggagatc

SEQ ID NO: 221709 - DNA, 302 bp, Homo sapiens
aaatatattggaggtgagaaagacatgaggaaaagatgaagattccttacggtctctcaagtatggcagtcatgctcctgccttgtggcccgtatrcatgccatctcctctgcctggaatgctcttttcccagatatttatatttctttcccccacactcccttcaaatctttgaccaaatatcaccttttcagtgaggcctttcctgactagctattgaaaattccacccaggggaattgagagatatcggtcaaaaggtacaatgtttcagctaaacaggatgaataagttttggagatc

SEQ ID NO: 221710 - DNA, 302 bp, Homo sapiens
aaatatattggaggtgagaaagacatgaggaaaagatgaagattccttacggtctctcaagtatggcagtcatgctcctgccttgtggcccgtatgcatgccatctcctctgcctggaatgctcttttcccagatatttatrtttctttcccccacactcccttcaaatctttgaccaaatatcaccttttcagtgaggcctttcctgactagctattgaaaattccacccaggggaattgagagatatcggtcaaaaggtacaatgtttcagctaaacaggatgaataagttttggagatc

SEQ ID NO: 221711 - DNA, 583 bp, Homo sapiens
aatatgttctataccaggaatttgaaatggggactaaatgcaatttgtgaatgaagcaccttaatttgctaaactaggagctatgtcagattttaaaaaataaagttttgctgtcagttcaggctagtataagttattttctgtaactcaaatgataaaagcaaaagtttaaaacattctctggatcaaatctaattttgaattcctggcttacagagaaagcacttgtttatgtctggttgccatttacccagctccctgctctcccatctgtcagaatgctgacccagtttgggattagaatagggatttaccacacgcacaagtttatacatgcatgcacacatgtacatgtgaatttgtacgtatttcacttaacaaattggattttagcattgatcttctgctaaatggaattttaaaaaaattatctatgattactttgcttttagagttggattacagattacattgaaaaaaatagaaaacctccagaaacgctttcctttctaatacatttcagctattttgcytctggtctctttcctgttcctcccctgacccattcttatttccatcacct

SEQ ID NO: 221712 - DNA, 631 bp, Homo sapiens
ggaagccattatcctaaggagtaaatacaaaaacagaaaaccaaatattgcatgttctcatttatattaataagtgggagctaaacactaagtactcatggacatatatgtggccaacaatagacactggggactactatgaggggagggacggagggggcaagggttgaaaactaactcttgggcattatgctcattagctgggtgattagatcaatcataccccaaatctccgcatcaagcaatacactcatgtaataaacttgcacatgtacccactgaatctaaaataaaagttgaaattataaaaaaaaaaaagttctattggggccatctatcttttctgcagagttaagtagctgcaatagagaccatataactcacaaagckgaagatattatctgaccctttatagaagtgtttgccaacctctggcttagatgcaacaactagtgtggaataatgtcagcaagtcaaccacaatttccattctagcacccaacacttttcctttctaacatacttcacatttatattatctttttgaacatctgcctcccttgctaatttaagttccctgagggcagtgaatagtgtcattttttattcattgctgatgccacatccccag

SEQ ID NO: 221713 - DNA, 547 bp, Homo sapiens
aaggaagaaaggagcatgggatttgaagtcattgagtcagtattgttgcaagatttagagcattatgtggggagagaaagagtgttagtcttgtgtcctagcacccaatccacagacagatctgcatcaaaasaaggcatttcacatcttctaagataagcccaaattaaaacaaaaccaaacaaaccccacatctactcttcccactccaccatcccactcccaccctgtcctggtaaaataaatgaatgcatgaaataaacaagtaagtcctggtcaatcttacttatatattttatcttatgaatactgtagtatgccaaattagctgctaattctttacatgggatttgaaaaaaatgctgcagggatttttaaatattcaatgaacttaaagaacaaatggaatataatagattcaaaatgaaatgattgcctagaagtatgctctgattcctaaaataagatttttttttaaagggtaaagtttttttggtcttttttttttttccagaatgccatataactaaaatctgagtaaaaggaa

SEQ ID NO: 221714 - DNA, 415 bp, Homo sapiens
tgaattctgttcctttacctggagaaatgcacacctacaaaaccaatgtgaggaatctgtacactcataaagaatggtcaggtagactagttgtcttaatacttggctagcccagtaacacaaagaatgaggcaatcataaacaattggtttgggktttttattgttgctaccattactattattactaatgattaagtcttcaggagatgatcatatctcatgccctttttagcagattttgttatttcattgtattgcatttaaacatccaattgttctagccttatttgttaatcacaggtcaataacctgggagcaagtaccaggaaatgacaagttatgagagaagctgtgctgctatcataatcttctatgtaagtggcagcagactatatggtatgttctaatgttag

SEQ ID NO: 221715 - DNA, 580 bp, Homo sapiens
aaaggatgctacttgtgtataattctcaacaaatctcttgtagtactcagattatctaagacattacacaaagatttacttggttagaatatcaacaacacttctatgtgccaaatggctttagttaaatcttgcttcaggagtatttgaagcatatatttttcaactacataatgcaataaatstaaaggatctgacaggaggaatacaggatgtttcgcaatgcacaaaggcaaagcatcacactcagcttggggaaagaaaggcttctttttttttttattttttgagatgaagtgtcactcttgttgcccaggctggaacacagtggtacacccttggctcactgcaacctccatctcttgggttcatgcgattctcctgcctcaccttcctgagtagctgggattacaggcacctaccaccatggctggctaatttttctcagggaacataatgcaaaagctgacacacaaaggatacatgagaatcatgtgaggtgaggaaaagtgatcccaggcataggaatcaatatctgtgacaaagacctgaaagaatttcaatgtagaaagagtcaagc

SEQ ID NO: 221716 - DNA, 451 bp, Homo sapiens
ttgaccttagatctggaaagtcaatgaaaattagaagtagatttccatcttagggtctgaatcacacaataaaggaataaaggaatcacacaataaaggaataaaggaatcacacaataaaggaataaagttgtaagaaagcttaaataaatgaaaactgtgaaaaatgagaaacaccaggtaggtatgaataggytattgaataaagctgtcagcaactgcgccaggagctcagcctcgtatggttgataatgtgggctatgaaggaaacatccctattgtgtgaatgtgaagtagaagggcacccgagtaaaggaaattgcaaagtggagctacagaaaaatttatcacctgtttatgtgccagtccacagtcacataaacaggtagtaagataacatccaatttaatattacggggattgttacaaagtgaaaaaaatggtactgcaa

SEQ ID NO: 221717 - DNA, 451 bp, Homo sapiens
ttgaccttagatctggaaagtcaatgaaaattagaagtagatttccatcttagggtctgaatcacacaataaaggaataaaggaatcacacaataaaggaataaaggaatcacacaataaaggaataaagttgtaagaaagcttaaataaatgaaaactgtgaaaaatgagaaacaccaggtaggtatgaataggttattgaataaagctgtcagcaactgcgccaggagctcagcctcgtatggwtgataatgtgggctatgaaggaaacatccctattgtgtgaatgtgaagtagaagggcacccgagtaaaggaaattgcaaagtggagctacagaaaaatttatcacctgtttatgtgccagtccacagtcacataaacaggtagtaagataacatccaatttaatattacggggattgttacaaagtgaaaaaaatggtactgcaa

SEQ ID NO: 221718 - DNA, 514 bp, Homo sapiens
ttgtcctcctttttgttccttcaacttgccaagacatcttgtgtcttgtagtgtttgcacttctgtcctcccttgcatagaacatcattcttcgcctctcttggcctatgtaatcctctgcataagtgagttcacagcttaagcccattcttcaaggaaacattgctgactcctccccagttcagaggaagtgagcttcctggtagacccacctaggacaaagttgcaattaattaattacagaattgtctgttttctcacttaagtattgtcattacagggacaagtttcatgtctctcttactcacttagcactgcctttgtctgggtgtttaataagtatttactgcatgactgagtgaatgtaatggctatattgtatctgaggaatttcagccacatgcttacgttrtgtgtcctgttggaacgtgggtttgttggtagttatgtctgggaatatcaattggtgttggtgttgactttttaatgatattttctggaaaatgatatgaca

SEQ ID NO: 221719 - DNA, 155 bp, Homo sapiens
actggaaattccatctctaatagatagctgccaacttgtttatgaaggctggctctagataaaataggcactgtaacagagaatgttcaatgatctcagctaygctactgataagcatgagaagagttgagtcagagacagggtaattaaagctt

SEQ ID NO: 221720 - DNA, 472 bp, Homo sapiens
agcagccagcagaggtcagagagagacagctcacgttccgggtaagttgcaggtcgatttcagggccgactcatccagattactcattcttcatttcaggcaattgtatgactgctaaatactgctgctgggggcatctggggttgggaagtcatttctgccaggtstttgacccctgaaagcgtcgttgcgtctcgcgccgcgggtaggcagggcgggatttctaggaggaccggcagaggcgcgcataggtgcgtggtgctgggcccgggcgccgcggcaccggtgtaggagcgcgcatctccagagtttcttccatctgggcgacgtctcggtgcctgcggcgggaacggcgctttgcttccctgaggagcttctagagagctacggtggcccccgtgtgggaggcggggggcgtggcggcgtcggggcgtcgctgtcccctcctcggtagctctcctccctccccttt

SEQ ID NO: 221721 - DNA, 584 bp, Homo sapiens
gtagcagcttctctctgtcctcaacagaggtacacatggtccgcccaggatactctcatcgggtgtctctgcccacaagccctrggattttggccacctccccatatcctgagactgacagtgctttttttgagccttcccatctgacatctgctgctgatgaaggtaattttagtaggtgacctccctcattcctctctgttcacacccttgcttcgccttgctctaaagcctgccttgttgtcttccccatgggacaatgcattgcctcatctaatattgtcagcagcccagccatctgggcggtcacaacaggtgaaatcaaatattggctttctccttagactgcagagaattgttatctttttagcttaatgtagttgataatcagtgccatgtgccatctttaagctggcgtctgccttcaggaacttagagctcattaaattgtctacaggggagagcatcggaagcactctcaagtcagtgtggaggttggaggtgtttccagacagccacggggtctgcatttcacaccagtacctagtaggtggtgaagtcacttcacttgttatatttacctg

SEQ ID NO: 221722 - DNA, 576 bp, Homo sapiens
aggggtaattacagaggagatatatgtgaaacacataacatacagctttctcatatttgcccaacttgccttcatagccactgtatgaagaagtagaagacccagactcttgctttatgttggtatcaaaagtcatttcagagtcaggctgatcactcccaagtaacccactgacttctttactccagctctctgtctgctgttgactcagaatgttacacttcattttctccattgctgatataatcatatctgcaacataaaagtgggcattttcctgcagaaaaagaaatcaattaaaatacaagcataatcaactttttcatggagggtatattagatttgaaaaatcaatatgctctatttaagtggaattaatgcatatcagtataaatattcatttaactgagttatcataggtcactctatgacttatagcacacattgtccagagacatagattcgrcttactataatcaacggacaactcaaattggatttcttgttatacaaaaccttaggttgggggaagcctaatgccagacatcattcatcaatcacagaaaactttccagc

SEQ ID NO: 221723 - DNA, 382 bp, Homo sapiens
taaataacagttgacataacagacattgtatactatttcaaayaataatttccataatagctataagataggttaccattattattcaaattttagagataaggaaactgaattatggttttatttagcactggagaaagcacagacagtaagtagtagatatttatttaaaacaatattcatattttatctagagcccacagtttgaacataatatcataaaggattaagttggaaaaattaagaactattagaaggtgatgacagtcctaggtttacatcatattcttataatttattaatttttcttccatatttatgtgtattttctgaacccgtttccttatcttaaaaatggaagtgttaatactagtcttgtaag

SEQ ID NO: 221724 - DNA, 382 bp, Homo sapiens
taaataacagttgacataacagacattgtatactatttcaaacaataatttccataatagctataagataggttaccattattattcaaattttagagataaggaaactgaattatggttttatttagcactggagaaagcacagacagtaagtagtagatatttatktaaaacaatattcatattttatctagagcccacagtttgaacataatatcataaaggattaagttggaaaaattaagaactattagaaggtgatgacagtcctaggtttacatcatattcttataatttattaatttttcttccatatttatgtgtattttctgaacccgtttccttatcttaaaaatggaagtgttaatactagtcttgtaag

SEQ ID NO: 221725 - DNA, 382 bp, Homo sapiens
taaataacagttgacataacagacattgtatactatttcaaacaataatttccataatagctataagataggttaccattattattcaaattttagagataaggaaactgaattatggttttatttagcactggagaaagcacagacagtaagtagtagatatttatttaaaacaatattcatatkttatctagagcccacagtttgaacataatatcataaaggattaagttggaaaaattaagaactattagaaggtgatgacagtcctaggtttacatcatattcttataatttattaatttttcttccatatttatgtgtattttctgaacccgtttccttatcttaaaaatggaagtgttaatactagtcttgtaag

SEQ ID NO: 221726 - DNA, 382 bp, Homo sapiens
taaataacagttgacataacagacattgtatactatttcaaacaataatttccataatagctataagataggttaccattattattcaaattttagagataaggaaactgaattatggttttatttagcactggagaaagcacagacagtaagtagtagatatttatttaaaacaatattcatattttatctagagcccacagtttgaacataatatcataaaggattaagttggaaaaattaagaactattagaaggtgatgacagtcmtaggtttacatcatattcttataatttattaatttttcttccatatttatgtgtattttctgaacccgtttccttatcttaaaaatggaagtgttaatactagtcttgtaag

SEQ ID NO: 221727 - DNA, 487 bp, Homo sapiens
aaattaagaactattagaaggtgatgacagtcctaggtttacatcatattcttataatttattaatttttcttccatatttatgtgtattttctgaacccgtttccttatcttaaaaatggaagtgttaatactagtcttgtaagagttattctatctttcccacaattttatcatggacagaaaaaaaaactgatagctacatataaacgcatgaaaaatgaaatgatattcattgttcaaatattttatcacatatatgtacacctcttgttaaactttattttttcacagaaaatgatacaagttattattaaatttgttgcttaatcaatgtcttataagcttaayttataagtttgtagttggccattttattctctattttattgagaattattcactaaccatgcagtagtatttttagtacctttctttttgatcatatgaatgattttttaaaaagtgaagatagagttttgtggatt

SEQ ID NO: 221728 - DNA, 487 bp, Homo sapiens
aaattaagaactattagaaggtgatgacagtcctaggtttacatcatattcttataatttattaatttttcttccatatttatgtgtattttctgaacccgtttccttatcttaaaaatggaagtgttaatactagtcttgtaagagttattctatctttcccacaattttatcatggacagaaaaaaaaactgatagctacatataaacgcatgaaaaatgaaatgatattcattgttcaaatattttatcacatatatgtacacctcttgttaaactttattttttcacagaaaatgatacaagttattattaaatttgttgcttaatcaatgtcttataagcttaatktataagtttgtagttggccattttattctctattttattgagaattattcactaaccatgcagtagtatttttagtacctttctttttgatcatatgaatgattttttaaaaagtgaagatagagttttgtggatt

SEQ ID NO: 221729 - DNA, 487 bp, Homo sapiens
aaattaagaactattagaaggtgatgacagtcctaggtttacatcatattcttataatttattaatttttcttccatatttatgtgtattttctgaacccgtttccttatcttaaaaatggaagtgttaatactagtcttgtaagagttattctatctttcccacaattttatcatggacagaaaaaaaaactgatagctacatataaacgcatgaaaaatgaaatgatattcattgttcaaatattttatcacatatatgtacacctcttgttaaactttattttttcacagaaaatgatacaagttattattaaatttgttgcttaatcaatgtcttataagcttaatttataagtttgtagttggccattttattctctattttattgagaattattcactaaccatgcagtagtattkttagtacctttctttttgatcatatgaatgattttttaaaaagtgaagatagagttttgtggatt

SEQ ID NO: 221730 - DNA, 331 bp, Homo sapiens
ggtgcatgtcagccatggcaacaacaggaagttcttcccatttccctgaagtgtataaacttcaggacactcaggatgctcaaatgctttcaactggcaatcttcataaacaattaaagrttaactctggagagagtaaggggagcaggacagatttattttgctcaggaaaaaaaaaaggaatacaatatttctttcacctgcggatattttaaaactataaattacccttgaatttcagtcagttatgaactgagattaaatcttacttagaatattgttctacttcaggaaacacgcactgtgattctctaatgagaaaaagcaatat

SEQ ID NO: 221731 - DNA, 331 bp, Homo sapiens
ggtgcatgtcagccatggcaacaacaggaagttcttcccatttccctgaagtgtataaacttcaggacactcaggatgctcaaatgctttcaactggcaatcttcataaacaattaaaggttaactctggagagagtaaggggagcrggacagatttattttgctcaggaaaaaaaaaaggaatacaatatttctttcacctgcggatattttaaaactataaattacccttgaatttcagtcagttatgaactgagattaaatcttacttagaatattgttctacttcaggaaacacgcactgtgattctctaatgagaaaaagcaatat

SEQ ID NO: 221732 - DNA, 448 bp, Homo sapiens
taagaaactactattatatacaggaactgaagtcatcatttggggtacactagagtaaatagagaaacaaaaataggaaaaagataaaagaaaaaacaaaatatatgaaggtctccatctttgtgtgttttatattctggataggagagayagattataaccaaaaaagtacaatcagttagaaaatgttatagaggctaaaatatgataaatgttagtgaaagaataaacaaatagatcaacaaaatagaaaagaaagagaaagactagaatagaaagcccaggaataaacccaaataaatacaattgatcttaaatcaacttaacttagacaaaggagtaaaggtcatacaatgcaggaaagacagtatttccaacaaatggtgctggagcttctgtgtatccacatgcaaaataatgaaatctagacacagaccttacatccttc

SEQ ID NO: 221733 - DNA, 448 bp, Homo sapiens
taagaaactactattatatacaggaactgaagtcatcatttggggtacactagagtaaatagagaaacaaaaataggaaaaagataaaagaaaaaacaaaatatatgaaggtctccatctttgtgtgttttatattctggataggagagacrgattataaccaaaaaagtacaatcagttagaaaatgttatagaggctaaaatatgataaatgttagtgaaagaataaacaaatagatcaacaaaatagaaaagaaagagaaagactagaatagaaagcccaggaataaacccaaataaatacaattgatcttaaatcaacttaacttagacaaaggagtaaaggtcatacaatgcaggaaagacagtatttccaacaaatggtgctggagcttctgtgtatccacatgcaaaataatgaaatctagacacagaccttacatccttc

SEQ ID NO: 221734 - DNA, 463 bp, Homo sapiens
ctgaattagtcaatactgaaycactgctcctgggggaaattcagggttaggcacctgtgagcttctggtagcaacagtttcatctactcctcaacacacactcaatatccattcactcattcatcaaacttcattgaatacatgctgttatactatcaatacagaatacactaatgtccatcttttttaatttcctaagtcctttaactaaaacagaatacaaagtgacctaaaccagtggttcttggccaagggtgattttgcctcccaaggggcatttgcaaatgtctggcgccattttcagtggccactgggagctgcttctggcacctactgatgctgctaaacatcctacagtgcacaggaccccccacgacaaagtccatggtactgaagttgagaaatcctgctccaaaacacaattgtcctcattttatgaaaagtcagcatcagggggttgggt

SEQ ID NO: 221735 - DNA, 444 bp, Homo sapiens
tagtcaatactgaaccactgctcctgggggaaattcagggttaggcacctgtgagcttctggtwgcaacagtttcatctactcctcaacacacactcaatatccattcactcattcatcaaacttcattgaatacatgctgttatactatcaatacagaatacactaatgtccatcttttttaatttcctaagtcctttaactaaaacagaatacaaagtgacctaaaccagtggttcttggccaagggtgattttgcctcccaaggggcatttgcaaatgtctggcgccattttcagtggccactgggagctgcttctggcacctactgatgctgctaaacatcctacagtgcacaggaccccccacgacaaagtccatggtactgaagttgagaaatcctgctccaaaacacaattgtcctcattttatgaaaagtcagcat

SEQ ID NO: 221736 - DNA, 470 bp, Homo sapiens
aggctgtggtattttgttatggcagcccaagtaggctaatacattccataacacaatagtggcttaaacaacaattaattacttctcatgattctgtgcattggcaaacttggtggttcttctctttgtttacctagagtcaattatacggcagcagtagtctggtatctaggctggagctagagattstcttagagaccctcagcctagtagtgcctcaccatacacctgcctccagtgcttcaccacgctagtactggacagtgatcatgaggtctggcacctcatcaaatgccgaccgcacattttctctcatttcagatgtccacatttttcttgggtggagggtgttcctatggcacagtcattcatatttcattcacgtgagtggtggataaattttttaaacagcagaaaaccaggaatcacaccagcacagggccctctcaggcactcactagcacctaaac

SEQ ID NO: 221737 - DNA, 470 bp, Homo sapiens
aggctgtggtattttgttatggcagcccaagtaggctaatacattccataacacaatagtggcttaaacaacaattaattacttctcatgattctgtgcattggcaaacttggtggttcttctctttgtttacctagagtcaattatacggcagcagtagtctggtatctaggctggagctagagattgtcttagagaccctcagcctagtagtgcctcaccatacacctgcctccagtgcttcaycacgctagtactggacagtgatcatgaggtctggcacctcatcaaatgccgaccgcacattttctctcatttcagatgtccacatttttcttgggtggagggtgttcctatggcacagtcattcatatttcattcacgtgagtggtggataaattttttaaacagcagaaaaccaggaatcacaccagcacagggccctctcaggcactcactagcacctaaac

SEQ ID NO: 221738 - DNA, 470 bp, Homo sapiens
aggctgtggtattttgttatggcagcccaagtaggctaatacattccataacacaatagtggcttaaacaacaattaattacttctcatgattctgtgcattggcaaacttggtggttcttctctttgtttacctagagtcaattatacggcagcagtagtctggtatctaggctggagctagagattgtcttagagaccctcagcctagtagtgcctcaccatacacctgcctccagtgcttcaccacgctagtactggacagtgatcatgaggtctggcacctcatcaaatgccgaccgcacattttctctcatttcagatgtccacatttttcttgggtggagggtgttcctatggcacagtcattcatatttcattcacgtgagtggtggatamattttttaaacagcagaaaaccaggaatcacaccagcacagggccctctcaggcactcactagcacctaaac

SEQ ID NO: 221739 - DNA, 470 bp, Homo sapiens
aggctgtggtattttgttatggcagcccaagtaggctaatacattccataacacaatagtggcttaaacaacaattaattacttctcatgattctgtgcattggcaaacttggtggttcttctctttgtttacctagagtcaattatacggcagcagtagtctggtatctaggctggagctagagattgtcttagagaccctcagcctagtagtgcctcaccatacacctgcctccagtgcttcaccacgctagtactggacagtgatcatgaggtctggcacctcatcaaatgccgaccgcacattttctctcatttcagatgtccacatttttcttgggtggagggtgttcctatggcacagtcattcatatttcattcacgtgagtggtggataaattttttaaamagcagaaaaccaggaatcacaccagcacagggccctctcaggcactcactagcacctaaac

SEQ ID NO: 221740 - DNA, 470 bp, Homo sapiens
aggctgtggtattttgttatggcagcccaagtaggctaatacattccataacacaatagtggcttaaacaacaattaattacttctcatgattctgtgcattggcaaacttggtggttcttctctttgtttacctagagtcaattatacggcagcagtagtctggtatctaggctggagctagagattgtcttagagaccctcagcctagtagtgcctcaccatacacctgcctccagtgcttcaccacgctagtactggacagtgatcatgaggtctggcacctcatcaaatgccgaccgcacattttctctcatttcagatgtccacatttttcttgggtggagggtgttcctatggcacagtcattcatatttcattcacgtgagtggtggataaattttttaaacagcagaaaaccaggaatcacacmagcacagggccctctcaggcactcactagcacctaaac

SEQ ID NO: 221741 - DNA, 502 bp, Homo sapiens
agaaaataaatttctgacatttaagccaggctgtggtattttgttatggcagcccaagtaggctaatacattccataacacaatagtggcttaaacaacaattaattacttctcatgattctgtgcattggcaaacttggtggttcttctctttgtttacctagagtcaattatacggcagcagtagtctggtatctaggctggagctagagattgtcttagagaccctcagcctagtagtgcctcaccatacacctgcctccagtgcttcaccacgctagtactggacagtgatcatgaggtctggcacctcatcaaatgccgaccgcacattttctctcatttcagatgtccacatttttcttgggtggagggtgttcctatggcacagtcattcatatttcattcacgtgagtggtggataaattttttaaacagcagaaaaccaggaatcacaccagcayagggccctctcaggcactcactagcacctaaacattgt

SEQ ID NO: 221742 - DNA, 311 bp, Homo sapiens
acatcagtgatgtgaagtcgtcagcctgtggttctgagggaatgggccacrgtcctggaggatccccatgcctgcgcccagcccgactgggcaagatgatccactcctcaccacccctaggtacaagaagagctcctcgcctcctggtgagcctcacagggtctgagaatttgccttgcctgaggatctcaaatgacagaatttaaatttggtggtgttcacaagctgaaggagtttattttcatgaaaattgggagggaaaaggtggtgctttatcatttcttctggggaagtaatcttccggggaagtg

SEQ ID NO: 221743 - DNA, 311 bp, Homo sapiens
acatcagtgatgtgaagtcgtcagcctgtggttctgagggaatgggccacggtcctggaggawccccatgcctgcgcccagcccgactgggcaagatgatccactcctcaccacccctaggtacaagaagagctcctcgcctcctggtgagcctcacagggtctgagaatttgccttgcctgaggatctcaaatgacagaatttaaatttggtggtgttcacaagctgaaggagtttattttcatgaaaattgggagggaaaaggtggtgctttatcatttcttctggggaagtaatcttccggggaagtg

SEQ ID NO: 221744 - DNA, 566 bp, Homo sapiens
tctatttctcttaatgggaggactggctgcaagcaagttcaaggtgctcagagatggagcagacaagtacacttggaccacacccaatgcctccccagcctacacagtctcactcattaagccaaaataataatagctggatcctgctgtgtctataccaatacagcacctcaacagagcaattaatttctttaaagtgcagttatctgagtttagcctgagggtgaacacaagagcaggatctctgtttgtgtgttggtaacagagtgatgcaggaaagaaagacggaggaggcaagactaacacctctctcctgaagatttcccttytaatactcattctcatgggttcctccttacaactcctgtctacatactggctttgagtctgtaagtgaggaaacacttttccccagaagggataattttccactttaaaggtccattcatgtttgggatgaagtgccctccattatgctttattctccaatacaatcccatctattatattttcaatcttccagaaatcctctcccacattgcctggcttgctgatgctccagagga

SEQ ID NO: 221745 - DNA, 566 bp, Homo sapiens
tctatttctcttaatgggaggactggctgcaagcaagttcaaggtgctcagagatggagcagacaagtacacttggaccacacccaatgcctccccagcctacacagtctcactcattaagccaaaataataatagctggatcctgctgtgtctataccaatacagcacctcaacagagcaattaatttctttaaagtgcagttatctgagtttagcctgagggtgaacacaagagcaggatctctgtttgtgtgttggtaacagagtgatgcaggaaagaaagacggaggaggcaagactaacacctctctcctgaagatttccctttwaatactcattctcatgggttcctccttacaactcctgtctacatactggctttgagtctgtaagtgaggaaacacttttccccagaagggataattttccactttaaaggtccattcatgtttgggatgaagtgccctccattatgctttattctccaatacaatcccatctattatattttcaatcttccagaaatcctctcccacattgcctggcttgctgatgctccagagga

SEQ ID NO: 221746 - DNA, 583 bp, Homo sapiens
  misc_feature (1)...(583): n = A,T,C or G
gaattctagttctcataatctccatgtgttgtgggaggggcctggtgggtggtaattgaatcatgagggtggttacttgtatctkttttcatgatattgagtgcattctcacaagatctgatggttttataaggggcttttcccccttttactcacttctcttcctgctgccatgtgaagaaggaaatgtttgcttcccattcctccatgaatttaagtttcctgaggcctccccagccatactgaactgtgagttaattaaacctctttccttcataaattacccagtcttgggtatgtgtttattaggagtgtgagaacagactaatacacatttaatatattgaattttaatttaatattgtataacaacccaaaagaaacttgcagactggaaaatgtagtcactgtaatccctaagccattcttgcacaacagatcatggcatcatctattctatcttcaaaacaatggatggaaaagtgtgagatgtaatgnagncattagaatgattctatcattcgaccacaaaactatatccatagtcgcacattttatgtacatcatacaaattcacatatct

SEQ ID NO: 221747 - DNA, 583 bp, Homo sapiens
  misc_feature (1)...(583): n = A,T,C or G
gaattctagttctcataatctccatgtgttgtgggaggggcctggtgggtggtaattgaatcatgagggtggttacttgtatctgttttcatgatattgagtgcattctcacaagatctgatggttttataaggggcttttcccccttttactcacttctcttcctgctgccatgtgaagaaggaaatgtttgcttcccmttcctccatgaatttaagtttcctgaggcctccccagccatactgaactgtgagttaattaaacctctttccttcataaattacccagtcttgggtatgtgtttattaggagtgtgagaacagactaatacacatttaatatattgaattttaatttaatattgtataacaacccaaaagaaacttgcagactggaaaatgtagtcactgtaatccctaagccattcttgcacaacagatcatggcatcatctattctatcttcaaaacaatggatggaaaagtgtgagatgtaatgnagncattagaatgattctatcattcgaccacaaaactatatccatagtcgcacattttatgtacatcatacaaattcacatatct

SEQ ID NO: 221748 - DNA, 411 bp, Homo sapiens
aggaacttattgattgactgaatataggaataaatgacaggaagtatcatagccatagtccatgaagggtataaccacttcttacagcagactcagataatattgaagttgccaggccacttagtggcattgaaggggaagggagctaatgagtagggcttttagggatggagygtgtcttatttgcttaagtctgatctgagacagattgatcatgtcacttttcctccccagatcacatgagtgttgagggatggatatattaatgcctagagatcttgctgtagagatgggtttccgcagccctagatagcagctaaccacacaggcctgcatttgcttagataagggatggacacttgacccaaaatgtgactaattttattgcctctcttaaatttcaatttggga

SEQ ID NO: 221749 - DNA, 407 bp, Homo sapiens
gttgattatgatgttaactacaggtttaaggacctttccttctgtacttaaaccattgagagtttttatcaagaaaagatgctaaacttcgtcaaatgctttttttgtgtcacttgaaatgatcctgtggttttttatctttcattctgttaatgtgacatatcacgacgtatcacattgattgatttgtaygtgttaaaccagccgtgcatgccagagataaatcccacttggtcatgatatgtaacctttgtggtgtcacattggatttggtttactaatattatattgaggatttttgcatcaatgtccatcagagatactgacctgcggctcccttttgttatactgtccttgacttaggtattaaggtggtgctggcctcataaaagatattgggaattata

SEQ ID NO: 221750 - DNA, 668 bp, Homo sapiens
cgttcatctgcctaaagtagatgaatgcttcttccgtcctaaaaatgtttgttgtataaatatatgaatacagttacattaataatttacatgatataaacaaatctgcccccatcaccaaataacctaagtggtaataataatgtatggttttggacaataattattcattcattaatttgaagtatgcyccaaattagactcaaaatataaatgggcagcaataatttaccccctgttacattaaaggcaaacttctccctttttctttaaagaacaaatgtgcctttggtagaattgttattctaatttccttatctggaaagagtcctgattttttaactgattactataaaaaaacacttcaatccatatctcattactctatgcaaaagtttccacaaaatgcctcataaatttaagtataaaacctaaaaatataaaactccaagaaaacataggataaaacctttgtgactttgtattaggcaaggatttcttaggtacggccccataagcaaagtctatgataaaatttcatataatgaaactcttcaaaaccaaaaacttctgcttttagaagaattcagttaagatcgtgataagggacaaaccacagagtgggagaaaatatttgcgaaacacatgtctgactaaggccttgtctc

SEQ ID NO: 221751 - DNA, 415 bp, Homo sapiens
tattgaaaagtatttcaaagttcattttcatatctctgattacttaccgctgtcctgccctttaaagcacttccatttgttttctttatgatggggtaatgttggccaaacaggctatatgataaagtatttagtcctagttttatcttcatacaatcagagctctgagatgaaaataaacttgttccttttttatcactaggtacaaaacaacaaatgaagttgcttatgtatataatrtgatgatttttgtctttttaggtaatggctgaaagcaacacattttgctaacctaaggataaataatactataatacctaattcacactacacacttaacaaaagcaatttatcatcagcctaagattgctaatttttataacaggtacagacataattaacttaatattgacca

SEQ ID NO: 221752 - DNA, 412 bp, Homo sapiens
ttctttttttccctattctttggcttttagctttgagtataatttataatcatttgctgaatcagagactgaaatctacaaggggtggacagcttgttttctagcagattactgtagccttgacacgctgaagaaaatagcttcagcargctgaccagactttctgctgaataggccatcctcggggctgagatccaagagctctgaggtattgtttaggacagtctacagagaactgcagatgatttgtataacataaagctcttttaggattaagagagtgatttacagacaaagcttttggtgaggtgatttttctggtatgtggtgtgtttatcaaaaacagtacacctaccaaacttctccctcattaaaaaaaagctgtagaggcaaactttagaggcttatgttg

SEQ ID NO: 221753 - DNA, 362 bp, Homo sapiens
aagtcgccccccaggtcagagctaagacaggaaatcagctgccctgtcctgtggcctcctccagtccttcccccagcacaccttttgggcatagacagtgacagacagtgcagacacagcaggcagccgtggcctatgatcttatgctcaatttcagggctcagatggttaccctaaagctgatacgagaaaagccaggaatggtggagtgtctaatgccagtttatcatgtcatctcaaatactgtggaagatcgggggaggcgggaaatggcagtaagaaataatttcctaatgtgatgaatgagaagagtgaacttttctaaagarttaatgtacagagcatgagcagaggatcctaaa

SEQ ID NO: 221754 - DNA, 593 bp, Homo sapiens
ctatgttgccagtcaaataatcttataaagacataaaaggtgctgtgcatttgtacatcttraaaattgacattatgccattactttcattagtgggaatatcattcaagtctttagaaacaaattacatttttatgtctagcattgtttctcaaagaaacattgaataatgctaagctaatctttggggttatctcatttccttttcaacactttatacattgtccctacttccctaaagcaatattttcttcattctcttgtcctttggcggtttctctctacacacatagtccttcactctcttctgcccccacccatcctttccctctctcattcctctgatataaaagttggtaccatatttccaggggttcaaatcaatccataattgcggtctagagtcctgtgtggaaagattttgagattacagctcagatcaatgggaaaggctgctatgatcaaatggtgatatctgccctaaatgtttgcttgaggagtggtagacttttccagctttccttgaaacaatatctccagtgcatttgatacctccctaacatcatgacgattaactaatctgaaaaacaaat

SEQ ID NO: 221755 - DNA, 439 bp, Homo sapiens
ttttctccttttgctttctcttctcctttataatttgagttgacttaagtacttattgtactcaagataaaagcattttcgggggataaatagccattttctgctgacgtgtatgactgtcacttagaagtgaaaggtgtgtgctactgtaaggctacagggtaagarcacacatgacactaggtgaaataggatgtgacataagctaagtgatagattcaaaaagagggcagctgtattattccagtcaagtcaggaagggtttttatggaaaaggcagcatttgggttggccttaaagaataaatagggtttgggaggtaagaagagaagtcagggaaagtgagcatttagatgtttgcatcaaatgagcagatgaactcccatggagagatccacaatagaacagtttgggatatggataggcagacaaagaattc

SEQ ID NO: 221756 - DNA, 439 bp, Homo sapiens
ttttctccttttgctttctcttctcctttataatttgagttgacttaagtacttattgtactcaagataaaagcattttcgggggataaatagccattttctgctgacgtgtatgactgtcacttagaagtgaaaggtgtgtgctactgtaaggctacagggtaagagcacacatgacactaggtgaaataggatgtgacataagctaagtgatagattcaaaaagagggcagctgtattattccagtcaagtcaggaagggtttttatggaaaaggcagcatttgggttggccttaaagaataaatagggtttgggwggtaagaagagaagtcagggaaagtgagcatttagatgtttgcatcaaatgagcagatgaactcccatggagagatccacaatagaacagtttgggatatggataggcagacaaagaattc

SEQ ID NO: 221757 - DNA, 500 bp, Homo sapiens
ttaatccaagattgagtccagctcagggattcaacctctttcagtactattggatttaatatctgctgacctgttaatcattttattctatagttattcacttgcttctctcagataggaatcttttaattcctaaaacatggcccaattgattattcataggttgcattttttccaatacaaaacctttagctacaaaccatacttctttcaactgttaaataaaaagatgtttcagaaagcactttctatcagtattcatttatcattatttaacaataaagcttaactaggccttgagtatatatcaagttgaagagcagctggtaaagctatgatcacttagtggcatgctcacgggtactaayagggatattatgcctgcattaggactataccctgcctgaaagaatataggtcagttatttaaatgatttacacagagtttgtccctttaataccttgcaaagagtcaggcagagatagtattagtgagttct

SEQ ID NO: 221758 - DNA, 562 bp, Homo sapiens
gtcgtgttgtttttcaatttgctatttcatgtctaaataaagaaaaattgaaatgataaattactagcatagatttaccattcatcttgatattgtgcaatgacacttttaaatgcaaactaagagtatttcattcctatgagattaccgaaatcacacaatttatacttcatagcttgtacacgcatatatattttgctcttatcagaacactgtaaacactgcacgaaaccagttcaagtatttstacttttcttcttaataatatgcacattctatcaacactctctacctttgacttactgatgagtaagaggactgaaaagaaaaggcactatggtttgccctatctttctctttccttctatggtatcattttcagtgcaagtggttgactaatagaggaagtaacatgagtaataaaggatatgacagagtcccttgctaattcttgtttcttagaatgtccttgccctctttctggcttgaatggaaaatgtggcctcctgggactgtcagtggtgtggtccccacatccttagttgtacacataacatgctta

SEQ ID NO: 221759 - DNA, 562 bp, Homo sapiens
gtcgtgttgtttttcaatttgctatttcatgtctaaataaagaaaaattgaaatgataaattactagcatagatttaccattcatcttgatattgtgcaatgacacttttaaatgcaaactaagagtatttcattcctatgagattaccgaaatcacacaatttatacttcatagcttgtacacgcatatatattttgctcttatcagaacactgtaaacactgcacgaaaccagttcaagtatttgtacttttcttcttaataatatgcacattctatcaacactctctacctttgacttactgatgagtaagaggactgaaaagaaaaggcactatggtttgccctatctttctctttccttctatggtatcattttcagtgcaagtggttgactaatagaggaagtaacatgagtaataaaggatatgacagagtcccttgctaattcttgtttcttagaatgtccttgccctctttctggcttgaatgraaaatgtggcctcctgggactgtcagtggtgtggtccccacatccttagttgtacacataacatgctta

SEQ ID NO: 221760 - DNA, 549 bp, Homo sapiens
gaggtggagcttgtagtgagccgagatcgcaccactgcactccagctggggcaacagagcaagactccatctcaaaaaaaaaaaaaattatatatrctgtgtataatgaatatatgtaaatggtaccatttatatgtatgtatgtatatatgtatacacacagaatgtatgtatatatgtatacacacagaatgtatgtatatactacctttaatatatgttaaatatgtacacgtttatatatgtatacacaaacacacaggtagtttactatatctatttttccttttagtaaagggaaatcagcatggaatcatgttacatttatttatttatttacatataaatgtctaccatcagaaaaaaaaacagttgggataaattgttaagccctctaatttagaaggatgggaatgttttttacatttaatcattgactgccaaaaaataagagtctgcacatgatattcctgggtcacagactttaaaggaatagtgatttttgcttgcttttactactaatgaatttcaagagttagacaggatgtg

SEQ ID NO: 221761 - DNA, 549 bp, Homo sapiens
gaggtggagcttgtagtgagccgagatcgcaccactgcactccagctggggcaacagagcaagactccatctcaaaaaaaaaaaaaattatatatactgtgtataatgaatatatgtaaatggtaccatttatatgtatgtatgtatatatgtatacacacagaatgtatgtatatatgtatacacacagaatgtatgtatatactacctttaatatatgttaaatakgtacacgtttatatatgtatacacaaacacacaggtagtttactatatctatttttccttttagtaaagggaaatcagcatggaatcatgttacatttatttatttatttacatataaatgtctaccatcagaaaaaaaaacagttgggataaattgttaagccctctaatttagaaggatgggaatgttttttacatttaatcattgactgccaaaaaataagagtctgcacatgatattcctgggtcacagactttaaaggaatagtgatttttgcttgcttttactactaatgaatttcaagagttagacaggatgtg

SEQ ID NO: 221762 - DNA, 549 bp, Homo sapiens
gaggtggagcttgtagtgagccgagatcgcaccactgcactccagctggggcaacagagcaagactccatctcaaaaaaaaaaaaaattatatatactgtgtataatgaatatatgtaaatggtaccatttatatgtatgtatgtatatatgtatacacacagaatgtatgtatatatgtatacacacagaatgtatgtatatactacctttaatatatgttaaatatgtacacgtttatatatgtatacacaaacacacaggtagtttactatatctatttttccttttagtaaagggaaatcagcatggaatcatgttacatttatttatttatttacatataaatgtctaccatcagaaaaaaaaacagttgggataaattgttaagccctctaatttagaaggatgggaatgttttttacatttaatcattgactgccaaaaaataagagtctgcacaygatattcctgggtcacagactttaaaggaatagtgatttttgcttgcttttactactaatgaatttcaagagttagacaggatgtg

SEQ ID NO: 221763 - DNA, 259 bp, Homo sapiens
  misc_feature (1)...(259): n = A,T,C or G
agtatttggaatagttcaaattatttgctgttccctccttacatcaaccaacaccactttttttsaggacactaaaagttacaggcatccctgcaaagtttttaagtatatgagagaatcacagtggagtctcaatcagttaacaatgtagatccattaaaaaaaaaaaaaaaccaaaacaaaaacggaatattaaaggaaaatcttcaagctaaaaaaaaaaaaaaaaaaaaaaaagcaaaancaaaatcctcctaag

SEQ ID NO: 221764 - DNA, 661 bp, Homo sapiens
agtatcattttattaatagcactataccgtagtatcattttattaatagcgctataccgtagtatcattttattaatagcgctataccgtagtattttattaatagtgctataccgtagtgtcattttgttaatagcactataccgtagtgtcattttattaatggcactataccgtagcatcactttattaatggcactataccatagcatcactttattaatggcactataccatagcatcactttattaatggcactataccgtagcatcactttattaatggcactataccatagtattattttattaatggcaygataccatagtattattttattaatagcactataccatagtattattttattaatagcactatactgtagtatcattttattaatagcactataccatagtatcattttattaatagcactatgccatagtattattttattaataacattatcagatttcctaaaatatgtatagcttttcatacctaaatttctacattatggtattaaaagctatacatattttaggaaatctgatcataaaatgcatgtagaaaggtctgtgaggaaacatttaatactggtacttatattcaggtcaacatctgggtaaaaatgggactataagaataatatacata

SEQ ID NO: 221765 - DNA, 557 bp, Homo sapiens
gagtttatggtgctgtgtcaactattaatgtttccttgggactagcacaggatgtatccacctggttaggagccccacactcctcaggccgtcatgtataaagcagttggctcatgaacttcatttttgtcaaattcctgttatcttatttaaatggtagtactggcttttagcattattgttattttgttttaaaaaaamcattcttaatgataattgtcaggaattgattttctgctcactactttactaaattctaaaatgactattgcttagaggcagataaaatatcttgttctttaagaacaacgtcgagctatatacattgggaatatccctcacactgtttaaaaccatattgctttaagtggtgtataatgcaacatttattgaactatttgaaagtccctaatgtgcagattcacgtgaaattaccccatgtgtctagtttgcaccacttaacatccttttaatggaagcaggtggaaaatgtgaaaaaaaaaatgactaaaatggctgtcttgcctattgtttgagcatgtagttgttctgaccag

SEQ ID NO: 221766 - DNA, 557 bp, Homo sapiens
gagtttatggtgctgtgtcaactattaatgtttccttgggactagcacaggatgtatccacctggttaggagccccacactcctcaggccgtcatgtataaagcagttggctcatgaacttcatttttgtcaaattcctgttatcttatttaaatggtagtactggcttttagcattattgttattttgttttaaaaaaaccattcttaatgataattgtcaggaattgattttctgctcactacttyactaaattctaaaatgactattgcttagaggcagataaaatatcttgttctttaagaacaacgtcgagctatatacattgggaatatccctcacactgtttaaaaccatattgctttaagtggtgtataatgcaacatttattgaactatttgaaagtccctaatgtgcagattcacgtgaaattaccccatgtgtctagtttgcaccacttaacatccttttaatggaagcaggtggaaaatgtgaaaaaaaaaatgactaaaatggctgtcttgcctattgtttgagcatgtagttgttctgaccag

SEQ ID NO: 221767 - DNA, 438 bp, Homo sapiens
cttctattctctatctccatgagttcaattgttttgatttttagaccccacaaataagtgagaatatgtgatgtttatctttctgtgcctggcttatttcactcaacaaaatgatgtccaattctatccatgttgttgcaaatgacaggatcttattcttttttaatggctgaatagtactccactatgtatatgtaccacattttctttatccattcatctgttgatggacacttaggttgcttccaaatcttggctattgtgaacagggctgtaacaaacatggttgtgmagatatctccttcaatataatggtttcctttcctctgggtatatacccagcagtgggactgctggagcatatggttgctctatttttagttttttgcggaatcacccaactgttctccttagtggttgtactaactggcataattt

SEQ ID NO: 221768 - DNA, 595 bp, Homo sapiens
ctctcatacacagctcactttcctccttgctttttgtctgcatagcattattcaatatgtagcataatataagttgaaatcatatatcacctttgtggtcttctcccaccagaaatcaggcattatgaaggcagaagggcagaggtatttgtcgtgtgtgtgtgtgtgtgtgtgtgtgtgtgtgtgtttgacttttgtatttttgctgccrtattcctggtacctggaatagcacttggcagacaaatgtatgcaaagttattcaaacccagtgggaccagaccacagtgaggacagtcaacaagggagggcagggaatgagcgctgtcagggagggtggagtccaggtcactggggttgctgtaagcatgttctgaatttatatgttatccaaagtataatagaaaacactgcattaaaccagacatgtcatatagttaccatcttttctttttctaaaagagaattattgcaatttatttccttattaagtcaatttagattaggttgcactaaaaaaaaaaaagcgatattgtttcagacactaggatctactctcttacacagtgtgattagaaaccagggaggatggggt

SEQ ID NO: 221769 - DNA, 595 bp, Homo sapiens
ctctcatacacagctcactttcctccttgctttttgtctgcatagcattattcaatatgtagcataatataagttgaaatcatatatcacctttgtggtcttctcccaccagaaatcaggcattatgaaggcagaagggcagaggtatttgtcgtgtgtgtgtgtgtgtgtgtgtgtgtgtgtgtgtttgacttttgtatttttgctgccatattcctggtacctggaatagcacttggcagacaaatgtatgcaaagttattcaaayccagtgggaccagaccacagtgaggacagtcaacaagggagggcagggaatgagcgctgtcagggagggtggagtccaggtcactggggttgctgtaagcatgttctgaatttatatgttatccaaagtataatagaaaacactgcattaaaccagacatgtcatatagttaccatcttttctttttctaaaagagaattattgcaatttatttccttattaagtcaatttagattaggttgcactaaaaaaaaaaaagcgatattgtttcagacactaggatctactctcttacacagtgtgattagaaaccagggaggatggggt

SEQ ID NO: 221770 - DNA, 509 bp, Homo sapiens
tatccaaatagtgaatagaaaataattcactatttcttgtttaaatttcccaacaaatacccatttattgagcacacacttagatcctttattgtgtggtgagaatatattaaaacatcactgtgacaaagttcttattctcaaggaactcacagtttagggttaagctagacatgaaaagggatcattacaatggacgataattgaagtaagaatagagtgccaagggtcaaacacarctgtataaagaggttgcaatcttttttgtctcccctgtgctcctagttgagatgcttagaaggaaatgaagctgaaaatctcacttcctaaactcatgaatgaatacatcaccagaactctgtgtactaattacatgtgtagctcattacaagagacatgggcaaaaatagaatgaaatgatttaaaaaatgggcaaaaacaaaataaaacaaattttcaagataacaatagtgtgctatttagtgtgcctccttcaaacacaatcaatg

SEQ ID NO: 221771 - DNA, 641 bp, Homo sapiens
tacaactaccataatgacttggtgatgatggctttctgaatgccaccagtcagtccaccttgggagactgatttgccagaggcctctcctttctatctgtgcttctgaactgggcttgaatcaaagccaacctactgccactgctctaacttgactgcattgtttatggtaatccacgtggaccctgaaacctggtcgtctgatgcactacatgcatgcacagactgagggcagccttctcagcatcagcacaacctctgcagtgagtactgctcataagatcagtgcagggagcagcagatgtttgctccaaccttctgcagtacatgtagtagcaatcgcagggctgaggctctgtgggcagtctcccaatttcctcctagggagaaatgcatacagaggcttagcaccacagttgggtgctgttcacttctgtctagttaaggagtcattattagccagaaaggractatgatgtcagtttggtctttgtggatttcctgactcagtgtttatgaaggagacacattagtaatggtctaagatatctggtccaatttgtatcaaacaatagtcgtttctcattttccattgctgtggtaattttaatgcattctcctctgtgaggcagtggaaataaa

SEQ ID NO: 221772 - DNA, 548 bp, Homo sapiens
caatgaccaacaaagaattgggagaacagacacagaattgtatacgtatagccttttattccaggcagtattctaggaacagtttaagacatttttaagggcattttccactctttacgattttcacttgagtactgtttaggttttaaccaaacttcgtgtcatcttaaatcgccctgagaaccggcgggggttctctgctcagcggaggctgaggctctcagctggctcacagctttagggaagctgctacttcctcctactcacctgcccttgagcgcagggtgcacagaggggagggggcagagagcaagacgactgggccagctcagagccagacagtcctacctcagtttactcattctgtctcagggatgagagatgaacaaggtccctagaaagagagtgagttgattcagctgccctagggaaacagctccattctgcttatggcctcagccaactgaggtccacagtgccagataacctcaccccagcgtggggctgcggmccacgccccctcgtgagaggtgaagccagcaggactt

SEQ ID NO: 221773 - DNA, 399 bp, Homo sapiens
aaaaactttttattgtggaggggaattttgaacatatccaaaaagacatagaagaatataataartcccgtgtgcccatcattcatccttaactaccatcaggccatggccagtcctacttcatctacatcccatccactgcctgccttccacacatcagatcatttctcccataagtatttgagtgtgtttttctgcaagataacacaaccacaaaatcctcatcaatagctttaaaagaacaatgttttcttaatatcaaaaagctaatcctcaaatttccaatcttctaatgactgttattttttccacagtttgtttatatgagtccagatttaaataaggcccaaacatagtgattaaacatagtgattggtttatatttctataagtctcttt

SEQ ID NO: 221774 - DNA, 396 bp, Homo sapiens
aactaattctccatccagttttgttcccttgctggcgaggaattgtgatcctttggaggataagaggtgttctgggtttaggaattttcagccttttgcactggtttttccccatcttcatggatttatctacttttggtcttygaggttggtgaccttcagatggagtttttgtgtggatgtcctttttgttaatgttgatggtattcctttctgtttgttagttttccttctaacagtcaaatctgtctgctgcaggtctgctggagtttgctggaggtccattccagaccctttgtgactgggtatcacaggcaaaggctgcagaacagcaaagatttttgcctgttccttcctctggaagcttggtcccagagaggcacccaccagatgcca

SEQ ID NO: 221775 - DNA, 396 bp, Homo sapiens
aactaattctccatccagttttgttcccttgctggcgaggaattgtgatcctttggaggataagaggtgttctgggtttaggaattttcagccttttgcactggtttttccccatcttcatggatttatctacttttggtcttcgaggttggtgaccttcagatggagtttttgtgtggatgtcctttttgttaatgttgatggtattcctttctgtttgttagttttccttctaacagtcaaatctgtctgctgcaggtctgctggagtttgctggaggtccattccagaccctttgtgactgggtatcacaggcaaaggctgcagaacagcaaagatttttgcctrttccttcctctggaagcttggtcccagagaggcacccaccagatgcca

SEQ ID NO: 221776 - DNA, 619 bp, Homo sapiens
caaaatcattaccagttccacagaggaagaccaaatgacaycataaacatgttatcgtggaaatttactttcagaatcttaacactcctcatgatgtctcaataactgggtaaaaggtgaatctgtcattcactcatctaaagccctggcccaccacaaaagtgcatggaacctgctgttttcccagtactgagggggctgctctgttatctccaccctcttgctactcttcctgggaccactgccttggtgaagatagtccttgggtagaggtaggatctagggtcatgtgccctctttggacaattcatccctatcttcacctaggcaggcaagggtctctctagaagaatcgcagctacatctttctatccatcctgaacttcctctctcagctccgcaatgtcctcggtgtctgaccctcacttcccactcctctagacaccccacccagcccataactcagcacccatggggcacacattcagaactgccccccagtaagggagtgctacccagccaataaagcagaacccatgggctgactcacccctgactctgcagaccaaacaacccaacgcttccagggttaaataggcagaaatattaagcagttccc

SEQ ID NO: 221777 - DNA, 602 bp, Homo sapiens
cagaggaagaccaaatgacatcataaacatgttatcgtggaaatttactttcagaatcttaacactcctcatgatgtctcaataactgggtaaaaggtgaatctgtcattcactcatctaaagccctggcccaccacaaaagtgcatggaacctgctgttttcccagtactgagggggctgctctgttatctccaccctcttgctactcttcctgggaccactgccttggtgaagatagtccttgggtagaggtaggatctagggtcatgtgccctctttggacaattcatccctatcttcacctaggcaggcaagggtctctctagaagaatcgcagctacatctttctatccatcctgaacttcctctctcagctccgcaatgtcctcggtgtctgaccctcacttcccactcctctagacaccccacccagcccataactcagcacccatggggcacacattcagaactgcccyccagtaagggagtgctacccagccaataaagcagaacccatgggctgactcacccctgactctgcagaccaaacaacccaacgcttccagggttaaataggcagaaatattaagcagttccctac

SEQ ID NO: 221778 - DNA, 533 bp, Homo sapiens
atgtgttcccagggaaaaaaacatttttgatcatgtcaactccctcatctatgataaccatccaaacctcagctcctcctcctttcctttgaaactaaaataggaagcactggcatgaaaaacttctgctttttaaagtctcaaaactggttacttgtatttaaaagcctttttgcctgtttaaaactaaaaacacttttacrccttcattaaagttatgaccgatgtgtttaattttaaagacatagctgccattcttaattacttcctctacctttaacatccctgtcttacataaaatattcaaaaaaaaaaaaacaatgtgaggccgtgctttggattccatgtggccaatttcactctgtggcagttgccagcagaactccacatctagaacaaccagtatgtgcctaaggcctttcctgttctttttgtttccttgagtttattcctgtcaggtgtaagcactccagaaatgtagaattatgacataggaactcacactgagtcatagctggaactcatctcttctg

SEQ ID NO: 221779 - DNA, 613 bp, Homo sapiens
ggagcattattgggactctcagcgtggatgcaggtgtagctagtgtgtgcagggctagattccaaggacaggatggttaacaaacagacctgtcttgggcctcctgcaagagcagcattgagggcagcctcacacaagtccaagatcagtttacacaggctgggggaggaactccagctaccagctacagcaggggtgagtcagtgggcgttatgggctgaattatgacccccaaaagtaatggaagcactaacccctagcacctcagaatgtgactgtatttagagacaaagtctttaaagaagtaatgaagattacatgaggtcctatgggtgggtcccaatccaatctcactgatacccttataagaagaggaaatttgggctcaggaagggacaacaaggatttgtgtataaaaaggaacggcctgtgaagacccaggaagacaacctccacctgtaagccaagagagaggcctcaggagaatcaaacctgccgacaccttgatcttggacttccagcctccagagctatgggaaaattaatttctgttgtytaagccacccagtctgaggaatattgtcatggtgcccctagcagactaatacagtgg

SEQ ID NO: 221780 - DNA, 543 bp, Homo sapiens
tttgacagaaatggaattcgattggagaatatatgtcaaaggcagccccttttccctgggaaaaagggagggggctgaaatacagcaagataattgggtggagaagatcaaattcagttttacaccaaataattaaggcttaccatgtgtaaaataccacsctagttaaatgcgcatgggagataatttctgatatttgttaacaataccacagagaaaagtgaagatttcaaaaactcctccaacaaaaatagcattttgtcagtaatgacaacttaatgttcatcccttaattaagttattcacatattcctcagacacatttactacctcaccaatattgctcatggagattattttctagattgacatttctggaatccagaaatgttgtgtattattctttgatagtattgcctccccagtgagtttttgcatgaaatttcagccacattatagatgaactcataattggacattgtggagttgaggaaaaacttactaaaattatgatttcttaaaaagatgacatgaaatagcttg

SEQ ID NO: 221781 - DNA, 570 bp, Homo sapiens
cacatcctgtctctggtgttcagtatgtgcaggataactttggcctgagattctccttcagcaaaacagagacaagaacatctacctgatgttggagggaatgtgaggatataatgatcaatgacgccacagacatggtagttaagtgtctaggctttagattctgacagatctgagctgggtcagttctaccacttactagctgtgtggtcagaaggaaagtgaatcaccaaaagccttggatttctcttatgttaaatgggggataatagcagcaatttggcaggagtgctgtgtgatgcgtgtagaacagcacctggcaccataaaagcccaatcaatggtagtttatgatgggttgggcaatattataattaatagcatagcattcagcacagaaagacrctcgctaaaagttaggctgccctttcctcaattttattaacattagttggaagggggaaagaagcataatattagttatactaaccttgcaataattaggaggaaagatagtaacaactggaatgaagtaaaaataaacttgataaccattttaaaaagtatctct

SEQ ID NO: 221782 - DNA, 458 bp, Homo sapiens
gtgttgcttttggcccattagatttataagaaactcacaaaagttttgatggtactatattgacaaaaggatcaccagtttatactaaaagatattgagactattcaaaatgtaagaaaacctctaggtctctaatttccacaatctggaaacaggctaagaaagttgtttaaagcacacaggagtagccaagggggtagaaaagacaacccagayggtacagaacacagccttagaaaacaatggactgggaagtcacttccacgaggcagaaccgaggcctaatcaagaatattccctcctctggaagagaaggtcctggcagcattttcagggatggaattcaggattgctatgagccagtgcctcttactagctttccattctttccctttttgaataagattgtctactatacttattctgtcctttcttaccctattgcattaggtttgaag

SEQ ID NO: 221783 - DNA, 500 bp, Homo sapiens
ggaaaaatagtggtatattcatctaatggactactatacaacaacgaatgtactactgctacacccaaagcctgggtaaatctcacaaacatgttgagaacataaaccaaaaacaaagacacactcaaagttcacatcatgaatagaaagtgacatgacaaagtgggtttatgttttttccagccatggccagctgctcctgtggagatagggagaaggcagaaagtgggatgaatccagggtctgggctttcccagatgatggcaaagggagggaaggagacagaagataagggcacatgcagagcaatacgtaactgtgaatgtgaaccataggctctaagttgggtaaggcaagtgaaaactccaggcctcattggtttgtaaatcctggtggggtaggataatttttggagttggggtacatgagagagtgatctggcaaaagrgaggtgatgatgtcaaagcaaggggactgaaattgtgatcaggacttactaa

SEQ ID NO: 221784 - DNA, 567 bp, Homo sapiens
cagcataggagtaaaaagcaaaagtttaaattgccccacagggaaattgacaaatactaaatatcccatgggagctagttaaagtataccattgcctaaaggaaggaatatccttcaagtctagggacatcacaacttaatattctcaaaatacccatgcagctggagaatatcactgacacaatttagcaattargttttacttcttaataaccacagtactagttcatttttaaatgaattttccctaattcaatatcataaacctaataattcaatatgacatgcatgtagtgaatttttttactgagtaattaggttattaaatgtgtactcggactctcctcatagttaaaagccctcaattcagactcaaatcaaagtagtacaggtatactcacattctgcctcaattttacactcctgaaaagactgattattttgagccaaaccacttaataatattatattaaaagcatcattgcataaggtaagtttctgatccacctttaagagcagacactaagactgtacttctttagaaaagaagagttatttggctgttca

SEQ ID NO: 221785 - DNA, 567 bp, Homo sapiens
cagcataggagtaaaaagcaaaagtttaaattgccccacagggaaattgacaaatactaaatatcccatgggagctagttaaagtataccattgcctaaaggaaggaatatccttcaagtctagggacatcacaacttaatattctcaaaatacccatgcagctggagaatatcactgacacaatttagcaattaagttttacttcttaataaccacagtactagttcatttttaaatgaattttccctaattcaatatcataaacctaataattcaatatgacatgcatgtagtgaatttttttactgagtaattaggttattaaatgtgtactcggactctcctcatagttaaaagccctcaattcagactcaaatcaaagtagtacaggtatactcacattctgccwcaattttacactcctgaaaagactgattattttgagccaaaccacttaataatattatattaaaagcatcattgcataaggtaagtttctgatccacctttaagagcagacactaagactgtacttctttagaaaagaagagttatttggctgttca

SEQ ID NO: 221786 - DNA, 560 bp, Homo sapiens
ctgacctgatcatgaggctaaagggactgccccaacttgaatcacatgattcatccccagagcctgggtgagacccttgaaccacaagtamcagaagtggcaaaggatttgggatattataagctaaagaagtgggctgggctctggatgatacatactgtccattctagggtcacttatgtttttgagaagatgtcattttatccttagtttcccctactcaatagagatagcttttatggaagaaactttgtccttttgttttaaaataatcttctccctccctttgtttatctgaagctcataattataacatggtgtatgtctttcctttctttctggcaaattttttttctccatctgttttttattgaatgatgtatgggaaagccacattttcctagctaggaaagcttggtaagctattctcaatgtctctatgcattctgtttaacacattcttatttttagctttctgggaagatttatacatgtgattgtagccagtattagctttttaaactctttcttagaaaatttaaagctgcatttatccctga

SEQ ID NO: 221787 - DNA, 366 bp, Homo sapiens
ataatctttctctatttattgctttctatataacgtgtgttttaatagctttcagagataatttgttttatttttccaactcaaatgagagactctagcaatgaatatatataagataaagtggataaaaaaggtgagaaatgtcaaggcaaaaaaatktagataatttagacttctgtggatgtctctcaaataatactcttcagattatggcttattccatttatgtttaaggctagcactatgtaaaacctctgtctcttaacccaaagtataacttgctctttctaaataggaaactagaaataattttgaaaacgaatcaataaaaatttcaaattattgcatgagtagaactcaaattaa

SEQ ID NO: 221788 - DNA, 235 bp, Homo sapiens
ccactctgtctttaatatcttatgattataagttatattgatgaatgaaaaaaaaacccatgtacaamtttggattatgtccacatttggataatctattgaaattgcatcaggtttttaagtacaataagataaatgagggattttatttttcttttaatgccagaatcctcatagaataagagatgttcaaatcctatggtagagagtgttgtaaattttgttctatcaacag

SEQ ID NO: 221789 - DNA, 449 bp, Homo sapiens
aagattatggtgactatctatgtatgtaagaaaaatgaaattgtgtttgtacatttgaaatgtgaaaacatggaatatgtaaatgtccaaaaatgttggagttttataaaggctatttgaagtttagtgatacaataaatttctgatcagcttggagatttccctgctgcctctctttagaatataaaaatacttgtcacccgttgtgctctggagcctgtaatggttaattatatgtggcaaaatggctagattatggtgaccagttgtttggtcaaataccagtatagatrttactgtgaaggtatatattttagccatgattagcatttaaatcaataggctttgactaaagcagattattctccataatgtgtgtgggggggctcatccaattagttgaaggccttaagagcaagcatggtgatttcctgaagaaagaggaattc

SEQ ID NO: 221790 - DNA, 615 bp, Homo sapiens
gccttcttcctttcattttggcgggggctgaaatttcagcagggacagtgaaaagcccatggaaataaaaattagaatgtctccagaaagaaagaggaagtaaaaggcaagtactaactggtaaatatcattygaggtgatttcagataaggccataacccaggttaaaaatatatcaaaacacaattgtcattattataacataaactaataaatattaattagatccctattttgggcgaagtactgtgttgagcactatggtagatacaaagatgttaaaatggactcaatgtgtgtaagaggattacagtctagaacaggtagttgtatatatgctattgaatacagctatgcatgtaagatgtagtctattatagtacagatgtataagttatttcaaagtagcacattaataattgacaaataaatagtaaaactagtaagtgcttaagaggagaagtaaggcagaaagacaccactgccttctggggtgagtttaattctagcatcagccaacatttattcaacccttactatgggccaggcaatgttctatggacttcacatgtattaactaattttatccatatgataaccctacgaggtagaaac

SEQ ID NO: 221791 - DNA, 615 bp, Homo sapiens
gccttcttcctttcattttggcgggggctgaaatttcagcagggacagtgaaaagcccatggaaataaaaattagaatgtctccagaaagaaagaggaagtaaaaggcaagtactaactggtaaatatcatttgaggtgatttcagataaggccataacccaggttaaaaatatatcaaaacacaattgtcattattataacataaactaataaatattaattagatccctattttgggcraagtactgtgttgagcactatggtagatacaaagatgttaaaatggactcaatgtgtgtaagaggattacagtctagaacaggtagttgtatatatgctattgaatacagctatgcatgtaagatgtagtctattatagtacagatgtataagttatttcaaagtagcacattaataattgacaaataaatagtaaaactagtaagtgcttaagaggagaagtaaggcagaaagacaccactgccttctggggtgagtttaattctagcatcagccaacatttattcaacccttactatgggccaggcaatgttctatggacttcacatgtattaactaattttatccatatgataaccctacgaggtagaaac

SEQ ID NO: 221792 - DNA, 520 bp, Homo sapiens
acctcagctgtcatgcttcggatgctgtgttcttaattacggctcaagactctgcatgaggaaytttggttgctggtccttcaaattgttgtgatccagatatgtccaagcaatttgcttctaaaacaactatgaatactaaatgcataacacaaatcatacattatctaaattaattgttaaatgtatgttttttggaaattaatggccagccagggtcatttggtcatttttgactctgccccatttctttttccctttactattgttaagagctattgttggagaaaaatgcttgggaaagctcatgggttggatggtgagaccttgtgaacatttcaacaatgaaaaacagtcaccaaattgttaagccatagagaagaaaaaaactttcatttcctaagatggagggggaagaaaataagaagaaaggtcggtgggaagtaagagcagttaggaagatgtgaggttgggagaccagatgaggtacaagctggagaaggggtaaagaaaggaattc

SEQ ID NO: 221793 - DNA, 520 bp, Homo sapiens
acctcagctgtcatgcttcggatgctgtgttcttaattacggctcaagactctgcatgaggaattttggttgctggtccttcaaattgttgtgatccagatatgtccaagcaatttgcttctaaaacaactatgaatactaaatgcataacacaaatcatacattatctaaattaattgttaaatgtatgttttttggaaattaatggccagccagggtcatttggtcatttttgactctgccccatttctttttccctttactattgttaagagctattgttggagaaaaatgcttgggaaagctcatgggttggatggtgagaccttgtgaacatttcaacaatgaaaaacagtcaccaaattgttaagccatagagaagaaaaaaactttcatttcctaagatggagggggaagaaaataagaaraaaggtcggtgggaagtaagagcagttaggaagatgtgaggttgggagaccagatgaggtacaagctggagaaggggtaaagaaaggaattc

SEQ ID NO: 221794 - DNA, 632 bp, Homo sapiens
gaggcatgaaaacaccaataagaatgtaatgggattcatttgactttcattttgcatggctgcacatgtctagaattcagtgtggtatctttaaaatagtaagaactcccttctctatgaaagtataaataaatacacacatattaacmaaaaaatatttgaatgtatattttaattatataaaaatatttgttgatgtgttttttgattgttaatgagaaataattcacaagaattgagaaaatagatggacttactgttaagtaaatcaatagaattgctaaaaagtttcgaattttatttcaaaatgtgcaaattaccataaaaattaaaaatagagttgtttttttttgaaattactttttattattgcctatcacaagtatctatcccacacattcatttgaaataaagttaaattcgttaatgtcatagaggctagcaggactggattaatgaaatgtttgcttatattagataatatttaggttgtttatgaatagaagtattagagaagtaatttttttttcaaatctggttttcattctttaccaatttttatctctttgaaattgaagataaaaatatcatagcacagaatatttttgatgattaaataaaaactgagggat

SEQ ID NO: 221795 - DNA, 632 bp, Homo sapiens
gaggcatgaaaacaccaataagaatgtaatgggattcatttgactttcattttgcatggctgcacatgtctagaattcagtgtggtatctttaaaatagtaagaactcccttctctatgaaagtataaataaatacacacatattaaccaaaaaatatttgaatgtatattttaattatataaaaatatttgttgatgtgttttttgattgttaatgagaaataattcasaagaattgagaaaatagatggacttactgttaagtaaatcaatagaattgctaaaaagtttcgaattttatttcaaaatgtgcaaattaccataaaaattaaaaatagagttgtttttttttgaaattactttttattattgcctatcacaagtatctatcccacacattcatttgaaataaagttaaattcgttaatgtcatagaggctagcaggactggattaatgaaatgtttgcttatattagataatatttaggttgtttatgaatagaagtattagagaagtaatttttttttcaaatctggttttcattctttaccaatttttatctctttgaaattgaagataaaaatatcatagcacagaatatttttgatgattaaataaaaactgagggat

SEQ ID NO: 221796 - DNA, 371 bp, Homo sapiens
tgtggataagatttaagtcctattaatgtgagctatgacyattgctttgacatttgtgatattgagaggagtgatattgagaggggggtggtagaagaggagtgagagagcaagtttgtgggaatacaaaacaggtaaatctccatccttcataggaggaaactgatcaataatgtttgaaactgtcaagtcaaaagtagatatgtatgtctgtctttagaaatatagagacagataccagaagaaacagctaaaaggagttgaaattggtttcctctggaggaagccctaaaagggtgggtatggtagaaaggactctttttttttttcattataagttttgtagtactatcttttaaagctaagcacat

SEQ ID NO: 221797 - DNA, 371 bp, Homo sapiens
tgtggataagatttaagtcctattaatgtgagctatgaccattgctttgacatttgtgatattgagaggagtgatattgagaggggggtggtagaagaggagtgagagagcaagtttgtgggaatacaaaacaggtaaatctccatccttcataggaggaaactgatcaataatgtttgaaactgtcaagtcaaaartagatatgtatgtctgtctttagaaatatagagacagataccagaagaaacagctaaaaggagttgaaattggtttcctctggaggaagccctaaaagggtgggtatggtagaaaggactctttttttttttcattataagttttgtagtactatcttttaaagctaagcacat

SEQ ID NO: 221798 - DNA, 565 bp, Homo sapiens
ttggttcataagaagactgagcttggtataaagaggccacagtgtgtggaggcatttcaggactagaggcaaagcatatttccatgattatcagcagcacatatgagcctaactctaaacagaccaagtaggagaagtcacatctytgtggtcactacgttaggttatgcagtgaccaggcagatgtatctgctaaagcatcagcatcggcagatacagtgagaaaagaggtcaatgctctaaccaaatgggatgagtcaccacaaccataggaaataattagggccagacacttcctgccatttgctaattggaaatttaggtttatcttgtacccagagcccatgttgggaagaaggagttggagagaaagtgaaaatctggaaatgagcgattactctaagtagactatttccaaataaagccactaggatacatttagttggcgaacttgagagccaagatgaggtaagtaatttaaaacacagaaaatcatatttctgcatgtctgagtatatagacagtagatttcaaccccttgacaatacatggtgagacatagtcc

SEQ ID NO: 221799 - DNA, 579 bp, Homo sapiens
caatcataacacatgctccaatcagcaatatatgagagttccagtttctctagatgcttaccaacagttagtattgctgatagtttcagttttaccattcatagttgtaaagtgctttttcctaatgactaatgaagttgtacactttttcgtacgtttaatggtcatttatttgcatatgaaccaattcttttaaataatttgtcaagttttttgcctagctttgtattgggattatctatttcttattgatttaatagttgtcctttgackgtatagaatcaaattctttgttgattctcccattctgtgtctttctaatgtcataatggggtcttttgatgaacagatgattagttgtgtgtgtgtgtgtgtgtgtgtgtttcctgtttaagagaccttttcctataccaaagttacaaatatacttctctatattatcttctagaagctttactcttttatcttttatatttatatctacagtccatgtagaattgatttttgagtatgagatgaggtaggtgataagtttcatttttttcatatacaaatgaattgattcaaaattttatgttg

SEQ ID NO: 221800 - DNA, 597 bp, Homo sapiens
acttctttttgcatctattgatataggtatgtgatttttattctttagcttgtgaagtgagggattacattagtatatttttgatggttgaactagccttgcatacctgggataaattccaattggttatagtatataattatttgtatgcattgtcggatactatgtgctaaaattctgctgaggacttttgcacgcaagttcatgtaagatattggtctatagttttcttttcttgtaaagtctttggttttggtattatgataatgctgatcacatagaatgagttaggaagaaattcctctgttactatcttctgaaaaaagatatattttccttaaatgtttggtagattttagcagtgagaaaatctagtcctactagtttctgtttagaaaggttattaattattgtttcaatttctttaatasatatagacttattcagattatctatttctttttgtgtgagttttggaagatcgtgtatttcaaggaattgctgcattttatctaagttataaattttgtgggcatagaattgttcataatatttttgttgactgtgagctaaagctttctttgttcatttcttgta

SEQ ID NO: 221801 - DNA, 593 bp, Homo sapiens
agaaagccatggaactggtgacaatcaactattcctctgacctgaagaatctgattttgtaagttttaatatatgataaattgtacagaatgattatttgcgataagacagagctttttttgttttaagtgattgttttggttcccactatttaaaatcaagcaaaacagaaactttatgtctttatttttattgcaaagtaaatatttcttagataaattgataaaccagtgtgtttaaattagttattgatgttttaaacatttrgttaaagggcacccagtagaagtttgttggtatccactagctacatgtgaccttttacattgatattaattgaaatttaaagcttacttcttcaattacactagtcacatttcaagagctcagcagccacatgtaattactggctaatataattggacagcacagacatagaatatttccctcatcttggagttctgttggatagtgctgctctagagagtgtgaaagccatcatgagtaagcctcaggtgcaatccagtcatgtactctggccaaaatacccattctggaaagcatttgtgtggagacccccatgcttacactcc

SEQ ID NO: 221802 - DNA, 466 bp, Homo sapiens
agctcatttgcagattatgctcatgtaaacaatgtgaacacacctcaacaagagaaaaatcatagtagtatattacttacaataaaactttaaggctaccagagatattcaattctgacactgctctctagggaagaaaggaaaatgcttacaaatttaactgaacctggaaaaaaaccaaagtagaagaaaaggtaagggaacaagtggtgggaggggagttggaagggagacaggtagtaagagaaagaatggtggggaaatgaggcgctgacaaaatccttagcaacacaaggttattaagctctgagtactctgatactttaatgctaaaacagatgctctgcgccactgtgttatctttatcttctcccatttttcttcccaaagaggtccttgaattagatatatgagtatttaaatcaamgatttacttactaattagattaagccctggagacagtac

SEQ ID NO: 221803 - DNA, 580 bp, Homo sapiens
tgcaacatagtcctggcagggaagaagagctacttgcatatcagcagtgaagcttggttttccttgatctggatgtagagagcccctgaccttaatgacacatattgaagagacagggctagcgagaacagctgcttagctaatcacaccagcagatcagctctggtctcaggggtgctaagtagagcagccagctcrccctcacaggcactgctctgcgcacaccctggatatcttgttcacatttcttttctgcaataatagttcttcattcattgtgtaccgtaaggatagatttcatgagaaggaaaaggcaactacaactcaagttttgcaaaagatatttgacatttctgaatttcattaaggaatttgattaaggaatcaagcaaaactgctgattctagtagcctgagcgtgacagatggtcagtttttcatccctgggtattaacagcctcattcctctctctcttctaaggttccttaagatctttcctggatctagtcaaatcacttgataattcagaggtgattctgtcctcttaggtactaggatctgaatatggtgcctacagatg

SEQ ID NO: 221804 - DNA, 578 bp, Homo sapiens
gttgactgtgatcttcttggcaactgctttttccagctctggtagcctcttcattcacatcctgaattcacatcagctaaagattcaagagggatcccttggtaaattgccagagttctctctgtatgtgagctctctcttcttcagtatgttttcttgtatagtattgccaccttagccactgtggacttccagtttggtctcctcaattcagacagatcagcaggctccacctgatgtccccctttctatacaaggttgggaaactctcccaaggtagtaagctgggttaatcacaaggttcacctcatttgttttccatctctcagggatcactgtccttcactgtctgatatctcatgtcttgaaaactgctgttacatatgtttttgttcagttttttagctgtttctgaagagaggtaagtctaatctctgttctttcaccttggccagaagacaaatttagtggtaatgttttgaaaatattaagkaattttttgactttatcaatatataaagtttagccaactctttttggttagattaaacacccactaggagagaggcgatctacaa

SEQ ID NO: 221805 - DNA, 545 bp, Homo sapiens
agatacaaaataatgaaaatgtaaatatccaggaaaagaagaaaagaatactggagaagcaacattcgaaaaaaaagaattgtgattttcaagaactcagcacacaactcctcactcaagaagttctaagttaagagttctcagcagaggctgaatgtggtagctcagacctgtaatcccagcattttgggaggctgacgcaggcggactgcttgaggccaggcgttagaggccagtctgggcaacatggtgaaaccccgtctctacaaaaaatataaaaaattaggccgggtgcggtggctcatgtttgtaattccagcactttgggaggccraggcgggtgggtcacctgaggtcaggagtctgagaccagcctggccaacatgctgaaaccccgtgtctactaaaaatacaaaaattagtcaggcatggtggcaacatgcctgtaatttcagctacttgggaggctgaggcagaagaatcacttgaaccagggaggcagaggttgcagtgagcagaggttgcaccactgttccagcctgggt

SEQ ID NO: 221806 - DNA, 616 bp, Homo sapiens
agattcttgaagacaaaatgcctcttgccctcttgagttaactaaaagtgtactgagatttgtcatttatccatttttattgtctttgtcccaaagaaagtaggcctattttttccccttaaaatatctttccaatctagtttccttatgatgatattaggcgggtaatacyatgaccaatttctaagacaaagtgttggtcacttattcaatttctagtacttagtgacctgagttgttttcctaggacataatccacaaaacaagattgaagaatacagagctggcatgtgtacttttacattcttgggtttcaagcttttgcctattattttgtgtggttttctgcagcatgtgtacacaccctctgtgattatgctaattatttatcagctgaaaattagtgtttggggacaactgcctctttttaattgagggcacttttctctgcggctggcactcacacccagcatatgctttacttgtttcatgatcctgttgatgttagggtttagttttctgggcaatctgcctagtttgattttgttttttacttactggttgcagtgttctgattgtttagcacagccattttctaggaccgatagaaacctct

SEQ ID NO: 221807 - DNA, 578 bp, Homo sapiens
tttttttttttttaagattctttttgttcttggatttcaggaattttaatggtagcaacacctttgacccaacctccaactgcatccatctatcaggtactataaattccaatcccactcactagggctgctgatagtaaccaacaagtagatacagctgaaaccagatataaccttgtgtatttctctacatttacaaccccagtataactgccagttaaaacagccttttctctctatctggacataatctgggttattttcagttgctagacattacttcaaattactttgtcatttatttggcttaagaaataaacaagtcttgggcctccttgctcccacgttaatcaatcagaggagtgtacctcggggccttgcagccacactctgtattgaaagacaaagttagcagacttgacacactttctctcacccatcagagacactcaaatggacatcagccaaattctagcatgtggcaactctggaaaggaaaagagtgataagaatgatcttcaacaaggagactstcctgaaatgggattatttaaacccacagagccccaggggaattc

SEQ ID NO: 221808 - DNA, 563 bp, Homo sapiens
gcacaatcaccagtggccaatgatttgatccctcatgcctatggaatgaaacctcaataaaactccctacagggcagggtttggagagctgtcaggttggtgaatacatccatgtgctgggaggatggagtgcctggagaggacatggaaactcagggttccccctgataccttaccctatccatttcttccatctggctgcccgagttgcatcctttatcaaaaactggtaatcataagtgaaatgccttcctaagttctgcaaggcgttctcaccaattactgaactggagacaggatcatgggaatttcccaagttctagttagacagacaaaagtgtgggtagcttggggatcccatttggagctggcatctgaagtgctagcagtcttgagggacagagcccttgagctgyggcatctgtgctaactgcatagctagcattagaatttaattgaattgttggacacgttcttggcatcagggaattggagaatacatttcatgaggctatggctgccatagataaattctgatggatctgagcaaaattaattgaaaa

SEQ ID NO: 221809 - DNA, 554 bp, Homo sapiens
gcacaatcaccagtggccaatgatttgatccctcatgcctatggaatgaaacctcaataaaactccctacagggcagggtttggagagctgtcaggttggtgaatacatccatgtgctgggaggatggagtgcctggagaggacatggaaactcagggttccccctgataccttaccctatccatttcttccatctggctgcccgagttgcatcctttatcaaaaactggtaatcataagtgaaatgccttcctaagttctgcaaggcgttctcaccaattactgaactggagacaggatcatgggaatttcccaagttctagttagacagacaaaagtgtgggtagcttggggatcccatttggagctggcatctgaagtgctagcagtcttgagggacagagcccttgagctgtggcatctgtgctaactgcatagctagcattagaatttaattgaattgttggacacsttcttggcatcagggaattggagaatacatttcatgaggctatggctgccatagataaattctgatggatctgagcaaaatt

SEQ ID NO: 221810 - DNA, 559 bp, Homo sapiens
tgtactatctctagttcactttttttccctcaactaactaaacaggcttctcacattttattcttctggaacctcagaargatggaacccattttcgtggtgcttctctaagctttctccctctctccctgtctgtctctttctccctgcccctgtgctgtgtgtgtgtgtgtgtgtgtgtgtgtgtgtgtgtgtgtgttattaaatcttcttccttcatctgtctccttactgcaggccttcctcccaaactgggtccttgatatctgttcctgtgaattgaacaaatcttatagaaaactctttggtagtttattctaaagataaacacgcatctacctttgagctagcaatccccttcttcagtatttacctaagagaaataaaaacatatgtccacagaaaagttgcacacacagaccttcatctagccttataatagtctcaaactaaaaacaatccaaatgtccatcaagaagtgaataggtaaattatgttatacccacacaatggaatactatttagcaatgcaacaacatgcaagaatctcaaaaacatt

SEQ ID NO: 221811 - DNA, 572 bp, Homo sapiens
agcttaactgaagaatggactgatttcttacagtgaaagtgacttacagtaatcttccccaaactgcacagtccataaggcatttatttgtgaaagacaaggaagtatggaattgtattaaaggtaggagacaaaggctaaaggcaaccatgtgaagaacagaggaaagttgctgccacctagaggtaaaagttggtaaattttgagaatgtgctgtgaatactcaaaaattcttgagtagacattgatgtaatgtaatcctaaactgaaatgcagccaagtgacttagtttctgcctctaggtgagacgagatttattccatctcccttcactccccattagtagtgtctccatattcctcatgagattttggtgacctgggtgggtttttgcattttttgccagcagtagccttgttactggtcataataacttaagttattgaaagtcttcatcctgtacaatataatctcagttatttggaagtcatcattaccatggctaatagagaatgtgttttccrcagtcttggctatcttttttcaaatatactctcagaagcaccactaaa

SEQ ID NO: 221812 - DNA, 573 bp, Homo sapiens
cgcaactaaaaactagcctgatgatgtgaggattggaaaaaaaatatggaagaggaaataggaagcagcctaggaacacagtgaccatgacagtagtgatgttgaaagaaagcagtgttcagccaggcgcggtggctcatgcctgtaatctcagcactttgggaggctgaggagggcagatcacctgaggttgggagtttgagrccatcctgaccaacatggagagaacccatctactaaaaatacaaaattagccaggcgtggtggtgcatgcctataatcccagctactcgggaggctgaggcaggagaattgcttgaacccgggaggcggaggttgcggtaagccaagattgcgccatggcattccggcctgggatgaagagagactctgtctaaaaataaaaataaaaaagaaagaaagcagtgttcattggctgtaaactttgtagttgcatttggtattagaataattgcttattttttccaccttgtttcaaaaggtttaacgtttataataatagctgtagtttctcgagtggaacatattctggttcacgtactaagctaaaat

SEQ ID NO: 221813 - DNA, 604 bp, Homo sapiens
catccccttctgttttctgtttcttgctctcagctcagtgtctgtgcatatgctggtccttttattcacagccccccttaccagccccacctagtttactcctaccccttcctcagctccgcagttcaaatgtcacttctctccctccaactcaccaaactggatcatgtctccaccttacagattctcatcattccctgcattgcccttcatagcacttagaaggcttataattatatggagagtgattatttgataaaaagtaagaactatttctccctagctcaccactttatgcctagtaccaggccgtatgtccaatacaaagtaggcacacattacatactgttstataaataaaaagagatgatgagaactcacaatagtagtcttattttacctaaagatgtgttgctgcaataatttggaaaaataagtaagtcaatatatgtgtgtgtatacatatacatatacaaactatatatatatacacacacacacacacacatctatatatatatatatatagattatacattaaaaagatacagtacaaaatgtaagagaaggtgactgaaaaatgatgtaccttaaagaaaagctt

SEQ ID NO: 221814 - DNA, 553 bp, Homo sapiens
taacctgtagcagaatgttacttgttgactccaaattcatgacttcaagtttgagaagatattctgtttagcatagttggcttgaattaatgaacacagaaaacatcctttcatattagatatgcttgtgattggttataaaagttaaaacttaagtatgtggttttgtatgaacattaatcaaccattgctggaaaaactgtactcaatctgttgaaggatcagtgataccatttatgtatatgaggggcagtattagctcttctatctgtgaatattatgttgaccttatttgtctgaatttgtcggttgccaagtgttacttatttttattgaatccagaacaataaaaactcataagagctaaatacttaatacttttctgatttttttcattttaatgaataatatcaatatatacttttataggacagtgcctgtattttgtgaagtaaaaacacaaatctctaaattacagcagtatattgttaaggaaaaatattygtaaaaatataaatacaatagccataaatgctattccaaatggtttact

SEQ ID NO: 221815 - DNA, 598 bp, Homo sapiens
gaattcactcactatcatgagaagagcatgggggaaactgctcccatgatccaatcacttcccaccaggtctcttcctaaacacttggagattacaattcaagatgagatttgggtaggggcacaaagcctaaccatatcacacactattctagttcacccaggaaataggtaaattatgaaataggagaccacctgtgaaaccatgctaacctaaagactgaaattcaaaacaaagaaataaggtgaaaagcactttgaaattggttacatgtcttagagaaaagttctgctattatatctaaatacattaaatactagcaagtacctggtatatagcaggctgtcaagaaatgatatttgctttccttatacaaacataaatcttccattttaaatgaaaaataaacagttcatttaamaattaacagtctacttagatatcttcccttgattcaactgagctaccctatttctacctgcagccttcattacaccccagattctagtattaattgaatcctagtcaagggtttaactaagtccccaaaattaattctgtattggttcaacatttttaattagtacctttgcttgtc

SEQ ID NO: 221816 - DNA, 494 bp, Homo sapiens
gctgctgggttctgagtgtttgtccctcacacgggattccagaaaactgctatgagcacctgaaggtttgtccataacaaaggattccagaacactgcttcgagggtctgagtgtttgtccctcacacaggattccaggccactgcytctgggctctgagtgttgttccacatataggatccagaacacagctacagggctatgaaagtttgtctctcacaaaggatttcagaaaaattttgctggttctgagtgtttgtccctcacataggattccagaacactgctgctggtttctgagtgtttgtccctcacattggattccagaacactgctgctgggttctgagtgtttgttcctcacataggtttccagaaaactgctgctgggatctgagggattgtccctgtcattgagtacgagaacactgctgctgtgttctgaaggtttgtccttcacttagaattgcagaatacagctgctaggttacgagg

SEQ ID NO: 221817 - DNA, 400 bp, Homo sapiens
gaattctagaactctgctgctgggttctgagtgtttatctatcacatgagattctggaacactgctaaaatgtaggaatgtttgtccctcacaaagagtccagagcaccgcttgtgggttctgagtgtttgtmcctcacataggattgcagaacaccgctgctaggttctgagtgtttgtcccaaacataggattcccaaaacactgctcagagggtctgaaagtttattcctcaccaaggattccagaacactgctgctgggttctgaaagtttgtccctcacatacgattccagaacagtgctatgagggtctgaatgtttgtccctcaaagggattccagaacactgcttttgagttctgagtgtttgtccgacacaaaggattccagaacactgct

SEQ ID NO: 221818 - DNA, 492 bp, Homo sapiens
agaattctagaactctgctgctgggttctgagtgtttatctatcacatgagattctggaacactgctaaaatgtaggaatgtttgtccctcacaaagagtccagagcaccgcttgtgggttctgagtgtttgtccctcacataggattgcagaacaccrctgctaggttctgagtgtttgtcccaaacataggattcccaaaacactgctcagagggtctgaaagtttattcctcaccaaggattccagaacactgctgctgggttctgaaagtttgtccctcacatacgattccagaacagtgctatgagggtctgaatgtttgtccctcaaagggattccagaacactgcttttgagttctgagtgtttgtccgacacaaaggattccagaacactgctgctggcttctgagtgtttgtccctcacataagatttcagaacactgctatgagggtctgcatgtttttccttcagaaagcattctgtatca

SEQ ID NO: 221819 - DNA, 534 bp, Homo sapiens
ggctgggttgtgtttgtcccccacataggattccagaatactgctgctgggttctgagtgtttgtccctcacataggattccagaacactgctacgagggtctgaatatttttgcctctcaaaggattccagaacactgctgctcagttgtgtttgtttgtccctcacaagggactccagtgcactgctgcaggtttctgagagtttttccctcacataggattccagaacacttctacgagggtctgaatgtttgtatctcacagtggaatctacaaaactgctgcagggttmtgagtgtttctcactcatataggattacagaacactgctgctgggttctgagagtttatccctcacatgggattccagaacacagctgctgggttctgagtgtttgtcccccacataggattgcagaacactgctactagggtcagaatgtttgtccatcacaaaggaatccagaatattgctgctgggttctgagtgtttgtccatcacataggattccagaacactgctccaagggtc

SEQ ID NO: 221820 - DNA, 514 bp, Homo sapiens
ttgtcccccacataggattccagaatactgctgctgggttctgagtgtttgtccctcacataggattccagaacactgctacgagggtctgaatatttttgcctctcaaaggattccagaacactgctgctcagttgtgtttgtttgtccctcacaagggactccagtgcactgctgcaggtttctgagagtttttccctcacataggattccagaacacttctacgagggtctgaatgtttgtatctcacagtggaatctacaaaactgctgcagggttatgagtgtttctcactcatataggattacagaacactgctgctgggttctgagagtttatccctcacatgggattccagaacacagctgctgggttctgagtgtttgtcccccacatargattgcagaacactgctactagggtcagaatgtttgtccatcacaaaggaatccagaatattgctgctgggttctgagtgtttgtccatcacataggattccagaacactgctcc

SEQ ID NO: 221821 - DNA, 525 bp, Homo sapiens
ttgtcccccacataggattccagaatactgctgctgggttctgagtgtttgtccctcacataggattccagaacactgctacgagggtctgaatatttttgcctctcaaaggattccagaacactgctgctcagttgtgtttgtttgtccctcacaagggactccagtgcactgctgcaggtttctgagagtttttccctcacataggattccagaacacttctacgagggtctgaatgtttgtatctcacagtggaatctacaaaactgctgcagggttatgagtgtttctcactcatataggattacagaacactgctgctgggttctgagagtttatccctcacatgggattccagaacacagctgctgggttctgagtgtttgtcccccacataggattgcagaacactgctactagggtcagaatgtttgtccatcacaaaggamtccagaatattgctgctgggttctgagtgtttgtccatcacataggattccagaacactgctccaagggtctgaa

SEQ ID NO: 221822 - DNA, 533 bp, Homo sapiens
ttgtcccccacataggattccagaatactgctgctgggttctgagtgtttgtccctcacataggattccagaacactgctacgagggtctgaatatttttgcctctcaaaggattccagaacactgctgctcagttgtgtttgtttgtccctcacaagggactccagtgcactgctgcaggtttctgagagtttttccctcacataggattccagaacacttctacgagggtctgaatgtttgtatctcacagtggaatctacaaaactgctgcagggttatgagtgtttctcactcatataggattacagaacactgctgctgggttctgagagtttatccctcacatgggattccagaacacagctgctgggttctgagtgtttgtcccccacataggattgcagaacactgctactagggtcagaatgtttgtccatcacaaaggaatccagaayattgctgctgggttctgagtgtttgtccatcacataggattccagaacactgctccaagggtctgaatgtttttc

SEQ ID NO: 221823 - DNA, 533 bp, Homo sapiens
ttgtcccccacataggattccagaatactgctgctgggttctgagtgtttgtccctcacataggattccagaacactgctacgagggtctgaatatttttgcctctcaaaggattccagaacactgctgctcagttgtgtttgtttgtccctcacaagggactccagtgcactgctgcaggtttctgagagtttttccctcacataggattccagaacacttctacgagggtctgaatgtttgtatctcacagtggaatctacaaaactgctgcagggttatgagtgtttctcactcatataggattacagaacactgctgctgggttctgagagtttatccctcacatgggattccagaacacagctgctgggttctgagtgtttgtcccccacataggattgcagaacactgctactagggtcagaatgtttgtccatcacaaaggaatccagaatattgctgctgggttctgagtgtttgtccatcacatagkattccagaacactgctccaagggtctgaatgtttttc

SEQ ID NO: 221824 - DNA, 306 bp, Homo sapiens
attccagaactctcctgttgggttctgtttgtttacccctcacaaaggaatccagagcactgctgctggtttctgagtgtttgtccctcactcaggataccagaacactgctacgatggtctgaatgtttgtccgtcacaaaggattcataacactgctgtgggttctgactgtttstccctcacaatggattccagaaaactactttgagagtatcaatgtttgtccctcacaaagtattccagagcactgctgcggggttctgtgtgtttgtccctcacatgggattctaaaacactcctgctg

SEQ ID NO: 221825 - DNA, 306 bp, Homo sapiens
attccagaactctcctgttgggttctgtttgtttacccctcacaaaggaatccagagcactgctgctggtttctgagtgtttgtccctcactcaggataccagaacactgctacgatggtctgaatgtttgtccgtcacaaaggattcataacactgctgtgggttctgactgtttctccctcacaatggattccagaaaactrctttgagagtatcaatgtttgtccctcacaaagtattccagagcactgctgcggggttctgtgtgtttgtccctcacatgggattctaaaacactcctgctg

SEQ ID NO: 221826 - DNA, 487 bp, Homo sapiens
tcactcacataggattccagaacacwgctgctgggttctgagtgtttgtccctcacatacaattccagaacactgctactaggttctgaatgtttgtccctcacaaaggattccagaacactgcttctgagttctgagtgtttgtctgtcaaataggattccagaacactgctgctgggctctgtttgcttgtccatcacaaaggattccagaacactgctataagtttctgagtgtttgtccctcacataggattccagaacaattctacgaggctccgaatgtttgtccttcagataggatttcagagcacagtggctgggttctgagtgtttgtccctcacatagggtatcagaacactgctgctgggatctgagtgtttgtctttcacagaggattccagaacactgctgctttgttctgagtgtttgtccctcacataggattccagaacactgccgctcggtactgagggtttgttcctta

SEQ ID NO: 221827 - DNA, 487 bp, Homo sapiens
tcactcacataggattccagaacacagctgctgggttctgagtgtttgtccctcacatacaattccagaacactgctactaggttctgaatgtttgtccctcacaaaggattccagaacactgcttctgagttctgagtgtttgtctgtcaaataggattccagaacactgctgctgggctctgtttgyttgtccatcacaaaggattccagaacactgctataagtttctgagtgtttgtccctcacataggattccagaacaattctacgaggctccgaatgtttgtccttcagataggatttcagagcacagtggctgggttctgagtgtttgtccctcacatagggtatcagaacactgctgctgggatctgagtgtttgtctttcacagaggattccagaacactgctgctttgttctgagtgtttgtccctcacataggattccagaacactgccgctcggtactgagggtttgttcctta

SEQ ID NO: 221828 - DNA, 487 bp, Homo sapiens
tcactcacataggattccagaacacagctgctgggttctgagtgtttgtccctcacatacaattccagaacactgctactaggttctgaatgtttgtccctcacaaaggattccagaacactgcttctgagttctgagtgtttgtctgtcaaataggattccagaacactgctgctgggctctgtttgcttgtccatcacaaaggatyccagaacactgctataagtttctgagtgtttgtccctcacataggattccagaacaattctacgaggctccgaatgtttgtccttcagataggatttcagagcacagtggctgggttctgagtgtttgtccctcacatagggtatcagaacactgctgctgggatctgagtgtttgtctttcacagaggattccagaacactgctgctttgttctgagtgtttgtccctcacataggattccagaacactgccgctcggtactgagggtttgttcctta

SEQ ID NO: 221829 - DNA, 408 bp, Homo sapiens
gttttccttttaattatatttctcaaaccctgttcacaattaccagacattgtatatatgtataaattgcccmccaagcttcattttagagaaggctttccccctcaggcttccagtcaactcattcagttgtgcttcaaagtgcacactgcccccagagtatgcaggcagacttgtgtctctgcctgtttcacatctatagtcctctacaaccacttgtagagaggttaagcctttctacaagtggttgacaaaattcacaggacagtaatcagccatttcacctctttcagtgaccatagtgtcttcagacctgaaactgagttggagactattaggcccagaagaacaattagggtgacatgtgtgcattgagtaaatgtgagtatctcaaagttcctctttctc

SEQ ID NO: 221830 - DNA, 564 bp, Homo sapiens
tgaaatgtaaatagccaaaagaatagtatcctatttcacagtgtctgtaaaagaaccagagcctactttcagcaggcacctggctgtaagttgcaaaactacctcctatcatgaagatgtcagaagtttatttttcctttcaatataaccaattaacatacacagatggcctccccaattaccaggtgaattcaggataaactgtgtatgacaaatggtgctgtcaagtcttctacttgaggactaattatagagacctttctgtctttgcaatctcttgagcagattgtctgtgattcttgtcacatcacattctggttttattgtgcaataaaacactcttctttctggtctgttattgtggggtttttctaggactggagatagttttccttttaattatatttctcaaaccctgttcacaattaccagacattgtatatatgtataaattgcccaccaagcttcattttagagaaggctttcccccycaggcttccagtcaactcattcagttgtgcttcaaagtgcacactgcccccagagtatgcaggcagacttgtg

SEQ ID NO: 221831 - DNA, 584 bp, Homo sapiens
tgtctttgcaatctcttgagcagattgtctgtgattcttgtcacatcacattctggttttattgtgcaataaaacactcttctttctggtctgttattgtggggtttttctaggactggagatagttttccttttaattatatttctcaaaccctgttcacaattaccagacattgtatatatgtataaattgcccaccaagcttcattttagagaaggctttccccctcaggcttccagtcaactcaktcagttgtgcttcaaagtgcacactgcccccagagtatgcaggcagacttgtgtctctgcctgtttcacatctatagtcctctacaaccacttgtagagaggttaagcctttctacaagtggttgacaaaattcacaggacagtaatcagccatttcacctctttcagtgaccatagtgtcttcagacctgaaactgagttggagactattaggcccagaagaacaattagggtgacatgtgtgcattgagtaaatgtgagtatctcaaagttcctctttctcctcctccccaaattcccaaaaatgtgcagttaacacctgccatttctccatc

SEQ ID NO: 221832 - DNA, 465 bp, Homo sapiens
gttataagcaatacctcacagcttaaaaatatatagccaattagtcatcaatgtatttttgtagatcgagaagaatttctgacaaacaactttgtttcagtccactccctgtccctctcttttgcctttgtaaatccacttgtaactgctgctaagtaaagtgtacattcaaggtaacttgaatctatgctcccagatttcaatcctcaggcttggcccaaataaaytctctacttaaatgagtgttgccttaaccttttctttttaggctgacatatcatgtcctagagcagactttatgatggaaacttttttttttttactctccttgctgtaacaccaaagaatgaagagtcaggttgatcttacctgtaatctgtacataagagctgagctctccctgggattcacaggagagagccagattttggattgagaatgtacagaaaacccataggagacatt

SEQ ID NO: 221833 - DNA, 465 bp, Homo sapiens
gttataagcaatacctcacagcttaaaaatatatagccaattagtcatcaatgtatttttgtagatcgagaagaatttctgacaaacaactttgtttcagtccactccctgtccctctcttttgcctttgtaaatccacttgtaactgctgctaagtaaagtgtacattcaaggtaacttgaatctatgctcccagatttcaatcctcaggcttggcccaaataaactctctacttaaatgagtgttgccttaaccttttctttttaggctgacatatcatgtcctagagcagactttatgatggaaacttttttttttttactctccttgctgtaacaccaaagaatgaagagtcaggttgatcttacctgtaatctgtacataagagctgagctctccctgggawtcacaggagagagccagattttggattgagaatgtacagaaaacccataggagacatt

SEQ ID NO: 221834 - DNA, 311 bp, Homo sapiens
acaggtgatatcacacatagatccaggttctggagctstaccagggcagttccattttctatttagaatcagcttgagtctttcctacctggatcaacatatggtcatcagtccatggtcactaggaatcctctcacaatcacccaggaatctttaagacatttcaggatgtcctgtacagacttgggtcaggctggcaggagtgtctaattctgcttccatgttagaggaagggaaatgagtcattcagtgtctgttccttcttttgtagaaataatctccttggttggtacctggacgagagtttctcc

SEQ ID NO: 221835 - DNA, 311 bp, Homo sapiens
acaggtgatatcacacatagatccaggttctggagctgtaccagggcagttccattttctatttagaatcagcttgagtctttcctacctggatcaacatatggtcatcagtccatggtcactaggaatcctctcacaatcacccrggaatctttaagacatttcaggatgtcctgtacagacttgggtcaggctggcaggagtgtctaattctgcttccatgttagaggaagggaaatgagtcattcagtgtctgttccttcttttgtagaaataatctccttggttggtacctggacgagagtttctcc

SEQ ID NO: 221836 - DNA, 311 bp, Homo sapiens
acaggtgatatcacacatagatccaggttctggagctgtaccagggcagttccattttctatttagaatcagcttgagtctttcctacctggatcaacatatggtcatcagtccatggtcactaggaatcctctcacaatcacccaggaatctttaagacatttcaggatgtcctgtacagacttgggtcaggctggcaggagtgyctaattctgcttccatgttagaggaagggaaatgagtcattcagtgtctgttccttcttttgtagaaataatctccttggttggtacctggacgagagtttctcc

SEQ ID NO: 221837 - DNA, 528 bp, Homo sapiens
ccccattgctgtagcagaaattgttgcgtctgtggcaggaaaagagaaagataaattttgatctttgtggaggagctcactgtccttgaatctcacctgttataaagaacataaatgggtggacatkttctgcatgcctggatctttctacctgtgtttgtggtggtagcaggtgaagagattgtgctgattcctttaaaggcatattcccaagatgcaggtgtgacttgtccagagaatatcacctgagaagaaatgctagagaaggatgatgaagagaaaaatggctttttctcaggtgactgtgtctcagattaggagcagtgttcactctgcctcctggaatgccatatgtttagaacttacaaacctgtacttcttgactttatgctgtttctccctataagtttgtttaaacattttttcttctcatgatagtcaagcaactctgaaatatattattttctatatactagagtcttctcgacattctcttcatcttggcttcttctctgtcatgcggaattc

SEQ ID NO: 221838 - DNA, 528 bp, Homo sapiens
ccccattgctgtagcagaaattgttgcgtctgtggcaggaaaagagaaagataaattttgatctttgtggaggagctcactgtccttgaatctcacctgttataaagaacataaatgggtggacatgttctgcatgcctggatctttctacctgtgtttgtggtggtagcaggtgaagagattgtgctgattcctttaaaggcatattcccaagatgcaggtgtgacttgtccagaraatatcacctgagaagaaatgctagagaaggatgatgaagagaaaaatggctttttctcaggtgactgtgtctcagattaggagcagtgttcactctgcctcctggaatgccatatgtttagaacttacaaacctgtacttcttgactttatgctgtttctccctataagtttgtttaaacattttttcttctcatgatagtcaagcaactctgaaatatattattttctatatactagagtcttctcgacattctcttcatcttggcttcttctctgtcatgcggaattc

SEQ ID NO: 221839 - DNA, 528 bp, Homo sapiens
ccccattgctgtagcagaaattgttgcgtctgtggcaggaaaagagaaagataaattttgatctttgtggaggagctcactgtccttgaatctcacctgttataaagaacataaatgggtggacatgttctgcatgcctggatctttctacctgtgtttgtggtggtagcaggtgaagagattgtgctgattcctttaaaggcatattcccaagatgcaggtgtgacttgtccagagaatatcacctgagaagaaatsctagagaaggatgatgaagagaaaaatggctttttctcaggtgactgtgtctcagattaggagcagtgttcactctgcctcctggaatgccatatgtttagaacttacaaacctgtacttcttgactttatgctgtttctccctataagtttgtttaaacattttttcttctcatgatagtcaagcaactctgaaatatattattttctatatactagagtcttctcgacattctcttcatcttggcttcttctctgtcatgcggaattc

SEQ ID NO: 221840 - DNA, 528 bp, Homo sapiens
ccccattgctgtagcagaaattgttgcgtctgtggcaggaaaagagaaagataaattttgatctttgtggaggagctcactgtccttgaatctcacctgttataaagaacataaatgggtggacatgttctgcatgcctggatctttctacctgtgtttgtggtggtagcaggtgaagagattgtgctgattcctttaaaggcatattcccaagatgcaggtgtgacttgtccagagaatatcacctgagaagaaatgctagagaaggatgatgaagagaaaaatggctttttctcaggtgactgtgtctcagattaggagcagtgttcactctgcctcctggaatgccatatgtttagaacttacaaacctgtacttcttgactttatgctgtttctccctataartttgtttaaacattttttcttctcatgatagtcaagcaactctgaaatatattattttctatatactagagtcttctcgacattctcttcatcttggcttcttctctgtcatgcggaattc

SEQ ID NO: 221841 - DNA, 620 bp, Homo sapiens
cactggtattgtgaatcttatgctctcttttctcagagatagagaatgcaacagagaatatttctttgttgggaattattttataggacaattttggtcgtatcagtcagaatcagttctcttcactcattttatcttgagtcaatttaagaattctgccyatggccacttgaagtgggtgtgtgtgtgttttcagggactgttgacattcagggatgtagccatagaattctgtctggaggagtgtcaatacctggatgctgctcagcagaatttgtgtatggatgtgatgttacagaactacagaaaccctgtcttcttggttgaggataacttcaatatagaattcctaatttaccctaaaggtttcattttcttcctttgtaggatgtgttttggtaatttctgctttgcatgagtaaatttcagatccctgttttcaagacaatcttgcggattttttggtgtggaaaatgaattcttcaggttgtttcattttgacctgaattttcccctttcctgagtttatctatgttattcactctagataagtggtaatttcagaaacttagtgacataaaataatgttgtccacaccttaaaattcaattgccaccacc

SEQ ID NO: 221842 - DNA, 220 bp, Homo sapiens
tttgtgtatggatgtgatgttasagaactacagaaaccctgtcttcttggttgaggataacttcaatatagaattcctaatttaccctaaaggtttcattttcttcctttgtaggatgtgttttggtaatttctgctttgcatgagtaaatttcagatccctgttttcaagacaatcttgcggattttttggtgtggaaaatgaattcttcaggttgttt

SEQ ID NO: 221843 - DNA, 620 bp, Homo sapiens
cactggtattgtgaatcttatgctctcttttctcagagatagagaatgcaacagagaatatttctttgttgggaattattttataggacaattttggtcgtatcagtcagaatcagttctcttcactcattttatcttgagtcaatttaagaattctgcccatggccacttgaagtgggtgtgtgtgtgttttcagggactgttgacattcagggatgtagccatagaattctgtctggaggagtgtcaatacctggatgctgctcagcagaatttgtgtatggatgtgatgttacagaactacagaaacyctgtcttcttggttgaggataacttcaatatagaattcctaatttaccctaaaggtttcattttcttcctttgtaggatgtgttttggtaatttctgctttgcatgagtaaatttcagatccctgttttcaagacaatcttgcggattttttggtgtggaaaatgaattcttcaggttgtttcattttgacctgaattttcccctttcctgagtttatctatgttattcactctagataagtggtaatttcagaaacttagtgacataaaataatgttgtccacaccttaaaattcaattgccaccacc

SEQ ID NO: 221844 - DNA, 620 bp, Homo sapiens
cactggtattgtgaatcttatgctctcttttctcagagatagagaatgcaacagagaatatttctttgttgggaattattttataggacaattttggtcgtatcagtcagaatcagttctcttcactcattttatcttgagtcaatttaagaattctgcccatggccacttgaagtgggtgtgtgtgtgttttcagggactgttgacattcagggatgtagccatagaattctgtctggaggagtgtcaatacctggatgctgctcagcagaatttgtgtatggatgtgatgttacagaactacagaaaccctgtcttcttggttgaggataacttcaatatagaattyctaatttaccctaaaggtttcattttcttcctttgtaggatgtgttttggtaatttctgctttgcatgagtaaatttcagatccctgttttcaagacaatcttgcggattttttggtgtggaaaatgaattcttcaggttgtttcattttgacctgaattttcccctttcctgagtttatctatgttattcactctagataagtggtaatttcagaaacttagtgacataaaataatgttgtccacaccttaaaattcaattgccaccacc

SEQ ID NO: 221845 - DNA, 620 bp, Homo sapiens
cactggtattgtgaatcttatgctctcttttctcagagatagagaatgcaacagagaatatttctttgttgggaattattttataggacaattttggtcgtatcagtcagaatcagttctcttcactcattttatcttgagtcaatttaagaattctgcccatggccacttgaagtgggtgtgtgtgtgttttcagggactgttgacattcagggatgtagccatagaattctgtctggaggagtgtcaatacctggatgctgctcagcagaatttgtgtatggatgtgatgttacagaactacagaaaccctgtcttcttggttgaggataacttcaatatagaattcctaatttaccctraaggtttcattttcttcctttgtaggatgtgttttggtaatttctgctttgcatgagtaaatttcagatccctgttttcaagacaatcttgcggattttttggtgtggaaaatgaattcttcaggttgtttcattttgacctgaattttcccctttcctgagtttatctatgttattcactctagataagtggtaatttcagaaacttagtgacataaaataatgttgtccacaccttaaaattcaattgccaccacc

SEQ ID NO: 221846 - DNA, 220 bp, Homo sapiens
tttgtgtatggatgtgatgttacagaactacagaaaccctgtcttcttggttgaggataacttcaatatagaattcctaatttaccctaaaggtttcattttcttcctttgtaggatgtgttttggtaatttctgctttgcatgagtraatttcagatccctgttttcaagacaatcttgcggattttttggtgtggaaaatgaattcttcaggttgttt

SEQ ID NO: 221847 - DNA, 220 bp, Homo sapiens
tttgtgtatggatgtgatgttacagaactacagaaaccctgtcttcttggttgaggataacttcaatatagaattcctaatttaccctaaaggtttcattttcttcctttgtaggatgtgttttggtaatttctgctttgcatgagtaaatttcagatccctgttttcaagacaatcttgmggattttttggtgtggaaaatgaattcttcaggttgttt

SEQ ID NO: 221848 - DNA, 412 bp, Homo sapiens
gaattcctaatttaccctaaaggtttcattttcttcctttgtaggatgtgttttggtaatttctgctttgcatgagtaaatttcagatccctgttttcaagacaatcttgcggattttttggtgtggaaaatraattcttcaggttgtttcattttgacctgaattttcccctttcctgagtttatctatgttattcactctagataagtggtaatttcagaaacttagtgacataaaataatgttgtccacaccttaaaattcaattgccaccaccaatttttgattcagtaatactggggagtgaaacagaggaccctcatatttaatgtactttctgaatacgctaaaggttctgtcagtaaaaagtattttgggattaattttctagaatcttctattatgtcctctt

SEQ ID NO: 221849 - DNA, 412 bp, Homo sapiens
gaattcctaatttaccctaaaggtttcattttcttcctttgtaggatgtgttttggtaatttctgctttgcatgagtaaatttcagatccctgttttcaagacaatcttgcggattttttggtgtggaaaatgaattcttcaggttgtttcattttgacctgaattttcccctttcctgagtttatctatrttattcactctagataagtggtaatttcagaaacttagtgacataaaataatgttgtccacaccttaaaattcaattgccaccaccaatttttgattcagtaatactggggagtgaaacagaggaccctcatatttaatgtactttctgaatacgctaaaggttctgtcagtaaaaagtattttgggattaattttctagaatcttctattatgtcctctt

SEQ ID NO: 221850 - DNA, 533 bp, Homo sapiens
tgaagtttggttgctttgtcccttttcctctagattgctttggtttttcaaagcctatcgtagtttcatgtaaattttagaattgtaatttccattactgtgaaaaatgtcactggatttttaatagagagttcattgaaactgtagatcactttgaatcatatggckctttataatatttattcttccagttcataaacttgaaatctttttgcatttatttgtgacttcttccacttctttcatcaatatatgtttcagtgaaaagatcttttgccttctttgttaaatttatttttcagaaatttattattttaattctattggaaatgagattgttttcttccttttttatcagatggtttgttgttagcatatggaatcataactgataattatatgttaatgttatatattgctaattttctgagggcatttgttattttttgatgtattgtttatggttttctatatataagatcatgtcacctacaaacagcaacattttaatttttttcctcaatttgaatgtc

SEQ ID NO: 221851 - DNA, 533 bp, Homo sapiens
tgaagtttggttgctttgtcccttttcctctagattgctttggtttttcaaagcctatcgtagtttcatgtaaattttagaattgtaatttccattactgtgaaaaatgtcactggatttttaatagagagttcattgaaactgtagatcactttgaatcatatggcgctttataatatttattcttccagttcataaacttgaaatctttttgcatttatttgtgacttcttccayttctttcatcaatatatgtttcagtgaaaagatcttttgccttctttgttaaatttatttttcagaaatttattattttaattctattggaaatgagattgttttcttccttttttatcagatggtttgttgttagcatatggaatcataactgataattatatgttaatgttatatattgctaattttctgagggcatttgttattttttgatgtattgtttatggttttctatatataagatcatgtcacctacaaacagcaacattttaatttttttcctcaatttgaatgtc

SEQ ID NO: 221852 - DNA, 533 bp, Homo sapiens
tgaagtttggttgctttgtcccttttcctctagattgctttggtttttcaaagcctatcgtagtttcatgtaaattttagaattgtaatttccattactgtgaaaaatgtcactggatttttaatagagagttcattgaaactgtagatcactttgaatcatatggcgctttataatatttattcttccagttcataaacttgaaatctttttgcatttatttgtgacttcttccacttctttcatcaatatatgtttcagtgaaaagatcttttgccttctttgttaaatttatttttcagaaayttattattttaattctattggaaatgagattgttttcttccttttttatcagatggtttgttgttagcatatggaatcataactgataattatatgttaatgttatatattgctaattttctgagggcatttgttattttttgatgtattgtttatggttttctatatataagatcatgtcacctacaaacagcaacattttaatttttttcctcaatttgaatgtc

SEQ ID NO: 221853 - DNA, 377 bp, Homo sapiens
gaaatgagattgttttcttccttttttatcagatggtttgttgttagcatatggaatcataactgataattatatgttaatgttatatattgctaattttctgagggcatttgttattttttgatgtattgtttatggttttctatatataagatcatgtcacctacaaacagcaacattttaatttttttcctcaatttgaatgtcatttttagggtcattttcttgactaattcttctgcaaagtactttcactgctatgttaaaatagaaacattgacaatggaaccatgtagccttacccyggtgtctataaatttgaagaagcaaacagctctttaattttttataaactgttttcaggaggtacggatctt

SEQ ID NO: 221854 - DNA, 539 bp, Homo sapiens
tattatatctgtcctcaacttagttattgatgtcactaaacatatctatttatgttatatatttattaacagatgttcattattattttttagcttttatctttaaattttagagaataattaaataaaacattttttggtattataataatgctacaggatattttttctataatatttgcatatctttatatctttcctagaaagctacctatttttatatgatacttttgttttttagcatcatatagttttagtaggaggactcttctcagcattttttgtagggcacatgtagtgttgatataatttttccacatttsgttatctttagaggtctttcctttttcttcatttttgtagcacagttttgctggttatattattcttacatagaagctatttttcgcttggtatctcgactatagcacacaatttccttctggcctgcaaggtttttgttgaaagagtcactggttatatcatagaaccataattatgtattttccagcatttgagattctcttcttgtctgtgac

SEQ ID NO: 221855 - DNA, 540 bp, Homo sapiens
ttttactgttcctcaaaccttattcaaaataacatagttcataagagaaacactacaaatgtcaagaatgtggcaaagcttttaagaagtctttagaccttaatgtacataagataattcatagtggagagaaaccctacagatatgaagaatgtggcaaagtctttaaactatcctcaaaactgaatgaacattagataactcatagtggagaggaatcctacaaatgtgaagaatgtggcaaaggcttttactgttcctcaagccttactaagcatatgatagttcatactgaagagactgtacaaatgtgaagaatgtggcaaagcttttaagtggtcctctgagcttactatacatcagagaattcgtactgaagagaarccctataaatgtgaagaatgtgtcagagtctttaaacactcctcaaaactgaatgaacataagagaaatcatactggagagaaaccctacaaatgtgaagcatgtggcaaagctttttaagcagtcttcaggcctcactatacataagagaattca

SEQ ID NO: 221856 - DNA, 576 bp, Homo sapiens
tgtaatacctttacttgccctatataatgtacagattttatgctagaagaaaactctaaaggaattactcaaacttgttcagcatcagagaatttatgttgaaggaaaccatacaaatgtaataaatgtggaaaaacatttgttcagaaactacagcttaaaaaacaccatgcagtttataataaaagatatttttgcagatggaatacatgtgtaaaaatatttattcaaaattaagtctttgtaaactttagaaaattcacagtagggaagaattaaggcactggcacttaagacgttacackaaatcagaatgttctgtatagaaagtaatccaaagctaaaactggtggataatttatttgtatataagtttaagaggagtggaagattattttttggagagttataattacattcaaggtatatgtttttccttgaaaaaaatgtagattttttgaaaagcaaatagtgaggtaattcaactgtaaaactgcttcattctgttccttttttcctgttgtttgtgtaaaagcatgtcatcaatttctgttgcatcagaaatctgagagattc

SEQ ID NO: 221857 - DNA, 615 bp, Homo sapiens
attataaatgtaattacttttgaaagaccttggaaaatttaaacccttaaaaaagagtactctggagacaaacattacaaatataaagagggttgtaatacctttacttgccctatataatgtacagattttatgctagaagaaaactctaaaggaattactcaaacttgttcagcatcagagaatttatgttgaaggaaaccatacaaatgtaataaatgtggaaaaacatttgttcagaaactacagcttaaaaaacaccatgcagtttataataaaagatatttttgcagatggaatacatgtgtaaaaatatttattcaaaattaagtctttgtaaactttagaaaattcacagtagggaagaattaaggcactggcacttaagacgttacactaaatcagaatgttctgtatagaaagtaatccaaagctaaaactggtggataatttatttgtatataagtttaagaggagtggaagattattttttggagagttataattacattcaaggtataygtttttccttgaaaaaaatgtagattttttgaaaagcaaatagtgaggtaattcaactgtaaaactgcttcattctgttccttttttcctgtt

SEQ ID NO: 221858 - DNA, 576 bp, Homo sapiens
tgtaatacctttacttgccctatataatgtacagattttatgctagaagaaaactctaaaggaattactcaaacttgttcagcatcagagaatttatgttgaaggaaaccatacaaatgtaataaatgtggaaaaacatttgttcagaaactacagcttaaaaaacaccatgcagtttataataaaagatatttttgcagatggaatacatgtgtaaaaatatttattcaaaattaagtctttgtaaactttagaaaattcacagtagggaagaattaaggcactggcacttaagacgttacactaaatcagaatgttctgtatagaaagtaatccaaagctaaaactggtggataatttatttgtatataagtttaagaggagtggaagattattttttggagagttataattacattcaaggtatatgtttttccttgaaaaaaatgtagattttttgaaaagcaaatagtgaggtaattcaactgtaaaaytgcttcattctgttccttttttcctgttgtttgtgtaaaagcatgtcatcaatttctgttgcatcagaaatctgagagattc

SEQ ID NO: 221859 - DNA, 548 bp, Homo sapiens
attttgaagtaaatatacattgtcaatgcctaattttagctaattgtcaaatgctttgcctcacatagttattatttttgtggtgcraagacaatatttactgtcagtattttttcagaaatacaatacatgcattataatctcttgaacttatttttcttatccaactgtaattatgtaatcaagatatgttttgtagaatccacatgtgagtgaaatcatgagatattaacttttctgtgccttatttcaacaactatagtgtcctttaggtttatctttgtgattaaaaataagattttctgttgaaaatacagtattcaattgtatatatataccatagtgtctgtatttcatcattggatgatggacacatatgttgattctatgttttggcttctgcaaagtgtgctgcaacaaacacaattgcagatgtctgttcatcaatctagtttcatttgttttgtgatagatatccagtagttcaattacatgttagagtttgttttgcaaaatttctatttttcataatggctgtttttatttac

SEQ ID NO: 221860 - DNA, 548 bp, Homo sapiens
attttgaagtaaatatacattgtcaatgcctaattttagctaattgtcaaatgctttgcctcacatagttattatttttgtggtgcaaagacaatatttactgtcagtattttttcagaaatacaatacatgcattataatctcttgaacttatttttcttatycaactgtaattatgtaatcaagatatgttttgtagaatccacatgtgagtgaaatcatgagatattaacttttctgtgccttatttcaacaactatagtgtcctttaggtttatctttgtgattaaaaataagattttctgttgaaaatacagtattcaattgtatatatataccatagtgtctgtatttcatcattggatgatggacacatatgttgattctatgttttggcttctgcaaagtgtgctgcaacaaacacaattgcagatgtctgttcatcaatctagtttcatttgttttgtgatagatatccagtagttcaattacatgttagagtttgttttgcaaaatttctatttttcataatggctgtttttatttac

SEQ ID NO: 221861 - DNA, 543 bp, Homo sapiens
tctttttttaaaaaaattgtcatctttatttacaatcagttgtctgtaaatacatgaatttatttctggtctttctcttttgctctgttggcctttgtgtccatttttatgtaagtaacactctgttttgattactgtagcttgttggacatttaaaagtcaggtagagtgattccttcagccttttatttttcattttttgcttgattttcttagctattaaggccttttgtggggcaatatacattttagatttttaaaaaattttctgtggagaatttaactggtattttaatagaagttttattatatctgtatatcagtttgtgtaatgcagctatttaacaatattaatcatgcccatttatgaattagaatatctttttgttggaatattattttctaactttttttttagattataatgtacagatctttcacccttttggttacattcayttctaagcatagttactgctgcaattattgtagatgggattgttttttggttttattttcagatactttattgttagtgtatag

SEQ ID NO: 221862 - DNA, 495 bp, Homo sapiens
tgaattcattttctagttcttttctagttttcaacaaagctttcagatgtctgaaactagccagaatcttgtcaacaatttccaaaatcagattctgaaatttgatgttgtttgcaaaattccttcaccaagattcccaagaaaggaaaatgataggagtgaagttcgggagagaggacataataaaaacataaaattgaagaatttgttcttgatcattgtggaaataggagaataccatattttatacgtattaattatacttgtctctaacgacagaaagaaatgtgaagaaatactatgaacaccccaaagttagacagcctaggtgaaatggactgtacacctcaaaattakataacctagatgaaatggacaaatttttagccacacataaattacctaatgtgattcaagaagaagaagaaattcttaacagacctataacaagtacggagaatagaccggcaatcaaaactcctcctcaacaacaac

SEQ ID NO: 221863 - DNA, 495 bp, Homo sapiens
tgaattcattttctagttcttttctagttttcaacaaagctttcagatgtctgaaactagccagaatcttgtcaacaatttccaaaatcagattctgaaatttgatgttgtttgcaaaattccttcaccaagattcccaagaaaggaaaatgataggagtgaagttcgggagagaggacataataaaaacataaaattgaagaatttgttcttgatcattgtggaaataggagaataccatattttatacgtattaattatacttgtctctaacgacagaaagaaatgtgaagaaatactatgaacaccccaaagttagacagcctaggtgaaatggactgtacacctcaaaattatataacctagatgaaatggacaaatttttagccacacawaaattacctaatgtgattcaagaagaagaagaaattcttaacagacctataacaagtacggagaatagaccggcaatcaaaactcctcctcaacaacaac

SEQ ID NO: 221864 - DNA, 596 bp, Homo sapiens
ttgaagaaaccaaaaatgtgcaagcaaattgaattggtgataaaaaaactaccaattataaaaagtgctaaaccagatgcattcacagcatgattttatcatgtatacaaaaatgagttggctgtaattctacagaaagtattccaaaaaatcaaagtgggactccttcctaattaattctatcatataatatcagtctcatcttgatatattaatcaggtaaagacacaaccaaaaaaaattacaggccaatatccctgacgaatacagacacaaacattattcatgaaatgcttgcaaactgagtcaggaaatcaaagttatttcactgcaactatgtggacattattctgtgaawgcaggaatgttttaacatgtgcaatctataaatgtgattcagcatataaaaataattaacaaacaaaaccacattacctcaatagatgtggaaatagcaattaataaaatgtaatatctatttttgaaaaaaattctcaaaaaactaggcattgaaggaacatacctcaaaataattacagccatataggacaaatcctcagccaacaccatactgaacaggtgaaagattaatgcat

SEQ ID NO: 221865 - DNA, 534 bp, Homo sapiens
gttatggttaaagttcaagaacaatgaaacaggagtattggttatttaagacawcagtcctgcaaaggcaatcatttcatcacaaccattttggtgacaaagaataatgtgtcagaaggaatttttagaataattttctgattatatggcagtgttaaatttttatttgtattatttgtcatatataagtctgtaaatcaaaaagaagatggcatgactttcagatgaatcttttcacacatatattctctgtagaagggcactggtgtgtttttcaaaaaggttagcattgctggctttcattgtgctgatatgcttgtgtgctaaatgaaggcagaaagtgaagcagagtcaaccagggcgtctctagtttctacatccacatcatctgaaatctagtgttatgtcaactagaaataatcctggggctaagtattctaaaactaaaaaaaaatgcattgataaatatagttttagtttatttttatagtttataaaaatttattgtttctgacttattacaagttaaaacaa

SEQ ID NO: 221866 - DNA, 534 bp, Homo sapiens
gttatggttaaagttcaagaacaatgaaacaggagtattggttatttaagacaacagtcctgcaaaggcaatcatttcatcacaaccattttggtgacaaagaataatgtgtcagaaggaatttttagaataattttctgattatatgrcagtgttaaatttttatttgtattatttgtcatatataagtctgtaaatcaaaaagaagatggcatgactttcagatgaatcttttcacacatatattctctgtagaagggcactggtgtgtttttcaaaaaggttagcattgctggctttcattgtgctgatatgcttgtgtgctaaatgaaggcagaaagtgaagcagagtcaaccagggcgtctctagtttctacatccacatcatctgaaatctagtgttatgtcaactagaaataatcctggggctaagtattctaaaactaaaaaaaaatgcattgataaatatagttttagtttatttttatagtttataaaaatttattgtttctgacttattacaagttaaaacaa

SEQ ID NO: 221867 - DNA, 524 bp, Homo sapiens
aaacaggagtattggttatttaagacaacagtcctgcaaaggcaatcatttcatcacaaccattttggtgacaaagaataatgtgtcagaaggaatttttagaataattttctgattatatggcagtgttaaatttttatttgtattatttgtcatatataagtctgtaaatcaaaaagaagatggcatgactttcagatgaatcttttcacacatatattctctgtagaagggcactggtgtgtttttcaaaaaggttagcattgctggctttcattgtgctgatatgcttgtgtgctaaatgaaggcagaaagtgaagcagagtcaaccagggcgtctctagtttctacatccacatcatctgaaatctagtgttatgtcaactagaaataatcctggggctaagtattctaaaactaaaaaaaaatgcattgataaatatagttttagtttatttttatagtttataaaaatttattgtttctgacttattacaarttaaaacaatttgaacatgcagata

SEQ ID NO: 221868 - DNA, 338 bp, Homo sapiens
agtttatttttatagtttataaaaatttattgtttctgacttattacaagttaaaacaatttgaacatgcagataactaaaagttccatctagatgawggtattaatatttaataacttatgattgtgagccacaattgccccatttggcttactgaaaagcagtattttaaatggagaataggatttccataattccaagcatacagatcttttaagataagcactatgtttagatttgaatggattgtagtaacagaaactttaatattttttctaataggagcaaaaaagcaataaaaataggtagttaaaattagttcaaaagaaacttcacat

SEQ ID NO: 221869 - DNA, 338 bp, Homo sapiens
agtttatttttatagtttataaaaatttattgtttctgacttattacaagttaaaacaatttgaacatgcagataactaaaagttccatctagatgatggtattaatatttaataacttatgattgtgagccacaattgccccatttggcttactgaaaagcagtattttaaatggagaatagratttccataattccaagcatacagatcttttaagataagcactatgtttagatttgaatggattgtagtaacagaaactttaatattttttctaataggagcaaaaaagcaataaaaataggtagttaaaattagttcaaaagaaacttcacat

SEQ ID NO: 221870 - DNA, 338 bp, Homo sapiens
agtttatttttatagtttataaaaatttattgtttctgacttattacaagttaaaacaatttgaacatgcagataactaaaagttccatctagatgatggtattaatatttaataacttatgattgtgagccacaattgccccatttggcttactgaaaagcagtattttaaatggagaataggatttccataattccaagcatacagatcttttaagataagcactatgyttagatttgaatggattgtagtaacagaaactttaatattttttctaataggagcaaaaaagcaataaaaataggtagttaaaattagttcaaaagaaacttcacat

SEQ ID NO: 221871 - DNA, 338 bp, Homo sapiens
agtttatttttatagtttataaaaatttattgtttctgacttattacaagttaaaacaatttgaacatgcagataactaaaagttccatctagatgatggtattaatatttaataacttatgattgtgagccacaattgccccatttggcttactgaaaagcagtattttaaatggagaataggatttccataattccaagcatacagatcttttaagataagcactatgtttagatttgaatrgattgtagtaacagaaactttaatattttttctaataggagcaaaaaagcaataaaaataggtagttaaaattagttcaaaagaaacttcacat

SEQ ID NO: 221872 - DNA, 578 bp, Homo sapiens
ttcatacattgtagctataagtatttttcattaaaagtcttgtctaaatatggtaaatatttgaaaataagattatcatttaaaaatattttattgtaattgtatacgttctgttatatttaatgtattttttaaacggtaattttttatttgttgcaggatgtcacagtacccaaacggarggactggctgaagccatggcagaagaatgtggattgtgaagatttcatggacatgtatttgttccccaaattaatacttttataatttcctatgcctgtctttactgcaatctctaaacacaaattgtgaagatttcatggacacttatcaattccccaatcaatacccttgtgatttcctatgcctgtctttactttaatctcttaatactgtcagctgaggaggatgtatgccacctcaggaccctatgataattgcattaactgcacagattgtaaagcatgtgtgtttgaacaatatgaaatctgggcaccttgaaaaaagaacaggataacagcagttgtttagggaataagagagataaccttaaattctgaccactggtgagctgggtg

SEQ ID NO: 221873 - DNA, 511 bp, Homo sapiens
atgtatgccacctcaggaccctrtgataattgcattaactgcacagattgtaaagcatgtgtgtttgaacaatatgaaatctgggcaccttgaaaaaagaacaggataacagcagttgtttagggaataagagagataaccttaaattctgaccactggtgagctgggtggaacagagccatatttctcttctttcaaaagcaaatgggagaaatatcactgaattctttttctcagcaaggaacatccctgagaaagagaatgcacccctgagggtgggcctataaatggcctccttgggtgtggccatcttctgtggtcaaaactgtagggatgaaataaaccccagtctcccgtagtgctcccaggcttattaggaagaggaaattcctgcctaataaattttggtcagaccggttgctctcaaaccctgtctcctgataagatgttatcaataacaatggtgcctgaaactacattagcaattttaattttgccccggtcctgtggt

SEQ ID NO: 221874 - DNA, 511 bp, Homo sapiens
atgtatgccacctcaggaccctatgataattgcattaactgcacagattgtaaagcatgtgtgtttgaacaatatgaaatctgggcaccttgaaaaaagaacaggataacagcagttgtttagggaataagagagataaccttaaattctgwccactggtgagctgggtggaacagagccatatttctcttctttcaaaagcaaatgggagaaatatcactgaattctttttctcagcaaggaacatccctgagaaagagaatgcacccctgagggtgggcctataaatggcctccttgggtgtggccatcttctgtggtcaaaactgtagggatgaaataaaccccagtctcccgtagtgctcccaggcttattaggaagaggaaattcctgcctaataaattttggtcagaccggttgctctcaaaccctgtctcctgataagatgttatcaataacaatggtgcctgaaactacattagcaattttaattttgccccggtcctgtggt

SEQ ID NO: 221875 - DNA, 511 bp, Homo sapiens
atgtatgccacctcaggaccctatgataattgcattaactgcacagattgtaaagcatgtgtgtttgaacaatatgaaatctgggcaccttgaaaaaagaacaggataacagcagttgtttagggaataagagagataaccttaaattctgaccactggtgagctgggtggaacagagccatatttctcttctttcaaaagcaaatgggagaaatatcactgaattctttttctcagcaaggaacatccctgagaaagagaatgcacccctgagggtgggcctataaatggcctccttgggtgtggccatcttctgtggtcaaaactgtagggatgaaataaaccccagtctcccgyagtgctcccaggcttattaggaagaggaaattcctgcctaataaattttggtcagaccggttgctctcaaaccctgtctcctgataagatgttatcaataacaatggtgcctgaaactacattagcaattttaattttgccccggtcctgtggt

SEQ ID NO: 221876 - DNA, 557 bp, Homo sapiens
gttgccatatttatctgggtgaggatcaagactttacatccatcattcatagtaaaaaacaacccttttaataatgtggacatgtttcactcaaattaaatataagcagttttagcaacatgccaatatagtcaaaataaataactatcaagttraccaaaatgttctgctttagattttcccagcacaaagatcaatatgtatgcattggtggatgttagggttttgttggtgtaggtttttgtttgtttctttgtttttattttttacagattttcatcctactttacactgatgtaaatctaactacccaaggcttaccagaagctttattttacattatttctaccaaaaattcatatcctcaaatattaaaagtggcattctgtattaccatttttcaagtaatgtagtctgcatttattagtacatttcaatatatgttttttacatggggtaacgttataaaaatgccatgcagttgattttctaggtaacaacggaatctgttttctcaaacagtagcatgagaattcttgatataccaccctcagagg

SEQ ID NO: 221877 - DNA, 557 bp, Homo sapiens
gttgccatatttatctgggtgaggatcaagactttacatccatcattcatagtaaaaaacaacccttttaataatgtggacatgtttcactcaaattaaatataagcagttttagcaacatgccaatatagtcaaaataaataactatcaagttgaccaaaatgttctgctttagattttcccagcacaaagatcaatatgtatgcattggtggatgttagggttttgttggtgtaggtttttgtttgtttctttgtttttattttttacagattttcatcctactttacactgatgtaaatctaactacccaaggcttaccagaagctttattttacattatttctaccaaaaattcatatcctcaamtattaaaagtggcattctgtattaccatttttcaagtaatgtagtctgcatttattagtacatttcaatatatgttttttacatggggtaacgttataaaaatgccatgcagttgattttctaggtaacaacggaatctgttttctcaaacagtagcatgagaattcttgatataccaccctcagagg

SEQ ID NO: 221878 - DNA, 557 bp, Homo sapiens
gttgccatatttatctgggtgaggatcaagactttacatccatcattcatagtaaaaaacaacccttttaataatgtggacatgtttcactcaaattaaatataagcagttttagcaacatgccaatatagtcaaaataaataactatcaagttgaccaaaatgttctgctttagattttcccagcacaaagatcaatatgtatgcattggtggatgttagggttttgttggtgtaggtttttgtttgtttctttgtttttattttttacagattttcatcctactttacactgatgtaaatctaactacccaaggcttaccagaagctttattttacattatttctaccaaaaattcatatcctcaaatattaaaagtggcattctgtattaccatttttcaagtaatgtagtctgcatttattagtacatttcaatatatgttttttacatggggtaacgttataaaaatgccatgcagttgattttctaggtaacaacggaatctgttttctcaaacagtagcaygagaattcttgatataccaccctcagagg

SEQ ID NO: 221879 - DNA, 531 bp, Homo sapiens
ctattccaaataggagaactggacaaaacaaaagggctaaaggccccatgcaagtccagaatccagcagggtagtcattgaattttaaagctccaaaataatctccttttactctgtgtctcacattcaggtcacactggtgcaagaagtaggctcccatggccttgggcagttctgcccctgtgcctttgcagggtacagccccattccaagctgctttaatgggctggcattgaatgtctgcagcttctccagatgtacagtgcaagctgttggttaatctaccattctgggatctggagaacagtggctctcttctcacagctccactaggcastgccccattgggtactgtgtgtgaaggctctgacctcacatttcttttctgcactgccctaacagaggttctccatgagggctccacccctgcagcaaacttctgcctgtatatccaggcttttccttacatcttctgaaatctaggtggaggttaccaaaccccaattcttgacttctgtgcactcacaggct

SEQ ID NO: 221880 - DNA, 428 bp, Homo sapiens
cctaaccatatctatcataaagacatagtcccaattccctgatatccctgcttcctgacccctgtgtgagacaggytatgtgtgtcccagatggcctgtttctcttgatttggggggcagtgtattaagcacctttcagcagaattcaccttctctttatgaattaagtcctaggcaccattcacaatgccagctctcaataaatttgttactgtaatttttttccagaaatgatatctgaacggaaacacaaagcaaaagaaacctaaagataggtaatgctgaatggttggaaagtatatttatgaaagagctatgtttcacaaaagcatctttgctatgattcaagggagaaatcgttaaataccaaccccatcatatccacataaatccagcaatctagagactgttggtcttttttcttttct

SEQ ID NO: 221881 - DNA, 428 bp, Homo sapiens
cctaaccatatctatcataaagacatagtcccaattccctgatatccctgcttcctgacccctgtgtgagacaggttatgtgtgtcccagatggcctgtttctcttgatttggggggcagtgtattaagcacctttcagcagaattcaccttctctttatgaattaagtcctaggcaccattcacaatgccagctctcaataaatttgttactgtaatttttttccagaaatgatatctgaacggaaacacaaagcaaaagaaacctaaagataggtaatgctgaatggytggaaagtatatttatgaaagagctatgtttcacaaaagcatctttgctatgattcaagggagaaatcgttaaataccaaccccatcatatccacataaatccagcaatctagagactgttggtcttttttcttttct

SEQ ID NO: 221882 - DNA, 633 bp, Homo sapiens
taattgacaaaacacacacattcaaacaagcttaatcaacaaagaaatgtattcactcatgtagtagaaaccttagggggtgctttctgtacaagcctggctgctgtcatgccctgcaatggtaatgtaagaatttcgcctctctcattccatatttggtctattattttctgtgttgactttgttttcagtctgacttttctacacatttggaaagatggctgttagcagctccaggccaatatagcatgcaattccagatctgagaaaagcaaaattctttcttttccaccattcatactaatcccttaaaagagtttttgggtcctagctgggacatgtacctttctgaggtatactttgacctctcttcttaaacctccaaatttttctgcccttcctctctcagctaatattcttgtttttcattttacagggaaaatgaaagcagycaaaagagaatttcctgatgctcccaccatcaaatccatcagcatgcctgcatctgaaatcacattctttgctttccttcctttgagagtggctggtctgtcagtaattctagcaaagaccacaccacatcctaacctcttaccagagagcattttcctgaaaatgaccatttctgcattc

SEQ ID NO: 221883 - DNA, 633 bp, Homo sapiens
taattgacaaaacacacacattcaaacaagcttaatcaacaaagaaatgtattcactcatgtagtagaaaccttagggggtgctttctgtacaagcctggctgctgtcatgccctgcaatggtaatgtaagaatttcgcctctctcattccatatttggtctattattttctgtgttgactttgttttcagtctgacttttctacacatttggaaagatggctgttagcagctccaggccaatatagcatgcaattccagatctgagaaaagcaaaattctttcttttccaccattcatactaatcccttaaaagagtttttgggtcctagctgggacatgtacctttctgaggtatactttgacctctcttcttaaacctccaaatttttctgcccttcctctctcagctaatattcttgtttttcattttacagggaaaatgaaagcagtcaaaagagaatttcctgatgctcccaccatcaaatccatcagcatgcctgcatctgaaatcacattctttgctttccttcctttgagagtggctggtctgtcagtaattctagcaaagaccacaccacatcctawcctcttaccagagagcattttcctgaaaatgaccatttctgcattc

SEQ ID NO: 221884 - DNA, 580 bp, Homo sapiens
ttttagcaatcccacctgaggtgtcagacatgtgaatgaagatactttcttggttgtccagtctagttgaactttcagatgactctagattttgctactatctgaccgacactccaggagatatctcaagggagaaataaccagttgagctcagtcaacacaaattaccataaataattattttggtttccaagtttgggggtgactttttgtgtagcattagataaacaaaaccctgcttatctccaaagttggggaaggggagaaataaaagaatcacataaggtaaataaggggcattgttttgcaaactttgaaaaatactatatacaatgcatggatgtagtgaaatacatagagactcagaagtcataagccctgagtttgaaacctcttgakattttctcactctgtgactcttggataaatcacactcaatttctcctagtctaaatgtgattatcaataaaattatgttaataaagccttgctctgtttagagtcttaggtgagaaaatgtggtttgtaaatgattttgtgaattttataaaattatacagatatatttcgtattgctatt

SEQ ID NO: 221885 - DNA, 399 bp, Homo sapiens
tttccctactcctaattcaggaaggtgggtgctctgaatgcctggagaamttcccacaatcctgttgtattagtctgttctcaggctgctaataaagacatacttgggactgggtaatttataaaggtaagaggtttaattgactcacagatccacatggctggggaggcctcacaatcatggtggaaagcaaaggagaagcaaacacgtcttacgtggcagcaggcaagaaagagtgtgtgcaggggaactcccctttatcaaaccatcagacctcatgagtcatgagacttatttactatcacaagaacagcatgggaaagacccacctccatgattcaattacctcccactgggttcctcccacaacacatggggattgtgagagctaaaattctg

SEQ ID NO: 221886 - DNA, 365 bp, Homo sapiens
gggtgctctgaatgcctggagaaattcccacaatcctgttgtattagtctgttctcaggctgctaataaagacatacttgggactgggtaatttataaaggtaagaggtttaattgactcacagatccacatggctggggaggcctcacaatcatkgtggaaagcaaaggagaagcaaacacgtcttacgtggcagcaggcaagaaagagtgtgtgcaggggaactcccctttatcaaaccatcagacctcatgagtcatgagacttatttactatcacaagaacagcatgggaaagacccacctccatgattcaattacctcccactgggttcctcccacaacacatggggattgtgagagcta

SEQ ID NO: 221887 - DNA, 399 bp, Homo sapiens
tgcagttggtttccctactcctaattcaggaaggtgggtgctctgaatgcctggagaaattcccacaatcctgttgtattagtctgttctcaggctgctaataaagacatacttgggactgggtaatttataaaggtaagaggtttaattgactcacagatccacatggctggggaggcctcacaatcatggtggaaagcaaaggagaagcaaacacrtcttacgtggcagcaggcaagaaagagtgtgtgcaggggaactcccctttatcaaaccatcagacctcatgagtcatgagacttatttactatcacaagaacagcatgggaaagacccacctccatgattcaattacctcccactgggttcctcccacaacacatggggattgtgagagct

SEQ ID NO: 221888 - DNA, 568 bp, Homo sapiens
tacccaagtcacttcttgaatgctttgctccttagaaatttattgcaccagatgccctaaatcatctctctcaagttcaaagttccacaaatctttagggcaggggaaaaatgctgccagtctctttgctaaagtacaacaagagtcacctttgcttcagttcccaacaagttcctcatctccatctgagaccacttcagcctggactttattgtccatatcactatcagtattttggtcagagccattcaataagtctctaggaagttccaaactaccatgttgttttttttctataaaaccagaaaaaaactatttaataattcatatgaaactccaaacagccaaaatagccaaagtaatcttaatcacaaagaacaaagccagaggcatcatgtttgctgacttccaaatatactatcaggtgacggtaaccaaaatagcatggtactggtgccagaacrgcatggtactggtacaaaaacagacacatagaccaatggaacggaacagagaacccagaaataaagctgcacacctacagatatctgatctttaacaaagttaa

SEQ ID NO: 221889 - DNA, 360 bp, Homo sapiens
tataaattggagctaaatattaggyactcataaacataaagatggcaacaatagacactgggtacagctagcaggtggagtgaaggaggagtagaggcaagggttgaaaaacctgcttttgtgtactatgtttagtaccttggtaaatgggatcacttataccccaaaccttagcatcagacaatatatccaagtaacaaagcagcacatatgccccatgaatctaaaataaatattgaaaaaaattctgatattccttataaatacaaagcaaagaaaaaaaatcctcaatcaattactagcaaactaaacccaataactttaaataggattacacaacatgaccaagtaggatttatc

SEQ ID NO: 221890 - DNA, 560 bp, Homo sapiens
ttggaggtgggcactctaataaataaatagatgaaaggcaaagaaaaatgaaaaaacaatgtgtttgaagaagtgactgtgtttctctgtgtgtgtgtgcatgtgtgtgtgcagaatctgtaggatgttatgagcttattgattagcttattgattattagaatgggaaagaaaatttagggtcagattaaaatgggccttgaattataattatcacattggatatgtttatcatttgtagaaaatttgaagtcattacaggtgatttagccatgatgtttttattctcttcttctttaaacttacaatgtratataaaaagtaaggggcctctcactcaaatcacagtgaaatttttaaatcttccttgcctaaaaattagttgatatcagacttttaaaacttgcttgtcatttaacccttcttcatcttctattctccttaaacagttaaccatgtctttagacacgagtctataccttgaattaaaacaaaaggaaaatgatcaattttcaccagatccagaattttctattctgaaagtggtaaaatgaacagga

SEQ ID NO: 221891 - DNA, 391 bp, Homo sapiens
tttaaaggatggctggttagctgacagggtctctgctttccaaagcattgccaattcagtgttgaactgctcataggggttattttaaactaacccaactgacggtataacagtcttagggtttctgaaccaacttgcttatatgagcaaggaatgaaattataagacagacacggaggaattctgaaaattccttgtggacaaagaggagttgggcagagaaaagcttgtgcactcactctttcagactgtgtgaaaagaaatgaagtccttttttacttttattttattttcaagtcattatttttcaattgtactcctttggttgctagtgaagtaaayattgttcccaagtgactttaatttccccaaattacaggaactataaata

SEQ ID NO: 221892 - DNA, 578 bp, Homo sapiens
atagaaacacaactgaaaggaaaatgamaaccaatcaaccagtaaaactgcaataaatacttttcaggtgagaaaacgtcaaaagagtgtggatttggaagtctttccattgtgctaattatagatcttttttatctctctgaacacttgtcaatagtcattaggtttatacaattttctctttttaatgcatcaaaaaatcaccaaataggaagaagtaaatctgtataacaggacatctaacaattggttttaaaatacataacctacagcctaaaataaagaagaaatatatacatgtgaagcgtttttttgactgactatattataaattatgctaaaattgtactgcaaatgaactctcctcacctcccaaataataacaaaacatacagtgaaactaaattgtacaagttatattaaggctctcaaatttaaactaagcataaaaactgagcaatttatcttgggattctaaaaaaaaaaagaatctaacaaaattcaaattgatgatacccgacatgttgtcataatataacagtcaaagtttactctctgaagaaatatcaagttttaaa

SEQ ID NO: 221893 - DNA, 578 bp, Homo sapiens
atagaaacacaactgaaaggaaaatgacaaccaatcaaccagtaaaactgcaataaatacttttcaggtgagaaaacgtcaaaagagtgtggatttggaagtctttccattgtgctaattatagatcttttttatctctctgaacacttgtcaatagtcattaggtttatacaattttctctttttaatgcatcaaaaaatcaccaaataggaagaagtaaatctgtataacaggacatctaacaattggttttaaaatacataacctacagcctaaaataaagaagaaatatatacatgtgaagcgtttttttgactgactatattataaawtatgctaaaattgtactgcaaatgaactctcctcacctcccaaataataacaaaacatacagtgaaactaaattgtacaagttatattaaggctctcaaatttaaactaagcataaaaactgagcaatttatcttgggattctaaaaaaaaaaagaatctaacaaaattcaaattgatgatacccgacatgttgtcataatataacagtcaaagtttactctctgaagaaatatcaagttttaaa

SEQ ID NO: 221894 - DNA, 399 bp, Homo sapiens
agcctgtgcatagtggcagcatttaaaattaataccatgcaattaccttctgttctatgataatctttcatattttctcttgttttctcaaactcttcataactcttaggtcaaatttcatgcactatatagttcccttccttttgtatcacctttatgtagctaagattatagtaagttcttaacaagaatttatagatttatcggtcaaattattaacckttcaacaagaagaccaaagccaatgtaatatttttaaaagtagggattaagaaaattacctttggtattatccttaaagagagttttagtccttattttccaatacatacactcaactatacctcccattttgtaagaaaaccagctgcatttgggaacatttcttaaattgttgaa

SEQ ID NO: 221895 - DNA, 523 bp, Homo sapiens
tggggggagggcaaaaactatttgtaaaggcagtggttgagatatttttaaaacttggtaaaactataaaccaacaggtaaaagaagcgcagtggaatcaaagcaaaatgaataaaaagattaagttgaagaaagttgtttytaaaaagaaaacttaaaaacagttggagaaagagatgtattattgacaatggaaccaatgtaataactactttttatgataagcatgtatatcagaagacagtagcgcaacattctattacttaaagcaagagaaacaagtcaacctggaaattcattcatgtgaaaattctaaaaaaatcaagaaatttacaaaaatgaaagcaaataaagctattttgacaataagtagctgatagattttatcaacagcatactggtactgaaagaaatggtagacaaaaagaaagtaacaggatgaaaatttacttttttattattatactttaagttttaggttacatgtgcacaacttgcaggtttgttacatatgtatacatgt

SEQ ID NO: 221896 - DNA, 567 bp, Homo sapiens
aaaaacccttgtcagtcagttgcagtgkctcacaccggtaattccagcactttgggaggccaaggtgggcagatcacttgagcccaggagtttgagacaagtttgggcaacatgacggaaccctgtctctacaaaaactacaaaaaattagccaggagtggtgatacgtacatatagtcccagctatccaggaagctgaggtgggaggatcacctcagcctggtggtcgaggctacagtgagcctttttgataccactgcactccagcctggacaacagtgagatcttgtctctaaataaaagaataaataaataaacacatttgtcaaaatattaaaaatgtcttactgttggttatatatgcatagaaaagtaaaaaccaaaaaaaaaccctaaaactagtatttatatagtacactataatttaaaacactgataattaaaatacatgttttatatatttctttgaaatgtattcagagtagtttgtacagtatttgcacaacttctcatcatgtgactctcaatattttttatgctttggtgaattgccatacttctttataa

SEQ ID NO: 221897 - DNA, 567 bp, Homo sapiens
aaaaacccttgtcagtcagttgcagtggctcacaccggtaattccagcactttgggaggccaaggtgggcagatcacttgagcccaggagtttgagacaagtttgggcaacatgacggaaccctgtctctacaaaaactacaaaaaattagccaggagtggtgatacgtacatatagtcccagctatccaggaagctgaggtgggaggatcacctcagcctggtggtcgaggctacagtgagcctttttgataccactgcactccagcctggacaacagtgagatcttgtctctaaataaaagaataaataaataaacacatttgtcaaaatattaaaaatgtcttactgttggttatatatgcatagaaaagtaaaaaccaaaaaamaaccctaaaactagtatttatatagtacactataatttaaaacactgataattaaaatacatgttttatatatttctttgaaatgtattcagagtagtttgtacagtatttgcacaacttctcatcatgtgactctcaatattttttatgctttggtgaattgccatacttctttataa

SEQ ID NO: 221898 - DNA, 607 bp, Homo sapiens
gtgaggtaggtactcttctgatgattatactcagcctccctcattgcaaagctcccattgttattgtcttggctctggattccctcaaaaatagatgatgaaacaaatatctkgggtcagatactttaatcagaaattgagtgagaaagcacagaagtggagaaaatgaaacagaatacgaagccagtgtgaatgagtagttactgctattgtgctcagtaatgatggaggtatggagattgtctcaaaataactttacaaagagatggggatgctggaatccccatctcttattgcttaaggattgccttagaatcattaactctccacccctaactccttctttgttcctatgtgtggttgagaagcactggttagcctcaagaagcttgcaggcaggcccaaaaatcagaaagacaggcatgatgtggggagctctcagttagctggaaacaggtgaatttcaggtgaacacattgagtccaggagatagaagacaagtcatcaacaatatctgctatggccagttttctgtttctttttaagaatgtatatactttttactgggtgtccccaagtccccctttggtttaatgattcacataac

SEQ ID NO: 221899 - DNA, 607 bp, Homo sapiens
gtgaggtaggtactcttctgatgattatactcagcctccctcattgcaaagctcccattgttattgtcttggctctggattccctcaaaaatagatgatgaaacaaatatctggggtcagatactttaatcagaaattgagtgagaaagcacagaagtggagaaaatgaaacagaayacgaagccagtgtgaatgagtagttactgctattgtgctcagtaatgatggaggtatggagattgtctcaaaataactttacaaagagatggggatgctggaatccccatctcttattgcttaaggattgccttagaatcattaactctccacccctaactccttctttgttcctatgtgtggttgagaagcactggttagcctcaagaagcttgcaggcaggcccaaaaatcagaaagacaggcatgatgtggggagctctcagttagctggaaacaggtgaatttcaggtgaacacattgagtccaggagatagaagacaagtcatcaacaatatctgctatggccagttttctgtttctttttaagaatgtatatactttttactgggtgtccccaagtccccctttggtttaatgattcacataac

SEQ ID NO: 221900 - DNA, 607 bp, Homo sapiens
gtgaggtaggtactcttctgatgattatactcagcctccctcattgcaaagctcccattgttattgtcttggctctggattccctcaaaaatagatgatgaaacaaatatctggggtcagatactttaatcagaaattgagtgagaaagcacagaagtggagaaaatgaaacagaatacgaagccagtgtgaatgagtagttactgctattgtgctcagtaatgatggaggtatggagattgtctcaaaataactttacaaagagatggggatgctggaatccccatctcttattgcttaaggattgccttagaatcattaactctccacccctaactccttctttgttcctatgtgtggttgagaagcactggttagcctcaagaagcttgcaggcaggcccaaaaatcagaaagacaggcatgatgtggggagctctcagttagytggaaacaggtgaatttcaggtgaacacattgagtccaggagatagaagacaagtcatcaacaatatctgctatggccagttttctgtttctttttaagaatgtatatactttttactgggtgtccccaagtccccctttggtttaatgattcacataac

SEQ ID NO: 221901 - DNA, 607 bp, Homo sapiens
gtgaggtaggtactcttctgatgattatactcagcctccctcattgcaaagctcccattgttattgtcttggctctggattccctcaaaaatagatgatgaaacaaatatctggggtcagatactttaatcagaaattgagtgagaaagcacagaagtggagaaaatgaaacagaatacgaagccagtgtgaatgagtagttactgctattgtgctcagtaatgatggaggtatggagattgtctcaaaataactttacaaagagatggggatgctggaatccccatctcttattgcttaaggattgccttagaatcattaactctccacccctaactccttctttgttcctatgtgtggttgagaagcactggttagcctcaagaagcttgcaggcaggcccaaaaatcagaaagacaggcatgatgtggggagctctcagttagctggaaacaggtgaatttcaggtgaacacattgagtccaggagatagaagacaagtcatcaacaatatctgctrtggccagttttctgtttctttttaagaatgtatatactttttactgggtgtccccaagtccccctttggtttaatgattcacataac

SEQ ID NO: 221902 - DNA, 454 bp, Homo sapiens
cattaatgaatatagattcaattctactttcttgttctagataaattacataatctagcttttcatttcacttatttactgataacaacaggaggaatgacaagatacctgttttggaaaattactgtcgtaggagtaaaggtgaaacaatgaaagaattacatggaaaactagaaaaaagtatggtyttctgatattctattacatcgtatactaaaggcctcataaaactcagatattttatctaaaaatattattttcatcttaggaatgatcaaagcatgagactagaattgtattacgatgactctcacaagcacatgtgctaaaaaggaggggaaaacatcattactgatattttaaacgtatgttttactttcaatcaacatgaacctcaacttgatatgatgcagattgaaggaaatcacccataattccatatgaagaaggcctg

SEQ ID NO: 221903 - DNA, 454 bp, Homo sapiens
cattaatgaatatagattcaattctactttcttgttctagataaattacataatctagcttttcatttcacttatttactgataacaacaggaggaatgacaagatacctgttttggaaaattactgtcgtaggagtaaaggtgaaacaatgaaagaattacatggaaaactagaaaaaagtatggtcttctgatattctattacatcrtatactaaaggcctcataaaactcagatattttatctaaaaatattattttcatcttaggaatgatcaaagcatgagactagaattgtattacgatgactctcacaagcacatgtgctaaaaaggaggggaaaacatcattactgatattttaaacgtatgttttactttcaatcaacatgaacctcaacttgatatgatgcagattgaaggaaatcacccataattccatatgaagaaggcctg

SEQ ID NO: 221904 - DNA, 454 bp, Homo sapiens
cattaatgaatatagattcaattctactttcttgttctagataaattacataatctagcttttcatttcacttatttactgataacaacaggaggaatgacaagatacctgttttggaaaattactgtcgtaggagtaaaggtgaaacaatgaaagaattacatggaaaactagaaaaaagtatggtcttctgatattctattacatcgtatactaaaggcctcataaaactcagatattttatctaaaaatattattttcatcttaggaatgatcaaagcatgagactagaattgtattacgatgactctcacaagcacatgtgctaaaaaggaggggaaaacatcattactgatattttaaacgtatgttttactttcmatcaacatgaacctcaacttgatatgatgcagattgaaggaaatcacccataattccatatgaagaaggcctg

SEQ ID NO: 221905 - DNA, 397 bp, Homo sapiens
ccaactttttgacatatttcaagatggctactcggaagactggaaatagcttcttctacaagaattgctgaaaagctgtgtttgttggggagatttgcatttgtagagaaaatctgcattgatatagacaggctttccctgagatactmccttgtctgggtttaggaaagattaactgagtctggcacgtttacatttcaaaaaaccatttcctatctttacttcccaagaggagggctgctccctgtgaggtttcatccatgtaacaagacaacttctgctgccaggctcctctttcttccttgtcatcacctgccttctgcaaagcctgatttagcaaagtacagctctgtgttttctgtaacttcaagacagcataggcgtgttgactaccttg

SEQ ID NO: 221906 - DNA, 482 bp, Homo sapiens
aaatctgtattcccaagacaaagtgccctttccgttagctataagtacactcaatggtaggctgaaatgatagtttttatctatggcgaaatggaatcatatcagtgatttttttaaagggaaatttaactcttgytatggtttgaatgcttgccccttccaaatctcctgttaaaatttgatccccaatgttgcaggtggggcttactgggaggtgtttggtcatggggatggaccttcatgaatggataataccctcccttaggaatctcaagctatcctccctcctcggtgccctcaggaatgaatgtaccattctttattcaactataattcccccacccatcccttttgagatattaattaaatgtatgttacactgctgcatattgtctcacgtatcagtgagtttctggctttcttattttagtttaccctttgtcctttagtttgtaaagcttctaatttttctatatattttc

SEQ ID NO: 221907 - DNA, 482 bp, Homo sapiens
aaatctgtattcccaagacaaagtgccctttccgttagctataagtacactcaatggtaggctgaaatgatagtttttatctatggcgaaatggaatcatatcagtgatttttttaaagggaaatttaactcttgctatggtttgaatgcttgccccttccaaatctcctgttaaaatttgatccccaatgttgcaggtggggcttactgggaggtgtttggtcatggggatgraccttcatgaatggataataccctcccttaggaatctcaagctatcctccctcctcggtgccctcaggaatgaatgtaccattctttattcaactataattcccccacccatcccttttgagatattaattaaatgtatgttacactgctgcatattgtctcacgtatcagtgagtttctggctttcttattttagtttaccctttgtcctttagtttgtaaagcttctaatttttctatatattttc

SEQ ID NO: 221908 - DNA, 482 bp, Homo sapiens
aaatctgtattcccaagacaaagtgccctttccgttagctataagtacactcaatggtaggctgaaatgatagtttttatctatggcgaaatggaatcatatcagtgatttttttaaagggaaatttaactcttgctatggtttgaatgcttgccccttccaaatctcctgttaaaatttgatccccaatgttgcaggtggggcttactgggaggtgtttggtcatggggatggaccttcatgaatggataatrccctcccttaggaatctcaagctatcctccctcctcggtgccctcaggaatgaatgtaccattctttattcaactataattcccccacccatcccttttgagatattaattaaatgtatgttacactgctgcatattgtctcacgtatcagtgagtttctggctttcttattttagtttaccctttgtcctttagtttgtaaagcttctaatttttctatatattttc

SEQ ID NO: 221909 - DNA, 594 bp, Homo sapiens
atccactctcctctgcctcccaaagtgctgggaagacagatgtaagcctccacacccggctcacctgccctcttaagcatgcatttctgaagtttgcaattctacctctgcgtcattccatctgtttgaggcactttctttgagtgggggctgtagaggatggggaaagaagactcagggaccatacccagggatggtagtcttagctctttggaaatcgccagagctgatttgctgacttgcacaatccaaagagaagcgtttgatgatttgtatccccatctcctctgacatgactatgggaagttacataaagacttctgagatgacggtgctaccaatgttttccacaaaagcaytgggtttggccatagttatgctgataaaaaggctgagacatggagaaatatcaccactgtacaaaaggtcattttatccttgacgtccccaggcttcccagtgagaaagaacagcagtaatcattcatattgagtctcgtttttactcagctacatcttaccaggccttcttgaaactgacgtggactctcagcatggaaagttccagacttagggtttgttttcaaaagaaacc

SEQ ID NO: 221910 - DNA, 563 bp, Homo sapiens
aagcttagcaacagtgattacttgtccctacctgtaacctgcttttatctcttgtcctgccctgaagcccattagccatgtctgttcactcctgaaccctggttgagggcagagttcgtgttctcgtccaatatttcatgcctgttagagaggttttatctatgcaaagcacacaacccccataagtgggccacctaactctaaatgctggcatagccacgtcttaggtctgagctggccaggataccatcaaaacccctggcagccctgtgaaataggaaatgtgaggcccgtgttgcaaatgtggaaactgaagctcagagaggtgtagcaacttgcccagactgatgtggcaggtacatagctgagctgaattcaaggcaggcttatgctgactctaaaactcaggtctttcccattaggccacattgtcctctcaggcaccaggcactgtggatgacaaggaaagaagtggcactatccactttacataaattgtaacctagcgcaggagggaagacmtagacacgaatcaaaagttaaaaactggcacagccacagat

SEQ ID NO: 221911 - DNA, 406 bp, Homo sapiens
aaagtttgaagagacagtgaggaggaaatagcccaaagaggccactccttcctgcagaggtcaaccagctgctctgaattaagaactctcaagtcactgacacaacgcaatatgacacctttccagctgatggagtgcagagcaattttagtgtggatscagaggcttctccctggtggggttgcccggcaggggtcacaacccagaataatcccattaagttccagctgctgcaccccatcccctgtaatttacggtcatgtcagggccttacccttaccagtgcaaccaaatttaaacccactcttggtgatgattctgcgattctgtgtgagcgcagcctgggggtaggaggaaggagggagcagcggcttaaagagatgctttcatttatgatccaagatct

SEQ ID NO: 221912 - DNA, 406 bp, Homo sapiens
aaagtttgaagagacagtgaggaggaaatagcccaaagaggccactccttcctgcagaggtcaaccagctgctctgaattaagaactctcaagtcactgacacaacgcaatatgacacctttccagctgatggagtgcagagcaattttagtgtggatgcagaggcttctccctggtggggttgcccggcaggggtcacaacccagaataatcccattaagttccagctgctgcaccccatcccctgtaatttacggtcatgtcagggccttacccttaccagtgcmaccaaatttaaacccactcttggtgatgattctgcgattctgtgtgagcgcagcctgggggtaggaggaaggagggagcagcggcttaaagagatgctttcatttatgatccaagatct

SEQ ID NO: 221913 - DNA, 408 bp, Homo sapiens
tgtctttctctttcctcactctgtccaccctcagaatggtaactctgcccaccgctatctaccctggcacaccgcgctctccatagggcttccaacaccctgtcctgccccaacttcataaactctcctcaaatgacccagttggwatacgcctttcatttcctgtaagagccctaacatgacttctgagcagatgcgaacagatatatggaaatccagagacccctggactgagggttagtggaccttcagggattccagcagcattccaccatgctcatccgcgtggcaggatgacatacccaatttatctgctcttgaccttctcttggataaaacaaagggctgaagccaggtgcagtggctcatgcaggtaatcccagcactttgggaggccgaggtgggtgg

SEQ ID NO: 221914 - DNA, 435 bp, Homo sapiens
tcaccagactggagtgcagtggcacaattacagctcactgcagcctccaagtcctgggctcaagtgatcctcttgcctcagcctcctgagtagccgagactacaggtgcacaccaccacacccggctaattaaaaaaawtttttttagagacagggtcctgctatgttgcctaagctggtcttgaacttggcctcaagtgatcctcctgccttggcttcccaaagtgctgggattacaggcatgagccactgtgcccggcatctcttttgcttctgacagtgcttcagatggtggctgttccaccagcctgggtccctaagtgatttcaatggtcagagtcccctgctcatccacaaagggcatgtagcagaagtgagaagcagtaagtagcagaagcagaagtgtgtgttaagccactgagatattggggtttt

SEQ ID NO: 221915 - DNA, 404 bp, Homo sapiens
tcaccagactggagtgcagtggcacaattacagctcactgcagcctccaagtcctgggctcaagtgatcctcttgcctcagcctcctgagtagccgagactacaggtgcacaccaccacacccggctaattaaaaaaaatttttttagagacagggtcctgctaygttgcctaagctggtcttgaacttggcctcaagtgatcctcctgccttggcttcccaaagtgctgggattacaggcatgagccactgtgcccggcatctcttttgcttctgacagtgcttcagatggtggctgttccaccagcctgggtccctaagtgatttcaatggtcagagtcccctgctcatccacaaagggcatgtagcagaagtgagaagcagtaagtagcagaagcagaagt

SEQ ID NO: 221916 - DNA, 602 bp, Homo sapiens
ggatcacttgagcccaggagtttgagatcagcctgggcaatacagggagacccatctctacaaaaaataaacaatattagccaggcatggtggcatatgcctgtggtcccagctactcaggaagctgaggtgggagcctctgctttgttgaacctgggaaggcgaggctgcagtgagccatgatcgyaccactgcactccagcctgggtgacagaggctgtctatataaaaaaaaaagtaagaatattaattgttcccctttataagagcttactgtgccagatcctggagctagccagtaatgtagataatctcagcattttgtgatcctcacaaaacccaatgaagtaaacactaagcatgatctcctcatatttctgatgagtaaactgaagttcagagaggttaagccactgcctaaagccacacagcagataaaaggcagaggtaggcttcaatctcaggtctgaccacctagtctgcactccaaatgcatattccaaaacaacatcacatgaggaacaatcaaaagagtggtagttatgaatcttcaactttaagggtgtgaagaaggggccccaaacttgccctggattgggtga

SEQ ID NO: 221917 - DNA, 618 bp, Homo sapiens
gccaggttccggtctgtcacgagaagactgttttcattaagataagcrcctatcaagggcatttttaaaagaatcaatccccaaaaagaaagccacctccatcaaaacaatcccaaccctgattatctcctctgtctacatggatcaaacaaagggtatatccaagcaatgggctggctggagaatctggacaatgaagacaaaacatatgtataatttatagaattttacttcctttacagcaggtatttttctttatattgtaaaataaaacacaggagtaggaaaccatactaaaaatatgtagcctaaattatgatacgggaaatagtgggtcttttaaattgctttaatttttggactcagcgctcattttgccaaacttgaacacagtcttggaaaagtaaagtttcagatctcaggaatataatgtgctcattttaggaaggaaagttatctaaagagatatgcacaacactcaactggttagttgagggctaacacgttcccagccatgttcttccttctcacaaagaaagggcattaaaggagtcagtgggcaccaaggagctgaatcccacaagcaggggtggactttggtccccagtgtgtccccac

SEQ ID NO: 221918 - DNA, 545 bp, Homo sapiens
tttctagtaagtctgcaaaactctttcatatggcagagaaacattttttaaatcccatgttcaagttcatatctcttgtcaaaatcccggggaaaggtgattgtttaaagaactgacaatcccatcaaaagataaaagggaggatttgagatttggcaggactttctcatccaaggatccaaacatattttcaggaaactgactggagagtaggacttgactttataatccagtccccaagggcccatggacaatgaactttggggttctgagaagcctctgtgatgcaatgaatgctttattctgcatccaaggatgtgggtggagtgaagtcactttaactcaaaaaagaaatgatgcaaccctggctatgcatgagatattaggatcaaaagttaaaagattatgtcaaagtgtacataatgcataaaagtgcttcatttgctgtaaaaagctctgcaagtatttggtgctgatgtttctgattagctggacygtgaatttttctgaaggaaaaatgagtttaaacattataactagttgtg

SEQ ID NO: 221919 - DNA, 346 bp, Homo sapiens
aaattaataaaatgtaaagaagttcagggagacctggagtcaagctccagttttgccacttactggggtgaccttgggcaagttatagaattctctcagcctcagtttcttcataattctatatattatrtgggttgtgtgatagttaaatgagagggtctaaaaaatgaagtgcttagcactctgcccagcccaaggtaagtgcgtagtaaatgtgaaatattgctgtcatttttattgctatgagctgggctctgtgctaggtactaggtactagggatacaaagactggtaagatacacttcctgccttcaaagagatcaaagtttactggggagacagacat

SEQ ID NO: 221920 - DNA, 518 bp, Homo sapiens
acaaactcggagtatcctggggcagcgttggggggaagtgggcttgtgttagccctagaaggctggatagagctcagacaagtgagaattggggcattctagcaaagaggcaaaataagagcataggaatggtatgacttcctggtaggtctgtgagcagaggggctactggggagtaatgaggaaggsagtgggctaggtgcagtggaattagtgaaagtttaggtttgatgttacagaggaaatgagagtcatttctctcccgtgaaactattaccctgttttaatgcttatctctcctgagctctgcaaggattcccaatgctaaccaatgcctcctctcttggcttaagtgacaatgacactaccctctctggccccaccttggctttcttctcccaccatccctgtcaattgtggtatctgcccccttttcaccatccacagtgcctctcagacaggtacttctcccaggcccttagcttcagctacacctgtatccgctgatttccaaattt

SEQ ID NO: 221921 - DNA, 560 bp, Homo sapiens
tcacgttgacttgcattgaagaatcgatcttggctgtgagccttaaagacctcgggagacaattagtcaccacatactatttaataatgcacagaaaacttggaacaaaatcaattcagccgtggaaactggccagttacctggagaatcatgaagtgaggcatgcttcttactcaaaaagcagctgatgttattctccaaaagccaggcacaggcaaggagaggcaattaaatttttctatgccctccggagactkttgcaaactctttggctaacttattcctataatgtgctgaaagcattgctaatatatttcatttataactgactctatacatcatagctccaacagtgggggttgcttaaaactcacacagatacacaggcacacaaacacataccaggttacatacacacatgtatatcctaggtatgctagaaatacattttggaaagatagagaagggatttagaatacacagaggagaagaaacaggaaattttttttttcttacctcctatctcttctttcccatttaagtggacttcccatccttcc

SEQ ID NO: 221922 - DNA, 444 bp, Homo sapiens
ctatcctagattggtgttcctatctgtgaggtaccctaactacaatgtactgtgtgtcctgtctcttcatctaggttgacagccagatcacatcgttcctctaaatccccagcacctggcacagaggctggaaatgagtrggtactgctaaaacaatgtggaatgaatgagtgaacatagaaactgcctttttctaatacgtttatctgaaaagactgcttgattcttctttatatgagttttgctctagtggtttcttggagaaaaatatgaaagtgtaggttttactcaagactattcttaatgaggctataacaatgtatggactgagaaaggtgaggagggttgtgggataaaaaatgggaaaaatcttgctggggttttctgggcttttatacaggttggtttctgctgggcactgcctgagatagattttgtgtggat

SEQ ID NO: 221923 - DNA, 506 bp, Homo sapiens
tctttcctccctttccaatttgttagtataatggcgaatataccttatattttacctactaatataaggtataaggtaacagaaccgatatatatggccaaagaatactgttcccattaaggcactggtagactgtataatttaggtaataatgtcaccatgaatcaaactcattttgggtatcgtttttgaaaactgctttatgaatcaaagtcatgttcttttaaaaattcctttgagtacacaaatatgacagagctggatattctggtagaaaataataggatttgtatgtgtctcaaaactggacttgaaagtcaggaaatgatgacaaaaaatgattcagaagttytaaagtaatacacaaaaagtctatgattatttgggtgatatgttggatacaaaacaaaaataaatcaaataagtgaatgttatatgttacattcaataacagttttgtatcatctagttaactagaatatcagcttcatatcttattatatgcc

SEQ ID NO: 221924 - DNA, 429 bp, Homo sapiens
tagtacactgccagaatacagctagcatatwtagctctactctttttagtgtggttatctagcttttgactgataatttccaggattgggacataccatagtactgactattcaattattggaaatttctaaattgaaaccatctttgctctacattcatttgaaactggtttctatgtaaattctaactattagcgttacttccactctctaaaataaaattggttagaatctaattttactattcctggttgaaatctaattctactcactagctgcatattatttgaatgaaggttatcttttttttagagggcggacgtcagattactcatgaaaaattctcctatagtgctcagtccaatgtaggaaatagtgagctatctagtagtgagataagtaggcctgctattagttccaattctgtca

SEQ ID NO: 221925 - DNA, 429 bp, Homo sapiens
tagtacactgccagaatacagctagcatatatagctctactctttttagtgtggtyatctagcttttgactgataatttccaggattgggacataccatagtactgactattcaattattggaaatttctaaattgaaaccatctttgctctacattcatttgaaactggtttctatgtaaattctaactattagcgttacttccactctctaaaataaaattggttagaatctaattttactattcctggttgaaatctaattctactcactagctgcatattatttgaatgaaggttatcttttttttagagggcggacgtcagattactcatgaaaaattctcctatagtgctcagtccaatgtaggaaatagtgagctatctagtagtgagataagtaggcctgctattagttccaattctgtca

SEQ ID NO: 221926 - DNA, 567 bp, Homo sapiens
ggctctcctttcaacagacatccatcgtgagtccaatcagcttttagccaagaaggcagaattacataaaccagacatggctgccactcatggcaccagttttgactggtaggaatgtgtgactctagtcttttctcactcatctggtatggctgcagcctattctgtgtactctgttacatggagaagtctaatagtttcctttcctgtttgacccatgattatagctctttgaagagcaaataagactaggacaggygtggccaatatgctgacatgtcagtgattttcttcttttgaaacacatcctcattgtttccacaatctcattccttatagcctgattttcccccaccccaccccacctgtctcatataggaatacagttagagtatctgctcaaaagaaatcacccactttctttggagctcaacttttcacttgggctacagctccaactgactccctttgccaatataaacccctccccaaacttgttgtgcttattctctatgataatgttgagagtccttttcccagttgtcactacttatccagaagttggtc

SEQ ID NO: 221927 - DNA, 469 bp, Homo sapiens
ttgtggttccttggttaactaatccaacctttcactgaatctttctatggtaactctgctcatcattttctttctctggtccctcctttctcactatatgctattgccttagtcttcttgatagtccaagaagcccagggttttttgtagctgagagttggaattggttttataaccccttaggattgaagatcatcstctcaaagtattgcacagaatgtaacactttccaaatgtggtgtctagcatgatactgatatgagacatccttaccccctgtaatcaagatattgtatatttcctggcaagtaaatttcaagccttttggctctacagattctctgtttcttggtttagaggaaatttagcaggtgatgtgttatagtatggagtcacttatatgttaaaagctacattgtgacatgggagatttcagtgatgaaaaaccggaagtgggaaatctgcagtt

SEQ ID NO: 221928 - DNA, 558 bp, Homo sapiens
agctccttagcaatctttacaaaaaaaaytatgcgcaatatcatgttatatgtattttaccatagttctttcaacagtgtggttggacttttattacactgaaagtcaactttattcatctgttataatgctacccagacatctttcctgaaagacaaagatgtctcaaataaaattcagagttggagacagaaggtacaagcaaatgaagtgataggaggcatttaggaaccagagttcagttcctgactttgtcgctaattcatcatgggtggaggacaaacaaatgctacgtcagcttctggaccaacatgacttggggggtgataccatctgggcccaagagacctcaataatattctatgaatctttttttaaccaccaccttctttgattccagaagacagtcttgtaccccactcaccctcatctaaaatagtttgtggactgatgacctccttttaaatccttcaaagtcaacccctaaaaattctgattctttttcaatgatgagcaatttatataaatgtcaaatacagtttatggaagacaaggcaa

SEQ ID NO: 221929 - DNA, 648 bp, Homo sapiens
aaaacataactttaattataaaaacatttttatccaaattttctttctccagttggggagaaaatgttgcattttcatctggtaccttaaagctccttagcaatctttacaaaaaaaattatgcgcaatatcatgttatatgtattttaccatagttctttcaacagtgtggttggacttttattacactgaaagtcaactttattcatctgttataatgctacccagacatctttcctgaaagacaaagatgtctcaaataaaattcagagttggagacagaaggtacaagcaaatgaagtgataggaggcatttaggaaccagagttcagttcctgactttgtcgctaattcatcatgggtggaggacaaacaaatgytacgtcagcttctggaccaacatgacttggggggtgataccatctgggcccaagagacctcaataatattctatgaatctttttttaaccaccaccttctttgattccagaagacagtcttgtaccccactcaccctcatctaaaatagtttgtggactgatgacctccttttaaatccttcaaagtcaacccctaaaaattctgattctttttcaatgatgagcaatttatataaatgtcaaatacagtttatggaagacaaggcaa

SEQ ID NO: 221930 - DNA, 522 bp, Homo sapiens
tgcccaaaggccaaagcccagacaggtcttgagtacctgttttgctttttatcactccaggtacaatgcaaacaytgaagtacatattccataaaatgtagactaacatttccctgcctcagtgcacaatgacatcacaatgtttccagtgtgttctaaataacatctcacactgagaacaacattctgcttattccacttcagactatgatctgtacacatgatccaagaataagactgcctttgttagatgctgttgagttaaattattagcacaattcaagatagtatctctccctactcaaaagcctatccaacacaccaaaagcatcctggtttgaaaatattcagacaaattaacaacctatagctaggcaggaagctgtttcctggtatagtccgatcctaaaatttttcttacaaaacccctttcagataccttggctttttcaccaatatgagattacttaggtgaccaacctcccccttgtaggtgttggccaaccatataggacatgaaag

SEQ ID NO: 221931 - DNA, 522 bp, Homo sapiens
tgcccaaaggccaaagcccagacaggtcttgagtacctgttttgctttttatcactccaggtacaatgcaaacactgaagtacatattccataaaatgtagactaacatttccctgcctcagtgcacaatgacatcacaatgtttccagtgtgttctaaataacatctcacactgagracaacattctgcttattccacttcagactatgatctgtacacatgatccaagaataagactgcctttgttagatgctgttgagttaaattattagcacaattcaagatagtatctctccctactcaaaagcctatccaacacaccaaaagcatcctggtttgaaaatattcagacaaattaacaacctatagctaggcaggaagctgtttcctggtatagtccgatcctaaaatttttcttacaaaacccctttcagataccttggctttttcaccaatatgagattacttaggtgaccaacctcccccttgtaggtgttggccaaccatataggacatgaaag

SEQ ID NO: 221932 - DNA, 446 bp, Homo sapiens
tatatcagtctcacatcttcttattatataataattatcaaaggtcwttaagtacaataaaattttaaattaatatctagggctccaaatttctgaatgtccctcctatagttaaagtatgtttttatctcagctctgtcagcaattgcgactttctgttttactttgtagttccaggtttctgttcctttcgctatggattgtctttccttgtgcactgttgtaatgttataataacagcacagcgtgcgtgcctgaacctcacaatggtagtcatggtgaatagcacagatccacatggtttgcccaacacctccacaaagaagctcctggataatataaaggtacatcaataattttccccacagtcaaatgtttaaaagcctgtcttgctaactaatttgtgtagatatggaattgtactgatatgatactatatttgaaaa

SEQ ID NO: 221933 - DNA, 385 bp, Homo sapiens
aatttcaatatcagcacagccatttatatcaaacaaattatttaccttctctctgatgatttttttcacacataaaatggattaataagagaacgtttactcatagagtaattaagataattgaataagttaatgtaggtcaagtatatagaatagtacctggcatactctggcaagcactgtgtaagggttagctgctccataattattgctattatgtccatattcatatattattaattctcataacaacctaccagttaatcatatttaccttacaactaaagaaactgaggttyagatacttaattttgagctcaaaatctcaccactggtctgaaattttacctaggattttaatccagacctgtttggcaaaaaactt

SEQ ID NO: 221934 - DNA, 533 bp, Homo sapiens
acaatgggccagatgggaggccttaccagtgatccactcgaggatgccattgcaaaaggaatttatgattcacatggccttgggtcagatgccagtgtatctgtttcaacatcctacaagattactagttgttcacttagagtctctgagcagcagaacttctatttctctcgtctttcttgatcttaaccctggcatcctgttggaaaatattctgatgcaatggagcttccaagtttgctataaggaggcaggccacctatggaacagaaaatctcacaggccaaataaagatgatagatatrcatggttggttaaataaatttaaaatccactgcaagaagcaagggaaaaagatagcataattttacatacttagaatagggagcaagcaagatggtaggaccatagtgctgacctggaagtacagaatgtgccaacatcctgtctttccctgccacattaactttcccagctaatggtatgattacaaggactagcactgagattccagcaagggatcccacagacag

SEQ ID NO: 221935 - DNA, 533 bp, Homo sapiens
tgttacagctgctcattcttatattctgtgacctacctcagtctccatattttctttttctctttctttctcttccaaagccatttcagttggacttctatcacttgtaagcacaggtgtctgacaaatagaagccacaactgagtacaataaaaactaaactctgcaatacaaaggccaataaataggtttggcccttaatcctcycttgtaacaacattgacatgatcttgctcctcatcctggtttagcaccaagagaaaaataagagtctgagtgggagagggaggaatcaaaaggaactgagccaaattaagagcttttggtgtaaatgttggaagctgagaaaagccatgtcaagccgcagcaaactccccttcataaaggaggcagagggaaaaaataaaataaaaaagaggagaataagagagaaattacccttttcatttttctccaagctaagacttgcaatctagctacactttaagtgattgatgtggtcactaggggctaagaaataaaaatgtttcagg

SEQ ID NO: 221936 - DNA, 586 bp, Homo sapiens
ggctcacctgtgggtgccttgggatttccctctagattacttctctttcctctagttatagccccagggtgtgggaagggtcagcagagcttgaatccagctttttaagtcagtgaaatgttttgaggttaccatggcagtaggtgtctgtcatggtgaggtgggtagaccacacctgctggcaggagaagaygtgacatcctggttcacttagagatagggtgttggtacaagctgtgtgcaggtggtagactgtcatgtgaaaccttagatagctttaaaaagtattaatattttcaaaagtcaggagacaaatgggaagatcggtatggaatcaggggacgttgacctgtctgtggagactggagatgatactgatgaatagaggcagtggcaatgcagatgcagggctgggtatgaaggatgtcatcttagcaagagtacccatgctttgcagaagaggtcacatcattgcaaaggaaatcagtgggaagtgaagtctgactcatgtttcagggttttcatgcctgaaaagcattcattatatatataaatatatatatatgtataaaatatacatatatat

SEQ ID NO: 221937 - DNA, 601 bp, Homo sapiens
ttgggaaaatcagaggccacaagaactcacaaattattagttgacttgattgatagaggaagtcaccaccagtgctgaatcagattgaaaaaaacccttacaaagatactatgtttcagttaattcactacaaagacttgtacttcatcaatagaagatagcatagccataaggggaatcctcctttattaatctcaaggcacctctttatcccacatcacagagccacataaaccctacagctgggtgcacgtggattgtattaatcacagaagtattctcatggaatcatcttggacaaaacagaagccaccatatatatgtgctacagtagttaagagcatagacacatgagctacattgtgagctggtctctctgtgcctgtgtttcttcatctgtaaaatagtagtaatagctgcttcatagcgttattgtgaggatttgacatcatgttacatgacctatcacrgacatttgaagtacctactgacttcctcttccctgaaactcttgtccccttggcttccaggacaccgcactctcctggttttcttcttatcccaccacccattccttttcactttcctttgtttgttcctc

SEQ ID NO: 221938 - DNA, 635 bp, Homo sapiens
ggtatctccagtgggtactgaattaggcccagacaaatattgagtcagcagtgctgtgttgttaaacaggctttttaggggggaaaataagctcatttatagtatttatcagtttctgtgctctaaacactcccaccatagctgwtttcaagattcagtcaagtcactgaacgcagagttgggaagagatggccacatttgaatttcacaaacttcagtgcttccctgattgagtgcctctaaacctccatgaatgttcagagactcatgtttaaaatcattgcctgactaatattatttgtctcttggtcttcatatccttttatatctatattcaaagataaacatggtattcttagtaaattacttatctttaatttacatagtttatgaatctcatctatccatatctctcaaattactgactttgttataatcaatacccaacacatcttatgatatttgactaatgtcttataaggtgaatttatttattttctaaggtagaaatgaatattctcatataatacagcaaacacattacagtgtcttagaaaaggacatccaggatgatacaactttaatgaagcccaaaacataaaaacaaaacaaatacactttagatatgaacatat

SEQ ID NO: 221939 - DNA, 482 bp, Homo sapiens
tgatcatctgcaaagaccctattttcaaatacaatcacattcacagatactgagtattaggacttcaacatcctttgggggaacataattcaagccatagcagcaagctcaataaggggccagatcactaatctgaaacttatagaaactataagagtgaaatggagaaaaagataaaggagaaaaatgcaaatgttcagtaccgcagacctgagtttagaccaaatgcctcagtaagagcctgtggatggaaaaccacaagccaagacagaatgccaacatctaagaagggccaaaaaaagaaatgcccacacataacagagatgaaagagtcaggtgtgtamgtgtgagaaataacaggagagtacaactctcattgaagactcatgggcatggccttttaagaaagactgctgatgagcaataacaagtgtagtgaagaagttcaagtagatgaggtcagaaaaggaacttagcctcct

SEQ ID NO: 221940 - DNA, 291 bp, Homo sapiens
tcttccattaattgcgtctcttttctatttacctaaccattgttaccagatcgctaatactgacatcgtgtgcctgcctccattattcctttgggtaagtttcttagggatttttctcattcccagggactctctagtcactaatgaagaagttcctagtgactccaactctactagacttctccatacaycgggcatgtatcgatgttattgaatattagcaatgaaaacagtttagattcagtctgagacaatgcccacattaactacatgttgagtatatgcgcagaa

SEQ ID NO: 221941 - DNA, 614 bp, Homo sapiens
tacatactctggtggcttacactttattttcatttttgcgcacttgtcagtttatcatttagtggaaaatatcagaaaaaactgggctattttggttccatctccaagagaaagagagatagatctgtaagtggaagtaaggcaggatgaatgttcttgagtccctgcattcttggacatcaacagctgaatgtgtactgaatattttttgagagaagctgtttattttaggcagggtagtgtaatgacaataaaggattactgctattggyttagcgttgtgtcaatgtcataggggacaaaatcccagaaaaggagatgagcgatagattgtatactttttcaacttatgaaaaagttactgtatattaaattatgtatttcttcttgtatcaactttgatacttaattattttgattgtttaagttgtccatttaatctgcattcaaagtttatatatatatgtttttttctatatattattcatttctgcccttatgcatttaattccttttagactttttgggtttgttcctttgctcagtttccaagtgtttaaattctttcttttttgataaatatatttacagatgcacattttactctgtccatg

SEQ ID NO: 221942 - DNA, 608 bp, Homo sapiens
tatataaatcttgagggctacttgcacctggaatcattttcctggtagtatgtacaattgggctttctcctttttaaagtatcctggctgcaggatgaaaattgctatttttgagtaaaatactatgcaaatctttcatttggtgtggtgactagaaaaacatttttttttcttgttgagattttcaagaagtaccaggatatttttgccagagactgccaaatttttcttctgcaaatctttgatcccagactgaaattctctccttgcgtgttttctttagctttcactgaatcagtttaacttagcccatgtttcatattcgtagaaaatttggagaattgacacagactgagtttggtagagataatccggacatggtgtaagaagttttaaggcatttaagaagagatggttttgagggcactacatgttcttaatttgtccataggacaatagaaataaacattacaattttctgttcatactatgtttaggkagaaaataaaaggataatattgctatttggaactcctacattatcatagcattctgctaaataatttatatgcactatccgataatatgaacatttattaacatttgct

SEQ ID NO: 221943 - DNA, 613 bp, Homo sapiens
taaatgtttggcagaaagtgaaatatctcatgtcctcacttacaagtgggagctaaataatgtgtacaaatggacacagatagtggaataataacaccaaagacttgtaagggtaagaggttgggagcagggtgaggaatgagaaattacctaatgggcacaatgtacactattccagtgatggttacactaaaagtacagatttcaccactacgcagtatatccatacaacaaaaatgcactcgtacccccgaaattccttttcaaaaatttaaaataaatttwaaaaaaaataaggatttgggatggattaattaaagcagcaaatatgaaaatactttataaactacaaagcattgttatgtgttgtttatttattcaatatatttagtaactattttaggtgcctactacatgctctgcattgagcagtaaagaaaaacagagtccttgctctcattctgataggaagagacaaataataaacaaatacatagattattgtaatgtgatgataaaagtactgtgaataaataggaagcaagttaagggagatatagaatgatgatgtgggaaggccaactgatgagataattttatcagaggcctgaaa

SEQ ID NO: 221944 - DNA, 331 bp, Homo sapiens
tgtgttgtgtgtgtgtgtgtctaatagttatttgaatttaaaagcatattgaatttaaaagcataaaaggagaaccacaagaattagctgccaatgtgcttggaaatgtatcaccatctccttcacaaacattgccttttttattgttttctaaataaatatgttttccttcatgaatcatgagctacttttcaatmtgttattaattttttcttttccattcttaccatgttaaattatttgcttttcattgccaattctgacacagtattattatctgccttttattcttccttaaaaataagttcttggctgtgtgtggtggctcatg

SEQ ID NO: 221945 - DNA, 601 bp, Homo sapiens
ttcagttgaccacggttgtcatcattccccattgtttacactgccctgcttcactcacttatgaattctttttctcctctgtraccatttgagctcactatccttgtattatggtttctaattaaggaatttgcatagctgatgatgatgaggtatatggaagacaggagaaggagcttagtagaaaatactaaaatttttggttttagatgtttgataagcattgacaattcttgtcattaagtcaaagagaactctgaactggaggtaagatttggaattctaaggtgctagttgaatgcacggatgtaatcatttcttcaatatattacattgtattattacaacaatagtttgcaatataatcatttacttactatttcacttactggcttatcattaatcttttatttcctgcacctgatataataaaaattcaataaattttattgaatgaataaataaatgagtgattcatatgaataaagacacttattggtcaagaggcatttgaggaggaaaacattcatgagtcagataacgtgaacctcaaaggatagtgaagttaggggaaggtcgatatgatctttagactgtagaa

SEQ ID NO: 221946 - DNA, 561 bp, Homo sapiens
gtaatgttccatatcatcatcattttctcagattttcacctgaagattgatctgtggatctaaaggtcatgttgctttttaggtagcctcattataaatataatatttgtaagttctgagcataacagaggccaggaaaaattgtagcattgacaattgaagttctgtttttgcaaacaatgtaacctcaaatcatagatatgagatacttggttagctcaaaatgaccaagtcactccctggttggacattctgtgcttcacaaaatgtaatctctctttcagaattttagaaataatgcarcattttagaaggatgattttaccttctttagtgccagatattagtctggactgagcaatgggtaggtaggctagagccataaaaagtaaatcatgatcgatgaatgacatatgtatgtatgtgagagtctggaaagtataaagctatcataaatattataagagaaaagctaaaccctaggaattgtttgttattattttctgtgtctcactaattagattggctgtttttctgagttaatgtaatgtgagtcttatc

SEQ ID NO: 221947 - DNA, 506 bp, Homo sapiens
tacatatgaacccatattgtaaccagtagaacagaatgtgwttctcctgggggtgcctgaagccaggagacagattctcagattaagcacgttcagctatgaaaaagaaatagtaagatttcaaatagtaatgttacacagaagtacaataaatcaagaagggatgaccttataaatatgcatgcaattcaggctggtctgtttgcattaatgactctacctattatttttaagtattaactggggtgtattagaatttgaatatagtcctggaattgatgcttgatagctcggagagttggcagttttccagtattaggaagaagctataatatatcattttcgtagtaattgaatcaagattattgaaataatgaaagatgtaattacatctttttattaaagcatactgtgtttgtttttctttaaaacagtaagtttcctgagcctgaagtgtttttagttgtcatttccacttacctgtatgtaggatgttaagaaaattg

SEQ ID NO: 221948 - DNA, 506 bp, Homo sapiens
tacatatgaacccatattgtaaccagtagaacagaatgtgtttctcctgggggtgcctgaagccaggagacagattctcagattaagcacgttcagctatgaaaaagaaatagtaagatttcaaatagtaatgttacacagaagtacaataaatcaagaagggatgaccttataaatatgcaygcaattcaggctggtctgtttgcattaatgactctacctattatttttaagtattaactggggtgtattagaatttgaatatagtcctggaattgatgcttgatagctcggagagttggcagttttccagtattaggaagaagctataatatatcattttcgtagtaattgaatcaagattattgaaataatgaaagatgtaattacatctttttattaaagcatactgtgtttgtttttctttaaaacagtaagtttcctgagcctgaagtgtttttagttgtcatttccacttacctgtatgtaggatgttaagaaaattg

SEQ ID NO: 221949 - DNA, 506 bp, Homo sapiens
tacatatgaacccatattgtaaccagtagaacagaatgtgtttctcctgggggtgcctgaagccaggagacagattctcagattaagcacgttcagctatgaaaaagaaatagtaagatttcaaatagtaatgttacacagaagtacaataaatcaagaagggatgaccttataaatatgcatgcaattcaggctggtctgtttgcattaatgactctrcctattatttttaagtattaactggggtgtattagaatttgaatatagtcctggaattgatgcttgatagctcggagagttggcagttttccagtattaggaagaagctataatatatcattttcgtagtaattgaatcaagattattgaaataatgaaagatgtaattacatctttttattaaagcatactgtgtttgtttttctttaaaacagtaagtttcctgagcctgaagtgtttttagttgtcatttccacttacctgtatgtaggatgttaagaaaattg

SEQ ID NO: 221950 - DNA, 506 bp, Homo sapiens
tacatatgaacccatattgtaaccagtagaacagaatgtgtttctcctgggggtgcctgaagccaggagacagattctcagattaagcacgttcagctatgaaaaagaaatagtaagatttcaaatagtaatgttacacagaagtacaataaatcaagaagggatgaccttataaatatgcatgcaattcaggctggtctgtttgcattaatgactctacctattatttttaagtattaactggggtgtattagaatttgaatatagtcctggaattgatgcttgayagctcggagagttggcagttttccagtattaggaagaagctataatatatcattttcgtagtaattgaatcaagattattgaaataatgaaagatgtaattacatctttttattaaagcatactgtgtttgtttttctttaaaacagtaagtttcctgagcctgaagtgtttttagttgtcatttccacttacctgtatgtaggatgttaagaaaattg

SEQ ID NO: 221951 - DNA, 441 bp, Homo sapiens
tcttacagccaatcctcttccactgccttattcctcattctgagctctctttcatttcaattactgttaagcatgtcctttcttctctgggtaatcgagagcaacccaattttttatttatccttatattctctacagaactggcatctggtgagacagggacacattatgctacataggcattttgggtaatataactggatgatacacttttcattaatgtttattcttgtatttctgctgaaaatatttctgttaaactagttaaatcttctatatttccattcagcagaacatataataatgctagatgattgctgtgtcaaaaaaatattttgttctctcaccttatactaatgacggtaataaatctgaccctccaggattttcttattgcttttttttgcaggccttragtatggcagaaaacatgatgtagtg

SEQ ID NO: 221952 - DNA, 523 bp, Homo sapiens
tgtgcgggtttgctacatgggtatattgcacccaggtggtgagcatagtacccaataggtattttttcaaacccaacccccttcttccctccccgctctagcaggccaccatgtctattgctcccatgtttacattcttgattgctcaatgtttagctctcacttataagtgagaacatgatatatttactttgctattcctgcattaatttgcttaggattatggcctccagctccatccatgttgctgagaagaacatgacttcattctttgtgtggctgtgtagtattccatggcatatatgtaccacattttctttatccaatccaccagttatgggcacctargttgattccatctctttgctgttgtaaagcaaagcatgtgtcttttcggtgtagtgatctattttggggggatatatgcccagtaataggattgctgggtcaaatggtatctctgtcttaagtcctttgagaaatctccagaaagctttccacagtggccgaactaatttatata

SEQ ID NO: 221953 - DNA, 581 bp, Homo sapiens
aaaaagcataaattatctaaagctggagataagcagaggccatttkggggttctgagtgcaatataaatagatgcaaaacagtaggagaaccagcccattcaaaatctccgaaggattagctatgtgagctgtaacttctttgctgttgttagctgtgatttatcatcagacagtaaggaagactcagccttatctgtgataattcaatggattaatggcagtacctttatctggaggtcataattaagcttgtttgatcaggctgagaacaagcacctatgctgtgctttagccctaactattgcttttggtgtcagggttataacataacaagaacatcattggaaatggcattagtaattttgttcaagcaagttattacttatctataaaacagaatcccctagatggtaggagaacaatatgttccaaatttagaaacttatgtataatattgagtttacgaatactaggtagctcaggtgcttggaccttcaaccaatttgaatataaaactgaaaataaagaaatactgtaacattattttctgctaataaaaatgaatgatagtaaaaggaaa

SEQ ID NO: 221954 - DNA, 581 bp, Homo sapiens
aaaaagcataaattatctaaagctggagataagcagaggccatttgggggttctgagtgcaatataaatagatgcaaaacagtaggagaaccagcccattcaaaatctccgaaggattagctatgtgagctstaacttctttgctgttgttagctgtgatttatcatcagacagtaaggaagactcagccttatctgtgataattcaatggattaatggcagtacctttatctggaggtcataattaagcttgtttgatcaggctgagaacaagcacctatgctgtgctttagccctaactattgcttttggtgtcagggttataacataacaagaacatcattggaaatggcattagtaattttgttcaagcaagttattacttatctataaaacagaatcccctagatggtaggagaacaatatgttccaaatttagaaacttatgtataatattgagtttacgaatactaggtagctcaggtgcttggaccttcaaccaatttgaatataaaactgaaaataaagaaatactgtaacattattttctgctaataaaaatgaatgatagtaaaaggaaa

SEQ ID NO: 221955 - DNA, 581 bp, Homo sapiens
aaaaagcataaattatctaaagctggagataagcagaggccatttgggggttctgagtgcaatataaatagatgcaaaacagtaggagaaccagcccattcaaaatctccgaaggattagctatgtgagctgtaacttctttgctgttgttagctgtgatttatcatcagacagtaaggaagactcagccttatctgtgataattcaatggmttaatggcagtacctttatctggaggtcataattaagcttgtttgatcaggctgagaacaagcacctatgctgtgctttagccctaactattgcttttggtgtcagggttataacataacaagaacatcattggaaatggcattagtaattttgttcaagcaagttattacttatctataaaacagaatcccctagatggtaggagaacaatatgttccaaatttagaaacttatgtataatattgagtttacgaatactaggtagctcaggtgcttggaccttcaaccaatttgaatataaaactgaaaataaagaaatactgtaacattattttctgctaataaaaatgaatgatagtaaaaggaaa

SEQ ID NO: 221956 - DNA, 581 bp, Homo sapiens
aaaaagcataaattatctaaagctggagataagcagaggccatttgggggttctgagtgcaatataaatagatgcaaaacagtaggagaaccagcccattcaaaatctccgaaggattagctatgtgagctgtaacttctttgctgttgttagctgtgatttatcatcagacagtaaggaagactcagccttatctgtgataattcaatggattaatggcagtacctttatctggaggtcataattaagcttgtttgatcaggctgagaacaagcacctatgctgtgctttagccctaactattgcttttggtgtcagggttataacataacaagaacatcattggaaatggcattagtaattttgttcaagcaagttattacttatctataaaayagaatcccctagatggtaggagaacaatatgttccaaatttagaaacttatgtataatattgagtttacgaatactaggtagctcaggtgcttggaccttcaaccaatttgaatataaaactgaaaataaagaaatactgtaacattattttctgctaataaaaatgaatgatagtaaaaggaaa

SEQ ID NO: 221957 - DNA, 604 bp, Homo sapiens
tcatattcccatattggtagtgggtcccacaagctcctgaatcctgtgtgaggtttcactctcaagaattaccatagcctggtgtttcaccagaccatggtaaaattaggcttgcttttagatggtatgcacatcagtctagcatagctatwtataaaatagtcttcctttttcctatgaatggatgccacggtggaaaaaaattccaatcagtacatcttacacatgctgatttcctttcgataatattaaacaatgcagttttcagaagaaaatggcccaaaatagtattaggttataggagtatctagtataaaataaataaaacagttcatgctattttgacattggaacagctatgaataaatcctgatcaacaggattaaaagacaaaagcttaaaacagattttctttcattctttggttgctataaaatgttatcaaaatattatcattcaaacagagggaagtgttaacttatttgtggccatttcatagtaacatcctctttaaaccaaaattggattttgtttctatggtaagtttatgccattgtataaagaaaattcttaaagttagaagttgagaaaaattaaaaatcat

SEQ ID NO: 221958 - DNA, 583 bp, Homo sapiens
cacaaaacaatagattaggtatcagtttcattcttctaacaaggtgttggaaaagactgaaggttctctcttagggtttttagactttgtgaatatgatatgttgatactattatttgtgcaatacaaatgtaaaaatgtcagttattagacatattgttggaggaaaaattggggaaatattttgaaatcttcatgtagaaaaaattggaatgttagatatattagcaaasatagagatcatctaatttagtggttctcaaagtgtagtccctacaagcaacatagcatcacttgggaacctgttagacatataaattcctccacccagcctcaaacccagtgaagcagaagctctgggtgtgaagtctagcagtctgtgctttaacaagcccttctggtgattgtgatgcccactagaatttgaaatctactgaccaaattcaaggtcttcacttgacaatgaggaaactagcctcagaggtcaccacattcctgatttgggtactgagataagattaaaaacaaagtctcttttgttagtgttatttattcattttgcccctaagcaattccttaaatta

SEQ ID NO: 221959 - DNA, 587 bp, Homo sapiens
taatgtggtatgcaggtaagagtgtggtgyttcagagtcaaatatagccactaaggatgtgtgaccttgtactcaactgctctagaacttggctttctcatctgtggactgcgaatatctgcctcacagagatatcatgatatataaaaagaaggtatatattgagtctagaagttaaactcctctacagatggctatgatgtaataatgtcatcagtaaatatccatctaagtttagctattacctttatatatttctttattttcttatcaaaagactttataactcttgtgtttctaatgtgtggatttgttcatgtatgtttgtatttcctgcacccttaactatcctagcatcctctctggattggagatagtgggatagttcttatccctgtaattcagtttatgttcatcaatagttctgatatgggtttcttttcttttctttctttctctccactatgcttggctaattttttaaattttttcgtagatacagggtcttgctatgttggccaggctagtcttgaacttctgacctcaaaagattctcccacctcagcctcccaaagtgctgagattac

SEQ ID NO: 221960 - DNA, 541 bp, Homo sapiens
aatactaacatcctgtaataaaactctttaaattttttttaaaagggcttttatttgggcttctcttttttgcacaaattcattggtctacattaaccacctttttacttaggttttttttccctctaatttctctcccttttttgaaagactagagaaacaagacttcattatcaagtactcttttgtcaaggttatatccgagcattgaaattactgaccacacttattctcataatttttcaggaccctataacttttgaggagggtttgtatattagtcctgacttctaattttaaaatattggatagctaatgagttttaataacaaaacaaatactggattaagctttagataaatggatttcatagaaatcaaatacttatctgtgtagagcttgtatcatatttgcttttgatataaaatttaaatcaatatttactgcatttaggtttagctaatctttattttgaaagccaaataatcaaaaataaaaatagccracaaaagctcattttacttaaagaaagtgtggtaag

SEQ ID NO: 221961 - DNA, 579 bp, Homo sapiens
tacacaccatttctatgccagaaaagaaatccataagacccaatgttgattattcatagaacttcatggttttgaagacatgatgtggaataatcaaatggcttcccgctatggatatattgagttaagataaataaattatctttctctgaagttacacattttggatcatgtaaatctgcagttgccagtcaccatcactctgattgcatttcatactaccacagaggactatgagggcaactcacagccggaaggaatgctgagaggtggaaggcagagtttgatgtcctgtgccagccttaactaaaacaaacttcaccgtaggagttcacagttacctgagtcaataaattccttttattaaaaaaaaaaaaatagactattttgaactggacatctctcatrtgaaacaatacaaatgaaaaatattttataaaaaatcaagtcttttagagattaattcatttccacatgtaaaaatggaggcatatcatatcaaaatgataacatttattttgctgatttttttttcagaatttctttgaggaacaactaagattgtgcagtataaaaata

SEQ ID NO: 221962 - DNA, 601 bp, Homo sapiens
tcattaccactaccactactacctggttttagccataaccataccctacctttcctctagcaagaatggtccagatgaaatcactcagataagaaagataatatgtcaggtaatattacacctctattgaaaacccacaatggctctccatcttcctcagagaaagtccaaattcttacaatggtttaaaaaatcatctactttatctagctcatcccactcttgcaagacttcatgctgcttctagaactcwcttggtacagaaatttacacttattgctccctagcctaaaatattcttctagagagccacatggctccctcctccctctcttccaggctttgtcacctctagggaaagctttctttgattactatttaaaatgtacacctccaaacatcatatccctttctatttctactttatctttgaccgtatgccatggtatatattttacctatttgtctccacccaattaagctctatcagtataagggctctctttcattcattactgcatcctcacagctcagcaaagtactaggcacttaccaggcacttgataaatatttgttgactgtgtatgtaaataaatgaaag

SEQ ID NO: 221963 - DNA, 608 bp, Homo sapiens
ccaaacatcatatccctttctatttctactttatctttgaccgtatgccatggtatatattttacctatttgtctccacccaattaagctctatcagtataagggctctctttcattcattactgcatcctcacagctcagcaaagtactaggcacttaccaggcacttgataaatatttgttgactgtgtatrtaaataaatgaaagatatagacaagaagttaggagtttatcacaataggccaaggtgagaaattatagtggcttgaaccagggtggtagcagtggacatactgatacattgcagagataaagaaaacacgagtattgggattcctgttatttctatttttctcatcatacgagtaacaaatccacattgtagttgaatgtatcagtattgagagttcattaatgtgaggcttcccgccaaggacgtgacctaccttctacatgccagtaaagatctgcttctcaacctagagaactgaggaccagaccttaaactgggattgccatataaaatacaagacatccagataaatttgaatttcagacaaacaaggaatgaaataaaaagtgtgttccaaatattgcccaaggcata

SEQ ID NO: 221964 - DNA, 575 bp, Homo sapiens
gcctctttctatgttattttctaagagttttatagttttatactttacagtgaggtctatgattcattttgaattttttttatgaagagtakaaagcctatgtctagattcctactttggcatgtagttgtacagttgttccagcactatttgttaaaaaagattacattagcttcattatagtgcctttgctcctgtgtcaaatatcagttgaccacatgtgtgtgggcctatttcagggctttctattctgttccattgattgccaataccacactgtcttgattattttagctttatatagtaagttttcaagttgggtattgtcagccttccaactttgttctctttcaatactgtgttggttattatgggtcttttgcttctccatatgaacgtttgaataaatttatagatattcacaaaataatttgctgggattttggttgacaatgtgttgtatctatacatcaaggtgggaagtactgacatcctaacaattttgagtcttcctatccatggacatgaaatatctcttcatttatttaaatcttctttgattttattcataaatt

SEQ ID NO: 221965 - DNA, 482 bp, Homo sapiens
tcttaaataataagacttgaaaggtgcaattacttcttgatccatggactgcagaatggatactgttttagtaggcatgacgacaacttcaatcttcttgtatatcgccatcagagctcttgggtgaccaagtgcattgccaatgtgcagtaatatttaaaaagtgatttatctttttttttctgagcagtgggtctcaacggttgacttaaaatattcagtaaaccatgctgtaagcagatgtggtgttatacaggctttgtgtttgcatgtatagagcaaacacagagtagatttagcataattcttaaggcctctaggattsaccattttggaatggtaaatgagcattgttttcaacttcaagtcaccagctgccttaacatctcataagagagtcagcctgtcctttgaagctaggcattgacttctcctctctaactatgaaagccctagatggcatcttctttcaatagtagact

SEQ ID NO: 221966 - DNA, 597 bp, Homo sapiens
acctaagtcatatctgcaaatagcttccatgataaccatttgcttacatgtccacttgaagaaaaatgcaaaacattttccagttgcttattgggagaccccaaagtagaaagcagaagtatttctttatcaaactagcctgactcctatctttcccattaaaaagactttttaggaatcctatttttgtccctaatcaaatactcaagaagtggcccttcagacatgtgcacktacttccttcccttgctaaaactttctcgctaaagccatgagtacacggctgacttttagctcaacaatcttctgcaaactgcaactcccatttggttgttttggattgatagtaatctctctgcacatgtattctaatatatactgatgtggtagccagtgtttcaaatgccagcggaaatgcaatctctgctagaaggaagcacttatgaactgtcaaagaataaatggctgccatcgggaataagtgcttgtcatatcaaagctttggcaaacatctctgcttagaagatttagtctgatgaatttcatccacacctaccagatgttatatctagaattttgccaggtggttgcacaaat

SEQ ID NO: 221967 - DNA, 597 bp, Homo sapiens
acctaagtcatatctgcaaatagcttccatgataaccatttgcttacatgtccacttgaagaaaaatgcaaaacattttccagttgcttattgggagaccccaaagtagaaagcagaagtatttctttatcaaactagcctgactcctatctttcccattaaaaagactttttaggaatcctatttttgtccctaatcaaatactcaagaagtggcccttcagacatgtgcacttacttccttcccttgctaaaactttctcgctaaagccatgagtacackgctgacttttagctcaacaatcttctgcaaactgcaactcccatttggttgttttggattgatagtaatctctctgcacatgtattctaatatatactgatgtggtagccagtgtttcaaatgccagcggaaatgcaatctctgctagaaggaagcacttatgaactgtcaaagaataaatggctgccatcgggaataagtgcttgtcatatcaaagctttggcaaacatctctgcttagaagatttagtctgatgaatttcatccacacctaccagatgttatatctagaattttgccaggtggttgcacaaat

SEQ ID NO: 221968 - DNA, 597 bp, Homo sapiens
acctaagtcatatctgcaaatagcttccatgataaccatttgcttacatgtccacttgaagaaaaatgcaaaacattttccagttgcttattgggagaccccaaagtagaaagcagaagtatttctttatcaaactagcctgactcctatctttcccattaaaaagactttttaggaatcctatttttgtccctaatcaaatactcaagaagtggcccttcagacatgtgcacttacttccttcccttgctaaaactttctcgctaaagccatgagtacacggctgacttttagctcaayaatcttctgcaaactgcaactcccatttggttgttttggattgatagtaatctctctgcacatgtattctaatatatactgatgtggtagccagtgtttcaaatgccagcggaaatgcaatctctgctagaaggaagcacttatgaactgtcaaagaataaatggctgccatcgggaataagtgcttgtcatatcaaagctttggcaaacatctctgcttagaagatttagtctgatgaatttcatccacacctaccagatgttatatctagaattttgccaggtggttgcacaaat

SEQ ID NO: 221969 - DNA, 513 bp, Homo sapiens
tttctactctgtttactttgttctccatttctagaacacatggtcccagaaggtgctcactgagtatctgttaaatgaaaaaaacaatggaaggaatacacagttttaacgagaatgccttcaggagatgctagtttggcaggatgtcttctgttgtgtttcagtggccagtccttgctatagactactgggcatgttcaggcatacctgaggagttcttagtctcccaagcccagctctccctggaaggttggaagtccaggccctcacactggatctctccacygctatactttttaactcccatcgagcagagagaagaacaaacttctgaaaccttctgagagcccaggctggcgacaagttgggtcagtacacctcaagtctctacacacatgcctgcacatgtggctcgggtatggtttgagagtagtacaagcaccaaaggctggctatcacaaaaccccccaccccaagcccacctaaataaacataaaacccatctcaaagcac

SEQ ID NO: 221970 - DNA, 390 bp, Homo sapiens
tggacagacagaacagtgtgtggagactcacactgtaaacttttcctccaagaaccaccacaggaacctaccaggaaaaccaaaagaattcacaggctacttactttgaaagaagtagcttgacactgcaaactccatgagacagctgaaaaactgtaagttcccaaagtgtgagtgggggaaaagtctgcctctgaacagacatccccactggggaacctaaaaatccagatcacaggagaagaatttaatctcatctgaagttaaaatggatttaggcagccaagtgaaatatcaaagtagaagaaggagcgggaagcgccctgkaggcactcccagttcccggctcaaaccagagaaagccatccctgacttatctcacaggggtcc

SEQ ID NO: 221971 - DNA, 556 bp, Homo sapiens
acttacctctttttgtatccttacttatacttgactatgttccatttggttaagattacagttaacctttgaacaacacagtttgaactggaggggtccacttatacgcaaatttttttcaactaaatgtgggtggaaaatataccattcatggcctatgaaaggcacatatatggagggccaactttttgtacatgcacgttccacaggccagccatgggacttgagtatgctctggattttggtattggggtagaggggctggaacaaatcccctgagtatactgaggaacgatagtactgcataattaacctaatggaccattatgtaaaaatgtagctcccaattaactcccaattatttttatataaatgtcagccagtatttataataattctacatccatatttattagtccatccatgaaccattatgagtcccaatatgaactcttctaaaaaactttaaatgtamaattttgtgttttcatccattcaattttaactattcccaaatgtacacaagaaatttaaaaagaagggatgtaggggaaaa

SEQ ID NO: 221972 - DNA, 546 bp, Homo sapiens
gtgaatgccgtgcctattgcatatgcaggaacgtcagcactgtgaccaaagagcaactggggtcctttcgactgtcgtcatcctctgctctcaccctgtgaccacttctgcaaagagggccctctttttttttttttttttaattgtcccagcaccctttggatttgaaatcgcccatctcctttccatgtgactagagcatggctgtcaattacaaagtcctgcattccctcccaccaagatgtgactcgtgtgggtcagcgtcccccatcccctcaaggtacagtcatcagaccagctaggggccaagacaccggcaaggccaggctgggtcattctgagagactgagatggatacagggcaagagacttttcttttttttccctcctgggattgcagtctgcagggactggagactgagcaccggcagtggccatctttcccacgatgtggaaagtgcctgacrgagaaagaaacaacagagaagaaagtgggactgagggggtggtggtgatcaacacaggggcttcatccaagcaggagcc

SEQ ID NO: 221973 - DNA, 595 bp, Homo sapiens
ataaaaccaccaggagtggccgggagcggtggctcacgcctgtaatcccagcactttgggagaccaaggtgggtggatcagctgaggtcaggagtttgagaccatcctggccaacatggtgaaaccccrtctctactaaaaatacaaaaattaggtaggtgtggtggcacatgcctgtaatcccagctacttgggaggctgaggcaggagaattgcttgaacctggaaggcggaggttgcagtgagctgagatggcgccattgcactccagcctgggtgacaagagtgaatgaaacttcatctcaaaaaaaaaacaaaaaccaaaacccaggggtcctctggaagatccctgtaatgtaatgcaataacatattttcatatgatatgaatgttaatcctaattggggtgaataaaggctgaatagccttatatcattttaggttaaggtttgttaccaaattagttttaaaacatttttgtgttttggaactttttatggtcaggcttgagtctctgtcctctgacccaggtgaaatgctctatcaccattctcacagcagggactaaacttctgccacagtaatacaggaattc

SEQ ID NO: 221974 - DNA, 549 bp, Homo sapiens
gaagataatttttttccctaaagtattttctaaataataaccagtagttgacctacgtcctttatatatatcacatagaagatctccacagtacattcttcaaattcagctcagataatccatggaatgctcaagttccctgtaacaaattgagctcctatatctctgtggacttataattgactaataaaagtaagacttgtttgctaatgataaagataatttgtaaaaaataaatcattttagtttgaccatgagacgcacacatcyattatcattaaatgtgaaaatctagaatatatccagttaatggtcaagtatcaactttatgtcccacacttgccatgtagaagctaagcttttaaaatgtagaattattttctacttttctgttatatgcatatattataaatgacaagtattttaaacactggatttttttaaaaattgctttattttcttctgttttgacaaaagttggctttcaagtttaattaagttaaaaaaaaacgaacaacaaaagtgtattccaatgggagacagataaag

SEQ ID NO: 221975 - DNA, 549 bp, Homo sapiens
ataaatggtaattatgaacaacattgtgccaacagatttgacaacttagatgaagtggacaaatktctccaaagacacaattatctagtcttactcaaaaacaaacagacagaatagcccggtatctattaaagaaattgaagctgtaatttaaaacctttccacaaagactccaatgctaggtctaaatggcttcagtgaagaattctaccaaacatttaagaaaaacatgataccaattctgctagttcttaccaattattctaattaaagagaaaattgaaaaaggaaggaatacttccgaataacctcttgcacttttctcagacttgtaagtgtgacactgggatgaccagttcatggggagaattttatattctttacaggtgaattggctacaaccacaggcaatttcaatttctttccaaatttcttcaggggaatatctgaggaaaaataaagtgcttttgaaatataaacactttctaggaatacaggaatgttgcttatatatgattttaccaatggtctcatgaaaattgtgtggag

SEQ ID NO: 221976 - DNA, 531 bp, Homo sapiens
gtgttcatactcaacgccaaactttttgtttacaaagggcacctagttctttagtatcttttgctgtttggaagctctaagctaccagctctctagtgcatattactgatgacatttttcttgtgggcattgatttaaatcctgtatttcaaaaagaatccaactgatccatatttcagatgcttcctttkgactaaagcttgatctgcaactcttggggactgttcctgaggtgacagtcaaccactgtttgtattcaatcttctctttcctcagagcaggctcagaagactaggagcttgttttgcaaatccatggcaccaaccatttactatctatgtcacatttctgggaaactttcaaagtctttcaccctaagttcaaaatttaaattgtatctattagaatattagttttttgtatatgaccttttaatttttttctgtttttgtgaattgtgagcaaaccacacaattaaaatgtaactccagaaccagttagcagaaacactctcaattcttagtatgtaag

SEQ ID NO: 221977 - DNA, 443 bp, Homo sapiens
cttggcaccaatgctagagatcaattgattgtaaagtcatggatttatttctttctatgmtctctattctgttcccttggcctacatgtctgtttttatgctagtagcatactattttgattactacagctttataatttagtttggaataaggtaatgtgatgcttccacttttgttttttctgctgaaggatgttttgactgtttggggtcatttgaggttgcataaaaattttagaactgcttttttccatttctttgaaaaatgccattgaaattttgatggggttgctttatatctatagatcgctctgagtaatagggatatgtatcttcttcaaattctttcatcagtgttttatagtttttggtatatacaaattttactgtcttatttaaatttcttcctaagtagttaattttttgatgctattgtaaatgag

SEQ ID NO: 221978 - DNA, 579 bp, Homo sapiens
aaggtaatgtgatgcttccacttttgttttttctgctgaaggatgttttgactgtttggggtcatttgaggttgcataaaaattttagaactgcttttttccatttctttgaaaaatgccattgaaattttgatggggttgctttatatctatagatcgckctgagtaatagggatatgtatcttcttcaaattctttcatcagtgttttatagtttttggtatatacaaattttactgtcttatttaaatttcttcctaagtagttaattttttgatgctattgtaaatgagattgtgttctttcagacggactctcactctgtcgcccaggctggagtgcagtggtgtgatcttggctcactgcaagctctgactcccgggttcacaccaatctcctgcctcagcctcctgccaccacgcccagctaattttttgtatttttagtagagacagggtttctccatgttagccaagatggtctcgatctcttgaccttgtgatctgcccacctcagactcccaaagtgctgggattacaggcgtgagccactgtgcccggcccgagattgttttgttaa

SEQ ID NO: 221979 - DNA, 570 bp, Homo sapiens
gcctgccctccacctcctccaaaagccttcattgctcccccactgctggactgcattctgactccgtctcaatgtgactcaatggcacttccattgggcactgccctaaagagctcatctccacagtggcctgaaaccaaacccacagtatctctgaggtatgcctatgtagcagtcccataagttatcgtgcactttaagcaytaccaagtccagaactgtaaatgctacacatttacagaaataccacttgaaggtttaactacttataactgtttcataattagaattacaaattttgaatattaattattttaattggggggaggggccaagatggttgagtagaaacagctctactctgcagcccccactgagacaaacataaacagcgagtgaattctgcatttctaactgaggtatccagattccctcattgggactgactaggcagttggtgtgacccatggagtgcaaggaaaagcagagttgggcgacagttcacccaagagctacacagggcaaagagacctccctcctccagccaagggaggcagtgagggattgtgc

SEQ ID NO: 221980 - DNA, 570 bp, Homo sapiens
gcctgccctccacctcctccaaaagccttcattgctcccccactgctggactgcattctgactccgtctcaatgtgactcaatggcacttccattgggcactgccctaaagagctcatctccacagtggcctgaaaccaaacccacagtatctctgaggtatgcctatgtagcagtcccataagttatcgtgcactttaagcactaccaagtccagaactgtaaatgctacacatttacagaaataccacttgaaggtttaactacttataactgtttcataattagaattacaaattttgaatattaattattttaattggggggaggggccaagatggttgagtagaaacagctctactctgcagcccccactgagacaaacataaacagcgagtgaattctgcatttctaactgaggtatccagattccctcattgggactgactaggcagttggtgtgacccatggagwgcaaggaaaagcagagttgggcgacagttcacccaagagctacacagggcaaagagacctccctcctccagccaagggaggcagtgagggattgtgc

SEQ ID NO: 221981 - DNA, 461 bp, Homo sapiens
agtaaatttctcttgattttttttctttcataatctactagttactgagcctgtyggacttaactcaccagagttttaattacaaagcagtacagttgccgcagagaatggtaacacagtgttgctgaaccaactgggcctgagatgtgtggctggaatcttatattttcttcactttctaaagatgagagacttcccagatgccctaacagcagggcttctttttgataagaggtaatgaaacctcacagacaaatgcaataatctgagttttaatagacccaaaccagtcgacagtaaaaaaaaaaatcagcacaatagacaaaaaactgagtcactctgatgagattttcaaatatttctcttccttctcatcatctcttcaaagagagtaaccgattgccctattcttttctttttgtcctaatgaaaaaaatagcttaaaattagaaataatgtac

SEQ ID NO: 221982 - DNA, 561 bp, Homo sapiens
gagtcagctatggccaacatgcctgttactgggtgtgtattaatacttaatccttgtttaccaggagatattctctgttgcctcagacattgggctgatctatggagtacacagtggcctgagtaccctgctcagcccagaatgtacagkggcaagatgggcagggtcataccaggcaggaccactacaagtattctggttgcgggcacatgcaccagcactgggggagaatccattgggtaactaacaagtgttcagagatgtgcctaggtgtggaactaggaaacctccttagcctcaagctctctgcaaggggatgggtgctgcctaaactactaattcagaagagtgggtgcctgaagatctgcttgggcatggagtgtagagggtcccactgaacaatctcctcacagaaatgcagtggtggctcagggtgctaattcaggcaaacaaatgttcctattgcctggagacctgcctgggcatggggtagagagagccccactgcaccacagtctctacatagaaagggtgggctggcttagggtactggtgcagata

SEQ ID NO: 221983 - DNA, 561 bp, Homo sapiens
gagtcagctatggccaacatgcctgttactgggtgtgtattaatacttaatccttgtttaccaggagatattctctgttgcctcagacattgggctgatctatggagtacacagtggcctgagtaccctgctcagcccagaatgtacaggggcaagatgggcagggtcataccaggcaggaccactacaagtattctggttgcgggcacatgcaccagcactgggggagaatccattgggtaactaacaagtgttcagagatgtgcctaggtgtggaactaggaaacctccttagcctcaagctctctgcaaggggatgggtgctgcctaaactactaattcagaagagtgggtgcctgaagatctgcttgggcatggagtgtagagggtcccactgaacaatctcytcacagaaatgcagtggtggctcagggtgctaattcaggcaaacaaatgttcctattgcctggagacctgcctgggcatggggtagagagagccccactgcaccacagtctctacatagaaagggtgggctggcttagggtactggtgcagata

SEQ ID NO: 221984 - DNA, 561 bp, Homo sapiens
gagtcagctatggccaacatgcctgttactgggtgtgtattaatacttaatccttgtttaccaggagatattctctgttgcctcagacattgggctgatctatggagtacacagtggcctgagtaccctgctcagcccagaatgtacaggggcaagatgggcagggtcataccaggcaggaccactacaagtattctggttgcgggcacatgcaccagcactgggggagaatccattgggtaactaacaagtgttcagagatgtgcctaggtgtggaactaggaaacctccttagcctcaagctctctgcaaggggatgggtgctgcctaaactactaattcagaagagtgggtgcctgaagatctgcttgggcatggagtgtagagggtcccactgaacaatctcctcacagaaatgcagtggtggctcagggtgctaattcaggcaaacaaatgttcctattgcctggagacctgcctgggcatggggyagagagagccccactgcaccacagtctctacatagaaagggtgggctggcttagggtactggtgcagata

SEQ ID NO: 221985 - DNA, 561 bp, Homo sapiens
gagtcagctatggccaacatgcctgttactgggtgtgtattaatacttaatccttgtttaccaggagatattctctgttgcctcagacattgggctgatctatggagtacacagtggcctgagtaccctgctcagcccagaatgtacaggggcaagatgggcagggtcataccaggcaggaccactacaagtattctggttgcgggcacatgcaccagcactgggggagaatccattgggtaactaacaagtgttcagagatgtgcctaggtgtggaactaggaaacctccttagcctcaagctctctgcaaggggatgggtgctgcctaaactactaattcagaagagtgggtgcctgaagatctgcttgggcatggagtgtagagggtcccactgaacaatctcctcacagaaatgcagtggtggctcagggtgctaattcaggcaaacaaatgttcctattgcctggagacctgcctgggcatggggtagagagagccccactgcaccacagtctctacatagaaagrgtgggctggcttagggtactggtgcagata

SEQ ID NO: 221986 - DNA, 601 bp, Homo sapiens
tcttggctatcaaccataaaagagaacttcctggagagccttcgtgggaattcaagaatccctaggactatagagaccatagaggtactggaaagacgtgaaggggccagctgtgagataataaagagtrgtaaggactatggggaactggaaagtttatgtcgatctagaggtgacagcctcttttccagtccaacagattgttgtcctgaggggatgtgtgggtctagtatttgcagattttctaatttttttcaaaaaaagaaatctaaatctgatgtgaaagattttattttgtgtctttgttgtacagtgccttctgctgagaccccatattgtgaatttgccatttttgtgtatgtccttattccctttgggtaaatgcttagtctatattatttttatagaatcttggtgggagaataaatcaagcaattttaacctcatcccatgaaaagagggaaagtttcttctaccagatgctgtcattcgccttctcgttgcccttgtgtgaaacgtgtttcctaaatcgggctaattggaccttctctcctaagattttgactctgaagtaatgtaaggacaaaaaaaaaaaaaaagg

SEQ ID NO: 221987 - DNA, 573 bp, Homo sapiens
tttagcttcaatttaaatatgctaaaaggctggacatggtggctcatcccttwatcccagcactttgagaggccgaggcagggggaattacttgaggaccaaagatcgaaatcagcctgggcaacatagtgagaccctgtctgtaaaaataaataaataaataaataaatagcttagtgtggtggcatgcacctgtagtgctagctgtttgggaggctgaggtaagaggatcatttgagcccaggagtttgaggttacagagatgtatgttcaccccactgcactccagcctggttgacagagcaagatcctgtctctacaagaaataaataagtaagccataaatagctccagagctaatttattggataaaatgatcataaaaattctgacatcatattatatgcataatggggaaaaactattatatatagaatgatctaccactgcatatgtgagggttaatactgagtgtcaacttgattggattgaaggatgcaaagtattgatcctgggtgtgcctgtgagggtgttgccaaaggagattaacagttgagtcagtggcctgggaag

SEQ ID NO: 221988 - DNA, 573 bp, Homo sapiens
tttagcttcaatttaaatatgctaaaaggctggacatggtggctcatccctttatcccagcactttgagaggccgaggcagggggaattacttgaggaccaaagatcgaaatcagcctgggcaacatagtgagaccctgtctgtaaaaataaataaataaataaayaaatagcttagtgtggtggcatgcacctgtagtgctagctgtttgggaggctgaggtaagaggatcatttgagcccaggagtttgaggttacagagatgtatgttcaccccactgcactccagcctggttgacagagcaagatcctgtctctacaagaaataaataagtaagccataaatagctccagagctaatttattggataaaatgatcataaaaattctgacatcatattatatgcataatggggaaaaactattatatatagaatgatctaccactgcatatgtgagggttaatactgagtgtcaacttgattggattgaaggatgcaaagtattgatcctgggtgtgcctgtgagggtgttgccaaaggagattaacagttgagtcagtggcctgggaag

SEQ ID NO: 221989 - DNA, 594 bp, Homo sapiens
ttcccaaagtcttaagtcatcccagcattaaccccagagtccacgtccaaagtctcatctgagacaagagaagtcactttcacctatgagcctgtaaaataaaaaacaagttacttacttccaagatacaatggaagtgcaggcactgagtaaatgttcccattccaaaaggaagaaattggccaaagcaaaggggctacaggccccatgcaaatctgaaaaccaagagagaagccattaaatctgaaagctccaaagtaataacttttgactccgtgtctcacatccaggrcaagctgatgcaagagatgggctcccagggccttcagcagctctgcccctgtggctctgcagtgtacagtttccatagctgctttcacaggatggtgctgagtgcctatgtgtttttcaggcaaatggtgttagctgttggttgatctaccattctcgggtctagaggattgtgtcactcttctcacagctccactaggcagtgccccaatggagactctgtgtgggggctccaaccccacatttttgctctgtactgccatagcagaagttctccatccctgaagtagacttctgcctgca

SEQ ID NO: 221990 - DNA, 594 bp, Homo sapiens
ttcccaaagtcttaagtcatcccagcattaaccccagagtccacgtccaaagtctcatctgagacaagagaagtcactttcacctatgagcctgtaaaataaaaaacaagttacttacttccaagatacaatggaagtgcaggcactgagtaaatgttcccattccaaaaggaagaaattggccaaagcaaaggggctacaggccccatgcaaatctgaaaaccaagagagaagccattaaatctgaaagctccaaagtaataacttttgactccgtgtctcacatccagggcaagctgatgcaagagatgggctcccagggccttcagcagctctgcccctgtggctctgcagtgtacagtytccatagctgctttcacaggatggtgctgagtgcctatgtgtttttcaggcaaatggtgttagctgttggttgatctaccattctcgggtctagaggattgtgtcactcttctcacagctccactaggcagtgccccaatggagactctgtgtgggggctccaaccccacatttttgctctgtactgccatagcagaagttctccatccctgaagtagacttctgcctgca

SEQ ID NO: 221991 - DNA, 594 bp, Homo sapiens
ttcccaaagtcttaagtcatcccagcattaaccccagagtccacgtccaaagtctcatctgagacaagagaagtcactttcacctatgagcctgtaaaataaaaaacaagttacttacttccaagatacaatggaagtgcaggcactgagtaaatgttcccattccaaaaggaagaaattggccaaagcaaaggggctacaggccccatgcaaatctgaaaaccaagagagaagccattaaatctgaaagctccaaagtaataacttttgactccgtgtctcacatccagggcaagctgatgcaagagatgggctcccagggccttcagcagctctgcccctgtggctctgcagtgtacagtttccatagctgctttcacaggatggtgctgagtgcctatgkgtttttcaggcaaatggtgttagctgttggttgatctaccattctcgggtctagaggattgtgtcactcttctcacagctccactaggcagtgccccaatggagactctgtgtgggggctccaaccccacatttttgctctgtactgccatagcagaagttctccatccctgaagtagacttctgcctgca

SEQ ID NO: 221992 - DNA, 568 bp, Homo sapiens
gaattctccctctatctcctatcagctactttgccgtgcaaactctagccactttttccttccttgattctcagctccttctcctcaattcaggcaatccacagggctccgctggggtttcctctccctgcactaccatctataaacgtcttcaaggtagttagctgggattaatcatagagctcaccctctcagctttccatctctcaaggatcactgtccttcatcgcctgatgtccaatgtcttgacaaccattgttttatatattttggattttttattaattttttttccttgagagggtaaatctagtgtttgttactctatcttgactggaagcagaagtctatctgaaccatgttgcatcagaagaaagggcagaaggtgagagtcatcattctaytgaatttctagaagctgtctagatatatgataatcatacaattgagatagtttttctgttttactcccggttttttttttacataatagactgagaaaagggaacaggtcagatgcatctatttttctcttgcaggaatttataaatatttttaaacttgtttt

SEQ ID NO: 221993 - DNA, 588 bp, Homo sapiens
cactcctggaataaaccccaaccaagtcattttatcagtcaggatgctttcacctaaaaataatgaaaagcccaactcacatcaattgaaacaataaagaaatatatcgatgtatttaactagaacacaaaaagtaaggcaggttcatgactggttgttccagggcttaacaggctcctgtgacctcaacatcagctttgtcctaaggtgcaaattccttgtagtcataggatggctttcagtagcagctggagctatatggttcctcccttacttctagcagaagatgrtcatttcaggaagctttcccatcaaagcaaaaaggacatttcctaagggactatgaaagtggctccttgcattccttatgcccagattgtgtccatgccaattcctaaaccagtcactatctaggcagtggaaattatccataggccaatcaaatctccctttggagtgagggaccggaaggctttccctgaagcaagcgggtaaggggtggattctggaatcaaactgacttccactcagaagggagaaaggcaaaggaatgatgaacaggcaagcaccaatgtaaaccacaatcac

SEQ ID NO: 221994 - DNA, 588 bp, Homo sapiens
cactcctggaataaaccccaaccaagtcattttatcagtcaggatgctttcacctaaaaataatgaaaagcccaactcacatcaattgaaacaataaagaaatatatcgatgtatttaactagaacacaaaaagtaaggcaggttcatgactggttgttccagggcttaacaggctcctgtgacctcaacatcagctttgtcctaaggtgcaaattccttgtagtcataggatggctttcagtagcagctggagctatatggttcctcccttacttctagcagaagatggtcatttcaggaagctttcccatcaaagcaaaaaggacatttcctaagggactatgaaagtggctccttgcattccttatgcccagattgtgtccatgccaattcctaaaccagtcactatctaggcagtggaaattatccataggccaatcaaatctccctttggagtgagggacyggaaggctttccctgaagcaagcgggtaaggggtggattctggaatcaaactgacttccactcagaagggagaaaggcaaaggaatgatgaacaggcaagcaccaatgtaaaccacaatcac

SEQ ID NO: 221995 - DNA, 550 bp, Homo sapiens
gaattctcttcattttcttgaggatgacctttcactgagctcttgatatcttccactgtgttactctcaattttttgtttgtcttcatctcccaatgaatgggctatatgacaataagcttgatgtagggcttcaacgtcactactgctttgtccataagaaacacctgttgaaataaacgtaatcaccagaaataattacatcacaaatacatgagaaygataaaacactaatatcattccttaacctgttaggaatataaaagtagagttaagtactaactaggtaatttgcagctatggcctaccagcatggattcatagcaggctcaacaactcttttagcaaactgaggcgtgtcctgatgtggtaagcataaaatctgctttcactcgtcattgttctttctcctactattcttaatcgaccccctctgcataactattcttaagtttcccaaactaaaaaattcctttgacggattctacctctcctttaccattaccattctctctgcttctctgtaccaccaagcatcttgtcatttgcac

SEQ ID NO: 221996 - DNA, 490 bp, Homo sapiens
gaagggtgttctgtgcagtcagttgacaacattgccatagccattattttgattgtgcagagcctcatggtaaagcggaggtgagcacctggggacttctcagatttttctgggcgtgcacacagccccttatctgtgcttggctttcttgattattaggtttttcatatttttgttggagcttttaaaactcttacagacatctcagtctcctgcttttccttctgaagtttttggttrgtcttttgtttgtctctgttgttatccactgctttagccagcctctaagctaaacaattccctggaattcttttcaacaaatggccttcaagtaaagggatttcacactggtgaactctatttatgtgaaatacctagctttgcaagagggatcttccagggaacatttatacaggtgaattttctgggaatgaggctttgatggagcttcagcctcattgtactccctctgctggcttttcaggctgct

SEQ ID NO: 221997 - DNA, 401 bp, Homo sapiens
gtaggtcttctagcatatacagattctgttgyacatattttgttatatatttcatatttttggagctgttgtatgcgataaaaaaattttcttccaattgttcattgttagtttatagaaatgtaatttatttttgtatgctgactttgtagcatatgtccttgctaaactcagttactagttacaggagggtatttggggatagatttcttgggtcagttgtgttttaaggagactttcaaaattgagaaaaatgtcttataattacccatgagctaccatttcaggtactctttattttgttgtgtagatcagtatttccatttggtataattttccttctgcctgagaatttcctttaacatttcttagactgtaggtcttctggtgatgaattcttt

SEQ ID NO: 221998 - DNA, 559 bp, Homo sapiens
tctcccagtcacatttagtcgtcactcaatgaacagagatactctcctgacattcatttcctaaaaggagtggcaagaaaattaagctaatgttggtaaagggattggcaagcattatataaaaggtactacataaatacaaagtattacttcctcttatggttatttgataagggtccttttaactctgataagtttttkactatcctaagactatgacctcattctaagatggttttcttagaaagaaaatggtagggcaattcatatgctctgagcttaaaaagctaagttgatcatatccttcctacttgtttatgtagttcaatagagactgattacttacttaaagaccacacaaattctcagagaaagaaatcacaatccttttagcacagagaaattgaactgaaactcattttctcttttgtatagctagcattttttaatgaaaaagagcctcaaagaaatctgcaacctttagctgaaggctttcaaagtgaggcatatttagaagcggaagttcgtgcctttatgactgttagttaagtcaggagcc

SEQ ID NO: 221999 - DNA, 520 bp, Homo sapiens
ctcccagtcacatttagtcgtcactcaatgaacagagatactctcctgacattcatttcctaaaaggagtggcaagaaaattaagctaatgttggtaaagggattggcaagcattatataaaaggtactacataaatacaaagtattacttcctcttatggttatttgataagggtccttttaactctgataagtttttgactatcctaagactatgacctcattctaagatggttttcttagaaagaaaatggtagggcaattcatatgctctgagcttaaaaagctaagttgatcatatccttcctacttgtttatgtagttcaatagagactgattacttacttaaagaccacacaaattctcagagaaagaaatcacaatccttttagcacagagaaattgaactgaaactcattttctyttttgtatagctagcattttttaatgaaaaagagcctcaaagaaatctgcaacctttagctgaaggctttcaaagtgaggcatatttagaagcgga

SEQ ID NO: 222000 - DNA, 306 bp, Homo sapiens
aagcttcctggaatgatttcaaagtactacattatgaattaagcagataggccaggcacggtggctcacacttgtaatcccagcactttgggaggtcaaggcgggtggatcacctgaggtcaggagttcaagaccagcctggccaacatgatgaaaccccrtctctcctaaaaatataaaaactagccgggcgtggtaatgggtacctgtaatcccagctactcgggaggctaaggaaggagaattgcttgaacccaggagatggaggttgcagtgagctgacacagtgccactgcactccagcct

SEQ ID NO: 222001 - DNA, 516 bp, Homo sapiens
ttcccaacactacagtgttcagaggctgcatatctgtcttggatgctaaagatgagatttcttaattacaagaaacttaacataaatgaccttctaactctaagagcctgagataccgatattataatgagattattaagtaaaatgagaaattcccrcagcaatgaaacaaatttcgcttttccttcagatggattaatgtgaagcgacagtaatgaaagagatattttataaataaccaatattttatctttctcaattggagtaaaaataaattaataataatttaaaccaacattctacaagtgatgtatttagctatttaacctatacttgtttgatggtctaggcattcaaatttgaaacaaacattgaaggccaattcctcaactttcaaaaaaaagaataaatcataccgaattagtttactttacataagagtacattaatgctaacttatctgggttaatttattcaggatcacagccatcatgatttaatttaccaggtatggtt

SEQ ID NO: 222002 - DNA, 529 bp, Homo sapiens
aaaatacctagaaataaattataccaaggaggtgaaaaacctctgcaacaaaaactacaaaacactgatgacaaaaaatgaagaggacacaaacaaatcaaaagatatctcatattgttataataaccacattctctaaagcaacctatagattcaatgcattccctaagaaaatactgagacattcttcacagaaatagaataaaaaatcctaaaatgtatatggaaccacaaaagactccaaatagctcaagaaatacttaccaaaaagaataaagctggaagcatcacactcactacccaacttcaaaatatactacaaggctatagcaaccaaaacagcatggtattggtataaaaatatacacatcaacctatggcacatattatagaaccgataaataaattcatgtgtttacaactaagatttttgacaaaggcatcaaaatcatatgtggggaatggagaccctcttcaataaatggtgctgggaaaactggatatctrtgtgcagaagaattaaactgga

SEQ ID NO: 222003 - DNA, 560 bp, Homo sapiens
gaattcaccactactcttaattgactagtagcttctagacctgtgattttgtttggcttgtgacactctgtcccagcttkgtgattaattcattcttttatcttctcctaccttgtattcatagtgtgatttttatctcttctcatctttgtacctcaccttgatgtcccaaacttgttcgaaattcttcagtgatagattatacaggatgaagcagttagctcaattagagcatcatatcagtgaaaccaagatcagatacttaatcttcatttgagccacctggtcctgtgccccactgattacagggagaacagagggagggtgtgtggattaaatagtagaaaactaccctgctattgacagcacatcttttaaaacatgtctgagtgacttgggtcagcattatcatctctgtatgggaaggacaccacacaactatttacatatataacacatgcaaatgagtttgagttttgtccagaggatgcatatgctgaggccaccttttaaattccaacagaaacaatttgtgtgtgagggactcctgttcagagaaa

SEQ ID NO: 222004 - DNA, 453 bp, Homo sapiens
aaaccacaggcttttgggcctcaccctcagagtttttgattcagtaggtttggggtgggggtcaagaaktggcatttataacaagttcccaggttctgttgacactcctagcccgaggatcacacttggagaataaacactgtatagccactaaagcaaccatctgaaaacacttactttgtttgtatcactcttctcaaatactttcagaggcttacaattgcctacccaaaaaagtttagattctagtacctaacactgcaagctccagccaccttctctctccaaacttccctctcagcaatcagaagcacaaacccttcattccagccaagaaggtttcttcattggtccctgactcaatatgcttactgcttgctgctgacttcaatccttgcttcatgctattcctctcaaaggaaatgaatgcctttagctttcctttgcccatca

SEQ ID NO: 222005 - DNA, 503 bp, Homo sapiens
cctgtccttatgcttccccaatagtgtgcagaagtgctggctgcagcaagcagatgcctggatggcatgcttgggtgcaggtagctttgatgatgggtgagacaggcttgtcttcaggccctagacaatgcccacatgcactggcagtagcagtggtgggaggggcaggcctgtcctcaggctcctggatgatgcatgcaggcacctgcagtggtggacaagacaggtcaatccccaggtctccaaatgtctgcagtggctggtggggcagrtcaacccctagacttctggatgacatacatggctaccagtggtgggctcacagacttatcttctggcttcctcaatagtgcacacagttgctagctgcagcaggaggggtggttcaatccccatttcctgaatggcatgcttgggtgcaggtggtagtaatggtgggtagaccagtcctgtcctcagaaccctggatggtgtgtgcaggtgcctgtgcaggagagataagt

SEQ ID NO: 222006 - DNA, 525 bp, Homo sapiens
cctgtccttatgcttccccaatagtgtgcagaagtgctggctgcagcaagcagatgcctggatggcatgcttgggtgcaggtagctttgatgatgggtgagacaggcttgtcttcaggccctagacaatgcccacatgcactggcagtagcagtggtgggaggggcaggcctgtcctcaggctcctggatgatgcatgcaggcacctgcagtggtggacaagacaggtcaatccccaggtctccaaatgtctgcagtggctggtggggcagatcaacccctagacttctggatgacatacatggcyaccagtggtgggctcacagacttatcttctggcttcctcaatagtgcacacagttgctagctgcagcaggaggggtggttcaatccccatttcctgaatggcatgcttgggtgcaggtggtagtaatggtgggtagaccagtcctgtcctcagaaccctggatggtgtgtgcaggtgcctgtgcaggagagataagtccccacatccccagatgacatg

SEQ ID NO: 222007 - DNA, 525 bp, Homo sapiens
cctgtccttatgcttccccaatagtgtgcagaagtgctggctgcagcaagcagatgcctggatggcatgcttgggtgcaggtagctttgatgatgggtgagacaggcttgtcttcaggccctagacaatgcccacatgcactggcagtagcagtggtgggaggggcaggcctgtcctcaggctcctggatgatgcatgcaggcacctgcagtggtggacaagacaggtcaatccccaggtctccaaatgtctgcagtggctggtggggcagatcaacccctagacttctggatgacatacatggctaccagtggtgggctcacagacttatcttctggcttcctcaatagtgcacacagttgctagctgcagcaggaggggtggktcaatccccatttcctgaatggcatgcttgggtgcaggtggtagtaatggtgggtagaccagtcctgtcctcagaaccctggatggtgtgtgcaggtgcctgtgcaggagagataagtccccacatccccagatgacatg

SEQ ID NO: 222008 - DNA, 525 bp, Homo sapiens
cctgtccttatgcttccccaatagtgtgcagaagtgctggctgcagcaagcagatgcctggatggcatgcttgggtgcaggtagctttgatgatgggtgagacaggcttgtcttcaggccctagacaatgcccacatgcactggcagtagcagtggtgggaggggcaggcctgtcctcaggctcctggatgatgcatgcaggcacctgcagtggtggacaagacaggtcaatccccaggtctccaaatgtctgcagtggctggtggggcagatcaacccctagacttctggatgacatacatggctaccagtggtgggctcacagacttatcttctggcttcctcaatagtgcacacagttgctagctgcagcaggaggggtggttcaatccccrtttcctgaatggcatgcttgggtgcaggtggtagtaatggtgggtagaccagtcctgtcctcagaaccctggatggtgtgtgcaggtgcctgtgcaggagagataagtccccacatccccagatgacatg

SEQ ID NO: 222009 - DNA, 466 bp, Homo sapiens
tcattaatgacaaaaatatcctgcctttgagggatgctttggtgaaacaggatggarattaaaaagacaattacacttcttaaatcacctcccttgctctccatgagatactttgaggctggtttggttcaattccaccttttcaaaaaatctcagttgggggaaaagggaatataaaaataatactttctcaaagcaaatttaaactattctagctggaacatggtatgcagaaagcaactaatgtctaaaattatgctggctctgttcttcttcccatagaatctaaattatttgaattgataaaagaaaaacacacaaattgtgtctatacatacaaactagtttgaattttttgaaagattattctccatttctgaacagattactaacctgggtttgatttcagtcaaatatctggtacttttcttatcaattgttgtcttcactccagtcccacataacc

SEQ ID NO: 222010 - DNA, 428 bp, Homo sapiens
atccacccaaccctcaccctggtccgtggaagaattgtctttcacaaaactggtccstggttccaaaaaggttggagactgctgctgtagggtctaggaactttgccttgatagtctctattgcacagatgagcattaggataaatattgttgaacgctatactttaattttctttttcccccagcaacattataggctctttaggaaacggttgtgtcttgtactacttttcattctccctcccaactccatctgccaacctgagattttatgcaggagcatactgaattaaataatgtttaagatactagggaaaatataggaaagaaaattacttttaaatttttattaatatataatatttgtacaaattcaggagctacatgtgatattttgatacctgtaaacaatatgtgataatcaaatc

SEQ ID NO: 222011 - DNA, 428 bp, Homo sapiens
atccacccaaccctcaccctggtccgtggaagaattgtctttcacaaaactggtccgtggttccaaaaaggttggagactgctgctgtagggtctaggaactttgccttgatagtctctattgcacagatgagcattaggataaatattgttgaacrctatactttaattttctttttcccccagcaacattataggctctttaggaaacggttgtgtcttgtactacttttcattctccctcccaactccatctgccaacctgagattttatgcaggagcatactgaattaaataatgtttaagatactagggaaaatataggaaagaaaattacttttaaatttttattaatatataatatttgtacaaattcaggagctacatgtgatattttgatacctgtaaacaatatgtgataatcaaatc

SEQ ID NO: 222012 - DNA, 439 bp, Homo sapiens
ttacagtctatacctgcctggtgtttttaaattcaggaactttgagtattattctacttatagaaatgaaagcttaagatattttaaaagttattctggaagtacactgaagcatgttgaaaataagaatatatatattatatatgtgaaatattaaatcaaaaatggctttggggcttaactcacatttaattataatcagttgctagtgacttgcttggaactccatgttgagagggatggtgaggttgtagccaaactctaaaggtagaaattttttgataaatcattaatgtttgtcattttggccaaaggtgagaataacacactcatgtccccatagtgtccactctgaccctaggaagccacttatgattggacttggtgaagtacmtatggtaagcagctgataaagccagcatttcgaaggtcaaataca

SEQ ID NO: 222013 - DNA, 497 bp, Homo sapiens
ttcttgactatcaaaaaaaagtaactcgtccttcatatgtttcatgctatattttgctctttgctacatgtaaaagtaaaaataacaatctaaactacagcatgaatgtgcaattacatactgtttttcacagttttaatgtttgtagtcatggaatttgatttttggccytaaaacttcagagaacagaggttaaatatagttaaccaacttaaaaccatagcctgtgcttcaaaatgggcaaaataagaagtgtattggtcacttatttgacctggatgatgatgatgaaaaaataatagcttagtaaattgtcctgcttgggaattaccacaagatagaagatggagactatcaaatgtgaatccagaaattatagagttggaaatacaccaagacattttgaaaataatccttacttttacagaatgtgctgtttgtagaaagttccttgatcagtatgattttttgctctattctctgtctatcgattcaat

SEQ ID NO: 222014 - DNA, 258 bp, Homo sapiens
tgcatactaccaaatgaaaaaaaaaagtcactctgaaaaggctacatactgtatgatttcaattacataactttytggaaaaggcaaaactatggaaatagtcaatcagaggttgccaagggcttgggggcagggtggaatgaataagtggagcacaggagattttagggcagcaaaactgttctatataatactgtgtgggtacatgtcattatacatttgccaaaaacttcagaatatacaacaccaacagtgaat

SEQ ID NO: 222015 - DNA, 627 bp, Homo sapiens
acgaaaatctcaatcttaccttctagaagagcaaactagactaaaaagctttgtttgaaatttggagataattgggggaagaaaaggaaaactctgaagagaagaagagttgaaggaagttaggaaacatggactactatgatggcatttattgcagagtgttagagttgcaaagtgttttttacttatcttataaaattagttcacattggtagtccccaaaccaactatattactaataatatatattaggaaactgtttatgatattaccttattaatttacaatttttacaaaactatatcattcaatccttgctgtttttttattaagtgaattgtttttcatgcatataaaagtatttaaaagattatgtaatcatgcacttgaaaaatccaagaaattaataagtgaattactcttcaaaaattcatacttttgtaatatcgttgacttattgatgttatgtttttcacaaatattcttaaatgttaaaatgtttaatgtcaacatttttaattgtaatgtttttgtaatatcttragactcaagcattctgtcttagctcttctcttaaaggcatctcaacatgctaaatgcccaatttctgcacaatattacagacaa

SEQ ID NO: 222016 - DNA, 502 bp, Homo sapiens
aacctctgcctccctggttcaaggggattcttctgccttagcctcttgagtagctgggattacaggcatgcaccagcacgaccggctaattttgtatttttagtggagacggggtttctccatgttggacaggctggtctcaaactcctgacctcaggtgatccaccctcctccgcctcccaaagtgctggaattacaggcgtgagccaccacgcccggacttctgacactattttttatgtgaatccaagttttggacctatataatctgccttttccctaaataacttattttaacatttcttgcaaggcagtcccagcaacaaattccctccatttttgtttgtctgataaattaattctttttcacttctgcaggtaagttcagtgattatagaattttagsttggtggttcttttttttttttctttcaacattttaaatatttcaccttgcttttttcttgcttgcatggcttcagaagggaagtctgtaattctt

SEQ ID NO: 222017 - DNA, 432 bp, Homo sapiens
gggagtcataggacctggggcacatttagaggttcagcagagaagggcccagagaaagagattgatgtcacatgcccaatgcttggtatgattctcccttaacagtcttgatgctagaatattattattcagttcttgtctttgggacagaactacaagagtatgatcgaggttgaaattagtcacattattttttcttttccaaagatgttgtagaattaactataaagaatgagtggctcattaagtcgcccttgtaaggcaaaagaggcaggttaatccttcaacagactccacgatgggcacatgaagattatgtttgcccctgcccacaggtatttttcccctacctacgcttccttgacaaactgacaatgtttayatcctagtgtcccaattcaatcagctatccataaaggattgtggccaaag

SEQ ID NO: 222018 - DNA, 433 bp, Homo sapiens
aatattctggtttcatcccttgttagatgcgtagtttgcaaatatgttcttacattctgtggtttgtctctccaatttgctgattgtttcctttgctgtgtttcttagttgatattgtcccatttgtccatttttgctttggttgcctgtgcttttgaggtctcaagaaatctttacccagagtaatgttctagagaatttccccagtgtcttattttagtagttttatagttgyaagtcttagatttaaatgtttaatacattttttatttgatttttgcctatggtgagagataagggtctaggttcattcttctggatagggatatccagttttcccagcaccacttactgaagagactgtcatttcccaagtgtatgttcttggtgcctttgtcaaaaatgagttgactgtaaatgtgtggatttattt

SEQ ID NO: 222019 - DNA, 433 bp, Homo sapiens
aatattctggtttcatcccttgttagatgcgtagtttgcaaatatgttcttacattctgtggtttgtctctccaatttgctgattgtttcctttgctgtgtttcttagttgatattgtcccatttgtccatttttgctttggttgcctgtgcttttgaggtctcaagaaatctttacccagagtaatgttctagagaatttccccagtgtcttattttagtagttttatagttgcaagtcttagatttaaatgtttaatacattttttatttgatttttgcctatggtgagagataagggtctagkttcattcttctggatagggatatccagttttcccagcaccacttactgaagagactgtcatttcccaagtgtatgttcttggtgcctttgtcaaaaatgagttgactgtaaatgtgtggatttattt

SEQ ID NO: 222020 - DNA, 433 bp, Homo sapiens
aatattctggtttcatcccttgttagatgcgtagtttgcaaatatgttcttacattctgtggtttgtctctccaatttgctgattgtttcctttgctgtgtttcttagttgatattgtcccatttgtccatttttgctttggttgcctgtgcttttgaggtctcaagaaatctttacccagagtaatgttctagagaatttccccagtgtcttattttagtagttttatagttgcaagtcttagatttaaatgtttaatacattttttatttgatttttgcctatggtgagagataagggtctaggttcattcttctggatagggatatccagttttcccagcaccacttactgaagagactgtcatttcccaagtgtatgttcttgktgcctttgtcaaaaatgagttgactgtaaatgtgtggatttattt

SEQ ID NO: 222021 - DNA, 436 bp, Homo sapiens
caatctcttaaggagttaacaggatccaaagagttaatttgaataggaatggaagtgagcataattacggttgaagcagagagacagtaaaaagagaggctctagcagttaatatccaacagagaaaagttagctcggttaagactctggttatggctgcctgggaaaagggctttctttcagggaggaaaccagtgaatgagttcatgattagtgtcaaattaaggctgtattytcatagaggagctatgagtagaagccagggaatcagattattggggaagttggagtgcaggagcaccatgataaccagctgagtgtaaaaaaaaaaaaaaaaaaaaaaaaaaaaaaggcaactagaagtaaagccaggataagcagaaagtcacatagagagacaggaattgagtggtaaacttggcagcaggtttgagaa

SEQ ID NO: 222022 - DNA, 436 bp, Homo sapiens
caatctcttaaggagttaacaggatccaaagagttaatttgaataggaatggaagtgagcataattacggttgaagcagagagacagtaaaaagagaggctctagcagttaatatccaacagagaaaagttagctcggttaagactctggttatggctgcctgggaaaagggctttctttcagggaggaaaccagtgaatgagttcatgattagtgtcaaattaaggctgtattctcatagaggagctatgagtagaagccagggaatcagattattggggaagttggagtgcaggagcaccatgataaccagctgagtgtaaaaaaaaaaaaaaaaaaaaaaaaaaaaaargcaactagaagtaaagccaggataagcagaaagtcacatagagagacaggaattgagtggtaaacttggcagcaggtttgagaa

SEQ ID NO: 222023 - DNA, 445 bp, Homo sapiens
taggtgaccttttgacctaggccggaaggatgagaaaagatcagcagaagatgaaaaacagataatttcttattccaggcagaaaaaatagcatgtgcaaaggccctgaggcaggaaagaggtgagcctattttaagatctgaaaggcagataagatatctagactttgctattacccattttatagagcaatagagtaatatttcctaaygtatataataaaggcagaattgggattggatctactttactttgtcctcaccaatgcgtattcttcccctaaacagattaattactgagtcctgctggttgtatctgccttcttctctatccttactcctacttatataggagtggacacttgccaccttctatgagattcctatatcagccttccctaatgacagcagacctgtcctcttaaaattcattcttcacactccag

SEQ ID NO: 222024 - DNA, 445 bp, Homo sapiens
taggtgaccttttgacctaggccggaaggatgagaaaagatcagcagaagatgaaaaacagataatttcttattccaggcagaaaaaatagcatgtgcaaaggccctgaggcaggaaagaggtgagcctattttaagatctgaaaggcagataagatatctagactttgctattacccattttatagagcaatagagtaatatttcctaatgtatataataaaggcagaattgggattggatctactttactttgtcctcaccaatgcgtattcttcccctaaacagattaattactgagtcctgctggttgtatctgccttcytctctatccttactcctacttatataggagtggacacttgccaccttctatgagattcctatatcagccttccctaatgacagcagacctgtcctcttaaaattcattcttcacactccag

SEQ ID NO: 222025 - DNA, 580 bp, Homo sapiens
ctcgattggtttgtcttaagagaatgttacggctgatttgatcttctacccagattactgcaactttctccatgtcagcaatgaggctgctttgctttcttatcatccatgtattcactggagtagcacttytaatttcctccaagaactttttctttgcattcaaaagttatgttactgttgggtacaagagacctaactttcatcctatcttggcttttgacacgctttcctcaataagagtaatcatttctaggttttaattaaaagtgacagaaatgccagtcttcctttcatttgaacgcttaacagggcattgtaaagttactaattcgtttaatatcagtatttttgtgtcctggggaataagaagacccaaggaaagggagagagatgagagaatggctggttagtggagcactcaaaccacacacagcatttattaagttaatcatcttaattaggggtgttcatggagccccaaaacaattactagagtaacatcaaagatcaatgatcacagatcaccataacagatataataataacaagtttgaaatattgtgagaattaccaaaat

SEQ ID NO: 222026 - DNA, 580 bp, Homo sapiens
ctcgattggtttgtcttaagagaatgttacggctgatttgatcttctacccagattactgcaactttctccatgtcagcaatgaggctgctttgctttcttatcatccatgtattcactggagtagcacttctaatttcctccaagaactttttctttgcattcaaaagttatgttactgttgggtacaagagayctaactttcatcctatcttggcttttgacacgctttcctcaataagagtaatcatttctaggttttaattaaaagtgacagaaatgccagtcttcctttcatttgaacgcttaacagggcattgtaaagttactaattcgtttaatatcagtatttttgtgtcctggggaataagaagacccaaggaaagggagagagatgagagaatggctggttagtggagcactcaaaccacacacagcatttattaagttaatcatcttaattaggggtgttcatggagccccaaaacaattactagagtaacatcaaagatcaatgatcacagatcaccataacagatataataataacaagtttgaaatattgtgagaattaccaaaat

SEQ ID NO: 222027 - DNA, 573 bp, Homo sapiens
catttttcttatatacagaagcctgaacaaggtttccttctctctacacatcacaagtgctccctaggcttttctgagacaccccctcacyttactggctacaaaagcagactccttctagattcattcttacaatagtggcacacactgaggcatcaaaaaccaagtcatctaggaagcaggcaaacaagacttaagacttctagaagtaacttgttagttgactgtgtccaacccatggctataccttcaaaaagctagagcaatttgcaaaaacctggattagccttttaaagtttaaaattgtgaaaaagcaggaaaaaacaaatcgtttgaactagtttctatatatgagtgtctatctaccgtggcaggatggcaggagagatggagtggtggaaccaggcaggctgccttccattcttggctggcctgtttcctagctgggtgaatatggaatatttgccttttctgagcctgtgttccctgtctagcaccaccctactccttctcacttagtgtgttcttactacacaggtattctttgagtgacttaaagtgtgctctttccca

SEQ ID NO: 222028 - DNA, 573 bp, Homo sapiens
catttttcttatatacagaagcctgaacaaggtttccttctctctacacatcacaagtgctccctaggcttttctgagacaccccctcaccttactggctacaaaagcagactccttctagattcattcttacaatagtggcacacactgaggcatcaaaaaccaagtcatctaggaagcaggcaaacaagacttaagacttctagaagtaacttgttagttgactgtgtccaacccatggctataccttcaaaaagctagagcaatttgcaaaaacctggattagccttttaaagtttaaaattgtgaaaaagcaggaaaaaacaaatcgtttraactagtttctatatatgagtgtctatctaccgtggcaggatggcaggagagatggagtggtggaaccaggcaggctgccttccattcttggctggcctgtttcctagctgggtgaatatggaatatttgccttttctgagcctgtgttccctgtctagcaccaccctactccttctcacttagtgtgttcttactacacaggtattctttgagtgacttaaagtgtgctctttccca

SEQ ID NO: 222029 - DNA, 415 bp, Homo sapiens
tgctggttctttcccacctttgtgggcttatctaccttcaatctttgaggttgctgacctttggatgaatatttttttcttttttcctatttgaagatctttagggtttgattgtggaataaggtggattcagctgactggcttcatttctgaaggattttaaggcggggggcaatgcccagctcccaattcctgamctgtgtgctctaactgcagaggacttatactgggtcctgacattatttcctggctcctctaggttaggaatttactgtgctgatagaggccgaggtgtttccagactgctggtcactacactctgatggttgatgtcagccaaagcattttgtagtgcgatgactataggatccatctttgttggcatgtgcctgcggcagttgcagcaaggtgctag

SEQ ID NO: 222030 - DNA, 546 bp, Homo sapiens
ctttggttttagtattaggttaagcctggcctcataaaatgagctaagaagtatttcctctggttctatcatctggaaaaaattgtgaagaactaataaaatttctctcytaaacgctggtataattcactagtgaacccatctgggcctgatgctttctctttggagaggttattagttattgagtgtatttcttcattgggcctattggcattatttcttcttctttgaattgtggcacattgtgagtttcaaggaattggtttattttatctagattatcaaatgtgtgagcatagagttatttagagtatttttaaattatccttttaatgtccatgagatctgtagtgatgtcttctctttcatttctgatattagtaatttgtatcttctttcttgttttcttagttagcctggctagaggcttataacttttattgatcttttcaaataatcagcttttaattttgttgattttctctactgatatcctgttgtcaagttccttaatttttgctctaattttaattatttttttacttc

SEQ ID NO: 222031 - DNA, 546 bp, Homo sapiens
ctttggttttagtattaggttaagcctggcctcataaaatgagctaagaagtatttcctctggttctatcatctggaaaaaattgtgaagaactaataaaatttctctcttaaacgctggtataattcactagtgaacccatctgggcctgatgctttctctttggagaggttattagttattgagtgtatttcttcattgggcctattggcattatttcttcttctttgaattgtggcasattgtgagtttcaaggaattggtttattttatctagattatcaaatgtgtgagcatagagttatttagagtatttttaaattatccttttaatgtccatgagatctgtagtgatgtcttctctttcatttctgatattagtaatttgtatcttctttcttgttttcttagttagcctggctagaggcttataacttttattgatcttttcaaataatcagcttttaattttgttgattttctctactgatatcctgttgtcaagttccttaatttttgctctaattttaattatttttttacttc

SEQ ID NO: 222032 - DNA, 480 bp, Homo sapiens
ctgttgtcaagttccttaatttttgctctaattttaattatttttttacttctgcttacttttgatttgatttgaacttctttttctagtttcctgcttagatgatttattttagattttttctcttctaatataggcaytcaatcctataaatttccctctaagcactgctttttgcgtatcccacaaattttggtaagttgtattttcatttagttcaaaatagtttttaatttctcttgagctttcttctttagatcatgtgttatttagaagtatgttattcaatctccaagcatttgcggattttctcttttgttataatgtctagctctattgtattgtgatctgacagcagacaatgtacaatttttattttttaaaatttgttaagatggttttatggcccagaatgtggtctgtcttggtgaatgctccatgtgagtttgagaagaatgtgtaatctggtgtttttggata

SEQ ID NO: 222033 - DNA, 409 bp, Homo sapiens
ctcagtgtagatatgttaacatgtacattctccttaattgatgtttttagagctacttaagaatagaagacaataaaaagcagtgatagggaggtataggaagggacaaactggaaacgcctgagaccctattagaggttgttacaactgcattctaaacagcagctaaattagatcagatatcttggaaataatgtacaacaatcatagttgagagaaaagtaagctagtatttagaaaaacaaaaaaagtgaaatttatttagctgattgaatgtaaagactttcttatttcagaattttaagtaaaaaaaagtataatttttaagttaaacataatattttcaaaaaayaagatatgtaaatcagttcaattaattcagatgacaaaacagagcattggggaaata

SEQ ID NO: 222034 - DNA, 459 bp, Homo sapiens
tctggctgtcacttctgcatatggtgcccagtcgacaaaatatgtttaaatgcactgcttgcctctatgtgataaaagacattttggcacaagactttatagaaaattgggtaccaattaggccttggaaattcatgaccatcaagaagggcaaattctgctctttcaaaacatwagctcctcgctatttatttgccaatggattgggcatttcaagactagacaaatgacaaacatatactgcaacagctcaaatgtgtattgtctttttgtatacactgttgttatttgacatttttaaaaaaacaattaagaaattcaggtcacatgaataggttggatactttctgcagttgaactagtttgttacttatttctatttagaaggctaggaatggaaaagagtagcattagaattgtgaacatttctgggagagttagagagggccctaacctatt

SEQ ID NO: 222035 - DNA, 459 bp, Homo sapiens
tctggctgtcacttctgcatatggtgcccagtcgacaaaatatgtttaaatgcactgcttgcctctatgtgataaaagacattttggcacaagactttatagaaaattgggtaccaattaggccttggaaattcatgaccatcaagaagggcaaattctgctctttcaaaacattagctcctcgctatttatttgccaatggattgggcatttcaagactagacaaatgacaaacatatactgcaacagctcaaatgtgtattgtctttttgtatacactgttgttatttgacatttttwaaaaaacaattaagaaattcaggtcacatgaataggttggatactttctgcagttgaactagtttgttacttatttctatttagaaggctaggaatggaaaagagtagcattagaattgtgaacatttctgggagagttagagagggccctaacctatt

SEQ ID NO: 222036 - DNA, 578 bp, Homo sapiens
ataccagggaagagatgaggactaccgcttgtgtgcctatgaggactcaaacatatcctagaacctgacagggacatgatagtttttttcccagcagtataaaagaagaccaaagaccaggacaattgcagtgggccatgacaccctctgcctttgcatggacaaaaacacyagaacattattttaagatattggagccagagggagccctaaagaccattcggcttggctgggcacagtagttcacgtctataatcctagcactttgggagaatgaggtgggcagattgcttgagttcaggagttcgagaccagcctgggcaacatagtgaaaccccatatctacaaaaaatataaaaaatagccaggcagggtcctcatgcctttagtcccagctacttgggaggctgaggtgggaggattgcttgagtctgggaggcagaggttgcagtgagccaagatcacaccactgcactccagcctgggcaacagagccagaccctgtatcaaaacaaaataaaaaaacatttggctcagttgtcccaaggtggtacatgttaaaaagattttaggtgcca

SEQ ID NO: 222037 - DNA, 578 bp, Homo sapiens
ataccagggaagagatgaggactaccgcttgtgtgcctatgaggactcaaacatatcctagaacctgacagggacatgatagtttttttcccagcagtataaaagaagaccaaagaccaggacaattgcagtgggccatgacaccctctgcctttgcatggacaaaaacactagaacattattttaagatattggagccagagggagccctaaagaccattyggcttggctgggcacagtagttcacgtctataatcctagcactttgggagaatgaggtgggcagattgcttgagttcaggagttcgagaccagcctgggcaacatagtgaaaccccatatctacaaaaaatataaaaaatagccaggcagggtcctcatgcctttagtcccagctacttgggaggctgaggtgggaggattgcttgagtctgggaggcagaggttgcagtgagccaagatcacaccactgcactccagcctgggcaacagagccagaccctgtatcaaaacaaaataaaaaaacatttggctcagttgtcccaaggtggtacatgttaaaaagattttaggtgcca

SEQ ID NO: 222038 - DNA, 479 bp, Homo sapiens
agtagcatagtaaacctaagaaaatagtgttcttttttcccagtaataaaaattatcctaactgatatgttttcatatttgtgatagctgtcaagcagcccagtttaaaatttgaaggccaccaaatttaaagcttgtcaaaggcacactaatcacatttatttattcacttttttttgttctttgtctgctctatttgtcagtcaytgggagaagtatcaaactcttgaactaggagtgtggatttatcaaccactctgcatgatcttgccaattttgctttatatatttgaagtttacattgttaagtgtttacaagtttagaattattatattttcctaaagatttaacaagagctgactcttacaaagtaattactgtgcaactcacataatctaaatatgttacatacattaacttagtcattacaataactctgagagaggtgttactatcccaattttatggttgaggaaaa

SEQ ID NO: 222039 - DNA, 416 bp, Homo sapiens
agtagtttatttttttattgcagaatattattccattgtatggatatatcacaatttctttattcttcatcagttaatggatatttgtgttgtattcgcttgttggttattatgaataaagctgctgtaagcatttacttacagaaytttgtgtagtcatatatgtaaatatctaggagcagaatgactgaattatatagtaggagtatgtgtaaagtttcaagaaattacccaactgttttcccaagtgtctataccattttgcacttgcacattctcccagaacttggtattgcctgtctttgattttagccattcaagttgaaatgtagtggtatctcactgtggttttggttttgatttaccaaatgactaatgatatttagtatcttttcatgtccttatttgccagctgt

SEQ ID NO: 222040 - DNA, 416 bp, Homo sapiens
agtagtttatttttttattgcagaatattattccattgtatggatatatcacaatttctttattcttcatcagttaatggatatttgtgttgtattcgcttgttggttattatgaataaagctgctgtaagcatttacttacagaattttgtgtagtcatatatgtaaatatctaggagcagaatgactgaattatatagtaggagtatgtgtaaagtttcaagaaattacccaactgttttcccaagtgtctataccattttgcacttgcacattctcccagaacttggtattgcctgtctttgattttagccattcaagtygaaatgtagtggtatctcactgtggttttggttttgatttaccaaatgactaatgatatttagtatcttttcatgtccttatttgccagctgt

SEQ ID NO: 222041 - DNA, 429 bp, Homo sapiens
ataaactttgatttttttaaaaaactgaatgttgttcaaatactggttccaaggacagcagaacaaaggaggtcttgggaaactgggtttggactctgtatcttccatgactgactaaatgactttgggctccgatgactggatgcagtcagggtaactggaaataagatattttccagaggctggtggctggccattctccaagtgctgtcaccccagataaccacctccatttcttcctttccaaaatcaaagagccaagatagcttggataaagattaagcatagctgtgtgaccctaggcacatcacgtaacctctttgctttttmttagaaaatgaggttaacaatggtcagctttctgaagacacaggtgttaaaatgaaaaccactttaacgtcttttttggtgaaaactataacaaaaatg

SEQ ID NO: 222042 - DNA, 566 bp, Homo sapiens
tttttgacttttatttcaggtaaccaagcaaccttttctcctattaatttagaaatgtggcagacgaatacccccatttatgtgagaatctcgagcctgcttttctctacctattaaaaaaaaaaaatcaccagcattataatgttagccaatgtttaaccttgccatagtagtagaaaagaaaagagaagctggtataaaacagcacagtcctcaaacagattggggtctgagcttggaactggacctgtgaattctttacatctgtggttctcagttaaggaggtggcttgaggatggagtttgtccccaggaagggtgctactgacacacagtgtaaagagaycagggatgctgctaaacatcccacagttcacaagacggcccgccacaataaagaaacacccagctcaacatgtcaagagtgtcttggttgagaagccttgctctgtaccgaatagatagatactcacaaagccaaggcactgaaacatcctgtatcttagttcagtggttttcaaacttttcagctgtcaaattctttaataaaacgcttatccaggagt

SEQ ID NO: 222043 - DNA, 614 bp, Homo sapiens
gggctaaggaatggctcttttctcttagtccagtgctcttttcgttggacatcactgcctttccagtaagggaaagaaggctgccttgatctgctcaacatctcagtactaaatgactagaaaagatttaaacctattcccactgccgaccctctgaatccccataagtcatttgagggtaccggtgaccaatggccagagggacctcttttaaataaccccagggaagaggaggttacaaatcccggcgcaagccccttcactgtcagataattccctcatattgagctgaaacctatttttgttactttgattccctggtccaagtttggccatttgaaatggcacaaaatttgaatatactctccttttctagagtatattcaagcatataaagaaagctatcatctgtgtccttttgagaatgagtgctttacctatatwaacttccaataaaacatctgtaattatccaacttctaattgcagtgagtcctaacaaactgcttggcagaggaggaaaagaaaaactatcatgtaggacccctaccaaatcataaagtatttaatacaagtagtcaattgttactacagtcctctaaggcaggggtgtcc

SEQ ID NO: 222044 - DNA, 588 bp, Homo sapiens
cttgttccattcggggactgagtaggcctcgagcccatcgctcaattctgagatttccctttgctgctgccctgtgtaggttctgttttctgtatctcatgctgccttgggtttttctggtttttggtttttgggtttttttgtttttttgtttttttgttttggttataattcctttattttgctgaagcatattcttcaatggtttccttaaggacacatgaggtaaatttttagagcccgtggatgtctataagtgtccttatttaatcttcacatttgatttgtaatttgatataggatttggcaggcatggttccttaaagattttgaagtaattgtcctaacacctctcagtgttgctgttgagcattaaatgtcctttcggttcccccaccctttgtgtgtgacctgtttttcctttccgaaagtgactttagaatcttttattcactttgtttctctaaaatttattttcstttgtttaaattggactgttggtgacctccttccaagtggagacttacattcttgtactctggattgctttttgttgggaggtattagtccttgataatttgattcctt

SEQ ID NO: 222045 - DNA, 306 bp, Homo sapiens
acctccccactctctctcttcctcctgctgtagccatgtaaagatgtgcctgcttccccttcaccttctgccatgattataagtttcctgaggcctccccasctatgcttcctgcacagcatgtagaaccatgagtcaattaaacctcttctctttataaattatccagtttcaggtatttctttatagcagtgtcagaatagactaacacacctgctctgtcatgtctcaggcaaaagcctcgcactagttcttaaaaaggggtgccagaaagaaacaggagtcaaagcaggcctgagagagaga

SEQ ID NO: 222046 - DNA, 545 bp, Homo sapiens
atattgcatgtttctctttttcttttttcagtgaggtgacatgctgcagtatttttataaacatgttctttatggaattttctctcagttactgaatacaatcctggaccatctccagagactttttagaaaagaataaatgtcctaacttaagttggaagagagatgaattgaaaattatgtatgtactgaaggaggataggatgatggctatgaaagatgaggggataaaaagcatctcacttatcagcgatacataaacagtgtgacagtggtactgtcctttgacgtaatgagataaatatctctgactactcaaagctttaggtctttataggaataaagtgataagctcataaagataaagcaccaagaccagccaccacccttaattagaagtcagcacaatctgtaccaagatccycctacccatttcttaaggccagtacctactactccctgcgggagggctgcaatggtgctgtcagtatctcccttgacacaggatggcataagcattgttagacttgaaaaagagggttcag

SEQ ID NO: 222047 - DNA, 588 bp, Homo sapiens
taaatggcaagcctgttcttccctagttctgccaggaggatggagtgtcagcagaagtctatggaggttcctcccaattgaccacactgggaaattctcccaacaatgactcttcaaagccatcctggtaaattcttcctcttgagtggttcccaaacagttgcctcattttctccagaactttacaagttcaacgtccatggtttggatcatggtttgggctcaaattcatgtttgtccctatacatttatatattttttaaggaataagaaaagttcgattatgcattgcttatccaaacaggtttgcagcttcragagttttaaaactagtgcttggattcagggctaattttccctggtaattgagggcagttttgttgctaaaaggctgagttgcttcaaagttccttttatttcccttaatcccaaagcctgtgtgagacagtcattgatgaacattgcaaacatcctcattctccttaactacataattctctacgcctaactaaaatagaataaactagaatggaaagaaagaacccttcaacataaaaaacttctaagccaatagtccatgttttaagt

SEQ ID NO: 222048 - DNA, 429 bp, Homo sapiens
tctccctttaaatattgaagccttcaaaatcatcattggagaaaggcacaaacttgcctcccaggtgcacgtccttaaccttggcaaaataaactttctaaatgattgagatctgtctcagacacttttgggttcacaccaatttcctgggtctttcargaaccctgtttgagaacaggtgagcacttcaggacaacagcacagattggcaccacaactttcccagagatattcagactcaagtaaagtggcaaaaaatgtgtattctatgcctctgtgaccccagccccctccatcttcagcggactaggttgaagtgctggtctgctcctctggtcctcttcagccagcatgggactggtgaggaaaaggttgtgctggactcctcaccgcctggctacctgaccttggtgttgagcttcaggtatg

SEQ ID NO: 222049 - DNA, 405 bp, Homo sapiens
acggttgtgcatgagcccagaagtgactgttcacagctgcacccttgaatgcatccgaggagaggcatgacctctaccctatcccatcaccatgagccaaccccacaaacatggctacataggaacgggacaatgtaccccaaaataaaggaagccccggagtgggtatgagggataatgaaggagaactcacaagaaatgccccagggcagagagggaagccccacattcatcacagctgggaagcaatgacctccctgatgtcacaagggtcaaacaatcttcactgcaatacatatcaaatagaaatgaagcaytaagtttttagaagtactaacattatttttaaagctatgagttcttctcagagtagttttgacaaacctcataggttttgatatgacg

SEQ ID NO: 222050 - DNA, 622 bp, Homo sapiens
gattgcaggcgcccacctcgagaccctaccatggggctggagcccaaagtgctcgccccagctctgcatctgcccttctgcgtgctccctttcccgcaaggggtttgagaagcagcaggacggtgacctgtcagtcactccacacccctgtcacaagtactgagagggggaaccgggaactctcccatttcacagggactctaacttacttcytcatcactaagtttagagttgctccacacttgcttttttcttctgtgggtataggggagttggagttgctaaaatgtgctgcaacccatgttttccctttagcctggagtactcttgcttggtcccttccctcatcctactctcaccctacagtcacactcccaaaagtttgcccggatatggcttacttactgtacccattcttcatgttacctcctcaaagccttctttgaaactttccaccttcaagatcaggtatcctgtagtactgatatatatgtagttggtgctaaataaatgtgattgggtggattaacgaatacatggacagttggatggagaccaagcaaggtggtgtaatcccattctgtgaaaattttaaaaaataagaaattgaactcacaaaggg

SEQ ID NO: 222051 - DNA, 622 bp, Homo sapiens
gattgcaggcgcccacctcgagaccctaccatggggctggagcccaaagtgctcgccccagctctgcatctgcccttctgcgtgctccctttcccgcaaggggtttgagaagcagcaggacggtgacctgtcagtcactccacacccctgtcacaagtactgagagggggaaccgggaactctcccatttcacagggactctaacttacttcctcatcactaagtttagagttgctccacacttgcttttttcttctgtgggtataggggarttggagttgctaaaatgtgctgcaacccatgttttccctttagcctggagtactcttgcttggtcccttccctcatcctactctcaccctacagtcacactcccaaaagtttgcccggatatggcttacttactgtacccattcttcatgttacctcctcaaagccttctttgaaactttccaccttcaagatcaggtatcctgtagtactgatatatatgtagttggtgctaaataaatgtgattgggtggattaacgaatacatggacagttggatggagaccaagcaaggtggtgtaatcccattctgtgaaaattttaaaaaataagaaattgaactcacaaaggg

SEQ ID NO: 222052 - DNA, 622 bp, Homo sapiens
gattgcaggcgcccacctcgagaccctaccatggggctggagcccaaagtgctcgccccagctctgcatctgcccttctgcgtgctccctttcccgcaaggggtttgagaagcagcaggacggtgacctgtcagtcactccacacccctgtcacaagtactgagagggggaaccgggaactctcccatttcacagggactctaacttacttcctcatcactaagtttagagttgctccacacttgcttttttcttctgtgggtataggggagttggagttgctaaaatgtgctgcaacccatgttttccctttagcctggagtactcttgcttggtcccttcmctcatcctactctcaccctacagtcacactcccaaaagtttgcccggatatggcttacttactgtacccattcttcatgttacctcctcaaagccttctttgaaactttccaccttcaagatcaggtatcctgtagtactgatatatatgtagttggtgctaaataaatgtgattgggtggattaacgaatacatggacagttggatggagaccaagcaaggtggtgtaatcccattctgtgaaaattttaaaaaataagaaattgaactcacaaaggg

SEQ ID NO: 222053 - DNA, 442 bp, Homo sapiens
gggaaaaaaagtgtacaaataagaaattaacactttccttccctaccgagacggtgaaacacaactacagcgaagtttagtgaggcacctcttttyttaaaggcacactgcacccgtttggctccggatgtcacgaaaaaaaacccatatggtggtaaaaatccccagtcaagttaaaacagttaagcatatttcagcctgcgtttttcctgaatgaagctgggaattactccttcctccactggatggcaaccttttttttttttttttttttttttggccctctttctctcttttctttctttcaattttgcttaaaagaaaatgtttttcatgactcagggtgtgcaagaacgagatgcaaactagctccctcttcaattagttcttatgaaagcggcgtgcacgttctgacagcaaaatgcaggagacagtcatgcag

SEQ ID NO: 222054 - DNA, 432 bp, Homo sapiens
aataggaaggaagtcggggaaaaaaagtgtacaaataagaaattaacactttccttccctaccgagacggtgaaacacaactacagcgaagtttagtgaggcacctcttttcttaaaggcacactgcacccgtttggctccggatgtcacgaaaaaaaacccatatggtggtaaaaatccccagtcaagttaaaacagttaagcatatttcagcctgcgtttttcctgaatgaagctgggaattactccttcctccactggatggcaaccttttttttttttttttttttttttggccctctttctctcttttctttctttcaattttgcttaaaaraaaatgtttttcatgactcagggtgtgcaagaacgagatgcaaactagctccctcttcaattagttcttatgaaagcggcgtgcacgttctgaca

SEQ ID NO: 222055 - DNA, 535 bp, Homo sapiens
ctcattctgttacccaggctggagtgcagtggtgtaatcaatcacagctcactacagccttaaccttgtgggctcaagcaatcctcccacctcaccctcctgagagctgggactacaggcgcacaccaccatgcctggckattttcttttttgtagacacagggtcaggctatgttgcttacacttgtcttgaactcctgggcgcaagcgatcttcctgctttggcctcccaaagtgttgggattacaggagcaagcaatcacatctggcctatcgagggcactttgaacagtgcttttcttctccttgtcaaataacttacgatatagaatacacgtcttttctatgccttggaaaactgccatactcctaaatttgggttggcttccaacattttatcctttgccatttccatgtcgtgaattagctgagttcctttactgtgactttgtttttttggttgtttgtttgtttttgccattatcacttcctctgggtcatcttcatcgttttcttgatagccacatccctcatt

SEQ ID NO: 222056 - DNA, 439 bp, Homo sapiens
ttcccttgttggcaatactccatgcacattatcacacatcagtgctgcaaaacagcactttccttactccatgggggagaagataattagaagytccactttcagctacctttccttgactctgccctatgaattacttcttcccttggctgattttaatctgcatcttttccttataataagccataaccacaagtataaaatagctttcagtgacctctgagagtctttctaatgagttatcaaaaccaagggtggttttgggaacacctcgaactcacaattggtttcagaagagtgtattcctatgagagctgttcccctaactttgcagttagttaacttttgcacctccattcaagatgaaaatacaccctgcctccaggaaacctttcctgaccacctcaattaaaaaaaaaaaaaaatcttcctctgaatt

SEQ ID NO: 222057 - DNA, 537 bp, Homo sapiens
aaggtccaccgtttgcacacaccaggggtggagggctcgctagcggtgggaacctggaaggggccaaacatgctgttcagaataattgaggaggtagaatattcttcctgcttggtagtgtgaaatcacttgtttatggcttccattcagtctccggtttgcagataatscccctttctaagcggtgaaactcatgaatgttgatcttgcaaatcaagctgacactagcagcttttgtccaccagggcgtacatcaaggcctgccttctccccagcacgtttcccccctcctcgccatgcgcatcccaggctcccggattcatgaaaggcgcgctccgccccaaggcgacctgagggtctctagcaacaatccaggggcttgtctgccaagcgctcgggccccacttggagcgtcctgttcagagcctcaaagagaggccctgaagacaaatggccccgacaggaggaggtcacccagtgaagggctgcgggagctctagacccttgcccggaggcctaggcgctcgttcttaaacg

SEQ ID NO: 222058 - DNA, 573 bp, Homo sapiens
ttgcagggctatttcataatgtggcaaagaaacatggtttggggtaaaatattttgattttcttgtcacataatgktatgccagagtcagattggaaagtaagtcaagatatatagggttaaataaaacccatctgatgagaatttgtggtttgtagggcatgactccccagaccccttaggtaggaatttggcaagataagaaaaaattagagcttagtcctcatcattattgttttgaaatcaggtatattggtggtcaaacaaattattttggtgggtaaattatcatatgctttcaactttcaattttttactgtgacaataatatcaaatgcctatatagattatgtatgacaagatttaattcaactgagcaggaacactcagtggaccatttattagtaacaggaaattctttaaggttcagtaacattttctctatgttgagcattttatatttttcaaacataggaaaagtgaataatcaaactcctagaaatttctcgttttagcctcgctctgtcacacaggctggtgtgcagtggtgcaatctcggctcactgcaacctcc

SEQ ID NO: 222059 - DNA, 573 bp, Homo sapiens
ttgcagggctatttcataatgtggcaaagaaacatggtttggggtaaaatattttgattttcttgtcacataatggtatgccagagtcagattggaaagtaagtcaagatatatagggttaaataaaacccatctgatgagaatttgtggtttgtagggcatgactccccagaccccttaggtaggaatttggcaagataagaaaaaattagagcttagtcctcatcattattgttttgaaatcaggtatattggtggtcaaacaaattattttggtgggtaaattatcatatgctttcaactttcaattttttactgtgacaataatatcaaatgcctrtatagattatgtatgacaagatttaattcaactgagcaggaacactcagtggaccatttattagtaacaggaaattctttaaggttcagtaacattttctctatgttgagcattttatatttttcaaacataggaaaagtgaataatcaaactcctagaaatttctcgttttagcctcgctctgtcacacaggctggtgtgcagtggtgcaatctcggctcactgcaacctcc

SEQ ID NO: 222060 - DNA, 603 bp, Homo sapiens
ctgcaatatagatcatgtttttcctaaacctgcggcattgccaggtgycccaggaggtcacctggaaaagcctctgcttagagtctaggcctcacatcactcatttgttgaaatgaaggtctatgctattttcaagagcagtccagagagagattctgtaggatacagctgagaagacaacagctggattcctgtggcagtgatggaggagagaggaaaagcccacacatgtcccctgggaacgtaccccttcccctttgagatcgaactgccctcaggccctttgctatcaccgaaatgccctttcacttgtgacgttttgttgtcacagtaaaattaactttttttattacgtgtctcctcttctcagccaaggtggagattaactggtcactcttttctgtgtgagaactccgccccaccccaccccgccccgcccccaccagctctttactccaagagtaataattctagttcctctaatctcttggctaacattttaaaaccacacaggagaagcagaacaaagtactcactgagctcagaagaggcaactgcagaccgagcaggaaggccatccccctgcttggtccaggtgatgtc

SEQ ID NO: 222061 - DNA, 603 bp, Homo sapiens
ctgcaatatagatcatgtttttcctaaacctgcggcattgccaggtgtcccaggaggtcacctggaaaagcctctgcttagagtctaggcctcacatcactcatttgttgaaatgaaggtctatgctattttcaagagcagtccagagagagattckgtaggatacagctgagaagacaacagctggattcctgtggcagtgatggaggagagaggaaaagcccacacatgtcccctgggaacgtaccccttcccctttgagatcgaactgccctcaggccctttgctatcaccgaaatgccctttcacttgtgacgttttgttgtcacagtaaaattaactttttttattacgtgtctcctcttctcagccaaggtggagattaactggtcactcttttctgtgtgagaactccgccccaccccaccccgccccgcccccaccagctctttactccaagagtaataattctagttcctctaatctcttggctaacattttaaaaccacacaggagaagcagaacaaagtactcactgagctcagaagaggcaactgcagaccgagcaggaaggccatccccctgcttggtccaggtgatgtc

SEQ ID NO: 222062 - DNA, 487 bp, Homo sapiens
aagatgatgcatttcacttgaagagtttcctaagataaatgtggggtgtcctgcccagaaagaagggagactctttcactaaacagataaagatcttcagcaatggtgaagcttgggtagaaatagggctcaagggagcaaygaaaatggaaaggttttaatctttggaacgggcatcaagaaagacctagagccaccactgcaaatgtctaaaattttcaaggagagtacagtgtcaaaatgaatccaactaccctgacgagaagacatttcccaatttaagtttaaattgacacgtggtagactccagactgcttggtaacctacagaggctgaactatggcatgctacattatacttactactagtaatttagggaggcaaaggagaaggtaacaacaggcttctttctgaacctgacaccatgggcctctcatttattatactcatgctagagtttagacctcatctctcaccactgtcccca

SEQ ID NO: 222063 - DNA, 565 bp, Homo sapiens
aagtggtgatagcatgtgatggagggaggaaaggaacacctgcagcatagggaggaaaggaacatagagctggctggagactgagaaaccactacttgttctatgtcctgagagagaggggggttgagcaggagaaagggctgctggggttttccacctgcaggcaccacggctgaaaggcctcctgcccaggtcctacctctgactcagtaccgaccttaggyaaggccctttccccatttatggccaagtcagaagatgtggcccagtctgaggttatcaaaaggcagaagcctcatgaatacacctggttattagctctggcagtgtaaaaccaacagcagcaccaaccacatggtgtgagcttcctcctccacttctctgttcagtttctcttcctgcctgttttctctgctgggtgggcagttcagaaggcttgggcctaccatgccccaaacagaagaggctgctttccttcccttctgagcagccacagcagtgtgaacccagatgtgtatctgtcaccttttcctcactcccatcccgagcccatgtgtcccatgaa

SEQ ID NO: 222064 - DNA, 720 bp, Homo sapiens
gctgggcacagtggctcacacctgtaatcccagcactttgggaggctgagatgagcagatcacctgaggtcaggggttcgagaccagcctggccaacatggtgaaaccccatccctactgaaaatataaaaattagctaggtgtggtggtgggcgcctgtactcccagctacttggaaggctgaggcaggagaatcacttgaacccaggaggcggaggtgcagtgagccaagaccacaccattgcactccagcctgggcaacagaatgagacttcgtctcaaaaaaaaaaaaaaaaaaaaaaaaatctgagaaaagcttaaaatagccataagcgtttgaatgtgactaacatttgctttgatgctaagtgcagatattagaaatggaaggtaatgtgcaagaawaaccagtaaagaacatatttcaagacactggagaatggaagggacttcaaatagcaaggccatttgggggaatggagtatatcaaaggagagaaactggcaggggccaggtgaagaagggagcttattaaactgaaatgcctggatcatacttgcattttataaaactcatgctggcagtggtatgaagcaaggagacgggtagaataagagacagaaagatgtggtagaaaagtgatgttcaggcaagagatgacaaagtctgagcagtgcagacaaaggagaggaaagaatgattttaaacagaattaagttg

SEQ ID NO: 222065 - DNA, 443 bp, Homo sapiens
gctgcctcacagtgacaaaatggctgcccttattctagacattgcatccagcacatcatcaagcagaaaaaggcactgtctcttcctttgtgtttcattttaaatttaaaaaaatttacttttaaatttacatttagtaaagttcactttatattgtagaggcctttgagttttgacaaatatgtagtaatctccactgttcaagataaaaagcagttttattatcctcaraaattttggggctgtccttttgtagttaaccgtccctccagcccttaccctggcaactactgactacttttttgaccccatagctttgccttttccacaatgaattcttacagcatataacctttggggtctggcttatttcattcagcacaatgcatttgaatttaaacaacatttttgcttatgtttattaatagttttttctttttatt

SEQ ID NO: 222066 - DNA, 417 bp, Homo sapiens
ttgcacttgatgtatagtctgtatttatttactttccatttatgctctattacttatttaaacttgctttcaatggtcaattgatgtgctttctatctctggaaattgcttaggtatcttgctttggtcgagatagaacacgtcgtaattttccaattacagttcatggaaatatttttcatataatggctctccagagcatcagggtttatacgaatgagttaaagtcattaagtgaagkataggttagagagttaaacactctctataatgtgatatgttccatcaactccaagagctgaaagccttggagaagggagaaaagacaaagaacacataattgtctcttgaccttgggtcaagacaccacactctggtattcctcttacctcttcacattccaattcttctcagtct

SEQ ID NO: 222067 - DNA, 503 bp, Homo sapiens
gttagaattcctcacctactaaatcagaaactctgatgtgcagtcagcaatctgtgttttcttttctttttctttttttttttttttttttttgagacagtctcactctgtctcccaggctggagtgcagtggtgtgatcccagctcactgcaacctytgcctcccaggttcaagtgatccctccacctcagcctcccttgtagcttggattacaggtgcgtggcaccacgccaggctaattttggtatttctagtagagatggggcttcgccatgttggccaggctggtctgaaactcctgacctcaggtgatctgcccaacttggcctcccaaagtgctaggattacaggcgtgagccaccatgcctggccccatttgtgtttttaaaaaggaaaagaaaaaatgaaaaaaaaattttgtctgcatttccttagtagagatggaggtaaatcagttgttggtaaaagctgtgtgcgtctttcttcagattgtgactcatat

SEQ ID NO: 222068 - DNA, 358 bp, Homo sapiens
gaattcaagatcaagtttaagtccagcttgggcatcatagtgagaccctatctmtacaaaaataagcagccaggtgcacctgtggttgcagctacttgagaggctaaggtggtaggatccccaggagtttgagcctgcagtgagccaagataatgacattgtactacagactgggtgatggattgagaccctgtcttaaaaaaaaaaaaaagagagagaaagcaaaaaacttaagtattacttctgtgaaaataacaatgataagccctttattttaacataagtaatttcttgtgaaaatcttttcagaaaaattggaagaataacagtgtttttgtatttttgcaaatctctttta

SEQ ID NO: 222069 - DNA, 536 bp, Homo sapiens
ctaagtaaacatctgctctcggcagggccctctgagatcaggcacagccatcarcagtggctgcatgcctctcatgcttctgagttacgtttgtcctgcttctgagaagatcagccacttcagaatgaaccaattaatacaatcgctaggtgccctcctgtagtacctctgtgaggtttgaaggacttgccctgatgaacctccacttccctgtaattccctataagatctgcagcacaaagctgtgaaggtgctggtcaggggtggaatgcaactgatgctgtcaccagactctaatcccaatatctcccagatattccacagataccacattctaaccagaataatctgcatcatctaaagggtttatgatatgtggctgtgggactggaccaatatgagcccacagaagcctgcatacttggaaccacttggtgggatcaatgtcattaggagacacaactataaatgctgtcattcaacccagcttgaatgaataacaaagaacatgctccaggaggataaagaacagagca

SEQ ID NO: 222070 - DNA, 549 bp, Homo sapiens
tcaacttcctgtgtgtatttcttgaagatcatttatgctccagatgcaagattctctcttatttttctggaactccagatctcaccctccttgtaacagttagtgctctcgcaagcataactctaaagttttcctgaggctggggaataaaagcaaaacagaataaagttagaggcctgaacaaatgaaatggtccttctattttctttccgtatgtcagcataaaaatcccctgtgtgtctctttcaaatatgtgattattttttaaaaacttccaactccagacaataaattttggttctctgtacttggaccaaatgcctratagaatgggtaagtttggggaataatcaccacagtggaatacattataacaattagaatgaacagcctgctacgaatgcaacaataccagtgactctcataagcagaatgttgagtggaagaagcgagacataaaagtttgcacactatgtgatttattttatatgaaatatagaaacaggaaaactaactgggatagggattgtcctttgtgggaggagatat

SEQ ID NO: 222071 - DNA, 549 bp, Homo sapiens
tcaacttcctgtgtgtatttcttgaagatcatttatgctccagatgcaagattctctcttatttttctggaactccagatctcaccctccttgtaacagttagtgctctcgcaagcataactctaaagttttcctgaggctggggaataaaagcaaaacagaataaagttagaggcctgaacaaatgaaatggtccttctattttctttccgtatgtcagcataaaaatcccctgtgtgtctctttcaaatatgtgattattttttaaaaacttccaactccagacaataaattttggttctctgtacttggaccaaatgcctaatagaatgggtaagtttggggaataatcaccacagtggaatacattataacaattagaatgaacagcctgctacgaatgcaacaataccagtgactctcataagcagaatgttgagtggaagaagcgagacataaaagtttgcacactatgtgatttattttatrtgaaatatagaaacaggaaaactaactgggatagggattgtcctttgtgggaggagatat

SEQ ID NO: 222072 - DNA, 575 bp, Homo sapiens
agagtttcacctcacctggtactgacggatagactggttaccagggctgagtgtaaattctgttcctgtatgggaggagacagaggtgcccgacccaggcttgctggagggcagcactgttgtggccaggaccaccgcyggaacatctcccagtgctctttccatctatcttcaaagcaggatttcactgcacaattgaatgcttttcattctgttgcccaggctggagtgcagtgatgctatcttggtttactgcaatctctgcctcccaggctcaaacaatcttcctgtctcagcctcccaagtagctgggacttcaggcatgtgccaccaagcctggctaagttttgaattttttgtagagatgggtttcgccatgttggctgggctggtcttgaatccctgggctcaagcaattcgcccgccttggcctcaccaagtgctgtgattacaggcgtgagccacccgcacccagtctaaacaatttatggttgttgttgttttttaatgagttcatggaaagttgatttcttctgtccatcaatcttaaaaagagttctcctcttactggaaac

SEQ ID NO: 222073 - DNA, 575 bp, Homo sapiens
agagtttcacctcacctggtactgacggatagactggttaccagggctgagtgtaaattctgttcctgtatgggaggagacagaggtgcccgacccaggcttgctggagggcagcactgttgtggccaggaccaccgctggaacatctcccagtgctctttccatctatcttcaaagcaggatttcactgcacaattgaatgcttttcattctgttgcccaggctggagtgcagtgatgctatcttggtttactgcaatctctgcctcccaggctcaaacaatcttcctgtctcagcctcccaagtagctgggacttcaggcatgtgccaccaagcctggctaagttttgaattttttgtagagatgggtttcgccatgttggctgggctggtcttgaatccctgggctcaagcaattygcccgccttggcctcaccaagtgctgtgattacaggcgtgagccacccgcacccagtctaaacaatttatggttgttgttgttttttaatgagttcatggaaagttgatttcttctgtccatcaatcttaaaaagagttctcctcttactggaaac

SEQ ID NO: 222074 - DNA, 410 bp, Homo sapiens
tccacttccacatgttccatcatttattggaaatttccatcaggctcattcatcagcgccttagcatccattacccaacttgcccccaagctaacrtgtcagcctactattgccaggtagctggaatccattggtccaaccatgggctttggggttcaaattctggtcctgtcatctattagctggaagacctgagttaagtcgtttaactggaactgctttttctgtgacattggaaggagtgttttgtagctccctctcatggttgataggaggaactaataaaattgcatctgtaaaccatctagcattttgcctgacatatagtaagaatgttaaaattaatatagatatacagatatactccctttcctatgcaaactggtgctctataccagctctccaatatc

SEQ ID NO: 222075 - DNA, 410 bp, Homo sapiens
tccacttccacatgttccatcatttattggaaatttccatcaggctcattcatcagcgccttagcatccattacccaacttgcccccaagctaacgtgtcagcctactrttgccaggtagctggaatccattggtccaaccatgggctttggggttcaaattctggtcctgtcatctattagctggaagacctgagttaagtcgtttaactggaactgctttttctgtgacattggaaggagtgttttgtagctccctctcatggttgataggaggaactaataaaattgcatctgtaaaccatctagcattttgcctgacatatagtaagaatgttaaaattaatatagatatacagatatactccctttcctatgcaaactggtgctctataccagctctccaatatc

SEQ ID NO: 222076 - DNA, 411 bp, Homo sapiens
ttccacttccacatgttccatcatttattggaaatttccatcaggctcattcatcagcgccttagcatccattacccaacttgcccccaagctaacgtgtcagcctactattgccaggtagctggaatmcattggtccaaccatgggctttggggttcaaattctggtcctgtcatctattagctggaagacctgagttaagtcgtttaactggaactgctttttctgtgacattggaaggagtgttttgtagctccctctcatggttgataggaggaactaataaaattgcatctgtaaaccatctagcattttgcctgacatatagtaagaatgttaaaattaatatagatatacagatatactccctttcctatgcaaactggtgctctataccagctctccaatatc

SEQ ID NO: 222077 - DNA, 433 bp, Homo sapiens
tctagatgtaggttcaacagagttccacttccacatgttccatcatttattggaaatttccatcaggctcattcatcagcgccttagcatccattacccaacttgcccccaagctaacgtgtcagcctactattgccaggtagctggaatccattggtccaaccatgggctttggggttcaaattctggtcctgtcatctattagctggaagacctgagttaagtcrtttaactggaactgctttttctgtgacattggaaggagtgttttgtagctccctctcatggttgataggaggaactaataaaattgcatctgtaaaccatctagcattttgcctgacatatagtaagaatgttaaaattaatatagatatacagatatactccctttcctatgcaaactggtgctctataccagctctccaatatc

SEQ ID NO: 222078 - DNA, 594 bp, Homo sapiens
tagaaatgttatgagtggctcattctgtcccagacaagccaccactgattttctgagccagaacatggggatcctatgccatccatacattagagcatagcatgtggctgctgtgggaagggcacagactgacagaaacccagggctagaagtgctcctgagagcttaaactttacaggggctctaagcatacagaaaacatccccatcatgcttttgccagcttctactcatgttcctctggaatctgcacttgcaccaaatatcccagatccagtactacctcttaaagccatacagaycaagcccaatccttcttctacatctatgaaagatgctgtaaagttacttgcacatttgtcacctgagataaatttcagtagtataagttattatggtctgaagactcataggtggaaagtcctttgctgggtgctattccaatttcattcattccttgacagccagtaaatgaaatgcctattcagccttttctccatgctactcatcttgagtctttaaatgggactattttctaaatgagcctcttttagtcatactaatgttgtagggcattttaaagtgtgatatcact

SEQ ID NO: 222079 - DNA, 594 bp, Homo sapiens
tagaaatgttatgagtggctcattctgtcccagacaagccaccactgattttctgagccagaacatggggatcctatgccatccatacattagagcatagcatgtggctgctgtgggaagggcacagactgacagaaacccagggctagaagtgctcctgagagcttaaactttacaggggctctaagcatacagaaaacatccccatcatgcttttgccagcttctactcatgttcctctggaatctgcacttgcaccaaatatcccagatccagtactacctcttaaagccatacagaccaagcccaatccttcttctacatctatgaaagatgctgtaaagttacttgcacatttgtcacctgagataaatttcartagtataagttattatggtctgaagactcataggtggaaagtcctttgctgggtgctattccaatttcattcattccttgacagccagtaaatgaaatgcctattcagccttttctccatgctactcatcttgagtctttaaatgggactattttctaaatgagcctcttttagtcatactaatgttgtagggcattttaaagtgtgatatcact

SEQ ID NO: 222080 - DNA, 630 bp, Homo sapiens
gagtccaaaggcctgagaaccaagagagctaatggtataagtcccagcctgaaagctttagggctcaagatccaagaagggcaagtttcaatctaagtctgaaagcaagaaaaaaaccaatggcccacctggagcagtcaggttggagttttcctttacttacagggtcagcttcttgttctattcacaccctccatgaactggataaggccaacccacattagagtgggcaatctcctttatgcaggccatcattaaaatgttaatcttattcagaaataccctcacaaacacacccagaataatgcttggctaaatgcctggatatcctatggtccagtcaagttgacacgtaaaattcaycatcacaaacttttcactccagattcaagcattgtgttacaactctttaggagtctacatcatagaagaaattctggagtgtatctctaaccaactgatctagtctccatgaactgtctctggcactgagccccaaattaatctgacagctacccatctctagacatgtcagtatattcttgaggccctgtcattaaggtgagattcttaatctgttattcttctggtttactttcccaacatcctgctaaatgcagagttattgtc

SEQ ID NO: 222081 - DNA, 512 bp, Homo sapiens
tcaagcatgatggctcacacttataatcccagaaccctggtaggttgagacagaaggattccttgaactcaggggtttgagaccagcctgtgcaacatagtgagamcccggcacttccccaaaataaaaatattagccaggcatggtggcacatgcctgtaatcctagctactcagggagctgaggcaggacaattgcctgagcccaggaggttgaggctgcagtgaactgtgatcttaccactgtactccagcctgggtgacagagccagactctgtctgtaaaacaacaacaacaacaaaaacaaacaaacaaacaaaaaaaaaaaaaacaagaagaagaagaaagaaagaaagaaagaaagaaagaaagaaaggaaaaatgcccaggtagctcaccatcatattgtgagctaaagggttccaaggctctaccctagccagtctgcctcctctcttcatatttctgagtcctctttatgtttgttttgtttgttatttagtggaaggaac

SEQ ID NO: 222082 - DNA, 512 bp, Homo sapiens
tcaagcatgatggctcacacttataatcccagaaccctggtaggttgagacagaaggattccttgaactcaggggtttgagaccagcctgtgcaacatagtgagaacccggcacttccccaaaataaaaatattagccaggcatggtggcacatgcctgtaatcctagctactcagggagctgaggcaggacaattgcctgagcccaggaggttgaggctgcagtgaactgtgatcttaccactgtactccagcctgggtgacagagccagactctgtctgtaaaacaacaacaacaacaaaaacaaacaaacaaacaaaaaaaaaaaaaacaagaagaagaagaaagaaagaaagaaagaaagaaagaaagaaaggaaaaatgcccaggtagctcaccatcatattgtgagctaaagggttccaaggctctaccctagccagtctgcctcctctcttcatatttctgagkcctctttatgtttgttttgtttgttatttagtggaaggaac

SEQ ID NO: 222083 - DNA, 608 bp, Homo sapiens
tccatctctggcttatacatggttggtatttattaggcaccaaaacttcagcttctaggatacatttggtcctcttacttctgtgcacagctaagtcccactttctgatcattattttagatttgagtttccatttcatgtagcattgagcatttctttttatttatttattttttgctttagtgctcagatacgttggtttaaataattgttttgcattcattttttacatatttagaatgaagtcagatttttctcatctacttaacctcctcattgagaaaaagtgytttggctttgcactccaggttgggctatctgatgttaagatctagcctatattgaatgccacatgttccgtcaggtcatgaagaatagtaaataaagtaactaacatttcttatgctattattgagaattctgagtctaaagttccacctctgtgtcctttcatagatggtgtggcatgggggattgcagagtgcagattggagtgtggattcaggagcaaaactgcattatttcaaatcctagctctgatattaaccacatgaccttgggcaaattacaaagcctcttcttttctcatctgtgtaatggggtcaaaa

SEQ ID NO: 222084 - DNA, 608 bp, Homo sapiens
tccatctctggcttatacatggttggtatttattaggcaccaaaacttcagcttctaggatacatttggtcctcttacttctgtgcacagctaagtcccactttctgatcattattttagatttgagtttccatttcatgtagcattgagcatttctttttatttatttattttttgctttagtgctcagatacgttggtttaaataattgttttgcattcattttttacatatttagaatgaagtcagatttttctcatctacttaacctcctcattgagaaaaagtgttttggctttgcactccaggttkggctatctgatgttaagatctagcctatattgaatgccacatgttccgtcaggtcatgaagaatagtaaataaagtaactaacatttcttatgctattattgagaattctgagtctaaagttccacctctgtgtcctttcatagatggtgtggcatgggggattgcagagtgcagattggagtgtggattcaggagcaaaactgcattatttcaaatcctagctctgatattaaccacatgaccttgggcaaattacaaagcctcttcttttctcatctgtgtaatggggtcaaaa

SEQ ID NO: 222085 - DNA, 608 bp, Homo sapiens
tccatctctggcttatacatggttggtatttattaggcaccaaaacttcagcttctaggatacatttggtcctcttacttctgtgcacagctaagtcccactttctgatcattattttagatttgagtttccatttcatgtagcattgagcatttctttttatttatttattttttgctttagtgctcagatacgttggtttaaataattgttttgcattcattttttacatatttagaatgaagtcagatttttctcatctacttaacctcctcattgagaaaaagtgttttggctttgcactccaggttgggctatctgatgttaagatctagcctatattgaatgccacatgttccgtcaggtcatgaagaatagtaaataaagtaactaacatttcttatgctattattgagaattctgagtctaaagttcyacctctgtgtcctttcatagatggtgtggcatgggggattgcagagtgcagattggagtgtggattcaggagcaaaactgcattatttcaaatcctagctctgatattaaccacatgaccttgggcaaattacaaagcctcttcttttctcatctgtgtaatggggtcaaaa

SEQ ID NO: 222086 - DNA, 516 bp, Homo sapiens
gttgttctaagccatgtgtctagaaatcttcatagacagacttttttaacccaggagtatcggattcccagtccatattttacaccgtagcaggcaacaactgaatggtttcaacagaaatagagtgacaattccaaactgtgtgtgtcrtatttcatcacttgtacaactcagaatatttatataagccactttggcaaaagagagacaaagggctcaaagtaatttggctcttgctaattacaaaacataatccaaaatctttttttttttaaccacaaccacttcagaagattgttcctgtcaaatatgtctcagcacatcagtcaatcatgctgcaatatttcccccttcttggcaaccaggaccttcctggaattgcccatagtgacagtttgagcaattttaattaacaagcacaattaggctggagaaaattagttccctaaatgccagttagtcctgttttctctttcatgcttcccaaacaaagattgcagctgatactactgccca

SEQ ID NO: 222087 - DNA, 617 bp, Homo sapiens
gaaaaacagtatccttccttccttcctttctttctttctttctttctttctttctttctttctttctttctttctttctttctttctttctttccttctttatttcaacagcattcgtgtgtgtttctttggtgctatatgctgctgcagcagtataccatgcaagaacaaagaatggaaaagtgtaatggcttataccagaagaaatctcctgtaaaatctacaggctggaacttggaatttactttgaactacccttccatctggcagaataagcagagcctgtttaacattatgtacataaattttctcatactgtctttaaatgaaagcctgtatgagctttgctactctatagtagcaggacctattcctgaagatagcttcatggtataggtcacacttgcatctctttcccactattaccrtatttcaagacactggagttttctgctagaagggtagtgaggaagatggtcttattttaagtcaaaagtcctgacttatgtacaaaaaaatcatgtgttatatgtgaatcaagtgctattgttggaattaaaaattctcccttggcatggccatattatacttttaaattgtagaaaaggataaccgag

SEQ ID NO: 222088 - DNA, 483 bp, Homo sapiens
ttctacagttgtttaaatttcccaatgtgaggttacatttttctttaccctgcttatcattcagtgagggctgtcaatttaaagatcttttttgggcaggggagccatctatgaaatattttactgattatttwtttccttcctgtgtctctagtctttccttctggaacttctaataaatggatgtagaacaccatgtttttccatttttttaatttaaggtttccagattctccaatttgctcttcagtggtgtttttgctatatattctattattaattttttaatctatacaattagtatttttaagtgactatttggttaatgataagatagatttatgacacagtatcatttcttaaagatctgttattgaaagcctctttattattgtattaaatctgcttgttaggattgatgatgcctctttttaattctataagtttttctcaggtgttttctagtcctttgtatgggttgtc

SEQ ID NO: 222089 - DNA, 572 bp, Homo sapiens
ttctattgatctatttgtctagttgttcaacaataacaccaccttaattactgtagctttataaaaactcttgatgtagagtagcatcagccctcaaactttgttattcttcagtattgagttgattattctgtatattttgcctctgtttaaactttagaatccactgtcaacatccacaaaatagcttgatgggattttggttggaactgtattgaatctataaatcaagttggaaagactgacatattgaccataatgagtctacctatccataaacatagaatttcatcccatatatttggttcttctttgataccttttatcagatatcagattttttagtttttctcatgtaaatcctataatattttgttagatttatacctaagtatttaatgtttagggatgctgmtctaaatggtaatgtgtttttactttcaaattctattcatttatcattggtgtacagggaaataattaacattttgtatattaccctggtatcctgcaatcttactataactgcttattagtaccagaaatttgttgtttgtttattttttgtcagt

SEQ ID NO: 222090 - DNA, 333 bp, Homo sapiens
aaaaggttaatggccagaattagttaatctgtggtatttccatacatctgaaagacacaatctgaaaatgaaattagaaaaccaatttaattcacaatagtatcaaaatgaataaaatatttaagattaaatttaacaaaagatgttcaaaacttataatcaaataatacaaaaacattatttaaaagtcaatraaaatttaaataaaatacatgggttagaagaattaaccttgttaagatggcaatacttttccaaacattctacaacttttgacataatcactatcagaatcccagttaacttctttgcaaaaatttaaaaggtgatttt

SEQ ID NO: 222091 - DNA, 552 bp, Homo sapiens
aaaaccaaaaattctatgttctcatttataagtgggagctaagctatgaggatgcaaaggcataagaatgatataatagatgttgggarctctccttgggggaggagagttggaggaaagtgagggataaaagactgcatattgggtacagtttacagtgtacactgctcaggtgatgggtgcaccaaaatatcagaaatcaccactaaagaacttatccatgtaaccaaaaatcacttgtactcccaaagctattgaaatatatagctataactaatatataatatatatattaaactaatatatattatatatgtatgtatatatattaaactatttgcctggggataaaaaagcaaaacatgtttttctcctctgctgtaaaataaaattttctagaggcaataataaaatatgtatcacaaattctcattgaaattccatacaaacagaaaaaagtcaaattgatattataatctgtgaaccatattagattaaacttctatggatatttagctgaaggaaaataaatttaaggcaaaatagagcaat

SEQ ID NO: 222092 - DNA, 552 bp, Homo sapiens
gaaaagtaaagctaatgtttgtaaagggaaaatgcagtcttgggtatataataagcatgttaggaatgatagctattattatcattacattaatgacaaaataccaaacacggtcacagaactgtaycagggcagtggaacactggaggaaaagaagagagggactacctatactttgaaagagagtgaaaatgagtgctgtggtatgagctgttttttctgaaaagaaaagggaagcataagtttcaagaaagattgtatatgaacaggcacatacaatctgaataaaaatattaaagaatacttgaagaatgaaagtagactggataactgaaatgaagaatgagagtaataagagataatcctataacatagataaggaccagatcaggaaggggaagaaaactgataattgttttgtaccctatttactacacagaaacctaggcatatttaattatttacttttcagaaccaccccacaaattaggtgttttgaaccccattttacagttgagaaagctggccttgggagtcatttaaaaggtttac

SEQ ID NO: 222093 - DNA, 552 bp, Homo sapiens
gaaaagtaaagctaatgtttgtaaagggaaaatgcagtcttgggtatataataagcatgttaggaatgatagctattattatcattacattaatgacaaaataccaaacacggtcacagaactgtaccagggcagtggaacactggaggaaaagaagagagggactacctatactttgaaagagagtgaaaatgagtgctgtggtatgagctgttttttctgaaaagaaaagggaagcataagtttcaagaaagattgtatatgaacaggcacatacaatctgaataaaartattaaagaatacttgaagaatgaaagtagactggataactgaaatgaagaatgagagtaataagagataatcctataacatagataaggaccagatcaggaaggggaagaaaactgataattgttttgtaccctatttactacacagaaacctaggcatatttaattatttacttttcagaaccaccccacaaattaggtgttttgaaccccattttacagttgagaaagctggccttgggagtcatttaaaaggtttac

SEQ ID NO: 222094 - DNA, 381 bp, Homo sapiens
gagtagcttatgccaagaggaaaacatcatagaatggctcttctatgcctgcccccagctgcccacagctggaagctgtgatgaatcataaaagacctcagaactggttcaacaccaaagagtttagtcttttcactgtctttacatttggggaaactgaggctcagaaaagtaaattaatctagatcagctaattgatttgctaattgatttactcattgagaccccaaaaatttcaagatgaagaggaatcaatgaatcttaaatctagcctgatttttgtggtcaaratcacccttacttatctctgaaaatattacaacaatgggaagttaagaagaaagaaatgtcaatggttcatggttatcaaaagggagcagc

SEQ ID NO: 222095 - DNA, 381 bp, Homo sapiens
gagtagcttatgccaagaggaaaacatcatagaatggctcttctatgcctgcccccagctgcccacagctggaagctgtgatgaatcataaaagacctcagaactggttcaacaccaaagagtttagtcttttcactgtctttacatttggggaaactgaggctcagaaaagtaaattaatctagatcagctaattgatttgctaattgatttactcattgagaccccaaaaatttcaagatgaagaggaatcaatgaatcttaaatctagcctgatttttgtggtcaagatcacccttacttatctctgaaaatattacaacaatgggargttaagaagaaagaaatgtcaatggttcatggttatcaaaagggagcagc

SEQ ID NO: 222096 - DNA, 520 bp, Homo sapiens
acatggtaaacactataggtgttatttttcattgtggtatattattcaagtcatctatgcttactgatattttctgttttctgtattaaatattaagatatattcaagttctccccatgactctaattttgtcaactgtaccttacatttataagttttcctttaaatattttagtgtcaaattatttgatacataaatgttaataattgccataaatatttattcattcatttggtagtcatataaagcacattcattttcttatttcatgctcttgtcttggattctgtaatactgatattgccaaggctgttttctttgcatttgttattgcctggtatacaattctcyctcttttaatgttttgcttttcttcttaatttcattttattgagtctgttatcaagattatataattaatttaggttcttttaccaatacaagaggagtttaattaatttataacaactctgataactggtggttttattataattttgcccttttattatatacttc

SEQ ID NO: 222097 - DNA, 520 bp, Homo sapiens
acatggtaaacactataggtgttatttttcattgtggtatattattcaagtcatctatgcttactgatattttctgttttctgtattaaatattaagatatattcaagttctccccatgactctaattttgtcaactgtaccttacatttataagttttcctttaaatattttagtgtcaaattatttgatacataaatgttaataattgccataaatatttattcattcatttggtagtcatataaagcacattcattttcttatttcatgctcttgtcttggattctgtaatactgatattgccaaggctgttttctttgcatttgttattgcctggtatacaattctccctcttttaatgttttgcttttcttcttaatttcattttattgagtctgttatcaagattatataattartttaggttcttttaccaatacaagaggagtttaattaatttataacaactctgataactggtggttttattataattttgcccttttattatatacttc

SEQ ID NO: 222098 - DNA, 520 bp, Homo sapiens
acatggtaaacactataggtgttatttttcattgtggtatattattcaagtcatctatgcttactgatattttctgttttctgtattaaatattaagatatattcaagttctccccatgactctaattttgtcaactgtaccttacatttataagttttcctttaaatattttagtgtcaaattatttgatacataaatgttaataattgccataaatatttattcattcatttggtagtcatataaagcacattcattttcttatttcatgctcttgtcttggattctgtaatactgatattgccaaggctgttttctttgcatttgttattgcctggtatacaattctccctcttttaatgttttgcttttcttcttaatttcattttattgagtctgttatcaagattatataattaatttaggttcttttaycaatacaagaggagtttaattaatttataacaactctgataactggtggttttattataattttgcccttttattatatacttc

SEQ ID NO: 222099 - DNA, 582 bp, Homo sapiens
tcatgtaactaacaccgaaaccaataactagaagattccagccctcagcagtgttttttgtgccctcttctagtcactatccaccaactgaacctccaaaatcatagattagttttatctggttttgcatttacatgaatgtaatcatacaaaacatactcttttgtgtaagacttgtttggctcaaaattatgtttgacaaattcaaggattttgtgcattgtgatagacagttccttctcatagtttccttcattgtgtaaatatcacacaacatgtttatctattctattgtttatggacatttttggtagctttcagttgggaactcttgtaaaaactgatgatatgggctgggtgtggtgcctcatttctgtcatcccagcgctttgggaggctgaggtgggagaattgcttgatgccaggagttcaagataggcctgcaaaacaacataaagagtccccatctttacaaaaaattaaaaatgaaaaattacctgggtgtgttgtgtgcacctgtcwtcccagctactcaggatacaggaggattgcttgaaaccaggagtttgaggttacagtgag

SEQ ID NO: 222100 - DNA, 537 bp, Homo sapiens
gcggtggttgcagtaagccaagatggtrccactacactccagcctgggtgacagtgtgagactgtatctcaaaacaaaacaaaacaaacaaacagaccaaaaacccgaagatctattatgatgaactgaaaattaaagagaactgtgaacattaagcatgctgatcacaaaaatttaagaaaagacacagcattctttttttaatttgtagtgataaactatttgttgatcacgaagcagtggcgagtttgccaaggtcatcggcgagtttgccaaggtcattgttgatgaaaatgtgacacaagagtaagtctataatattgatgaaacagtgttcttttggtattattgcccccagaaagccactgtctctagctgatgaggcagtccctacaagaattaaggatgccaataacagaataacggctaggctgtgctaatgcagcaggcagtcacaagtgttatctctctgtgttagccaaaaatgtgcatcctcactgttttcaaggagtgcatttcttatcagtttattactat

SEQ ID NO: 222101 - DNA, 537 bp, Homo sapiens
gcggtggttgcagtaagccaagatggtgccactacactccagcctgggtgacagtgtgagactgtatctcaaaacaaaacaaaacaaacaaacagaccaaaaacccgaagatctattatgatgaactgaaaattaaagagaactgygaacattaagcatgctgatcacaaaaatttaagaaaagacacagcattctttttttaatttgtagtgataaactatttgttgatcacgaagcagtggcgagtttgccaaggtcatcggcgagtttgccaaggtcattgttgatgaaaatgtgacacaagagtaagtctataatattgatgaaacagtgttcttttggtattattgcccccagaaagccactgtctctagctgatgaggcagtccctacaagaattaaggatgccaataacagaataacggctaggctgtgctaatgcagcaggcagtcacaagtgttatctctctgtgttagccaaaaatgtgcatcctcactgttttcaaggagtgcatttcttatcagtttattactat

SEQ ID NO: 222102 - DNA, 406 bp, Homo sapiens
actgtgaacattaagcatgctgatcacaaaaatttaagaaaagacacagcattctttttttaatttgtagtgataaactatttgttgatcacgaagcagtggcragtttgccaaggtcatcggcgagtttgccaaggtcattgttgatgaaaatgtgacacaagagtaagtctataatattgatgaaacagtgttcttttggtattattgcccccagaaagccactgtctctagctgatgaggcagtccctacaagaattaaggatgccaataacagaataacggctaggctgtgctaatgcagcaggcagtcacaagtgttatctctctgtgttagccaaaaatgtgcatcctcactgttttcaaggagtgcatttcttatcagtttattactatgctaagaaaa

SEQ ID NO: 222103 - DNA, 406 bp, Homo sapiens
actgtgaacattaagcatgctgatcacaaaaatttaagaaaagacacagcattctttttttaatttgtagtgataaactatttgttgatcacgaagcagtggcgagtttgccaaggtcatcggcgagtttgccaaggtcattgttgatgaaaatgtgacacaagagtaagtctataatattgatgaaacagtgttmttttggtattattgcccccagaaagccactgtctctagctgatgaggcagtccctacaagaattaaggatgccaataacagaataacggctaggctgtgctaatgcagcaggcagtcacaagtgttatctctctgtgttagccaaaaatgtgcatcctcactgttttcaaggagtgcatttcttatcagtttattactatgctaagaaaa

SEQ ID NO: 222104 - DNA, 473 bp, Homo sapiens
tgacttttttccaaactagatgactaaamatgtcattatagcaagagcttatggaaaacgttagaaaaattaaaaaaaattctgtttattaagtacagggcacaaatggaagggcatgatgcctttcagcctccagatggcactgtgattgtaagaaccatgttttttctggactttttgtcagttgcttttttttttttccttctttttttgagacagggtctcactctgtcatccaggcaggagtgcagtgccatgatcatagcccattgcagccttgaactcatgggctcaagcgatccttctgcttctgcctcctgagtagctgggactacaggtgtgcaccactacacccagctaatttttttaatttacttttttttatagagacaaggtctcactatgttgtccaggctggtttcaaactcctgggctcaagtgggctcagctgcccaaagtgctgggattgcagg

SEQ ID NO: 222105 - DNA, 516 bp, Homo sapiens
aggctgttttgcttttttaaagcaagccattcttggtttttgacatctgaaaagccctgcattccttcctgtggacacacgaccggcaggtggtgcatggtgtggctgtgagtcaagttatyggttgacatcctcctgatcaccaccatgcagcaaaggggaactgccctcttgccagaaagcactggggtgtgttatcctgaccaatatgaaccagattggggcttctcttgtttccccatggaagtgacagagcaacactttgcctttttttctgttgcacactgagtattttttttagtcattaattaaaaaaacaaaaacaaaaaccttgtaaacagaggctacctacctcagggcctgtcttggcatccaaccagaaggtcagttatgtgcaaatacagtgcaacctccctggtatcgctggctgaacagcctgcacccctgactcaggatctgagctagcagtggttaagctttcactgctgcccaactaccaaccccagttggcaggct

SEQ ID NO: 222106 - DNA, 543 bp, Homo sapiens
gcagggaagaggcaagaacaggctgttttgcttttttaaagcaagccattcttggtttttgacatctgaaaagccctgcattccttcctgtggacacacgaccggcaggtggtgcatggtgtggctgtgagtcaagttattggttgacatcctcctgatcaccaccatgcagcaaaggggaactgccctcttgccagaaagcactggggtgtgttatcctgaccaatatgaaccagattggggcttctcttgtttccccatggaagtgacagagcaacactttgcctttttttctgttgcacactgagtattttttttagtcattaattaaaaaaacaaaaacaaaaaccttgtaaacagaggctacctacctcagggcctgwcttggcatccaaccagaaggtcagttatgtgcaaatacagtgcaacctccctggtatcgctggctgaacagcctgcacccctgactcaggatctgagctagcagtggttaagctttcactgctgcccaactaccaaccccagttggcaggctcaccatcc

SEQ ID NO: 222107 - DNA, 625 bp, Homo sapiens
taagttgagttgttttgtttactaatgaatataacttacagggattattttccctatgtaacctttcatagaagctagaaatcaattttgtgttatggtgaaattgaaggtwaatggagggcagattgaagtgttccataaacccactctgtttgatattatttccaggatatttggatgtttcgagctcgacttgtgaaaggagaaagaaccaatctttgaaatagccatctgctataactctttcaacagaaaaccaaaaccaaacgaaatgtctaaggaaaatgttttcttaatgagatgatgtaaccttttctatcacttgttaaaagcagaaaacatgtatcaggtacttaattgcatagagttagttttgcagcacaatggtgttgctttaatggaaaaaaaaaacagtaaaagtgaaatattactgttttaaggaaaactaatttagggtggcagccaataaaggtggttggtgtctaatttaagtgttaaatcaatttctttcattcagttagctctttacccaagaagaagtgaatgatttggagcttagggtatgttttgtatcccctttctgataaacccattccctaccaattttatgtcataagagattttt

SEQ ID NO: 222108 - DNA, 550 bp, Homo sapiens
ccagtaattgcttaattgcataaatattatcctggttaaactgtctgtgtatttaaaaagtctaaattatacctcaatagagatggagaaaaattttaaaaatctactatttccatctgtcaatttctgattaaatatactaycatttgtccatttctttttatagatacagattctttgttgattacatacacaagaaaaagtctttcttaaacattttatatgcaactgtacttagtcaaacctagggctactgctagtcttccagtggtgttttgtccagttcaagagctgctggtgttttgtggatcctgatgtataaacacactacttctaaaggactccgagaggcacaaaaagctatgccgtggcgcacatgaatagatggtttagctactgacctgagccgcagaccagagaaggcttccacacagatgggttgagtcgtttccccagaacttcctggggtccccacaatttgacctctagttatcccactaggtttgttccgagaaatcgtctgtaggggttgggagggtgcacttgtcat

SEQ ID NO: 222109 - DNA, 638 bp, Homo sapiens
aatgagttgtcaagtgccaagcgtccccgattgtcaaatgtcctccaagccaccattctgctttcttccgggctattcatgacagctgtgaattgtatgggactcttcgtatgcagaggctccaatgaggaagaggaaactgccctcccactgagcaaccttctgttgcttgggttgacaagaaagctatattaatatctcatcggaactcctatgtttcttgtagagaaaaaatggtttcattcccagctagctcagaaaaagcccatttcattccgtgttatagatttagaatgatttccaatggctgggtttttcatgcyttgtttgcaatgttgtgaaataccgcttggttcttaaactattgccttcttggttcttgtgtggatagctactgtactttgtaccagttgtcaatacttctgatttcccacaaggtttgtttttgttttttttttgctttcttagattctgaaatatgtggagtgcttcactggacctaatattatggccatgcacacaatgttgataaacaaacctccagattctggtaattgtaagggagaagaaaaaaaaatggtttcattaaaatgtgtaaggttggctgggtgcagtaactcatgcctgtaatcccagca

SEQ ID NO: 222110 - DNA, 498 bp, Homo sapiens
tagttccagggaccaagaggcggccttgttggccatctcagagcacgcaccacttggggaagaaacagttaccttcccagtcctatgctcccggagatgtgttgtgtgggccttctctgggcttgtctgatttccaagctgatcttgactgagcatagagcccttagaaagttgaacctcaaagaccacaaaygtatgctcaactgattttttacaaaagcatcaaagcaatctttcagaaaaaggaaattttttttgtcaactggtgctggaataattaaatatatacaagaaaaaaaaatcttcgattccctacttcatactatacataaaaatcaattcaagatggctcatagatctaaatataaaacttatatgagaaaatagactatattccaggtgtgtgtggtagctcacacccgtaacccagcactttgggaggacaaggcaagcagattgcttgagtccaggagttcaagatcagcttggaaaacatgg

SEQ ID NO: 222111 - DNA, 498 bp, Homo sapiens
tagttccagggaccaagaggcggccttgttggccatctcagagcacgcaccacttggggaagaaacagttaccttcccagtcctatgctcccggagatgtgttgtgtgggccttctctgggcttgtctgatttccaagctgatcttgactgagcatagagcccttagaaagttgaacctcaaagaccacaaatgtatgctcaactgattttttacaaaagcatcaaagcaatctttcagaaaaaggaaattttttttgtcaactggtgctggaataattaaatatatacaagaaaaaaaaatcttygattccctacttcatactatacataaaaatcaattcaagatggctcatagatctaaatataaaacttatatgagaaaatagactatattccaggtgtgtgtggtagctcacacccgtaacccagcactttgggaggacaaggcaagcagattgcttgagtccaggagttcaagatcagcttggaaaacatgg

SEQ ID NO: 222112 - DNA, 438 bp, Homo sapiens
actaggccgtcttctgccatcttcaagcctagcaatattgggcagaaagcttagctgaactgagtcctcccactgatgccgtctctctggtctgttttctgacgccctcttccacttttaaggacctttttgattatattgggctcaccaaggtgatccaggattttctccatatcttgaagtcagctgattagcaaccttgattccatctgtaatcttaattctcctttgccatgtaacctagcatacatacagattcaggggcattattctgcctcccaagagggacccaagcatcaggcacagtcagcytgccatgaatttccttcccatactgggccagtgaaggaaagagaggacagaaattagggcacactcaagtgagtccatcatgtttacacacaaactgggtagccttgttctgatatagacattatt

SEQ ID NO: 222113 - DNA, 599 bp, Homo sapiens
cgtccagctctgagtagtctgcggtggcgtccgggcgctccccgagtcccccggcgccgcgaggcagcggcagcagcagcagcagtgacaccagggccccaagtgcagtcgcccggggcatggtggcgcggggccggctggggcagagggagttgcgtgcacgaaagctcagctcggccgaaagacggcgcacactgggtcggtcggctccggccgggactcggtggttacacagggctgctgggcatggctcaggcgcggagcaagcggagcgcggcgccccctgtcttcgtcgaggcaaccgggaagcagccgctcggagctacttgcccggcggccgaggctgcggcggctgcgagtgtggcggtggcggcggtggttggagcagtggccgctccgcccctctccaccagggctggaccacacagccttcgccmggggccctaagcagccaatcactcgggcgcccgaggcgaggcccctcctcttcccggcaccttcgcaacttcggaggcaggcgagcgaggtgaagatgctggagccaaaggccggggccagctccgcacccacccagcctaaggcgcctgcccggggcgcca

SEQ ID NO: 222114 - DNA, 519 bp, Homo sapiens
agaaattaaccactgatttcaatgtggcacaataaaaataatctcttccattcgtatagaacactaattttcaatgtgacttctacatatattacctgcctcccaggctagagagggtgacacccccattttacagttacaatagtcaagacaacagggccctgaatcttgatgacttctgggctaaacataagagcacctttagctgtggtttcttatccataaaacacagctatctactctaccagcttcacaggatggttgtgaaggaacaagtgaaactgctttgaaaaagtagtaaatgctaaacaaatgcaaagaatcatcaatcagaggatggcaggcaaatagatggtaaagtctgagtgtaagagtcagaataggtatacaaaaaagtcaaaagaatggcaataaaagaaaaatcattcttaagaaagaccaatcttattcactggaccattctctcaactttactgtayattacagttcacttttgaaatacaaatttaaaccttaaat

SEQ ID NO: 222115 - DNA, 594 bp, Homo sapiens
ggaaggacggatgggtggtgatctcttctggttaagaattactattccagatcatctaatgtccataatgaaccaattatcgtaacaacaagtaggcacaaaccgtctggatgctagacaatttattaaaagcatactatgtcttaacagctaagggtgcartggtgaataagagtgctactataacaggctagtacagcagcttggggataaatcaaagtctgtaatcaataaactaacatttcataatcgtaaatacaaaatcaaggtggagctacagacccatgctatgtgctattagtattcctaattaccacttttcgaatataaactatataccaggaactttgataaatgctctacatgcattctcatttaaacctgacacttcgatcaaataaatattatttcccacacttcacagataagcaatacgagatcaaagaggttgaacaatttgcccatgaccacacaggtaagcagaggcaaagctggatgcatcaagtctctctgaccctaaagcacatcttctattccacactatgatggcaaggttcgaagaggtaccctctaaaactggagggtactgaattc

SEQ ID NO: 222116 - DNA, 612 bp, Homo sapiens
taagtatccatcaccaccctccacagatttgaggtagtatgcatgtggcrggtgttttggggaggactgggttggcaaatgcttggaggtagggaggacacaagaaaaagtatattcatttagggaggatagattaaaaccaggaaactacacacacaacaaagaacaggcatgacagtgtacttttaaaaaggaacacaaaagctggccaactgtgcaaatggtcaacaggcagtaaaagcaatgggcaatgagagaagtggaaagaaaccctatttcagaggagtatttgggaaaatttaatggatggaagagcaggtagagccattaattcaacgattatttattaagcctctactatgtaccaggcactctggtaggtactaggggaattatgctgataaatggcattaggtgatacaagtctgacagcagtaggtgtggaaagaaggaaagggagataaagtaactgattagagtaaaagaagtgtggcttcaaagatcctaggtgcctgatgacctcaacaggacaaaacagggctcaggtcaccatcaaaattagggttgtttcactaaactggggagtgaaaaacattaacataccttatttca

SEQ ID NO: 222117 - DNA, 624 bp, Homo sapiens
tctgccaccttacttttatatatatgttatatatataacataaaatataaaatataatgtaaaagtgaggtgggtgtgtatgcatatatatttatatatatttatatatatatggggtagtggaaggaagggggagttaattatcaaggcttcatgtttaccaatttttgattagcataatctcatcttgaactttgcttggaagagataatttattttcctggagttttattgtacaagcrcacacacacacatttgtacacacacattcttgggccagcttctctcacacagctgaattatgtgagattgatctcttatagtctctccttttttctataaagcagaagctctggacatcactccctcaccaataggatgaataggaaataattaaaatgggagtaggggagtgaggtggaagtagatgtcagtgggaaaaaaggaacaagtgatacggattgatccacacattatatgcaggatattaatcagttggttaatattgttcatcccaggcccattgactcattcttggaggtgaggtctaggaagtagcttttcaaagaagattctcaggtgatcctgagagcactgggttgagtatatgccaagtattagtgt

SEQ ID NO: 222118 - DNA, 624 bp, Homo sapiens
tctgccaccttacttttatatatatgttatatatataacataaaatataaaatataatgtaaaagtgaggtgggtgtgtatgcatatatatttatatatatttatatatatatggggtagtggaaggaagggggagttaattatcaaggcttcatgtttaccaatttttgattagcataatctcatcttgaactttgcttggaagagataatttattttcctggagttttattgtacaagcgcacacacacacatttgtacacacacattcttgggccagcttctctcacacagctgaattatgtgagattgatctcttatagtctctccttttttctataaagcagaagctctggacatcactccctcaccaataggatgaataggaaatrattaaaatgggagtaggggagtgaggtggaagtagatgtcagtgggaaaaaaggaacaagtgatacggattgatccacacattatatgcaggatattaatcagttggttaatattgttcatcccaggcccattgactcattcttggaggtgaggtctaggaagtagcttttcaaagaagattctcaggtgatcctgagagcactgggttgagtatatgccaagtattagtgt

SEQ ID NO: 222119 - DNA, 601 bp, Homo sapiens
gctaagttctgcccaatggaaagggggaagaagtagaatgtgttatttattcccaggactcgcccattattttgtctcacatgaatattcaaatcctctcaggatgtatatgattatgagagaacacttagaatctgagggtagactcataataattgaagtctgagcttcatggaagtactggcccaaaaagagactcatttaagtaattacacagggtaagaaataaactattgtgctcagccactgaaatctgggagtttgtaacagcacctggtgatattttaatattatagtaatatataatctcctaaactcctttaggactaagtatttttaaatatttgtgtgatatgtgatcaaaagtgactttaaataaatgtttcattgttaattagtgtatttttaattcttttagctgtgtggccctagaaaacctgaggtctacgtttaatctttctgagctggaaaatarggtaaaatagtacctaactcacaggataattatggagtttcaaagagctagagtgtgctgcagcatcccagagtagggtaagttctccatgacaagtgtgtgtggccctcagggccacctctggca

SEQ ID NO: 222120 - DNA, 499 bp, Homo sapiens
accattcaatccaacaatcccattactgggtatacacccaaggagtataaattgttctatcgtaatgttcattgcagtactattcatgacagcaaagacatggaatcaacctatatgcgcattaatgatagactgaatttttaaaaatgtagtatatatacaccacggaatactaagcaaccttaaaaaagaataaaatcatgtcctttgcagcaacgtgggtggagctggaggccattatcctaattgaactaacgcatgaacagaaaaccacatactgcatattctcatttataagtgggagctaaacattgagaacacatgggcacaaagaagggaacaacagacattggggtctacttgagggtggagggtaggaggaaggaaaggataaaaaaatacttattgggtaytatgcttattacctgggtgataaaataatctgtacaacaaagccctgtaacatgcagtttacctatataacctgcacatgtactac

SEQ ID NO: 222121 - DNA, 560 bp, Homo sapiens
tgcacaccatggaatattcatcaccataaaaaaggaatgaagtatttatatacgtacaatgtagatgaaccttgaaaatgttatgctaaatgaaagaagccagacacaaacagtcacatattttgtgattccatttatatgcaatatacagaatatgccaatccatagtgaaagaaagaacattggcggctgccagagctgggggaggagagaatatggactgacttcttaataagtatggggtactctttgggggtgataaaaatgttttggaacttgatataggtagtggttgcacagtaccatgaatrtactaaaagccactgaattttacggtctaaaatggctaattttatgttatatgaattttacttcaataaaaagcatagcagcaaaagaaacagaatgggtgtgggaactgactgggaggttgttggattagttcaggcaagagaggagagtgtttttgactagggtggagatggagataaaaagaagtaaaccatctatgacaagctgggcttgatgtcagaggaagaggggaggagaagggcagacac

SEQ ID NO: 222122 - DNA, 556 bp, Homo sapiens
ttcacaagaaaaataaaagaaaaacaaaaacaaagaaaatggaaataggtggggttcctgtaactcacgaacaggtacaacaacagaataggggctatttgaaaaacatagttacatcaccacattaattttgctgctgtgctatttctgccacagtgactatttccctagctgttacttactgccccaattcattatcagtgaagagatcgaggatatctcctccagtcatttttcttcaaaagaaacaaatttatttacattgttaaaaaattgtatatttgttgctttatattctttctgagtataaacatgtatatgtgtttctctgatcaccatgaacaaagataatctcagaaaatttagtgtctgaaggaaccccaattctaagaccctatcagtaacttagctgcattagatgaaaaaaaaaaaatccttcttcaacagctttccaagctgacagtcatgaaattaaaattatttacttgggtctcataacaatcatagaaacagggaaaatgataactgcagagggawaaccaaagaaataacattg

SEQ ID NO: 222123 - DNA, 546 bp, Homo sapiens
tctgtagatgtattgtttgcatgcaagaacatcagtctctttaaatgttggtcagagagaacacaggttgtgaattaggtgtgccagcttgtccagaaacatggcaaagataaagaatcaaatgycaaatgttctcttctttgaaaacccactttgtaatattatgttttatatcagcatgtgagcattgaattttcatgtgcaaatagttagagtttcagttctctctcccacttttaaattacctacagaaaaatgtcatctttaagtaaaattgaaagtaaaaaactagaaaaagaaatttaaagacacaagaaaaatgttatatgagcctcaaaacataaatagttcctacatatcaataagaaaaatggagcactataacagatgtatcaaatgtacatacaaatcgcaattgaacaaatgccaagcccataaagaaaatgttgtacacatttaaaaactaaaatttatttgtatattttgttatcaaaatttattttttgaaattgttttaatgataatatagcatgtgagttctctaat

SEQ ID NO: 222124 - DNA, 546 bp, Homo sapiens
tctgtagatgtattgtttgcatgcaagaacatcagtctctttaaatgttggtcagagagaacacaggttgtgaattaggtgtgccagcttgtccagaaacatggcaaagataaagaatcaaatgccaaatgttctcttctttgaaaacccactttgtaatattatgttttatatcagcatgtgagcattgaattttcatgtgcaaatagttagagtttcagttctctctcccacttttaaattacctacagaaaaatgtcatctttaagtaaaattgaaagtaaaaaactagaaaaagaaatttaaagacacaagaaaaatgttatatgagcctcaaaacataaatagttcctacatatcaataagaaaaatggagcactataacagatgtatcaaatgtacatacaaatcgcaattgaacaaatgccaagcccataaagaaaatgttgtacacatttaaaaactaaaatttatttgtatattttgttatcaaaatttattttttraaattgttttaatgataatatagcatgtgagttctctaat

SEQ ID NO: 222125 - DNA, 492 bp, Homo sapiens
gtagactataaaatataaattaacatatatgtgtatattactaaacacttatacgtgtgtggagaatgatgttggtaacgttaagtagccttttcttgttgytttcctgcatgtcatagtaagtgttcaatgcaggaggaatattgttgctataaattatttctggttttctgtaacgcatttaatgaagagggacatctttggtagaatgactcacataataaatatggtacatttcttcctgtttagtaaccaagcaagtacatttctgtcatgagcatgatagaatgtaaacatcagctgcatgctgtccacgcctttttggaaaagtgttattcagtgagccctccccttcctcctcccctgctcaatctcaatttcagtgctgaccagttttatgactttgggaaatctctctaacatctccgtgcctttgtttttgctcaagtgaaataacaactttgggttagacttgtatcgcataagaaacag

SEQ ID NO: 222126 - DNA, 563 bp, Homo sapiens
ctttcactttagggtacacaaagggtcatacagttgatattctgcattgtgctgaccttaagatagaattaggggagagtccagtcctgaggttgtgtttggaaacacaaaggcacacattggtatgtctcaytggatttagcatcaatatgggttttcccaatggcctggagtcagaattctgcctatgtggcatttgcatcagtagtggataatatagtgccctggccagattactgtttcaggacagagccattcattccccaatctaccagaaatgttaactgctgggactcacatctgagtctgtctctagcatcactctctgctgaagggagctgtcctgcccagggttatgattcttcccaaggatagcattcatccaaagataggttggtatcaaggaacaaattgagttccctttcctcaatttaaacaattctgatagattatcaagactccagagattcccatggtgtcagctgagccttgtattgaatcttcatcacagttcaacttcttcctcttccaatgccacttccttcattaccttgcataggatg

SEQ ID NO: 222127 - DNA, 563 bp, Homo sapiens
ctttcactttagggtacacaaagggtcatacagttgatattctgcattgtgctgaccttaagatagaattaggggagagtccagtcctgaggttgtgtttggaaacacaaaggcacacattggtatgtctcattggatttagcatcaatatgggttttcccaatggcctggagtcagaattctgcctatgtggcatttgcatcagtagtggataatatagtgccctggccagattactgtttcaggacagagccattcattccccaatctaccagaaatgttaactgctgggactcacatctgagtctgtctctagcatcactctctgctgaagggagctgtcctgcccagggytatgattcttcccaaggatagcattcatccaaagataggttggtatcaaggaacaaattgagttccctttcctcaatttaaacaattctgatagattatcaagactccagagattcccatggtgtcagctgagccttgtattgaatcttcatcacagttcaacttcttcctcttccaatgccacttccttcattaccttgcataggatg

SEQ ID NO: 222128 - DNA, 417 bp, Homo sapiens
ctcctgcttggctgaaattccactcccagcagtttctctagtgtgagccctgtgtttggagagttcacaggagctccaggattctctagccccgggcctcactgtaggcctgccttgcactcaycaagtcctggagaggactaaatacttcccaatttcagctgctatatccagttcacacacagcgcttccagtgaatacctgtgggctgtttgggattctcttgttctcagattgctcagatgctctgtggcttctctctgctttcttcaacagatactgataatatctagtgcttgaggttggatgctacttggagtggttcatagagaatacttttccacctagttatgttgtaaatgtttcccatgggtttttggatttgctatctgcttgctgtgtttgtgtgtgttgggg

SEQ ID NO: 222129 - DNA, 612 bp, Homo sapiens
tatttcaccttgctaaacaccttttaaaataacctgttggctgggcgcggtggctcatgcctgtaatcccagcactttggggggccgaggcaggtggatcacctgaggtcaggagtttgagaccagcctggccaacatggtgaaaccccatctctactaaaaagtacaaaaattagttgggtgtggtggcagatgcatgtaatcccagctactcaggtggctgagacaggagaattgcttgaacctgggaggcggaggttgcagtgagatcgcgtcactgcactccagcctgggcgacaagagtgagacaattcttaaaaaaaaagaaaaaaaaaagaacctgttgaagtctgaaaaactcagccaattagttattaataactgaagtaaatgatttgtctgacattaaacaagtgtaactgttgttttcgctaaggtttgttgaattttgaagtatatctccataaatacccaaattgtttctcctttatgcaatgtgtgagtacactaataaatatactttttttacrtgaatacaaaaactagataataacttcaaactggattcattcaagaaatggcagaagagcattacttttgcctgggagtaag

SEQ ID NO: 222130 - DNA, 523 bp, Homo sapiens
tctgtgctgtatgttcacccccacacgcaggggagaaaattgagttttactgctgatgacgttaattgattgcaagttgttttagtgggagtgtgatgttgaaaacyagatttcctttcatttttatgcattagatgcagagaagctatacagtgacatgttcattccactgtaactaaaaatatcatagaggtatctaaatttggttttgtatgttttatattcagatcttgacactggtcagcttacaggattatctttgggttggagactgtttctgtagtgatttctttagttcccagtaaattcacacagtcatctccttcaatagagttctgattagtgcagtcagggggtgacacactaaattaggggtgggcagaggggtgaaatggaaaccagctgttatctgcttacctataattttatatggtccaaaaaaagcttttgtcttttttttttcttttgtccctgttcttttcagatcatcttcttcaaaaatttcttgccttaacatgtaaag

SEQ ID NO: 222131 - DNA, 523 bp, Homo sapiens
tctgtgctgtatgttcacccccacacgcaggggagaaaattgagttttactgctgatgacgttaattgattgcaagttgttttagtgggagtgtgatgttgaaaaccagatttcctttcatttttatgcattagatgcagagaagctatacagtgacatgttcattccactgtaactaaaaatatcatagaggtatctaaatttggttttgyatgttttatattcagatcttgacactggtcagcttacaggattatctttgggttggagactgtttctgtagtgatttctttagttcccagtaaattcacacagtcatctccttcaatagagttctgattagtgcagtcagggggtgacacactaaattaggggtgggcagaggggtgaaatggaaaccagctgttatctgcttacctataattttatatggtccaaaaaaagcttttgtcttttttttttcttttgtccctgttcttttcagatcatcttcttcaaaaatttcttgccttaacatgtaaag

SEQ ID NO: 222132 - DNA, 556 bp, Homo sapiens
tgaaactaaacttcataaatgaaggacagatacttattttccagacaaacaaatgctgagagaatccaccaccaccaagccagcackacaagaattgctaaaagaaacatgaaatcttgaaacaaatccttgaaatataccaaaatagaacctacttaaagcataaatctcacaggacctatataacaataacacaatgaaaaaatacaaggtatttaggcaacaaatagcatgacgaatagaatagcacctcacatctccatactaatatcaaatgtaaatggcctaaatcctccacttaaaagatacagaatggcagaatggataagaattcaccaaccaagtttctgctgtcttcaggagactcacgtcacacataaagactcacataaacttatggtaaaggggtggaaaaagatattccatgcaaatggacacaaaggtgaccaggagtagttattcttatatcagacaaaacaaactttaatgcaacagcaggaataaaagacaaagagggacactataatgataaaaggactagtccaacaggaaaata

SEQ ID NO: 222133 - DNA, 568 bp, Homo sapiens
ccatgggaatctggattgtgagtgccttggggagcaggcactgtgtcttgcacataacaggtacataacaaataacagtcactatgttttactgctacctctactagggtgctatttgttagataactccaataaaaacagccatgcttcccatcctccataaagacactacagtttatcggtatacagtgtagtctrgaggggaaaaaagcacgtactgtttctctggttgcacgactgcaatctttctcttcttttgtgctgtagaaaaggcaaaacggaaaaagaaaatcagctttgttagtggggcaagtccatttttaaaaataggttataaagcaaagaggtacccattttaaagtagcaatttaaatgctgaaaagttacgtcattcatgccacaatttcctatcagtttcttctagcataggatagacgttaactcaccagatgtcagatcttagtacaacttcgttcatttaatcttatcattacactagctactttatttttaaatgtgcatttaagaaagcaaaagagtacacctgttgtacctcacattagcacac

SEQ ID NO: 222134 - DNA, 571 bp, Homo sapiens
tgatgttgtagggctctgttttgcactttcatgcctattttaggaacggataggatagagacagttaaatccagtgacaatcactgcaaccctcccaggagtattctgggaagaggtgctatataaacacaaagcattctgcaaaaatggttgtattcaccctcataacatctcatgaggtagatgcactgtgaacattgttaatataaagctgctagtgccacaaatagagcagagattattttctctccctgcatggggaatgacaccattttcctcacatttcttaagaggaattatccattggactgctttgtgaatggcagccttgcatgtatttgtctgattgttcacacttgtaaccaaaagacttgtttgagatgaaaagcaatatcctgggcttaaaagtttatatgtgtacaggtgcttcccactgcaaaccaaaytggaaaaggctaacataggatgctaaaataaaaatgagtagaactgtttattagagaagagcatctgttgaacaatgctatgaacacctgtcacctctggacgatcacgccttctaattgcgggt

SEQ ID NO: 222135 - DNA, 597 bp, Homo sapiens
tatgtcctttatagcaatgattctcaaattaggtagcatcttgctcacttaggaaatttgtgaaaatatgaatagctcatgtgtaccccctgtgattctactaaggactatatttcagtgcatgggactctgggcttttattaagagattgtttgctatgtttctctgaattaccctcaaattgagagagccacacagtgggtcaggagagcttgggctatgggtagctgcgygcagagaaaagagttctgttagataaggggagctgactctcaaataaacctggttattatgctaagttaagggggatccactgcttcagtgctcctctggagggattaatggaggtcataggtccttcagacatgactcagaggcctgttggaggaggctttgggctcccgtgttttcacagaaacgctctttactgttttatattttgtggttacatgtatgacttaactaagttaaagattctgcttctaaatagattaaataccaccgagctatgtggtgaagaaagaaccaggaacaattatttccgaagacccgctgaagtcagattcataaataagattctagatgccagaaatcata

SEQ ID NO: 222136 - DNA, 597 bp, Homo sapiens
tatgtcctttatagcaatgattctcaaattaggtagcatcttgctcacttaggaaatttgtgaaaatatgaatagctcatgtgtaccccctgtgattctactaaggactatatttcagtgcatgggactctgggcttttattaagagattgtttgctatgtttctctgaattaccctcaaattgagagagccacacagtgggtcaggagagcttgggctatgggtagctgcgtgcagagaaaagagttctgttagataaggggagctgactctcaaayaaacctggttattatgctaagttaagggggatccactgcttcagtgctcctctggagggattaatggaggtcataggtccttcagacatgactcagaggcctgttggaggaggctttgggctcccgtgttttcacagaaacgctctttactgttttatattttgtggttacatgtatgacttaactaagttaaagattctgcttctaaatagattaaataccaccgagctatgtggtgaagaaagaaccaggaacaattatttccgaagacccgctgaagtcagattcataaataagattctagatgccagaaatcata

SEQ ID NO: 222137 - DNA, 536 bp, Homo sapiens
aggtgagatcctgggagccaggctaaatctccacttgatcttagccaaaaggctgagaaatgatcaggctaaatcgccaggtcaggcttgatgatgcttggttaagacaatgaatgcacagttacgttttctttgcacagaaaaaggtaaaaagggttaaatkgtgactaatcgtaatagtaattcccatttattaagaaaccatgacatttcaggattgcaaacgttatgcaatttattccacataacgaatgtttgaggaagatattaatattttcactttccaagtgtgtaaacttgagttttaaaatattaaatgacgtgtccaaagtcccctggtagatcaaggacctaaactgaggtctgtgtggttccagagctcgtattcttaatcacagctttcaatcagaccctaccttagaaaaaacagagctctttgcctgatttcattggtgagaattatagaaaaggtgatgaaaccatcatgatacttatctccttaccatcacgatacttatctcgtttccatcataact

SEQ ID NO: 222138 - DNA, 459 bp, Homo sapiens
tatgattgaagaatatgcaaaggttctcattttaaaaatatcttatattcagaaaatgccataagaaataaatttatattttcccaccaagaagttggatatctgttagggcatttgatgcttttcttttttaaaacttgcatgccaacaagtatatttagtgcagagtttaactttccataaaaatctttgggttaaagatattggagagtaggaaaagggcatagctaccatccaaatacagatgttagggtcccagccagatggcattwctttgatacctcccttcctgatttttggatcaaatcccttgtcccagcagatgtgaatagacatcataatactgttaccattctcagcttggtaataaaagacagccttgaaattcaagtagccctttgcctctgcatcaaacttagctctcaaataccttcttgatagtaaacataatgttgaata

SEQ ID NO: 222139 - DNA, 588 bp, Homo sapiens
attgacgttttatataaagtactcacaaaacttgctctatgttggacatttattctcctagaaatgtaagaaatgttcatttgcaaaataccwaatccagacaggtttttcttttgttgagtgtgttttatgcaacatgtcagggtttgagttttttgttttcccaattcataaccttttccaccatcacgtaaaaagatgactctctcaccatgtggtttctctgtctgacctaacatcaaatacgtgcagtctgttccaagaattgaaagcttagcttccctctggctactgaggtcatatgtttaaatttttaggtcaacacatccaattaaaacaggtttggtgcagaatagatgataaaagctagaagtgttacaaagaacaagatattcactcaagtaacatataaattaggggaaaaatggaaatttactattggttcatgttcagagtgttggacactctaagtgaaattcaacaactgaaaaaaacatctttcaagatcacagtagaggaatccttgacccctggcaaggtcctgaatcatgagcagacattatctctggattcggaggagtaaatcat

SEQ ID NO: 222140 - DNA, 572 bp, Homo sapiens
gaattcttcacatcaccagtgacataggtcagacatgcttaatactgatgaaggaaggagatttgaattttatgacacttactacagtttgttataagacaggtggttatttaaatttgcccgctctgtgccctcaatgaaaagtrtaaatgccagcaacacatgtatttttaaatcttctagtagccacataaaacatttaaaagaaatagttaaaattaattctaaagtaatatatctaaaatatgatcacttcaatattaatataaaaattattaatgagatcttcttatattattcttatgctatgtcttggaaattcagtgtacattttataattttagcacagtctgttcggactagctgcatttaataagctcagtcacatgtgcccagtgaaatataaactaccatcagagaatactataaacccctctaggcaaataactagaaaatctagaagaaatggataaatttcctcgacacatacaccctcccaagactaaaccacgaagaagttgaatctctgaatagaccaataacaggagctgaaattgtggcaataatcaata

SEQ ID NO: 222141 - DNA, 584 bp, Homo sapiens
ttaatactgatgaaggaaggagatttgaattttatgacacttactacagtttgttataagacaggtggttatttaaatttgcccgctctgtgccctcaatgaaaagtgtaaatgccagcaacacatgtatttttaaatcttctagtagccacataaaacatttaaaagaaatagttaaaattaattctaaagtaatatatctaaaatatgatcacttcaatattaatataaaaattattaatgagatcttcttatattattcttatgctatgtcttggaaattcagtgtacattttataattttagcacagtctgttcggactagctgcatttaataagctcagtcacatgtgcccagtgaaatataaactaccatcagagaatactataaacccctctaggcaaataactagaaaatctagaagaaatggataaatttcctcgacacatacaccctcccaagactaaaccasgaagaagttgaatctctgaatagaccaataacaggagctgaaattgtggcaataatcaatagtttaccaagcaaaaagagtccaggaccagatggattcacagccgaattc

SEQ ID NO: 222142 - DNA, 584 bp, Homo sapiens
ttaatactgatgaaggaaggagatttgaattttatgacacttactacagtttgttataagacaggtggttatttaaatttgcccgctctgtgccctcaatgaaaagtgtaaatgccagcaacacatgtatttttaaatcttctagtagccacataaaacatttaaaagaaatagttaaaattaattctaaagtaatatatctaaaatatgatcacttcaatattaatataaaaattattaatgagatcttcttatattattcttatgctatgtcttggaaattcagtgtacattttataattttagcacagtctgttcggactagctgcatttaataagctcagtcacatgtgcccagtgaaatataaactaccatcagagaatactataaacccctctaggcaaataactagaaaatctagaagaaatggataaatttcctcgacacatacaccctcccaagactaaaccacgaagaagttgaatctctgaatagaccaataacaggagctgaaattgtggcaataatcaatagtttaccaagcaaaaagagtccrggaccagatggattcacagccgaattc

SEQ ID NO: 222143 - DNA, 548 bp, Homo sapiens
ctgccttctttgcagtttcaaactctgagtgagtagcctttgtctgtcttcatttggttggtcttcatttacttctacttgccctggtgttttttttctttcctcatcatgtggtagaggggttaagtaagtgggctccagaaccatgctaacttgtgtttgaatagaggcatcaatgtttgtgtggcctttggtgagttactcaaccctctrtatctcagtttccttatctgtaaaactggataactggatttgactcaaaagagctatgtgagaattaggtgacgtgatacccgtcaaagcatttagaacactggcatgctgatggaagctatttatatcagctttttcacaatgaagcccattgtcccattaccatctcggttgacctgcatcatcaggtgtatatcctattaagatgcaaattctgtctgggagaggcagtgcatgaaactcttggcatttactgacaaatgaacttcaattagcaagtaaaatttcttagcctaggaagattcatggaactattatcagaggtgtttgaacca

SEQ ID NO: 222144 - DNA, 538 bp, Homo sapiens
tttgcagtttcaaactctgagtgagtagcctttgtctgtcttcatttggttggtcttcatttacttctacttgccctggtgttttttttctttcctcatcatgtggtagaggggttaagtaagtgggctccagaaccatgctaacttgtgtttgaatagaggcatcaatgtttgtgtggcctttggtgagttactcaaccctctatatctcagtttccttatctgtaaaactggataactggatttgactcaaaagagctatgtgagaattaggtgacgtgatacccgtcaaagcatttagaacactggcatgctgatggaagctatttatatcagctttttcacaatgaagcccattgtcccattaccatctckgttgacctgcatcatcaggtgtatatcctattaagatgcaaattctgtctgggagaggcagtgcatgaaactcttggcatttactgacaaatgaacttcaattagcaagtaaaatttcttagcctaggaagattcatggaactattatcagaggtgtttgaac

SEQ ID NO: 222145 - DNA, 532 bp, Homo sapiens
gatgctacccactagacattgccaccctagttttctttcttattccttccatttgctatgattttcatcttcccccatttcttattattttaggtaccacctgtctatagaagacttcattcactgaaagtctttcctactaagtgggggcacacagcttacgtatctctgggcacaacttctagttgtctgtgcttaattgaagctaaatctgcctaaatcattaacacatacagtttatctrtataaatttgaggttgtagcaatgttgctggctgaagaacttgaactgcaaggtggatggtgccattcacaggcttaagatgctctcgttgttttgagtgatcaagcagactaaagtatgtggccttccatttaataaatgaacactgttggtaactcttcaactgcaacatggaaggctctccccacccctgcacaacccaaccactgacattgcacttgatcatgagctctgtgagggcaggagccatgctctgtttttattgttgcatccctagttgtaatggaa

SEQ ID NO: 222146 - DNA, 413 bp, Homo sapiens
tatttgtgatgatgttatttgttatttgttatgaatggagctgaccagggtcagggtggtgaagggttgacaacctccctgttttcctttctgtgttttcctytcctcccttgtaatcagaattcttataccaggaaggggaacatgaggaagctgattaaaagtgtgggctccaggatcagactgcctgggtttggctggaaactgaggccacctcctaccacttcaggccagttccccctcagcctgggaagcctcccgttgaagttgagtccccctcaagctatagcgattgaatgcagaataaccctaatcatgcctgtctatgattccagtaattgtaaggggcctaaatgagataaattgcatagagtaaagtaataataataaatattagatattatgttgctggt

SEQ ID NO: 222147 - DNA, 576 bp, Homo sapiens
ctagttgcacagagggctaaaagccactcacattctgaatcaagtattacggagatgacttttcattagtgaaaatatctaattttcattcaggataatggcacttacaggtttgtgaataggaggtgaatctaatgataaaatgtccatccagagggatcatcactaaaatgaagccttaaccaagaaagatctaataaattaatattaaaggcaattatgggttggataagtataatttgtttccaaggaaaaaggagcagggctagcaatgcaacgcacaggcaagaacagataggttcagaagccagaatccctcccagccatggagaaatgcctttgcaggtgctgggccttggttgtagaaagagcacaattcaagttcattggcaaggtcaatgtagggtcactggtggcccctccatctctgactcatggttgtgcttgttgatggggaaaatgaaaacacctaatcctttgagtcctctaggaattcaccctcaatgtactgtagggrcttttctgcaaagcgactacagtggtccctttttcagttttccacaactgcaccaaagc

SEQ ID NO: 222148 - DNA, 596 bp, Homo sapiens
ggtctaaatctgaaatggtggtagaggaaatgaaattgaggtataggttgagaatttcttatccaaaatgcttaagaccagaagttttaggattcttggaatattagcattatgctttctcacccattgaacatcccaaacccagaatctgatawccacaatacaaaatgttccaatgaacattttgagtgtcatgtcagtactcagaaagggttcagatttcggagaatttcacgtgacagttttgaactgggattaatcaacctgtagtgtattcaaaaacctgaataaaggtgaaagtcacaggagtcagaatggaataggtaggaacactaaagagaggcaggtgtcaaagacaactcacagatttaaagtcttggaaacggggaggatgttgctgaaataggtaccagtttcaggaggaaggtaatattttggtttgggatatggatagtttgattaacaaagaaaattgctaacttccttacaaaattggtggctctacagttagttttcaaatggaactgaacatcagcccaatgacaattatacaatctgagctgatacccatttactggcctggtactgactttcta

SEQ ID NO: 222149 - DNA, 596 bp, Homo sapiens
ggtctaaatctgaaatggtggtagaggaaatgaaattgaggtataggttgagaatttcttatccaaaatgcttaagaccagaagttttaggattcttggaatattagcattatgctttctcacccattgaacatcccaaacccagaatctgatatccacaatacaaaatgttccaatgaacattttgagtgtcatgtcagtactcagaaagggttcagatttcggagaatttcacrtgacagttttgaactgggattaatcaacctgtagtgtattcaaaaacctgaataaaggtgaaagtcacaggagtcagaatggaataggtaggaacactaaagagaggcaggtgtcaaagacaactcacagatttaaagtcttggaaacggggaggatgttgctgaaataggtaccagtttcaggaggaaggtaatattttggtttgggatatggatagtttgattaacaaagaaaattgctaacttccttacaaaattggtggctctacagttagttttcaaatggaactgaacatcagcccaatgacaattatacaatctgagctgatacccatttactggcctggtactgactttcta

SEQ ID NO: 222150 - DNA, 596 bp, Homo sapiens
ggtctaaatctgaaatggtggtagaggaaatgaaattgaggtataggttgagaatttcttatccaaaatgcttaagaccagaagttttaggattcttggaatattagcattatgctttctcacccattgaacatcccaaacccagaatctgatatccacaatacaaaatgttccaatgaacattttgagtgtcatgtcagtactcagaaagggttcagatttcggagaatttcacgtgacagttttgaactgggattaatcaacctgtartgtattcaaaaacctgaataaaggtgaaagtcacaggagtcagaatggaataggtaggaacactaaagagaggcaggtgtcaaagacaactcacagatttaaagtcttggaaacggggaggatgttgctgaaataggtaccagtttcaggaggaaggtaatattttggtttgggatatggatagtttgattaacaaagaaaattgctaacttccttacaaaattggtggctctacagttagttttcaaatggaactgaacatcagcccaatgacaattatacaatctgagctgatacccatttactggcctggtactgactttcta

SEQ ID NO: 222151 - DNA, 596 bp, Homo sapiens
ggtctaaatctgaaatggtggtagaggaaatgaaattgaggtataggttgagaatttcttatccaaaatgcttaagaccagaagttttaggattcttggaatattagcattatgctttctcacccattgaacatcccaaacccagaatctgatatccacaatacaaaatgttccaatgaacattttgagtgtcatgtcagtactcagaaagggttcagatttcggagaatttcacgtgacagttttgaactgggattaatcaacctgtagtgtattcaaaaacctgaataaaggtgaaagtcacaggagtcagaatggaataggtaggaacactaaagagaggcaggtgtcaaagacaactcacagatttaaagtcttggaaacggggaggatgttgctgaaataggyaccagtttcaggaggaaggtaatattttggtttgggatatggatagtttgattaacaaagaaaattgctaacttccttacaaaattggtggctctacagttagttttcaaatggaactgaacatcagcccaatgacaattatacaatctgagctgatacccatttactggcctggtactgactttcta

SEQ ID NO: 222152 - DNA, 597 bp, Homo sapiens
cctctttgttcatccctcatccacattctcaccccaggctgcacatctacagaataagttccgagtctgtcatttggggagggtagaaacaatgtctcattcattcgtcttagtgttcctacagcttaaaatacagtcagtgtttatttatttttactttttattttttaacatttattttagtttcagagggtacatgtgcaggtttgttacaaaggtaaatgcatgtcataggggtttgttgtacagattatttcatcacccacgtactaagcctagtacccaatagttatttttttctgctcctctccctcctcccaccctccaccttcgagtagtcctcagtgtctgttgttcccttctttgtgttcatgtgttctcatcatttagctcccacttataagtgagaacatgtggtatttggttttctgttccygtgtttgtttgctgaagataatggctcccacctccatccatgtccctgcaaaggacatgatctcattccttgttatgtctgcatagtattccatggtgtatgtgtaccatattttctttatccaatctattcttgatgagcattagattgattccatgtct

SEQ ID NO: 222153 - DNA, 458 bp, Homo sapiens
aaagtagggacatcttccctggaagtgtcatccaatctcttctctctgctgtctctagaatgccttctctcctccccaccaattttccaatactacatagtctggacctgttacattgaaatgatcagtttatgtagctgtagcctcaaaaagaccatgatctatcagaggagactctgtcgtgttcattattgtgtcatgtttcagcccggggcactgtatgtaagagggagctagtttaatgatcaytgaattgaaggacacaactccatgtgatttttttttctttttttagatggagtttcgctcttgttgcccaggctggagttcagtggtgtgatctcggctcattgcaacctcagcctccagggttcaagggattctcctgcctcagcctcccaagtagctgggattacaggcatgagccaccgtgctgggcctccatgtgggtttgaaat

SEQ ID NO: 222154 - DNA, 458 bp, Homo sapiens
aaagtagggacatcttccctggaagtgtcatccaatctcttctctctgctgtctctagaatgccttctctcctccccaccaattttccaatactacatagtctggacctgttacattgaaatgatcagtttatgtagctgtagcctcaaaaagaccatgatctatcagaggagactctgtcgtgttcattattgtgtcatgtttcagcccggggcactgtatgtaagagggagctagtttaatgatcattgaattgaaggacacaactccatgtgrtttttttttctttttttagatggagtttcgctcttgttgcccaggctggagttcagtggtgtgatctcggctcattgcaacctcagcctccagggttcaagggattctcctgcctcagcctcccaagtagctgggattacaggcatgagccaccgtgctgggcctccatgtgggtttgaaat

SEQ ID NO: 222155 - DNA, 530 bp, Homo sapiens
atgcaggtcttacttttgtgtgcgaaatgtttgatattaacagttagtattaattataaaattattagaagccatctattgtaataattgataaatcacacacacatacatatatatatagagagagatattatttggatacatatgtgaatatatgtatatatagtgatagttaaatatcatctacatgtgaatatatgcatatacagtgatatatatctatgtacatatctatgtatgtacatattatatcacttagagatatatatttgtatatattgcaatagatatatgtattacatatatgtgataactatctcagatatatacattatatataaatgtacatgcatttatacaaacatatcaaacatatacatgtatcrtatagttattcagaaaatatattaaatacatatttaaatatatatgtgtatatgtatatatgcacgcacatacgtatctatattgtcattcatactggaatttgaacctaaggaaactagtttcagagaccacgctgtcatcaa

SEQ ID NO: 222156 - DNA, 530 bp, Homo sapiens
atgcaggtcttacttttgtgtgcgaaatgtttgatattaacagttagtattaattataaaattattagaagccatctattgtaataattgataaatcacacacacatacatatatatatagagagagatattatttggatacatatgtgaatatatgtatatatagtgatagttaaatatcatctacatgtgaatatatgcatatacagtgatatatatctatgtacatatctatgtatgtacatattatatcacttagagatatatatttgtatatattgcaatagatatatgtattacatatatgtgataactatctcagatatatacattatatataaatgtacatgcatttatacaaacatatcaaacatatacatgtatcatatagttattcagaaaatataytaaatacatatttaaatatatatgtgtatatgtatatatgcacgcacatacgtatctatattgtcattcatactggaatttgaacctaaggaaactagtttcagagaccacgctgtcatcaa

SEQ ID NO: 222157 - DNA, 435 bp, Homo sapiens
actcagccatacagagctgatatgttgatctctgtgtttctactaagccagatatatacttccaccaagaaatttagggcagygtgttttgcatttgttcatttagaggtgtatcttctttcccactggacttaaagagcattgagagtagagttaatatgtcatctgtttcctaactaacagtatttaccagagttctgctcaaaaatttgaatgaatgtcaagtgacttcaggttgttcaacctgtcttcaaaaacagacctgccagtgatcttaaccatctcttctagaaaatatagctactaccttgagtttcacatgttctgtggcaactcagtaggcatgttaaaattctggaaaagcttttgtgaattgtggtgcacattctatctggtttctctgatacttccaaaagttagagtcaataaagaatt

SEQ ID NO: 222158 - DNA, 435 bp, Homo sapiens
actcagccatacagagctgatatgttgatctctgtgtttctactaagccagatatatacttccaccaagaaatttagggcagtgtgttttgcatttgttcatttagaggtgtatcttctttcccactggacttaaagagcattgagrgtagagttaatatgtcatctgtttcctaactaacagtatttaccagagttctgctcaaaaatttgaatgaatgtcaagtgacttcaggttgttcaacctgtcttcaaaaacagacctgccagtgatcttaaccatctcttctagaaaatatagctactaccttgagtttcacatgttctgtggcaactcagtaggcatgttaaaattctggaaaagcttttgtgaattgtggtgcacattctatctggtttctctgatacttccaaaagttagagtcaataaagaatt

SEQ ID NO: 222159 - DNA, 436 bp, Homo sapiens
actcagccatacagagctgatatgttgatctctgtgtttctactaagccagatatatacttccaccaagaaatttagggcagtgtgttttgcatttgttcatttagaggtgtatcttctttcccactggacttaaagagcattgagagtagagttaatatgtcatctgtttcctaactaacagtatttaccagagttctgctcaaaaatttgaatgaatgtcaagtgacttcaggttgttcaacctgtcttcaaaaacagacctgccagtgatcttaaccatctcttctagaaaatatagctactaccttgagtttcacatgttctgtggcaactcagkaggcatgttaaaattctggaaaagcttttgtgaattgtggtgcacattctatctggtttctctgatacttccaaaagttagagtcaataaagaattc

SEQ ID NO: 222160 - DNA, 436 bp, Homo sapiens
actcagccatacagagctgatatgttgatctctgtgtttctactaagccagatatatacttccaccaagaaatttagggcagtgtgttttgcatttgttcatttagaggtgtatcttctttcccactggacttaaagagcattgagagtagagttaatatgtcatctgtttcctaactaacagtatttaccagagttctgctcaaaaatttgaatgaatgtcaagtgacttcaggttgttcaacctgtcttcaaaaacagacctgccagtgatcttaaccatctcttctagaaaatatagctactaccttgagtttcacatgttctgtggcaactcagtaggcakgttaaaattctggaaaagcttttgtgaattgtggtgcacattctatctggtttctctgatacttccaaaagttagagtcaataaagaattc

SEQ ID NO: 222161 - DNA, 629 bp, Homo sapiens
gacttgcacttccctaatgtctaatgaagctgaacatcttttcatgtgcttattggtcattagtgtatctttttcaaagaaatagccatccaaatatttgcctatttttaatttaattaattaattaattttgagacagggtctcactctgtctcccaggctggagtgtagtggcatratcttggcttacggcaacctccacctcctgggctcaaacgatcctcccacctcagccccctgagtagctgggactataggagcatgccaccatgcccagctagtttttgttttattttgtagaaagggggtctcactacgttgtccaggtctcaaactcctaggctcaagtgatccaccttccttgatttcccaaagtgctaaagttacaggtgtgagccactgcacccagccaatactgttatttttaatcatctatttattgttgcactgtaagaactttttgtatattccagattcaaatcccttattgatctacttgcaaagattttcttccattctgtgagttgtcaatctacctttatgatgatgttctttgacgtaggacaccttgcctaattcaagttcatgaagatttactcctatgttttcttctgagttttatagttttg

SEQ ID NO: 222162 - DNA, 629 bp, Homo sapiens
gacttgcacttccctaatgtctaatgaagctgaacatcttttcatgtgcttattggtcattagtgtatctttttcaaagaaatagccatccaaatatttgcctatttttaatttaattaattaattaattttgagacagggtctcactctgtctcccaggctggagtgtagtggcataatcttggcttacggcaacctccacctcctgggctcaaacgatcctcccacctcagccccctgagtagctgggactataggagcatgccaccatgcccagctagtttttgttttattttgtagaaakggggtctcactacgttgtccaggtctcaaactcctaggctcaagtgatccaccttccttgatttcccaaagtgctaaagttacaggtgtgagccactgcacccagccaatactgttatttttaatcatctatttattgttgcactgtaagaactttttgtatattccagattcaaatcccttattgatctacttgcaaagattttcttccattctgtgagttgtcaatctacctttatgatgatgttctttgacgtaggacaccttgcctaattcaagttcatgaagatttactcctatgttttcttctgagttttatagttttg

SEQ ID NO: 222163 - DNA, 629 bp, Homo sapiens
gacttgcacttccctaatgtctaatgaagctgaacatcttttcatgtgcttattggtcattagtgtatctttttcaaagaaatagccatccaaatatttgcctatttttaatttaattaattaattaattttgagacagggtctcactctgtctcccaggctggagtgtagtggcataatcttggcttacggcaacctccacctcctgggctcaaacgatcctcccacctcagccccctgagtagctgggactataggagcatgccaccatgcccagctagtttttgttttattttgtagaaagggggtctcactacgttgtccaggtctcaaactcctaggctcaagtgatccaccttccttgatttcccaaagtgctaaagttacaggtgtgagccactgcacccagccaatactgttatttttaatcatctatttattgttgcactgtaagaactttttgtatattccagattcaaatcccttattgatctacttgcaaagattttcttccattytgtgagttgtcaatctacctttatgatgatgttctttgacgtaggacaccttgcctaattcaagttcatgaagatttactcctatgttttcttctgagttttatagttttg

SEQ ID NO: 222164 - DNA, 629 bp, Homo sapiens
gacttgcacttccctaatgtctaatgaagctgaacatcttttcatgtgcttattggtcattagtgtatctttttcaaagaaatagccatccaaatatttgcctatttttaatttaattaattaattaattttgagacagggtctcactctgtctcccaggctggagtgtagtggcataatcttggcttacggcaacctccacctcctgggctcaaacgatcctcccacctcagccccctgagtagctgggactataggagcatgccaccatgcccagctagtttttgttttattttgtagaaagggggtctcactacgttgtccaggtctcaaactcctaggctcaagtgatccaccttccttgatttcccaaagtgctaaagttacaggtgtgagccactgcacccagccaatactgttatttttaatcatctatttattgttgcactgtaagaactttttgtatattccagattcaaatcccttattgatctacttgcaaagattttcttccattctgtgagttgtcaatctacctttatgatgatgttctttgacrtaggacaccttgcctaattcaagttcatgaagatttactcctatgttttcttctgagttttatagttttg

SEQ ID NO: 222165 - DNA, 548 bp, Homo sapiens
gtggagaacacattgagcagatccagtaaccattagcaaaagtcttagtaaaaacaaggaaaaaaattgtatatatgtatatataatattttatatatatatataatgaggttattgaattgtgggatgagaagtgataattgtgactgaattaataatttgttgaagaatttctatgaactgagtaatagaacaaatcttgagactaaagtggccctttgagcaacaacaaaaaaagtagacacttacttaaatgtttcttaagtttctgaactcaaaggatgtacaaaaaaatcagaagtgttagcctcaaatttgtccgttgaaaatatagatgytaacaaaagatattgacttcttttctaattctgtggaaaaaaaatattaggagcgagacatttgtccacaaaaattatcatttaagttgagggcaaaggtatcatttatcataaagcatgaaaggactcaaaattgttgtcaccaacaaagctttgttatcaaaaatgcactggagataaatgaaacaaaaatatacaagagaagaagaa

SEQ ID NO: 222166 - DNA, 580 bp, Homo sapiens
aaggacccatattgccattcacaggcagactcaacagcgtttgcctcacccatgccatgtgtcactctcctcttactttgacacccaccgggtaaccatgcctgtgtaacccacacatacagggaagttaaaatcttacagtgcaaaatttgagcaatgagaagtaaaaccttggagataaacctccccttcctcccttcaccccagacaggagattcacaggagtagttttagatggygtttctgaagatgtcctgcaacttcaagcagttggcttattacaaagaggtggctagctctgtaacatattcccatccattctcctcctcacactcctgcttctctggaatggcacaactcataaagtcttggcataagtgacctctgattctattttgttaggacacctggaagaatcatatgggaactcactaatgatgatgtgttcagccatgaattgagatgaagggttctgacaagatagctgagacagttcaaagctggcgacgcaatgatggttttttgaatgttgaacatagtgatggactgaagtaaataaggtgacgatgccacaacttct

SEQ ID NO: 222167 - DNA, 580 bp, Homo sapiens
aaggacccatattgccattcacaggcagactcaacagcgtttgcctcacccatgccatgtgtcactctcctcttactttgacacccaccgggtaaccatgcctgtgtaacccacacatacagggaagttaaaatcttacagtgcaaaatttgagcaatgagaagtaaaaccttggagataaacctccccttcctcccttcaccccagacaggagattcacaggagtagttttagatggtgtttctgaagatgtcctgcaacttcaagcagttggcttattacaaagaggtggctagctctgtaacatattcccatccattctcctcctcacactcctgcttctctggaatggcacaactcataaagtcttggcataagtgacctctgattctattttgttaggacacctggaagaatcatatgggaactcactaatgatgatgtgttcagccatgaattgagatgaagggttctgacaagatagctgagacagttcaaagctggcgacrcaatgatggttttttgaatgttgaacatagtgatggactgaagtaaataaggtgacgatgccacaacttct

SEQ ID NO: 222168 - DNA, 527 bp, Homo sapiens
gctgacgaatctctgtgactagagttcttggtggaaaatgctacatgaaactgggctctatgatctcaatgaggatgacaggatactagcatgacaaggtaccgaatggcaacagtggactatcagaggcaaagcagctgtaaataccagggtagcttgaagatgtgattggcagccaaggcatctttacctgcagaagatctgtggtgatagctaatacatcactgcatttttaggcatgagacaaatggacaataagctagaatgatacttaatttgtatattttaaaaaatcaagatctggtgagtagatggcttatatcagctgccacaatagaatattgccatctttctatcaggatccacatctaattccactcacagatctgaagccctttaattaaaaagtargccagttgctaccttgaaggtccctgcaaatactgtctttaaatatccctctgatctttcactaatagggtctgtgttatttatagaataaccaagggaaaataagaattgtcaga

SEQ ID NO: 222169 - DNA, 229 bp, Homo sapiens
agggggaaaggtccactgtactgatccgggtaatgattttttggatatgatcccaaaagcacagtcmataaaagcaaaaacagacaaatcagatggaatcaaactaaaaggattatgcagagcaatcaaaacaattagcaaagtgaaaagacaacccatagaatgaaagaaaatatttgcaaaccatacacctgataaggggttactatccaaaatatataaggaacgc

SEQ ID NO: 222170 - DNA, 229 bp, Homo sapiens
agggggaaaggtccactgtactgatccgggtaatgattttttggatatgatcccaaaagcacagtcaataaaagcaaaaacagacaaatcagatggaatcaaactaaaaggattatgcagagcaatcaaaacaattagcaaagtgaaaagacaacccatagaatgaaagaaaatatttgcaaaccatacmcctgataaggggttactatccaaaatatataaggaacgc

SEQ ID NO: 222171 - DNA, 609 bp, Homo sapiens
tagtaatattcctggacagcattaataaaaggatcttatgctactctgattcggagaacaaagctctcatagactagaatttagtttttcaatccacttttttttagcggtgaaaagaatgggtttggaaacttacggatatgaaatgaaaaaggttttaaacaacaactgtgatagatgccataaagatattcagaattctaggtttaytttacgtgataccgtgccaataatacttgaccttcctccctccctcacatacaatagcgaatatttcaggcccttgtagagcttctattctagtggagagcttacatctcctttccattaaaatactgaaggagctactcatacaaacacttgctacactaaacatccaaaactaagggagaatttctgcctgagtataactatttatgtacatgcaatgatgactatgaacttctagagaaaacttgggtctctggctcttatcaaggatcaagtctcatttggagggaagtactaagttttaaccaagcttgcaagggaagaactaagaggctgcagccgctggctgtgagccctctgggcactcaatagatgcatcaaatcttaaggaagcttaaa

SEQ ID NO: 222172 - DNA, 609 bp, Homo sapiens
tagtaatattcctggacagcattaataaaaggatcttatgctactctgattcggagaacaaagctctcatagactagaatttagtttttcaatccacttttttttagcggtgaaaagaatgggtttggaaacttacggatatgaaatgaaaaaggttttaaacaacaactgtgatagatgccataaagatattcagaattctaggtttactttacgtgataccrtgccaataatacttgaccttcctccctccctcacatacaatagcgaatatttcaggcccttgtagagcttctattctagtggagagcttacatctcctttccattaaaatactgaaggagctactcatacaaacacttgctacactaaacatccaaaactaagggagaatttctgcctgagtataactatttatgtacatgcaatgatgactatgaacttctagagaaaacttgggtctctggctcttatcaaggatcaagtctcatttggagggaagtactaagttttaaccaagcttgcaagggaagaactaagaggctgcagccgctggctgtgagccctctgggcactcaatagatgcatcaaatcttaaggaagcttaaa

SEQ ID NO: 222173 - DNA, 609 bp, Homo sapiens
tagtaatattcctggacagcattaataaaaggatcttatgctactctgattcggagaacaaagctctcatagactagaatttagtttttcaatccacttttttttagcggtgaaaagaatgggtttggaaacttacggatatgaaatgaaaaaggttttaaacaacaactgtgatagatgccataaagatattcagaattctaggtttactttacgtgataccgtgccaataatacttgaccttcctccctccctcacatacaatagcgaatatttcaggcccttgtagagcttctattctagtggagagcttacatctcctttccattaaaatactgaaggagctactcatacaaacacttgctacactaaacatccaaaactaagggagaatttctgcctgagtataactatttatgtacatgcaatgatgactatgaacttctagagaaaacttgggtctctggctcttatcaaggatcaagtctcatttggagggaagtactaagttttaaccaagcttgcaagggaagaactaagaggctgcagccrctggctgtgagccctctgggcactcaatagatgcatcaaatcttaaggaagcttaaa

SEQ ID NO: 222174 - DNA, 572 bp, Homo sapiens
gatctgaactgtaaagcatacaaggaaaaataggggaaaatcttcatgacattggatttggcaaggatttcttggatataacaacaaaagcataggcaacaaaagtaacagcttctgtgcaaagggcacaatccacagagtgaaaatgcagcctacagaatgggagaaaatatttgcaaatcatgtatctgataagaggttaatatccagaatataaaaaaaaatgcctttaacaagaaaacagcccaagcttttaaaacagacaaatcctttgaataaacatttctccaaagatgatatataaatgaccacgtatatgcaaagggacccaacattactaatcattaggaaaacgcaaatcaaaaccccaatggatatcacctcacrcccattaggaattctactatcagaaaaaaaaaaaaaaatggaagttaaatgttggtaaggacaggaaaaaattaccaaggatgggaaaaatagtgttggtgggaatgtaaaattgtaccgccactataaaagataaccctcaaaaaaaataaaataaaatagaattgccgtatgatccaggaatt

SEQ ID NO: 222175 - DNA, 145 bp, Homo sapiens
tacctctctctttctctacatgggtatatggccaccctatgtcccctgaaattgtttataattctaccaccagcmacaacagagcgatttattagctacctcttagttataatttctagaggaaaattcgaattgactcagtttt

SEQ ID NO: 222176 - DNA, 565 bp, Homo sapiens
aagtagacaaaaggaaataattagaataagacatatcaaataaataggagaaacaattaaatgaagtcaaaagttgattatttgaaaatatcaataaagctgataagccctagcagaactgaccacaaaaaaagggagagaaagtaaaattcactgcaggcaagaatgaaagagtacataattagcatagataatacaagcattaaaaagataagaaaggggggactgtgatggattacttcatgccagtaaatttgaaatgtagataaaatgggcaaatttcttatrtatcttttagggaagttgaaattgtcattaaaatatctcctagagaaaaatccagatctggatgatttcactggtaaattctgtcaaacactttaggaagaaataataccagtcttccacaaaaaatagaagagtgaaaacaattctcaagtaggtttttgataccaaatcctaacaaagacattataataaaagaaaattacagaccaatatccatctgaataaaagaaaattacaggccaatatccctatgaatatgagtataaatataaaatta

SEQ ID NO: 222177 - DNA, 369 bp, Homo sapiens
tgagccaaataaactttattctttgttaaagaatagtgaaatatgtttccatctttaaatgcatcatayaacgcatttttgatccacaattgtgtctgcctactaccactatactcagcatataagaagcatgaaaatatcagcacattaatttagaactttctgcttctataattcccttttcttttgcactatttcactagctctttaatttggcattctgatgaccactactgattttctgaaaatgtggcttctggactgaaacctcagcacttctaattgcatgcctcagtaatgcaagtaaatactggtactacactgtatcgggacaatgtgcattcaatatggtagtcttctgtagacaga

SEQ ID NO: 222178 - DNA, 549 bp, Homo sapiens
aggaaggtatgtaaacttgtctattgtcccccacttaattctttgaaatcacaatccttaattaggagatataacaaacattattaaaagggrgtcacataacactggaacacaccgaatagctctatcctgattgcacttgcttgaaataaatgcagggaaactttattgtaacttctctttttaatgagctttaaccagtgccggagcttcctggtcaggtacttttgtaagctgcagtacttacaagtagtaaattattaggtggtactgaaaaaattcaagacagtacttttaatggtttagaggtatctaatctcttcccagctggtttgttatgacgctcaaaggtcttggaaattttagggaaaaccttgatcattaaaatttaaggcaaaaaataatttattttgtgatattaatctttcaaatatatgtgttgtgttaacatgcacagatgtctgtgggtggtgagattatatattttctatgcttttaatgatattttccaaattttatacagtgaatgtgtatgatttttataatcag

SEQ ID NO: 222179 - DNA, 499 bp, Homo sapiens
cagatcttagaatccatttattaaaaagggacaataataatgatgattattatgatgattcactcaacaaacacaaaagactacaataaagtgcttgggtttcagtcttaagatccatttattagtagctctgtgattttgggcaagttactaaatcttcctgtgtcytagcttttgtaaaattgggagaaagcatttgttgggagaattaaaatagaataatccacacaaagtagtgaaacctgtccagggcattacaaatgtctaataaataatatccttgttatcattcatcatgtactaagtgccaaaaactttgtccttgcctgtgagttaaagttctcagctactgaacctactgcgaaagtaataaacttagtcctgtgtgagcagctctaacatttcacaacaatagacctcaaaaatcatatgagctcttcccctggcctactcccaaactggagatgaatgtcaacgtatttcaagctaggtttgaaat

SEQ ID NO: 222180 - DNA, 440 bp, Homo sapiens
gactactcagtgggttataggagctcaggaattaggtaggagtcaatttgttgatcttgcagaactacagtgtgttggtcttcagaggctgaagtgttgtctacaagtcccagtgtactttgagaacaaatagtggcctgagaaagagactggggccaactgacccagctagagaaagttcaggttgaagaagggaacacagcagagcagggctttgcagtgagatcacctattcaatatccccttctgcagacaaggaaacttaaacactaaatagacattttctaagaaaaaaatatttttagcatttgtaatgtatttccaaatacattaccaggtgttacttaggttttaccatacttttactgccatcartaatgatcatatgtttttgtatttctctgtcaagaatgtcatgtatcataaactttacaagttct

SEQ ID NO: 222181 - DNA, 562 bp, Homo sapiens
ggcacagaaaaacaaataccacatcttctcacttaaatgtggaatctaaaacaattgaacacatgtaagcatagagcaaaatgctggttaccagaggctgaggggtgrggaggcaatggggagatgttggccaaaggtgcaatgtttcagttagaccggaggagtaagtatttgaggtgatggatatgttaattacctcaattcaatcattccatattatatatcatagcatcactttgtacaccgtaagtataggcacttataatttgtcaatattcaatagtataaataaaaatttgaaaaaactttctgaccatcacaatatccaagagaaataaaaatatatgtcctaccagaaacttgtagataaatattcatagcagcattattcataataactaaaaagtgaaaacaacccactctccatcccctgatgaatggataaacaaaatgtgttttatccaaacactggaatattattcagccataaaagacataaactattgatacttactctaacataatgaagcttgaaaacatgataatattttaaagaaggcag

SEQ ID NO: 222182 - DNA, 562 bp, Homo sapiens
ggcacagaaaaacaaataccacatcttctcacttaaatgtggaatctaaaacaattgaacacatgtaagcatagagcaaaatgctggttaccagaggctgaggggtgaggaggcaatggggagatgttggccaaaggtgcaatgtttcagttagaccggaggagtaagtatttgaggtgatggatatgttaattacctcaattcaatcattccatattatatatcatagcatcactttgtacaccgtaagtataggcacttataatttgtcaatattcaatagtataaataaaaatttgaaaaaactttctgaccatcacaatatccaagagaaataaaaatatatgtcctaccagaaacttgtagataaatattcatagcagcattattcataataactaaaaagtgaaaacaacccactctccatcccctgatgaatggataaacaaaatgtgttttatccaaacactggaatattattcagccataaaagasataaactattgatacttactctaacataatgaagcttgaaaacatgataatattttaaagaaggcag

SEQ ID NO: 222183 - DNA, 367 bp, Homo sapiens
agaaatgttaaaagaagttctttagagagaagggaaacaaaatatagatcagaaaccaggatctacataaggaaggaaaagcattggagaataaattagtgaaggtaaagtaaaaactttcatttttaaattttagttgatctaagagataagttgttcagcataatagcaacaatgtatttgattatgtgtgtcatatataactgtgtataaatatatatacacacacatacatacacttagatatgcttatgtgtaagtgaaattaatgacagcaatgatataagggacaagaasgaagaattaggattatcttcttattataaggtactcatactacctgtgaagtagtatagtgttatttgaa

SEQ ID NO: 222184 - DNA, 367 bp, Homo sapiens
agaaatgttaaaagaagttctttagagagaagggaaacaaaatatagatcagaaaccaggatctacataaggaaggaaaagcattggagaataaattagtgaaggtaaagtaaaaactttcatttttaaattttagttgatctaagagataagttgttcagcataatagcaacaatgtatttgattatgtgtgtcatatataactgtgtataaatatatatacacacacatacatacacttagatatgcttatgtgtaagtgaaattaatgacagcaatgatataagggacaagaaggaagaattaggattatcttcttattataaggtactcayactacctgtgaagtagtatagtgttatttgaa

SEQ ID NO: 222185 - DNA, 608 bp, Homo sapiens
gtctccgtctcaaaaaaaaaaaaaaactcatatggataggcttaagtttttaatttgcaattgggtcttttacagaatttcttctgggctatattttatagcatttccctaattttcaaaactgttcttaaagtgcgggtgactttctaccaaagaaatccctcaaattaaaattttgagggaaacacatagttttatttactccttttaatctttttaattgaaatatactactatgtatacaatctacagatctaagtgcccagttcaatgagcttyaacaattctatacacctatgttatcttcatccaaaacaagatacagaacagcttcatcacctcagaaaatttctttgtgcccctttgcaatcacttctcaccctgtctctcaccgttcaaccacttcctgacttatatcacaatagatctgtttttcctatagtctgttattagacttcagacaatatcaggtgcattcagggtagtacggctgtagacctgttgtcagacttcaaataaatggaatcacacaggatgtactcatttgcatatggcttgtttcacttaaaatgttttcaagatgtatccacgttgcatgtatctgagtt

SEQ ID NO: 222186 - DNA, 537 bp, Homo sapiens
tctttgtgtgcaatctaagttttggacccaagggtggaggacctatcactgtacaatgctgagtaagacatggttttcaccgaagtcagtgaagttcccagtcctttctggcgcgagctgcattcccagacactccagctcttacggaaagaagcwctgtcttttgcgctagtgtttgtctaccgtcccctgtcctaaaataatgactgccctctacctgagggaaagggacttcaatggtggtaatctactcgcggctggctgcatccttaaaaaagcccatttctcttctactatcttcaagatcttggttaaccagattcacattgtatgtgccggactctttctcaggtgactgctctgtgcttttttatctaaagaagggcaagtcacccacgggtactaaccctcccccacccacatcaagggagaaacactcctctactcttttctggacattcctgttcagagtcgaggtaagggttgcacggccccgcccctccgttaccaagccttccctcgcctgcctcgcagcct

SEQ ID NO: 222187 - DNA, 588 bp, Homo sapiens
atgagataatgcatcaaaaatactgtgtccattttaaggcatggtctcagttgtctattcctgcataaacaatctaccccacaattcagtagctcaaaacaaccattttattgtatcttatgattttgtgggtcagtaatttggacaggtctcagctgagcaatttgttttccccatgcagtattgactgggtcacttgctggtattcagtggaaggcagggctgctctggaggtcccaggtaacttcacttatrttgtgtgcctgatgcctttgaggactgctggtggcctcaagacctctcctctctatagctccagcaaggtagtcagatttctttcatggcagctcagtatatcaagaggcctactggaaactgcaaggtttcttattgcccaggttcaggagtttatggcctagaactgcattctattggtcaagcaagtcatgaagaccagcttagatccaagggaggggaattagattctacctctgaataagagaagtagcaaaaaatttgtagccatcttgaatctaccacattccttttcctctggccacagacattattaccacaagcaaaataaac

SEQ ID NO: 222188 - DNA, 577 bp, Homo sapiens
tcgttcctgggaaaaaagtttaggcaaattcattcagctctacctgccaaagaattaaatctaatacgacattaaaggtgacaaagtgggtcataatctaacttgctgttgttgtttgcttgtggtgaattctctagcttccaaagatgtaatttttgttaatcagtccctcttggttcttcccctaatccctrgcccatcctcttactccatcactacctgatatgagacctttttctttgttttttattagggagcatgatcctctggttctggaaatctgaagtcaggccccaaactctgtgtgccatttctctacggaggtctacctccaagctctcgggcagataataaccaaaatttcaaagttctaggaggaatttcctttttaaaaaatctgctatttatgcagactgtcacttcttgagaatattacaatgaaagctttgagttgaagttttaggagctcaagacataatcctttcttcctcttttaagttcagatcaaattgggaaatagagaagtcaaacagagaattaataatgctacagtacttttattactgatcaaactaag

SEQ ID NO: 222189 - DNA, 631 bp, Homo sapiens
aaggtcaaccctcaggccaaattcagcccatccgacatgttttatttagcccacacaagtttgacccacttctaactgctcttgggaaatgagtgggtctgccaacactgggcctgccttcccacacagcgggagaacttgccccctttacacaggacagggatgtgttttccagtttgccacagtccctgccactccctgtccttgtcrtccctcattcacttaattatgatacttgcctggcatcttgcaggtttctgatgctgttaccccagtatagaccaagtgcagacagaatttcatttctgctttattaaggcacagtcttgagaaacccattggcttcacacacaattaattaatttgtgacaacaagctactatattggcttgcatgtcactttcacctctctgggcattagttttctctaatatttataaaagaaggacatgactttctaaggttccttgcagtaattatgcagttctattctaatagatgcttaagcataaaacccattttaatactgtccaaggatccaggataccttccagacatgatctcactcaatcttctctgctctgcagattgcacattataggtcaagagcaagctacaacacagcaataca

SEQ ID NO: 222190 - DNA, 631 bp, Homo sapiens
aaggtcaaccctcaggccaaattcagcccatccgacatgttttatttagcccacacaagtttgacccacttctaactgctcttgggaaatgagtgggtctgccaacactgggcctgccttcccacacagcgggagaacttgccccctttacacaggacagggatgtgttttccagtttgccacagtccctgccactccctgtccttgtcatccctcattcacttaattatgatacttgcctggcatcttgcaggtttctgatgctgttaccccagtatagaccaagtgcagacagaatttcatttctgctttattaaggcacagtcttgagaaacccattggcttcacacacaattaattaatttgtgrcaacaagctactatattggcttgcatgtcactttcacctctctgggcattagttttctctaatatttataaaagaaggacatgactttctaaggttccttgcagtaattatgcagttctattctaatagatgcttaagcataaaacccattttaatactgtccaaggatccaggataccttccagacatgatctcactcaatcttctctgctctgcagattgcacattataggtcaagagcaagctacaacacagcaataca

SEQ ID NO: 222191 - DNA, 518 bp, Homo sapiens
tcttgtgtttaccgtgtggattaaaccaattaattcaacacattttattgagcaccaactaagtcctaggctagatgccggcacagatatcttagcacagtattcaacaagcagtagtcatcattaaaatgccacgcacataagagcagacataaaactgggaactatatgacaatacttaatgtgattcatatttttttttccatctgattccttcattagattgtaggctacacaagggcatggtctgatttagcttgttcacagggtctgagacacagtagaagctcaacatatattggtttctgtgagtgaatgaataaataattagtaattctaattgttagatgcctgtgacatgaaagaaaagacatggaggatgagaagccaggtcttgcccaaacmaacttttgtcttttttttcactttctctaagcactgtctgggcatatgcatataatcctagccaagccaattcccagaatttacaacagccatatttgattgtacttaatttt

SEQ ID NO: 222192 - DNA, 581 bp, Homo sapiens
aacatctattgtgtatgatttgtaatatttttaaatttttccaaaattttaaaatagccagttagctgaaaaataaactcaactttttgagacagagtctcactctgttgcccaggctggactgcagtggtgtgatcttggctcactgcaacctccacctcctgggtttaagcaattctcctgcctcagcctcytgagtagctgggactataggcatgcgccaccacgtccagctaatttttgtattttttagtagagatgggttttcaccatattggccagctggtcttggactcttgaccttgtgatccacctgcctcggcctcccaaagtgctgggattacaggcgtgagccactgcacccggcctatttgatctttattttcaacaataaacccacaaacttagttaagcaaaatgagcatgtgttacttgaaattttaattattttacaaataactgttaactaaatttactgtcggaaaaagacattactcaatctgcaaactttaaagcattaggtcaggcaactaatttatttttatcattatttctttatttacagccaactagaaaatata

SEQ ID NO: 222193 - DNA, 581 bp, Homo sapiens
aacatctattgtgtatgatttgtaatatttttaaatttttccaaaattttaaaatagccagttagctgaaaaataaactcaactttttgagacagagtctcactctgttgcccaggctggactgcagtggtgtgatcttggctcactgcaacctccacctcctgggtttaagcaattctcctgcctcagcctcctgagtagctgggactataggcaygcgccaccacgtccagctaatttttgtattttttagtagagatgggttttcaccatattggccagctggtcttggactcttgaccttgtgatccacctgcctcggcctcccaaagtgctgggattacaggcgtgagccactgcacccggcctatttgatctttattttcaacaataaacccacaaacttagttaagcaaaatgagcatgtgttacttgaaattttaattattttacaaataactgttaactaaatttactgtcggaaaaagacattactcaatctgcaaactttaaagcattaggtcaggcaactaatttatttttatcattatttctttatttacagccaactagaaaatata

SEQ ID NO: 222194 - DNA, 466 bp, Homo sapiens
gctttgtcaaacaaagcatgaacactaggagtttctgacattttcataactatgagcatatgatttgcagttcatattgaataacgatgtaagaaatctgccaagaaagctccaaatactatttccagcactggttcataaccagttacagctgcctcaccacagaatgtgagcacaatagactaccatgttccatggtctcttgcttgcaaartttgtattgagttactaggagtcattctaatgggggaagtcactctcctggaaagcatttaagatgaataaagtgaagggtttaatgttctaatgaaaaaatttgtcaatatattaatcaaatgtgtgaacactaaacgtttttacgtatgtttgctgtagaggttttaaggcgggctttggctttccagactcaaataaagtagatagatgcactgttaaactttcgaacaatgacaaagaaaaacatggg

SEQ ID NO: 222195 - DNA, 548 bp, Homo sapiens
catttttaactattaatgcacaggaagtctgcatttaaacagaaaatctggaaataataaattgatattaaaattactgagggtctaagatgatgaatcataacaccaactgtctctgaggaaaagtactattgttttagggcagaagctgagctcttgtcacaatttctaggggaaatatgaaaaaaccttccacttttcagtaagtaaaatttgggctctttggagatttgaatwtaactattttagacgtatcagaatattattaaagtaccttaataaaaatatctgtgaaaactgtggggaaaaaacataataaataatatacaagatatatactgtgctctatctgccttggcactccttttctcgtagtatttaagagtttttagcagtgctcctccaatgcagtccccgaacctgcagcatcactatcacctggaaacttgttagaaatgcaaattcttaagtcccacctatacctcgtaatttctttctctggagttgagctccacaatctacatctttaaaaagctattcaggtgatt

SEQ ID NO: 222196 - DNA, 548 bp, Homo sapiens
catttttaactattaatgcacaggaagtctgcatttaaacagaaaatctggaaataataaattgatattaaaattactgagggtctaagatgatgaatcataacaccaactgtctctgaggaaaagtactattgttttagggcagaagctgagctcttgtcacaatttctaggggaaatatgaaaaaaccttccacttttcagtaagtaaaatttgggctctttggagatttgaatttaactattttagacgtatcagaatattattaaagtaccttaataaaaatatctgtgaaaactgtggggaaaaaacataataaataatatacaagatatatactgtgctctatctgccttggcactccttttctcgtagtatttaagagtttttagcagtgctcctccaatgcagtccmcgaacctgcagcatcactatcacctggaaacttgttagaaatgcaaattcttaagtcccacctatacctcgtaatttctttctctggagttgagctccacaatctacatctttaaaaagctattcaggtgatt

SEQ ID NO: 222197 - DNA, 446 bp, Homo sapiens
ttcagtgttggcttgttttagctgatccatctktaacacaggagggatccttggctgaggattgtatttcagaaccaccaactgctcttgacaattgttaacccgctaggctcctttggttagagaagccacagtccttcagcctccaattggtgtcagtacttaggaagaccacagctagatggacaaacagcattgggaggccttagccctgctcctctcaattccatcctgtagagaacaggagtcaggagccgctggcaggagacagcatgtcacccaggactctgccggtgcagaatatgaacaatgccatgttcttgcagaaaacgcttagcctgagtttcataggaggtaatcaccagacaactgcagaatgtagaacactgagcaggacaactgacctgtctccttcacatagtccttatcaccacaaatcacacaac

SEQ ID NO: 222198 - DNA, 446 bp, Homo sapiens
ttcagtgttggcttgttttagctgatccatctgtaacacaggagggatccttggctgaggattgtatttcagaaccaccaactgctcttgacaattgttaacccgctaggctcctttggttagagaagccacagtccttcagcctccaattggtgtcagtacttaggaagaccacagctagatggacaaacagcattgggaggccttagccctgctcctctcrattccatcctgtagagaacaggagtcaggagccgctggcaggagacagcatgtcacccaggactctgccggtgcagaatatgaacaatgccatgttcttgcagaaaacgcttagcctgagtttcataggaggtaatcaccagacaactgcagaatgtagaacactgagcaggacaactgacctgtctccttcacatagtccttatcaccacaaatcacacaac

SEQ ID NO: 222199 - DNA, 446 bp, Homo sapiens
ttcagtgttggcttgttttagctgatccatctgtaacacaggagggatccttggctgaggattgtatttcagaaccaccaactgctcttgacaattgttaacccgctaggctcctttggttagagaagccacagtccttcagcctccaattggtgtcagtacttaggaagaccacagctagatggacaaacagcattgggaggccttagccctgctcctctcaattccatcctgtagagaacaggagtcaggagccgctggcaggagacagcatgtcacccaggactctgccggtgcagaatatgaacaaygccatgttcttgcagaaaacgcttagcctgagtttcataggaggtaatcaccagacaactgcagaatgtagaacactgagcaggacaactgacctgtctccttcacatagtccttatcaccacaaatcacacaac

SEQ ID NO: 222200 - DNA, 409 bp, Homo sapiens
tgaattcagcaaactttcagtaaacaatcagttgtgttagcaatgaacaatctgagaagaaaattgacacaatgatttcatttataatagcactkgtaagaataatatgcctgggaataaatttgttcaagaaggtgcagtacttgtacacagacaactacagaacattgctcgaggagattcaggaagacctaaatcaatggacagacatcttgtgtccatgggttggaagttgtaacatggttaagataaaaatacaactcaaagcaacccacagattcaatacaatcctatcaagaagtggccttttttacaggaatgcctaagaagaacttcatattcctaaaaaaagtgtgtccccccaaaacaaaagcaatcttgaaatgcaagaagaaacattttctattcc

SEQ ID NO: 222201 - DNA, 521 bp, Homo sapiens
tgaacaatctgagaagaaaattgacacaatgatttcatttataatagcacttgtaagaataatatgcctgggaataaatttgttcaagaaggtgcmgtacttgtacacagacaactacagaacattgctcgaggagattcaggaagacctaaatcaatggacagacatcttgtgtccatgggttggaagttgtaacatggttaagataaaaatacaactcaaagcaacccacagattcaatacaatcctatcaagaagtggccttttttacaggaatgcctaagaagaacttcatattcctaaaaaaagtgtgtccccccaaaacaaaagcaatcttgaaatgcaagaagaaacattttctattccaaaggtctttaactgctctaagcagtacttggtagtcttcaatatataggctttcacatctctttttttcttcttttgtttctgcacaggatctcactctttcacccaggctggagtacagtggcacaatcacagctcactgcagcatggaattc

SEQ ID NO: 222202 - DNA, 521 bp, Homo sapiens
tgaacaatctgagaagaaaattgacacaatgatttcatttataatagcacttgtaagaataatatgcctgggaataaatttgttcaagaaggtgcagtacttgtacacagacaactacagaacattgctcgaggagattcaggaagacctaaatcaatggacagacatcttgtgtccatgggttggaagttgtaacatggttaagataaaaatacaactcaaagcaacccacagattcaatacaatcctatcaaraagtggccttttttacaggaatgcctaagaagaacttcatattcctaaaaaaagtgtgtccccccaaaacaaaagcaatcttgaaatgcaagaagaaacattttctattccaaaggtctttaactgctctaagcagtacttggtagtcttcaatatataggctttcacatctctttttttcttcttttgtttctgcacaggatctcactctttcacccaggctggagtacagtggcacaatcacagctcactgcagcatggaattc

SEQ ID NO: 222203 - DNA, 521 bp, Homo sapiens
tgaacaatctgagaagaaaattgacacaatgatttcatttataatagcacttgtaagaataatatgcctgggaataaatttgttcaagaaggtgcagtacttgtacacagacaactacagaacattgctcgaggagattcaggaagacctaaatcaatggacagacatcttgtgtccatgggttggaagttgtaacatggttaagataaaaatacaactcaaagcaacccacagattcaatacaatcctatcaagaagtggccttttttacaggaatgcctaasaagaacttcatattcctaaaaaaagtgtgtccccccaaaacaaaagcaatcttgaaatgcaagaagaaacattttctattccaaaggtctttaactgctctaagcagtacttggtagtcttcaatatataggctttcacatctctttttttcttcttttgtttctgcacaggatctcactctttcacccaggctggagtacagtggcacaatcacagctcactgcagcatggaattc

SEQ ID NO: 222204 - DNA, 521 bp, Homo sapiens
tgaacaatctgagaagaaaattgacacaatgatttcatttataatagcacttgtaagaataatatgcctgggaataaatttgttcaagaaggtgcagtacttgtacacagacaactacagaacattgctcgaggagattcaggaagacctaaatcaatggacagacatcttgtgtccatgggttggaagttgtaacatggttaagataaaaatacaactcaaagcaacccacagattcaatacaatcctatcaagaagtggccttttttacaggaatgcctaagaagaacttcatattcctaaaaaaagtgtgtccccccaaaacaaaagcaatcttgaaatgcaagaagaaacattttctattccaaaggtctttaactgctctaagcagtacttggtagtcttcaatatataggctttcayatctctttttttcttcttttgtttctgcacaggatctcactctttcacccaggctggagtacagtggcacaatcacagctcactgcagcatggaattc

SEQ ID NO: 222205 - DNA, 330 bp, Homo sapiens
tttctcaatataccacaacccattaattgsggtttttaaaagtgtacatgtatttttaccaaaaccccagggcttcagtgttctcagcacacagaaagacaatcattgagacattgagtattgctgaggaagaaggctttaatcaggtgctgcagctgagtagacaggagttgagtctcaaatctgtctccctgattgactcaagttaggggtttatatagcacagaagaaatgtaactgtgtgtgggaagagagaaactagggaggggtgaggaagcacttgtgatgagtgaggggactggcatctcattgtctggatgctgtgattgg

SEQ ID NO: 222206 - DNA, 330 bp, Homo sapiens
tttctcaatataccacaacccattaattgcggtttttaaaagtgtacatgtatttttaccaaaaccccagggcttcagtgttctcagcacacagaaagacaatcattgagacattgagtattgctgaggaagaaggctttaatcaggtgctgcagctgagtagacaggagttgagtctyaaatctgtctccctgattgactcaagttaggggtttatatagcacagaagaaatgtaactgtgtgtgggaagagagaaactagggaggggtgaggaagcacttgtgatgagtgaggggactggcatctcattgtctggatgctgtgattgg

SEQ ID NO: 222207 - DNA, 615 bp, Homo sapiens
taactgtgtgtgggaagagagaaactagggaggggtgaggaagcacttgtgatgagtgagggsactggcatctcattgtctggatgctgtgattggctgagtttcaggtctctgatgctttttgagaggactgagagtcctttcctgaggaaggaactcagataaaacaaatataattttcttttatagaatggcttgacctcaggagtttgaaaccagtctgggcaatatggtgaaaccctgtctctaccaaaatacaaaaaaaaaaaaaaagagggttgcttccaagatggctgaataggaacagctccggtctacagcttcaagtgagatagacgcagaagacaggtgatttctgcatttccaactgaggtacctggttcatctcactgggactcgttgaacagtgggtgcagcccatagaggatgagccaaagcagggtggggtgtcacctcacctgggaagtgcaaggggttgggggatttctttttcctagccaagggaagctgtgagtgactgcacctggaggagcagtacactcctgctcaaatactgtgcttttttccactgtctttgcaactgacagaccaggagattccctcttgtgcctgcct

SEQ ID NO: 222208 - DNA, 389 bp, Homo sapiens
gttacttaaagatatagcaaaatcaaatygctgttcttaacccgggaatgtgcagtgaaatcagtttattaggttgcaaattgcttttactttttcatgaagagtagaacacataactggcctcaagatccctctactagaagctcattcagaggcagactcccgaatgtctaatgacttcaagagtcagctgaattgcatttctccagtctctgaacttggcctcaaagaagaaaaattggagtaaaaaggagagatgatgacaatgtgagagtgaaccaagatacaggggcaggagctgacggggtgggagggtgatggggacagaaactagcaggatgctcactgaggacctgtgatcttgcaagtggaccccaagtcttctcctg

SEQ ID NO: 222209 - DNA, 319 bp, Homo sapiens
atatagcaaaatcaaattgctgttcttaacccgggaatgtgcagtgaaatcagtttattaggttgcaaattgcttttactttttcatgaagagtagaacacataactggcctcaagatccctctactagaagctcattcagaggcagactcccgaatgtctaatgacttcaagagtcagctgaattgcatttctccagtctctgaacttggcctcaaagaagaaaaattggagtaaaaaggagagatgatgacaatgtgagagtgaaccaagayacaggggcaggagctgacggggtgggagggtgatggggacagaaa

SEQ ID NO: 222210 - DNA, 409 bp, Homo sapiens
atatagcaaaatcaaattgctgttcttaacccgggaatgtgcagtgaaatcagtttattaggttgcaaattgcttttactttttcatgaagagtagaacacataactggcctcaagatccctctactagaagctcattcagaggcagactcccgaatgtctaatgacttcaagagtcagctgaattgcatttctccagtctctgaacttggcctcaaagaagaaaaattggagtaaaaaggagagatgatgacaatgtgagagtgaaccaagatacaggggcaggagctgayggggtgggagggtgatggggacagaaactagcaggatgctcactgaggacctgtgatcttgcaagtggaccccaagtcttctcctggaaggccaaagcaggccaagggtcacctaca

SEQ ID NO: 222211 - DNA, 390 bp, Homo sapiens
tgttacttaaagatatagcaaaatcaaattgctgttcttaacccgggaatgtgcagtgaaatcagtttattaggttgcaaattgcttttactttttcatgaagagtagaacacataactggcctcaagatccctctactagaagctcattcagaggcagactcccgaatgtctaatgacttcaagagtcagctgaattgcatttctccagtctctgaacttggcctcaaagaagaaaaattggagtaaaaaggagagatgatgacaatgtgagagtgaaccaagatacaggggcaggagctgacggggtgggagggtgatrgggacagaaactagcaggatgctcactgaggacctgtgatcttgcaagtggaccccaagtcttctcctg

SEQ ID NO: 222212 - DNA, 408 bp, Homo sapiens
atatagcaaaatcaaattgctgttcttaacccgggaatgtgcagtgaaatcagtttattaggttgcaaattgcttttactttttcatgaagagtagaacacataactggcctcaagatccctctactagaagctcattcagaggcagactcccgaatgtctaatgacttcaagagtcagctgaattgcatttctccagtctctgaacttggcctcaaagaagaaaaattggagtaaaaaggagagatgatgacaatgtgagagtgaaccaagatacaggggcaggagctgacggggtgggagggtgatggggacagaaactagcaggatgctcactgaggacctgtgatcttgcaagtggaccccaartcttctcctggaaggccaaagcaggccaagggtcacctac

SEQ ID NO: 222213 - DNA, 569 bp, Homo sapiens
catttatttctttctggctattcagcttggagtctccttctatccaccccctgtcctccactccctctgcagccacaattgctcctggtacaggaggtttggggayatcaaatcagtctcaactcccaacatccccaagcccccctgatcacttctcatctgaagcacaagtggggcatcgggaagactgcctgtttcttcccccattccctctcagggaacctacgctggctgacaatgaactgttccatgctctccttctgctggttggcgttcttcagatgctcagttgtgctctgaaggagtcgctcctgtttggatactttggttctcagttccagaagttccctttctgttgattctccctggataagaggaacagactcttactgaccaggcagaaggcctaaagcaccctgtgctttgtggctctttccaattcaaagaaggattctacagtcttctcaactctcttgaactggatttcctccttcacagcctcggatacctccagctgaggacagttcaggatgaggccattaggcaggaataatgagactctggaattc

SEQ ID NO: 222214 - DNA, 506 bp, Homo sapiens
caaatacaatatttcttatcttccttatacctacaagttaggtttcatcactttctattttactgactgggaaaccaaaacttaaagagaggtggtaaactagcttgttctagatcactcaaactagcacatggcagagccagaattcaaatcctccaatgtcctgtgttcattccacacacactggtgtttcttaagacattaacatggccttatctatttaggatggccacaagaatgtaggacaagctattactgcatgctgaaagtttaatgctctttaaattttactataatttaaaagtttattgggttacaactgtatgaaaaataggcataggaaaataaggcttcaaawaaatatatcagcatgttaacatcagtgtattagggcagtggtagtcagaatgagaactaatccatggcattttaccagatgccaggcactgttctaaagcattttataagaatttactcatttaattgaccttagtacctgatggggt

SEQ ID NO: 222215 - DNA, 209 bp, Homo sapiens
gtgagtcttcagcctcgggcccagtgtggtcaggtctaaagacttggcagcaggagctggaaatccagactttgagtaaattgtcagtgcctaacttagagacgtttataacactgtgcaagccaagtacacccagctctctgctgcaggtgtctgctaacagccagggctsggggggtgcttctccaggtgctatcaggatggtgctg

SEQ ID NO: 222216 - DNA, 575 bp, Homo sapiens
tcaaatgtcaggtgtcaaaatttcaggcattgcagaagagtccacgtttctttgcaagctgccaaattgttgcaggaactggtttgacagaacagtctggagcgggggaaagcagagaggtccttaagaagtaatgttttgtccccagttacctttggaaaactggtgtcttaagggaaaaggcccatccaggagaaggaaggctggcatgtagccaacttttatggcttcttgatttcatctggaaagactcccaaagtgctttccagcattgctttgccccatgaacaaatatttgcacgctggctcgtcttggcaccttaaaacaggggcgttggaaatcaccttgttccatgaaaacacctgggggccagctgaattagaaatgggtttaagttgcaggtagcagcagcgcgttgtttggaaaatgyccagccttcaggcccaagccagagggggccacgtccacatggtggcttttgtcccagggaagcacctcctggtctacagtaacgtaagcccaggtgctgatggcgccttgttgccagtcctgtgcccgtgttgcatcatttctc

SEQ ID NO: 222217 - DNA, 575 bp, Homo sapiens
tcaaatgtcaggtgtcaaaatttcaggcattgcagaagagtccacgtttctttgcaagctgccaaattgttgcaggaactggtttgacagaacagtctggagcgggggaaagcagagaggtccttaagaagtaatgttttgtccccagttacctttggaaaactggtgtcttaagggaaaaggcccatccaggagaaggaaggctggcatgtagccaacttttatggcttcttgatttcatctggaaagactcccaaagtgctttccagcattgctttgccccatgaacaaatatttgcacgctggctcgtcttggcaccttaaaacaggggcgttggaaatcaccttgttccatgaaaacacctgggggccagctgaattagaaatgggtttaagttgcaggtagcagcagcgcgttgtttggaaaatgcccagccttcaggcccaagccagagggggccacgtccacatggtggctkttgtcccagggaagcacctcctggtctacagtaacgtaagcccaggtgctgatggcgccttgttgccagtcctgtgcccgtgttgcatcatttctc

SEQ ID NO: 222218 - DNA, 636 bp, Homo sapiens
tcattttacaatcccaccaatagtgcacaagggttccaatttctcaacatcctcaccaacactttttttttatagtaaccattctaatgggtgtgaggtcactgtggctttgatttgcatttctctgatggttagtgatggtaagcatctcttcatgtgcttgttggccatttgtatatcatctttggagaaatgttatactcgagggtttacttccaggctttctattctattccataggtctatttgtctttatgagcatgccacactgttttgatgactgtagcttgtagtatgttttgaaatcaggaagtgtgaaggcagaggcttttgatattcatcttttccgccatcatatattctccatgacctacatgaaaataacaggatccctgggtgttctctgaatatcttggacccttttgagccaatatctggtctcaattttaatgatctcaagccatcragttttattttctacagaggaatctgagtctttatgtcgaagccataaaaggcaatataaaaaagaacaccgaggagatgaattacttcattccacaaaaatccatcgctatcagtacgtaggtgaatgcccagttgtaggtgagtttaaagagggatatgcccagattc

SEQ ID NO: 222219 - DNA, 636 bp, Homo sapiens
tcattttacaatcccaccaatagtgcacaagggttccaatttctcaacatcctcaccaacactttttttttatagtaaccattctaatgggtgtgaggtcactgtggctttgatttgcatttctctgatggttagtgatggtaagcatctcttcatgtgcttgttggccatttgtatatcatctttggagaaatgttatactcgagggtttacttccaggctttctattctattccataggtctatttgtctttatgagcatgccacactgttttgatgactgtagcttgtagtatgttttgaaatcaggaagtgtgaaggcagaggcttttgatattcatcttttccgccatcatatattctccatgacctacatgaaaataacaggatccctgggtgttctctgaatatcttggacccttttgagccaatatctggtctcaattttaatgatctcaagccatcaagttttattttctacagaggaatctgagtctttatgtygaagccataaaaggcaatataaaaaagaacaccgaggagatgaattacttcattccacaaaaatccatcgctatcagtacgtaggtgaatgcccagttgtaggtgagtttaaagagggatatgcccagattc

SEQ ID NO: 222220 - DNA, 570 bp, Homo sapiens
gaattccaacttctccactctgagcctcagtttcttcttctataaaatgggcctattgatagaatctccataacagtttatcaaattaaatgagtcagtgcaggtaaagaatgcagcactggctaacacacaactcattctcaataaatgcaactattattattattgttctgtgctgagtttgcatcaacctgccaggctagtcaagcatgagtcagcaatacgtcacttcccacctccacatggacagcctgtggctgataaagtcacacccaggaaatgaccactgatccactgatcccaaaatcccccatatcccagatggagcccctgaagaccaaacaccacccataagacagagcctccagctgggcattgggaaagattccagycccggccccacctccgccttgcagcaagagcttcttcaagagcacagggaggtccaagcctgagccacctcctcggcagggttacctggagatcaagctgagctcacgggtgacaagggttttgggaaatgaagagccagatcttatcttggtaataaaaaaataacaagccccacct

SEQ ID NO: 222221 - DNA, 384 bp, Homo sapiens
ttagctcctcttatccccagggaggataattctcaggtaagttagcttggttcggctgagggctaatctttgggaaggagagagctatgagctgttagcagccaaaaacacttacagccgctggggaacaagaaggatgccaatagcagccactgcaggccaccccttgcactcctcagaaccacttgcttctgacatttagtttactccattcaggcacaacaacttcaggattctggttagtcacatgtcctgggctcctgtataagataaagatgagtaaawcaaactgtagcttccactgctgcagtgtgtcccaagcccgtaacataatcatcatctaccccttcatcactcttccagatgttcctccttatgggtgac

SEQ ID NO: 222222 - DNA, 605 bp, Homo sapiens
tagcaccttgcttcatttccatacttaacaccttagataaccaataaatgcattgattaaattcccttaaagagaaaattaattgagactaggtttttagcgaggaaggatggagagttcagttctgcgtgacaggcgctagccaggcaggcaggagtaggaacgcgtgaaaggaaataaagagcaggaagggcagcgtgaagctgcagacaggcagtagaggctgttagcaaatattagataagcacctcagaaacaaacaccacctttcacagtgtgtcctgggagtagatctgattgctcctttctctttagtcctcatcgtgtctgatcacatgcaaaactctatattaatacacatcgaacactccaaaccacaaaatagataactagcccaacctgtgcctgatattctgttaaacctcacttcaagcttcacattttgtgaagcccaatgtggttacactcaggagccactatccagagaaaygggaattgttggctatgcaggctacttctcaggtgagagtcttctgacttgatgttaagatagcggaaagagatgttcatcctcaacatttgataagacagacagtgtagcatta

SEQ ID NO: 222223 - DNA, 541 bp, Homo sapiens
taaaattgctagggaaaactaaagatatatatttttaaacctcaaaaataagaattatgaccatatactttagagaaatggtaaatactttgtgcatgcagttttttgtctgttttgtttttattttttaacacagaattgtcttgaagattggttaaagtttgctcatctctgaaccttcagaaaggctctctcctacccccttctccatttgagtggattttwaaaaaaattttattttgaaatgattatagattcagcaaaagttgtaaatgtagtactacagagagatcttgtatacctaacttttcctaatggttacatcttatattgctatgatacaatatcaaacattgatgttgtttgatattgtattgatattgtaacattgggacaatgtgtgtaaatagtttgatgccatttcatcacatatgtagactcatgtaaacaccactgcaataaacatgtagaacgatcccatcactacaacaatgtggttcaagctgccccttataatcctgtccacttccctccctgccac

SEQ ID NO: 222224 - DNA, 568 bp, Homo sapiens
tttaaagcttcaccagttattttcatgttgtatgtatgtctggatttatgatagtgcccaatcacttatcttctgcaggttcctggggagcagagcaacgcagtgaaactgaaattattaagttgtctgaattcataatagttggacttgcccctccatgaaatagcactgcacagccaattggaattcatggccctagccctttattgcatcatcatggtttatagtccataacaaatacaaatacagaaaggaaccataacaatatgatacatctgacctgccagcctaccttctggggctttgcttgatgrgcttgcattctcaatgcatgggacaaaagcaaagggaacactctctgtttaccccttctaaggcctgaccttgggtccctagtccgtatctttgaccttgtcatcaccaccacaggcagccaatctcaactgggaaaagcagtgatttatgtaagttttcccagaaacaaggcttcgtgaaggcttcctgatgtcagtttaaaagtggtttcccactgtggtgagataccccagttgcttttataaagcattaa

SEQ ID NO: 222225 - DNA, 475 bp, Homo sapiens
tgcaatcacttcatatttctgcctggaggcagtttccaggctatggtgcagggagagagaacccaaacagacttgtggtcttacccaaatgagaaaacaaacaccataaaagctagaatattcaagacagagtccaagaaagaagggagatgtataggaagagcttcagaaatctgcataaagtctccttgagtttttaaatgaatactaatctgcatacacctatgtggaaactccatgaagtcaggcaaaaagctacctttagaaaaagaaaaattactagagaactacaaaacaaataattcccagagctcacacaaagcaggaaatcattcaaattcccaccagccagagtggagagatctcattgactrtatgggacattcataagaaaattcagaagggttacaatttatttatagggctaatgttggcctagaataaaccttattctagacttaccttaaaattccgg

SEQ ID NO: 222226 - DNA, 575 bp, Homo sapiens
tagcaatttaaaccattcagaatgaggctgacaaagaaaatatctaggaaaaagccaatcaaacaaacaaaagcaacacctcaatagcctatatggtagtatcaagtgctcttgcatatgtttgaaagtccctgcaagaaaagaaagagaatgtggaaaacaaaatagaaaagaaataatggctttttttttcaaacttaatgacaaaataaacctaaagatccaagaaacatacagaattctaataaagatgaagacaaccaaacacatattaaggtacamgtaataaaatttctgaaaagaattcataggaagaaactcttaataatggccaataaaaatatacattatgtacacagggaaaaacaagataagaatgacaacagacttcttatcagaatcttagcaatccagaagacaatggaatgccatctttaaagtgcttaaaaatgacctgtaaatgtgttattcaatataaatttaaatatttcacaaatgaagatgaaacaagattgtttattttctgggaaaataaaagcaagcagagtgatattgtttgtacctgtgtccttgcc

SEQ ID NO: 222227 - DNA, 596 bp, Homo sapiens
tacttttcatctgtggctttccttccccaarcccataaacccatttcaccatgagacaaatatcatgtgaatttcagtaaaagagtttcctacaaaatatttgactagactcctcaaaattgttaagggcatcagaaacaaaaacaaaagaaaagtctgagaaactcacagctaagaggagcctaaggagacatcatggctaaatgtagtgtgagtgtgatctattggatggaatcctggtacagaaaaagaacattaggtaagaaaatttgaatgaaatatggactttacttaataataatgtataatatttgttcaataattgtggcaagtgtaccatactaatgtaagataataataaggaaaactaagtgtgagtatgtaggaattttctgtactattgtcttagtctattcaggcgctatcacaaaaatcatagctttcatagtttataaacagcagaaatgtattccttacagttctggaagctggaaatgtcaagatctgggcactggcagatttggtgtttggcaagggcctgtttcctggttcatggatggcacatttttgctatgtcctcatgtagtggaaaaggg

SEQ ID NO: 222228 - DNA, 415 bp, Homo sapiens
ccgtatgcaacattatgcatatctcaccaacacaatgctgaccaaaaaatctacacataggagtacacactctgtgstcccactcgtataaagttcaaaagtagacaaatctaccctatggtattagaaatcagataatgattatttgcagaaaagaggtcacaaggaaggctcctgagttcctgaagatattctgtttctgaatccaggtacttgttatttagacgtgtagactattaaacttcattgagctggtatattcatgatctgtacacttttctatgggtatgtaacacttaaatattattacaaaaataccatgtacttgaggaaactagagaaaaaaggttaaaaatgaattttttattttcaaactctaataaatagaaaataaaaattttaagcaaatttttaa

SEQ ID NO: 222229 - DNA, 437 bp, Homo sapiens
atttacccccacagttctggtggaaagagctcctccttaggccaggctggcatggcaacattttcttacattgggatggggcaggactggaggaatgtgattagagcctactgctgctattctctctgttcactcaaaagtcataatctttgccttaatatttttatatttttttcttaagcattgagggagttgaataaatgtactttaataaayaagactggggacaaattgggtgatccataataggggacattcaaaaatggcagatctgagtgtcatttgcttgtaattgcttttcaaattagtttgttgtttttgtttcattttttttgttatcatccacattccaacagctgcctaaactactggcattgcaggatgtatcaagacatttgccatctaaagagccattaggagaataataagggtaggac

SEQ ID NO: 222230 - DNA, 578 bp, Homo sapiens
gcacatgataaatgaactcccaccttttcctttctgatgacaacttgagctctgaatagaggtgtgatttatttttttcattttttggtgagtgtgagaaagaatgcggttttctatagtgtagagtgaaacaccacttacttggcaaaatatctcaaggcataacgcttccagcacctgaacaatttggttccatgaaggcttaagcttagatatatttttttttcctcggactgctggtccagaggggaaatacattgcagcatctcatttgtcgatgtcttttcttacaattgtagtgattcatttcctattttgatttttaaatttgtgtttctagatattttgctctgcatctttccttcaaatgttgcttttaaagggggaataagtacacacaccgaaatttatttaacygtttaagcccttgaccgacttccctgttggtggaagttcatttgatctgcattactaacactggacacacattttgagagaaaggataggaagctcagcaagagtaaagatcaatccacaattttccatatccctcagttcttagatcattgacacacacc

SEQ ID NO: 222231 - DNA, 391 bp, Homo sapiens
gagaggttaagaaacttggccaaattcacacagctgataagcaactaccatatttttgcaaatgcaagcctagatattggtctcaggtgcagaaagayagattgtcacaattatacgtgtggtattggcatgtgcttgtatttctcttttccaatttaaggtcgtcaaccccaaagtctggcagagttagcttggtacacacaaaaatggggtttgggctggcagaaaaagaaacaatgagagagtgtaaaaggcagaggcatacttggtagaaacagataataaggccatgacagccacccctcatccttcccctctcataaatatggagaagtggcaaagagcaacagaagagggaatagaggaggaggaggaggcgagtcggttgtgc

SEQ ID NO: 222232 - DNA, 584 bp, Homo sapiens
gagacagtaaaatattgtaggatatatacatggaatctcaggagaaaacagagtaatgtggttcacmgtaatgttgtcataattaacaaaggaagggctaaaagaccaaatacaaaactgtaaacaaagtattgtcaatatgggtagagaaacttcaattcattaaaaaaaaatttaactacacatcatccatattaaagtatgcaatactgactctgtgtcaatgtccagagcctcctcctgtttcacaaagaagacctgagagggagcataaatgtaagagtgaataccaaaagagaatcctagcagatgagtaagataagtatggtatgccttatctaaagaggttgataaatcttattttatagataaaactgagacccaaggatataaagcaatctgtcacttgttgcacagatgaacaaactgaaattcaaacacagaccatcagaatcctaaaaccatttttcttttgttctgtttttctccacattattctggtttccctgccataaccaggaatagctaagattatgtctggggaagacaggatagtagatatctagcaagctgcctcacctaac

SEQ ID NO: 222233 - DNA, 585 bp, Homo sapiens
tactgcactccagcctgggtggcagggcaagatcccgtctctaaaagaaaaataaaaagatccttgagggtaaggactgtgtcttgataatatccacagagcctagcaaagtgtccagtacactgtaggcaatcttcctttaagtctttcccttagttcaaaacacacagaaattccaccaccatgaaaggccattatatatcctattaatttgaatctttctttattctaaggcatccgtttctttttagtttaacttattactgaacytgatagtaaggtttaaagggaggaaaaaacccagcaaattttaaaatgcattaaataaaggctcaggcagacatggcccacatttcttattaagcacaagtcgtaatgatcattgctattcgattctttaataactgcttaatttctgttttctgggtactttttctgcttggaaatttgagacaatcaacttggtcaaatcttggaagatgtcagtaaaatggatgattaccaattatatataatcaacacatcaaaaagcagcagctcaacaaggatcagaataaaaacaggtattatatattaaagtattta

SEQ ID NO: 222234 - DNA, 558 bp, Homo sapiens
ctgaagagacacagatgaaagtgaaaatgctgctctattttctatcacccaatttcttgtcacagttactatcattaaaacatattaaaaacatggaaagggctgaaagggaaggtacaaatctaataagatttgtaatataaataaccctcagtatgtttttattcccgattgccttgcctccttaggttctgatatttaaagattgggttaaatatctccttttctgtgtataaggtattggcacaatttttttttttcttattcacttctcctcatcaggcaggtggttgaaactacgtaatgcttgtcttttatggccattttcagagagaatcattttcaccaggggacgatctcctgtgttttttgttttgttttgtttttttacccttttctctcaatctcatctcaaagataaatgggagttaacaactctggttaarattatgctcattttcaaatgctttctttatactttttagccttccataatataaataatattgtggtgctattgtaataacaaatccaggaaaaagaaacaccttactgtcc

SEQ ID NO: 222235 - DNA, 572 bp, Homo sapiens
tttttcttctgcacttgatcaaaattctgtttaggtatccacattttaccattatatgtattcaacagtgcagaatgctggtgaccagttttacttgttaaccaaggcatggctgagtcctcagagacttttaatttgactccattcttaggatgatgtgctgcatttctgcaatggcacccactggcgtgcaaaagaaaaactggattttccaggttaagcagaaacatggacgccatactaaactctgaacagacacattcatgcatcttcttgtccaccagctgcaggaactcaggggttttactacttcatccttttatgcccaacaccccatcagctccagaggcagcttggctgcatgccaatgtcagtgtagaattattctatcctcacgggttcatatcgtttgtcaagtcaccaaacmctcagaaatattgatgagtcatctacctagatgtttttgttcatttgtaagactaacttgtacagagttttgagttttcttaagattttagagatataaataaaccatcaattaaggatttagaattcactaaaaataaaagctt

SEQ ID NO: 222236 - DNA, 592 bp, Homo sapiens
tataatagactctgaaaatattttactggatttgaatcatgtccatcaaacctattcacccatccttccttcttttcttttttccataagtactaattgttctaggagccaagcacattccaggccttaggaataccataaggtacaagacagctgaggtctttgccctcttgtgcttacatttcagtgggggatgcagactttcaaaaagtaaataaaacatctgcaaaaaaaatgttaatatgagtatgtggtataaagaaaacaaatggtactgagcatggagacaattgcagggagggcctctcgaagggtaacataggagttgaaaactgaaggtcaagaaggagccagccttgcagagatctgggagaagagcatttgaggcagaaggaacaagtgaaaatgccctgagataagaaagaaactttagaattcaagtaatacagtgaggtcatttcagagtgacttgtccttattgattgtgtgctgaccagcaaagagatatttccatctgctstaggtcccataaactacctcttcaaatacctgctgaaaatgtttctatgtccccacaagcttttagccagcc

SEQ ID NO: 222237 - DNA, 503 bp, Homo sapiens
ttaatgggtcatgagaactctatctcatgaatgaatcaatccattcttgaattaatggattaatgaattactaggttagtagattaatgagttatctcaggagtgacactggtgacttgaaagagagacctgagctagcaagctcagccccctccccacatgatgccttgtcccaccttggaactctgcagaaactccacaccagcaagacggccctcaccagatgcaaccccycaaccttctcagactctgtaactgtaagaaataaattccttgtctttgtaaatttctcagtttcaggtattccattacaaacaacagaaaacagactaagacacgccctacaggtggatataatcattattctcattttgtaaatgaagaaacagaaacaatgacaacttatgtaattggccaagtgaaatactactaatcattaaggccagcatttaagctctcatggtgttttgctctagtgaccctatttgtgacactacattatt

SEQ ID NO: 222238 - DNA, 646 bp, Homo sapiens
acttccttagcaatattaaacaaacccttggacacattaaatccctgttcccagcttttgcaaatgccatccccactgcctggaatgttcttcctcttttccattcacctgggtaagtttcacttttccttcattttagcttaaacctcactcctttggaaaagccttactgtaattccaatcatacgtgtgtgtgtatatatgtatatgtatatatatatatatatatatgtgtgtgtstgtctgtgtgtgtgtcggtgtgtgcatgttatatgatttggccgtgtccccactcaaatctcattttaaattcccacctgttgtgggagagacccagtgggaggtaattgaatcatgggggcagatctttcctgtgttgttcttgtgatagtgaataagtcttgcgagatctggtggctttaaaaatggaattttccctgcacaagctgtcttctcttgtctgccaccatatgagatgtgcctttcaccttccaccatgattgtgaggcctccccagccacatggaactgtaaatccaataaacctctttcttttgtaaattgcccaatctcggttatgtctttatcagcagtgtgaaaatggactaatgcagtaaactggtaccagtagagtagggtgttgctga

SEQ ID NO: 222239 - DNA, 646 bp, Homo sapiens
acttccttagcaatattaaacaaacccttggacacattaaatccctgttcccagcttttgcaaatgccatccccactgcctggaatgttcttcctcttttccattcacctgggtaagtttcacttttccttcattttagcttaaacctcactcctttggaaaagccttactgtaattccaatcatacgtgtgtgtgtatatatgtatatgtatatatatatatatatatatgtgtgtgtgtgtstgtgtgtgtgtcggtgtgtgcatgttatatgatttggccgtgtccccactcaaatctcattttaaattcccacctgttgtgggagagacccagtgggaggtaattgaatcatgggggcagatctttcctgtgttgttcttgtgatagtgaataagtcttgcgagatctggtggctttaaaaatggaattttccctgcacaagctgtcttctcttgtctgccaccatatgagatgtgcctttcaccttccaccatgattgtgaggcctccccagccacatggaactgtaaatccaataaacctctttcttttgtaaattgcccaatctcggttatgtctttatcagcagtgtgaaaatggactaatgcagtaaactggtaccagtagagtagggtgttgctga

SEQ ID NO: 222240 - DNA, 617 bp, Homo sapiens
tattttaatatatactatatatatggccttttagtaaccaactgtgtacacaaaatgcatttgataatgcagtgtcaagttgcagaatcattttagagataagatatggaatattaaatatcatttttgtgttttacctattktgtgttttattttacttgaaaataaaacttgtagagagatgggattagttacttggtaaattataagaagaaatacagtttcctcaaataattttacatatgaaaaattagacgtaagatgaatacttaattgacaaaagaagtaagtctaaatagccatatgggtcaggtgcggtggctcacacctgtaatccccacactttgggaggctgaggcaggaagattgcttgcaccaaggagttcaagcccagcctaggcagcgaagtgagaccctgcctctaccaaaaaaaataaaataaaattaataaataattaataaaatgaaacaatcatatgtaatgctcattaaatttcaaggggctaaatttatatgcacataatacatgaaaaattcatatacagtgtcatatgctgtcagtggaattaagctaaatattgacaaaacgttaaattaaaaataccaaaatggtaaga

SEQ ID NO: 222241 - DNA, 617 bp, Homo sapiens
tattttaatatatactatatatatggccttttagtaaccaactgtgtacacaaaatgcatttgataatgcagtgtcaagttgcagaatcattttagagataagatatggaatattaaatatcatttttgtgttttacctattttgtgttttattttacttgaaaataaaacttgtagagagatgggattagttacttggtaaattataagaagaaatacagtttcctcaaataattttacatatgaaaaattagacgtaagatgaatacttaattgacaaaagaagtaagtctaaatagccatatgggtcaggtgcggtggctcacacctgtaatccccacactttgggaggctgaggcaggaagattgcttgcaccaaggagttcaagcccagcctaggcagcgaagtgagaccctgcctctaccaaaaaaaataaaataaaattaataaataattaataaaatgaaacaatcatatgtaatgctcattaaatttcaaggggctaaatttatatgcacataatacatgaaaaattcatatacagtgtcataygctgtcagtggaattaagctaaatattgacaaaacgttaaattaaaaataccaaaatggtaaga

SEQ ID NO: 222242 - DNA, 538 bp, Homo sapiens
gacttttttgacctattagatgaagagcaacccatctctgagcagaagagtcarcatcctacaataaaacttcttgtatttttttttcttagaaacttcatatcataggatcataggacactggaggaaaggacccctcaatcatctaagccttcaattaagtccatagttcagaccctgtaaactgagaatgcccaagagggatgcagaaaaacacttgtggacaatgtgatatcttaccccatcaactgtgatcatcttgactttaattctgtacactcatgaatcccttcaaaaatagaattttaactttctttgtgcctgtctgacagtgtcagtggttttactctttgtttcctctagcatattctatcagctcactggagagccaagctgggttgtggccaaaatcatagcatcaactttttatgttctacaagcaagagtctctgacacaggtagcataaataatgctccccatagctcctgctgagctagggcttttctgaattatctctcatgcccttctttccactct

SEQ ID NO: 222243 - DNA, 563 bp, Homo sapiens
cagtcaaccccttcacaatctagaacccaaagaccggatcatctaagaacatcagagaaagactgtccttgccatccacattgcagcaaaactttggaaccctgaattttggattcataatctcacaactgagaaagggtccctcctcactcttaaaaatgtgcactcattgaaacccttagggtaaagctaaccaggtaagtctctccccagaaaacggcatccttgatgtgaacagcttttcccatgatcacagatcaagacttctactatcataagactcttatctttgaatattttttcttgtttatgcttctatgaacaaaacaaatgaaaagggggtctgttgtgtgcacttatagggtatacttttatttgtgaaggattttgcagccagccttattcatggataaccttatactttataaggtaaaagatgaaggcccaatgtaggtgagaaactttaatggtacatacgttgcctcatcatcagtcagaaacataacattaattcactcttcttaaytcacatcatgaattaaagagaacactgccaggaagct

SEQ ID NO: 222244 - DNA, 615 bp, Homo sapiens
tgcctattttacagaaaaaaaaaaatggaggctaagggttgaattatccccaggctacactggatctacatggcaggatgggatctggacttgttcactgttaacttcagtcttgacaatttacaaaaagaaatgttggcctgctggacatcaatattaatagcgtcatttttcttaagttgaaaaaggtggtaggaaaaagcagataaggatttcacaacytgtgcgtttcaggctcttagcacttagcctggccctctacagctgtggactgcagcttaccctttctgtcccaaatgtcttgcggtgtgctggcttgtaggaggcaaataataaatgttcgctgaaagtgaaataaaagactttaataaaatacaattttagaaagacttcatgaactggcaagtaaattgctgctgctcttggcagggctacactggtggatctgggaaggggaaacttgactggtattgttaggctaaatatgataattgcaatccttttctggtgtgaggagggccactatttcttaatttgtgttcctactaagacatgtgtttctaggttgttcctttgctttctaaagtaaacagggtggccaggtctggttctatt

SEQ ID NO: 222245 - DNA, 568 bp, Homo sapiens
gaggctgggcagggtagcctgcaaggagacttggcaaattaccaggcctggtgactgatgagtctggtaagagggaggacttcggcttttggctctgtgagctggtggatggtggagccatttactaaggcagaaacacaggcagaggaggaagtgggcaggggaacacaaagacatctttttcacaagtgccgagcttaggatgtgtgtgtgtgtgttaataatgtgtgtagattgatacatctggagggcactgggtcactgagtccagcaccaggaagggtgacctaacttttcagagatttagatttggaggtcatacacgtgcaggtatgaatggaagccagaagagtacaaggaccattcaggaagaatgagccagtatctacgggctcaatgctgaggtgtagaacccaaacctgtaagttacagaagagggaaaaggccgagaaggagttgggctagctggaacacaaaaagaatctgaagaagggttttwaagaaccaaaggaagtgagttcaagacaaaacaacgctggtcgcagtggttcacacctgtagtcctggc

SEQ ID NO: 222246 - DNA, 542 bp, Homo sapiens
ttcaataatgcaaacacttcagaacacacaactctgatttttccatctcttcttgtcttcagcactgaaggctactcagtttgccattttttgcagggaatctgtcttttccttctggttgcttttacaataattccctttgtctttgatgggctgtagtttcatgacaatatttagtatgactggttataggtttgtttttatatcctgttcagctgctcaggtctggaaagctacaacagcttgaatgtttgtggatcttcacttacagaaaacactgagattcctgcctcccctccgttctctattttaccttctcctggagcttctatctacagtatctccatattgatctsattctatcttccacatccctcaatctctcccatgtttttcattccccttctcccttcagctttatctaaactactttaaaattttctaatatgttttaatttaaatcactggacttttcatgtctatatgttttatttttcttccaaatccacctgttcttacatactacccttctcttgcttttt

SEQ ID NO: 222247 - DNA, 565 bp, Homo sapiens
accctgtgttcacagattgaaagatgatactgttaagatagcaatactagtcaaagtgttttacagattcagtgtaactcctatcaaaatcccaatggttttttttgtttgtttgtttgcaaagatagaaaagctgatcttaagattcacatggaattataagggacccaaaataaccaaaataatgttgaaaaaagaacaaagtcatagaactcacacatacctatttcaaaacttattactaaactacagtaataaaaatagcatggtactgacatagacttacaaatcaagagaatataattgagagtccagaaataaacccatacatcaatggtcacttaatttttgacatggatgtgaagaccattcaataataaaagaataatctctccagcaaatggtgctgggacaactagatttctacatgccaaacaatggaattgggcccttcccaccacatacaaaaattaacttaaaatggatcaaagatayaaatatatttgaaacaaatgaaaatggaaacacagcatatctaaatttatgggttgcagcaaaagcaatc

SEQ ID NO: 222248 - DNA, 536 bp, Homo sapiens
gaacagtagaaattacccagtctgagtaatagagacaaaatagactataaaaattaacagagccttgggagcctgtaagaatataatagaagatctaacattcacgtcttcagagtctcagaaaaagaggagaaatacggcagggctaaaagagcactcagaaatagtggctgaaaatgtcccaattttgawgaacaatataaacttacagagcaattctaaagaggataaactcaaagaaatccacaacaagacagattttaattacactgccaaaaaccaacgacaaagattccaaaggcagccaaagagaaatgacaccaatagaggaaaaccacgtaggttgacagtggatttctcatcagaaaccactgaggccagagcaactggcacaacatttttcaggtgctgaaagaacagaactgtcaacccagtgaaaatatctttcaggaatgaaaaagaaatctcttgaatggaaggaaaactaagaaaatttgtcaccaccagaacgatcttacaggaatagctaaagaaag

SEQ ID NO: 222249 - DNA, 536 bp, Homo sapiens
gaacagtagaaattacccagtctgagtaatagagacaaaatagactataaaaattaacagagccttgggagcctgtaagaatataatagaagatctaacattcacgtcttcagagtctcagaaaaagaggagaaatacggcagggctaaaagagcactcagaaatagtggctgaaaatgtcccaattttgatgaacaatataaacttacagagcaattctaaagaggataaactcaaagaaatccacaacaagacagattttaattacactgccaaaaaccaacgacaaagattccaaaggcagccwaagagaaatgacaccaatagaggaaaaccacgtaggttgacagtggatttctcatcagaaaccactgaggccagagcaactggcacaacatttttcaggtgctgaaagaacagaactgtcaacccagtgaaaatatctttcaggaatgaaaaagaaatctcttgaatggaaggaaaactaagaaaatttgtcaccaccagaacgatcttacaggaatagctaaagaaag

SEQ ID NO: 222250 - DNA, 526 bp, Homo sapiens
aaaacaaaaccagcaaggaaactggaagaaaatagaggtttttaaaagtaatttgagagaatgagtaaaacagtgggatctttcttaccccctaataaatgaaaagtgagggaatttaagaaattagttttttgttgttatcatctgttttacagattattgtggatatttgcaatggtaggctgaataatgtacccctccaaagatactcatgttttaatccctaaaacctgtgcatatgttgcgttagatggtaaattggattttgcaaatttgattaaggatcttgcaatggggaggctgtcctggataactggattggcccagtgtgatcacaaaggttcytaataagagggaggcaggaggaattagtcagagaagggttaagaccaaaagcaaaggtcaagagagaagatgctgcactgctggttttgaagatgatggaacatcccataagcccaggtgtgcagctaacctttagaagctggaaaaggcaaggaaacatattctgtagagcctccagaag

SEQ ID NO: 222251 - DNA, 552 bp, Homo sapiens
gttttggagttcagattttcttttggattttggaatatttgcagaatacctactgattgagcatatctaacctggaaatccaaagtgctccggtgaacattttctttgagcatcatgtcaatcaatgstcaaaaagttcaggattttggagcttcttggattatgggtgctcaacctgtataggaaacgtggagatggagcatgaatcagttgtatttgatacttgctggggaaaggatttccagaccaccagagaagaaggatcacccatttaacttggtgtatccagtgccatatcagagccttttcttccattttaacctcaccagtagtctttagatttgtggtttatgatcaagaaattaaatcctagaatacagattagtagagcaaagttgaggcttttgattatctatttcttttaaggtttttcgctttaacactttacagaagaatttctagactgtctgagaagaatactccaggtatttgtcccagtcttaaaatggttcaacaaaaagttcataatcactttttagaacccttttcgca

SEQ ID NO: 222252 - DNA, 606 bp, Homo sapiens
atatatgaaactttcaggttgaagaagattcccagagtgtagaagactttctaataccatcctccaatttctgtccaaagtgtagcaatatatatagggcaaattagactaggactctgacaatatcctaatttatttcattggtgatagggaatgggtcaaatgaacacatacaggtttgcacaccatcaagaagcctatgggtttagtcattttagggcagtcaactgtttcctgctgatgtttattattgtgtatattttatgacaaaaataaagtaagagagaaatatcattcacaattccattactgtaacatactaatagtttttagttcccttatccacacacatatctgaattttatatggttacaatcatggtctagatataatttcatattatgcttttttgagctaaatgttttctctaaagcactttctcatgttttaaaaatatttcctctatatatatttaggttkcttccaatgttttactattctagagaggtctacagaaaatatcttcaccagtttacctttacttttttttttaaattaatcctttaggcaaaagtcctaagagtgggattatggagtagaaaatta

SEQ ID NO: 222253 - DNA, 606 bp, Homo sapiens
atatatgaaactttcaggttgaagaagattcccagagtgtagaagactttctaataccatcctccaatttctgtccaaagtgtagcaatatatatagggcaaattagactaggactctgacaatatcctaatttatttcattggtgatagggaatgggtcaaatgaacacatacaggtttgcacaccatcaagaagcctatgggtttagtcattttagggcagtcaactgtttcctgctgatgtttattattgtgtatattttatgacaaaaataaagtaagagagaaatatcattcacaattccattactgtaacatactaatagtttttagttcccttatccacacacatatctgaattttatatggttacaatcatggtctagatataatttcatattatgcttttttgagctaaatgttttctctaaagcactttctcatgttttaaaaatatttcctctatatatatttaggttgyttccaatgttttactattctagagaggtctacagaaaatatcttcaccagtttacctttacttttttttttaaattaatcctttaggcaaaagtcctaagagtgggattatggagtagaaaatta

SEQ ID NO: 222254 - DNA, 621 bp, Homo sapiens
actaataactcttgaatattttgcttttcacaaggttttccttcaacaaaaagtatgtaggcttgtaaggacagtgggcctttagaaaactcagccattcccagaaagacaaatgcacatttgagtcatttcccaagagagatgtcactagtcaggaaggtatgtggaaccacacggttcagcttgcaatttagaatttcaaaagcaggagttggccaaaagttgcctrgggtttttaacctcacgtttttaccataaattttctttcttatttgttgagtgctgacctcacccttgtcataggtgggatagaagagatgctagctgcctctgatcaacattggagaaaatgcccaattaagaaataggcttcatagccaaggtgactaaatcccaaaggcttgtttgttttctttgtgcaacccaacttcttatgggcttgcttttggattctgttgtttcctttgtttttgtttggttggttgtttatatgttgttactaagactctgtcttggagatgttggacaataggctagtgtctcattggatctaggtgttccagatgtgagctaggtcctagaaggaggtggtaagaaggctttgcactatgccctggggag

SEQ ID NO: 222255 - DNA, 600 bp, Homo sapiens
taaacattgggtacacatggacataaagatgggaacaacagacactgaggattcctagaggggggatggatggagagtaggagaggggacaagggttgaaaagctaactattgcatactatactcactatttgggtgacgggatccattgtactctaaaccatcacacaatatgcccatgtagcaaacctgcacatgtaccccttgaatctgaaataaaagttaaaattatatattttttaaaagataagtgtggtcaaatgacttcatagaagatagttttccagaaaaggtttgtaatggctgacagtaagtaaacctcctcatctcctctttccaacccttttttattgtggaaatcgcattaccaaagagcaacaagactgattgaagaagtgaggggcaggggagctccacactggaaagcactcagatgtccatacataataaaatgaataagtaattgggatttattcaaacagtgaaatttaacacagcaatgaaaatgaatgcatcrtagcacacaacaccatggatgaattctaaaaacataagattgaataaaagaaatcagacacaaaagatacatattcaatgattc

SEQ ID NO: 222256 - DNA, 552 bp, Homo sapiens
aattctatttctcaagaggaaactcaaaagaattggtaagctttcaaaattataattctatctttgcaatcacacatgttgttcatgctgcagacaaaaggaaaagacattcggagccaaggtggctgcacactcccactgagaaactcggattttaaaaagatgtgccaaaaagtggaaagaggcacgctgccaaagattgtgttgaagaaaggcagggaccagtaacagatcagaagggccaaagaccagagtgagctgaggcttagagaaaagaaagtaaggataatggagggctcttaaatttagagcaagaataaggaaggaagaggctcgctgcctgaggccagtggtgtgatgttgatggatgacatgaaraaaacagaactcctttcctcccatttagtcctgtcttctctgtcaaggagagtgatctttggactgaaaagggtagaacgaacattgttaagagaaaattgaagcccaagatgggtgtagagattatgcgagagcatgcatccgctgtaaatgagccgaaatgtctggatctga

SEQ ID NO: 222257 - DNA, 584 bp, Homo sapiens
gaggaggagagaaaagtgaaacctcccttgcaaaaattgtaacagtgagaaaattatggcagtgaaagagatctgatttaaccaacccccatcttgcctttagccttcaaactgcccttaattatcccttggcttgggtctacctagctttgggagacatttagtttataggttaaattgccgggcacggtggctcacgcctgtaatcccagcactttgggaggacgaggtgggcggatcccgaggtcaggagatggagaccatcctggctaacacggtgaaacgctgactctactaaaaataccaaaaattagccgggcgtggtgctgggcgcctgtagtcccagctactcaggaggctgaggcaggagaatggcgtgaacccggaaggcagaggttgcagtgagccaaaatcacgycactgcactccagcctgggcgacagatggagactgtctcaaaaaaaataaatacataaaaaataaagaaataaaaataaatgataataccctcctcgcaagcttaaccacctttgcaaagctaatgagaaaccaccagactagtaggaggataggagcctgaattc

SEQ ID NO: 222258 - DNA, 437 bp, Homo sapiens
agttaaaaacaactgaaacatatgtcaacagtaaataaactgcagtatattcatacaatgatttactctatggcaatgacaataaacaaactatatgcaaaacatggatgacccttacaagccttagagcaaaacaatcacaaatcaaaagactgcatgcagtaatattccatttatataaaagcaggcaaaactacattttctagggatgcatmtattagccaataaatgcagtaataaaacccaaagaacagtgattaccataaaagacaaggcggtggtcatcattagagtggagaaagagaggagtgttttcaaaaagagatacatgaggggcttccaggtggttgttatacagcatttgcttcaatattacactgttcacttatattttacacccctttctacataatattatatttcacaattagaaaaaa

SEQ ID NO: 222259 - DNA, 583 bp, Homo sapiens
aaagaatccaaacagagtaggattctaaaattctttacattatttccctttccttgtcagtgaactaaagggctcccaaaatctctcctgcagcattttccttgagaaggaggaaggtttgcatctctgtaagtataggttgagtatcctttatctaaaatgcttgggactagaagtgttacggatttcaattttttttttttttttttggatcctggaatatttgcatatatgtaacgagatatcttggggatggaactcaagtctaaacatgaaattcatttatttttatttatatatatattttttgagatggagtctcgctcttgtcatccaggctggagtgcaatggcaccatcttggctctctgcaacctccacctccygggttcaagcgattctcctgcctcagcctcccgagtagctgggactgcaggcatgcgccatcacacccagctaatttttgtatttttattagagacggggtttcaccatgttggccaggctaatctcgaactcctgacctcaggtgacccgcccacctcagcctcccaacgttctgggattacagccgtgagccacca

SEQ ID NO: 222260 - DNA, 459 bp, Homo sapiens
aatttcacccacagttttctaaggaactggtattctgtgaatagacccagggagatgctgctataagaggcctgtggggtagcttcagggtttcatggaggcctgctgggctgctcactgtgtattcatttgccccttcctctctggttgtctcacttataaccatggagatgctttcaagggcatttaacagaggtaaagcagcctgttttccctgacttaccccccacccccccacccacacacgcatgcacagcagttgctttcaggagctataaacatctctggatgggctrctggcatagctatccccccactgcactgggattctgtcctctgttgctgtcttttctgcaggtcatttgttggccagccctgtccccacttctaacaactcccaccattgacagttacagtctctttcctgtctctttctctgtattttcttgctttctcttt

SEQ ID NO: 222261 - DNA, 573 bp, Homo sapiens
aaataccatcaccttaggggttagggtttcaataataagattttgagtgttttgttgttgttttttttttttttttagacagcctgtcacccaggctgcagtgcagtgacatgatcttggctcactgcaacctccgcctcccaggttcaagcgattctcatgcctcagcctcctgagtaactgggattacaggcatgcaccatcatgcctggctaatttttgtatttttagtagatatggggttttgccatgttggcctggttggtctccaactcctggcatcaagtgatccaccagccttggcctctcaaaatgctgggattacaggcatgagccactgcacctggctaacaataagatttctggaagaacataaaagttcagacggtagcagggaygtctagatgggctggcaaagaacctgcagcatcatgagccttctggattttatagctctgatcctagaacataagccactgggtggtgttgtgtgggttatggacagctttgggcccaacagcataaagtagtactggaaggtatacaattctggagatgaattccacccttaac

SEQ ID NO: 222262 - DNA, 573 bp, Homo sapiens
aaataccatcaccttaggggttagggtttcaataataagattttgagtgttttgttgttgttttttttttttttttagacagcctgtcacccaggctgcagtgcagtgacatgatcttggctcactgcaacctccgcctcccaggttcaagcgattctcatgcctcagcctcctgagtaactgggattacaggcatgcaccatcatgcctggctaatttttgtatttttagtagatatggggttttgccatgttggcctggttggtctccaactcctggcatcaagtgatccaccagccttggcctctcaaaatgctgggattacaggcatgagccactgcacctggctaacaataagatttctggaagaacataaaagttcagacggtagcagggacgtctagatgggctggcaaagaacctgcagsatcatgagccttctggattttatagctctgatcctagaacataagccactgggtggtgttgtgtgggttatggacagctttgggcccaacagcataaagtagtactggaaggtatacaattctggagatgaattccacccttaac

SEQ ID NO: 222263 - DNA, 272 bp, Homo sapiens
agagtctaagtgtttcatttagtgtggaaattaaggggaaaaaacatttcccccttagccaaaaggaattaagtacactggattaatgggttaataaacagcccagatcatcttctcagagcctttagcaggggcttctaaatctccttaatactttaattggggtttttcatgtaaggagaaataatagttcccycctccacccccaagccctgcaagtagaaaaacctaaggcttatcatcttaacatatattcaagttataattgtgtg

SEQ ID NO: 222264 - DNA, 285 bp, Homo sapiens
ttctaagaacctggaatgtcatgcagtacatgtccagcttattgatgtgttgaaattttttgcctttttaggaaacttaagttgttatccartgcaaagtacaaaacataattgaatttgcaatggcaagaaaatattttattcagcccttaatcattcaaaattttgtctgttttgcaaactggatagactccaaaggaataaattatatgagatgcatgaacactcaaacatgaaaacaattgtgtattttaattagagtagacaacattagatatatacctg

SEQ ID NO: 222265 - DNA, 403 bp, Homo sapiens
atgtttctttgcaagagctctcaattcttcaggctgatatacagttcatctctgtttggggtaaacttcttagtagcagggactatgtatctcttctttttctcttttcccttcccctctcctgtggcaacccaccacctctaggagacctatgctgtaatcgtccttagtaagttttgactgatayactacaagagaacattttcagaaatatactcccgtcaacagggatcatttaatcaaatgttgtagtgtccagactaattcgtaagttgttaaatttcctggagttgagaacagttattaggctgacgtgcaggatattctcaggacttggttagtgttttgtacctgtgttgcagtcactggctggagttttcattacatgtctttcagagtcacc

SEQ ID NO: 222266 - DNA, 538 bp, Homo sapiens
tggacagatcttggtgtctggttagaagttcaacctgaggtgtggcaggaaagggagagacaagcagagcaggagtcccaggtagaacctgactcagtaagaacccagtccaacctctgccatgcattgtgcacctcagtgtccccacctctcagagaaggagtgagacaagattatctctaaggtcccttccaatacaaacatgttgtaatcctaccttatgaatctagcctttctgtagcacagagacaggaccagctccagtgttaggcagaaggctggagggacaaatatcactcaaaaaaaaaaaaaaaaagctcaggcttgccattaaagkcattgaatgcaaatagacacaaattattaaacatctttaaatgtgaacctatttgataagtgtgaggtcttatcatctaaccatctcatgtctgaaaggaaataagattgtaagttctttaagaaagacatcaatttcttgtggtattcattatctaatacactgtgcctgcttcaccctaaaaaaaaaaaaaaaaaaatc

SEQ ID NO: 222267 - DNA, 552 bp, Homo sapiens
accataaaactaagtgtaacacatgcaaaataaatcattcatttttgtcattgatgaaaagtatattttaatgctattacagtataattattatggcatttattttttgtctcctatcaaataatataatatttttgaattttgcatatttggtcagttttgcttagctttaaggacatttaaatacatttctccaaaaatttcaaacaggtgaaatccacctttatatcaaaacttatactgaaatatttttctcwtcagccaatgaggatgcaaaaactgacaacctaagtagagattaatctcaaacaaataatgctagagaaaatccttgtagcattttcagaattaaatcttttgccatttttatgcttggaggaaactgaaagataaaagagctttggtagtctcagtggagtcttaggtgagatactggacatattctctgaagaatgcatttccaccagagcttcagaaactgctcgtgtaatgccaaaatgatctcaagtaagaaaagccacctttaaaatgcacatgtctggtagacaggcc

SEQ ID NO: 222268 - DNA, 576 bp, Homo sapiens
ggtaggtaagtttcctagcaggcattgggactgagaaaacaagaggctgagtcatttttagagcatgccacagaaatgatgcccatgtgaatgacaaacataagagagaaatgctgctctctaagcaggagggactgggctgtactaggtattatgcatgtcatcaaaatgctcaggatctctgtatctgtggcagacaacttcacagttccacaaagagtatacagcagagtagagaacacctgggattcacagtctgatctcataaacctgagcctaagtgacctaaatcaaaggtcacgacctggttgtacttgacaggtagaatattttatttgatctgcacaatgttttagaaatcggaaaatttctcacagaaatctatactgttgcattctctgaaaagattagaaaaactagaacacyaaataatggcagccagacttttctaaatggagcatggacccaccagtcccctcagtctctctcttctctatgctggttcatccaatatggcagacattacttctctgcttcttccttggaaatagctggctttctttaaggcagcaatga

SEQ ID NO: 222269 - DNA, 566 bp, Homo sapiens
gcaggtagttaagcatacatgaagaaaaacaaccaaatacaacatatcatggtttcatatcatatcatggcaccaagggaagaatgcttaaaggattatgggaacacacaggatagagcaattaagctctgaaaaagtggaaggtgatagagaagaaagggggtaaaggagacactcagagaagacttcacgggagagggaacttctgagttggaccttgagaaatgagttggagtttgctagagagaagtgagaaaggggatcttccttcatagttcaaagctacctggagattttgttattcttatgcaattcagccagtccagcctaaattgtagaaattgaaaatttaaccctaagttcaggtgaaactgaaaaaaaaaatgggtgaaataggtttcttaaaaatcaaactgccatggaaactgctttacccaaaattttggtccacagtctttattagattatctattgaggcaaataaagtttagtcatgtgaataggtcccaattttgtcagaaatataattgagatccaacagycttttataaaccagtgagtctgta

SEQ ID NO: 222270 - DNA, 513 bp, Homo sapiens
aggctgcgacctgcgtagatgatttagcagactgcccctgcccatgctcctgctcctgctcctcctcctcctcttccccgctctctccctctcgcctcctcttccagtccaggcgcccagactcggcgaagcgcagcgcctgccaccagcggtgcctcgggctgccyggcgcgccgcgctcccaggttctgtctcgccgcaccccggcgggcactggcgcgggcaaggacgctggcggggagaacgccctgggctcaacgtactccagaatcgaatgttgagagaagcagtgctctgatccagctcaggagaaaaaggagcgggttccgagtgagacttctggagccagctggacgtgccggtttgcccagtgcggcgcggctgcacgcaccgtccacaaggtgaggggcgcacaccttccgggacgaccttggcttcccttcttacccccacccactccaggtactccagctctggcttggggatgtttgccagctttgaggcgcaaaggcg

SEQ ID NO: 222271 - DNA, 601 bp, Homo sapiens
acgaagtcagcgtttttcagaagtggtgcctaggaagagacaaaatccaggacacacctctagttcaggtaacactgcaatatatttcaatttcctgctgcgtgatggggttattattgaagagggaagtaaggtatatcattcacagcacattgtccccacctggctcaagcaccacccattccccaggtgggctcaatatgctacccccaccaccaccaagataccaaggctgcaaatgaaaagtagatctcagccaggcatgatgggtcacacctgtaattccaacactttaggaggccaaggcaggaggatcacatgagcccatgagttcgagaccagcctgagcaaaataatgagaactcatctctacaaaaaaatttaaaatgagccaagtatagtggtgtgtacctgtagtcccagctacttgggaggttgaagtgagaggatcrcttgagcccagaaagccaaagttgcagtgagccaagtttgtgccacggcactacagcctaggtgacagagcaaggccttgtctcaaaaaaagaaaagaaaagaaagaaaaagaaagtaggtctctttgcagaaagcctcaggccctgaa

SEQ ID NO: 222272 - DNA, 555 bp, Homo sapiens
gaaggttatatgacctttccccagtcagcttccctacctataaaatgaaaataatgctaatacttatcacctcagagaggtttttgcagggttaagtaagttaatatgtgaaaaagtgcttaaaacagtatctggtatattttaattactacgtaagtgtgtccctgctgctgctgctgctgttgttattttgaaggcagaaagaaaatgcaggagagtaaatgacctatttcactcatgcagagatttagcagccaagctaaaattcaaatttaggtcttctcttttctctgcttgttgttctttctcaagagctaagcctatcgtcatctttatgatatatttgagtattaagctttcagaagtttccatccacatawttgaacatttctatcaaaagttttgaggtagaccaggaggccagaaaatagatttaagttactagcaataaccagatgctactgtaggattataggttatcacaacttgtaactaaaaattatgatttttattataataagtttaattacatttatttaattttaattaaaatta

SEQ ID NO: 222273 - DNA, 629 bp, Homo sapiens
tagtttcatttgcattccttctaagtataagattgcttaagcattagttcatagtttaacaaaaacattagtggttccttttctgtgaactctatttatattttcagttcttttataggtgggtgttcttttttgaattggtttttggcaactcctttaatattgatgaaattagtccttaatacataatctgaattgcaaatatttttcctagtgtggcattcgttttcattaatggtatttttacgttacagagttatctagttttaataacttagtgtattaatcaatcttttgtggcctctaagttttgtttcatgttcataaacatctctattaacacaagattattttttaaaaagaaacttcctagttttcacttatgattttttatgtaaattgttaatacctttggtatttattttattatgaggtagggatcyaactttatttttttaatagatgactattaagtggtcccaactctattcatgaataattcaactttcttccatgagtttgaaatacttctgtcatatactaaattcccttgtaggggaagtgctttgtaaatgccatcattattcagtttagaaacgcagacattcccctaggttaattcactagag

SEQ ID NO: 222274 - DNA, 582 bp, Homo sapiens
ctttttggttcaaaaacatccacacgattatccattttcctaagacagttatttctctcccaatcaactaatttagcacaccaagactattaatttagtttataatacacaattaagaaaaaatacccacaaagaatgaattaaaatgctccaaccagatatttttatatagaagtgaagtctggcctttaaaacatcaaacttattttagccatcaaaaatagaaaaaatgtgttttgattaaactggatatgattttaagcatcaacaaacacacatgaataggattatttgctcctgtcttcagtatttttagatattcagtgcccctttagttttattctgcacctttcctttctaagtcagtattggctgcaactacccagtgcttctttagcagtcatcaccaaaatcacaccaactgtgtacaaagtaccaagtcagatacttcatagccaatatcactgtcactgccacsctgcaaaactggcatgattatccacattttgtatatgaaaaaacttacgtccagagattaagttgttcatcacaatgcaacgaagagacaaagtcaggatttca

SEQ ID NO: 222275 - DNA, 413 bp, Homo sapiens
acagagcctatctttcatgaaataatacataatgaccagctagaacataagtgatcagaaaccagctagaaaacaatttatcaggccaggaatggtggctcacgcctgtaatcccagcactttgggaggccraggtgagcggatcctgaggttaggagtttgagaccagcctggccaacatggtgaaaccccgtctctactaaaaatacaaaaatcagccaggcgtggtggtgcacgcccatagtcccaaggtactccagaggctgaggcaggagaatcacttgaacccaggaggcggaggttgcagtgagccaagattgcaccactgcactccaggctgggcaagagagaggctgtctcaaaaaaagaaaaaaaatgatcaaggtaactgggttcaacaaaatacccaagac

SEQ ID NO: 222276 - DNA, 461 bp, Homo sapiens
aattagtgaaataacagaagtaggagcagatgggatcacatagaagggaaaccacatgacagggtatgagagaagtcaggaagccctcccagaggaagggatgcctaagtcaagatataaataaagagtgaggcaaggggaggaatctgggaagaactgttcctgaccaagggacaatagttgaagtgtttctgaggatgaaaaatattcccagaaacatcaagaaactgaaaaaaaaattagcgctcaagggagatatgtaggtaattgtgcagataataaggaaaagttaaaggtatagaaaatgataggtgcmccagttcttgataaggatgggactcagagagcaggaggctttggagatgaggtcgactcaccaccattgtgataggtgggaaggagatgacgccatgtgggacacaattatgttcatgcattttgtggcaaaagttgcagaattc

SEQ ID NO: 222277 - DNA, 461 bp, Homo sapiens
aattagtgaaataacagaagtaggagcagatgggatcacatagaagggaaaccacatgacagggtatgagagaagtcaggaagccctcccagaggaagggatgcctaagtcaagatataaataaagagtgaggcaaggggaggaatctgggaagaactgttcctgaccaagggacaatagttgaagtgtttctgaggatgaaaaatattcccagaaacatcaagaaactgaaaaaaaaattagcgctcaagggagatatgtaggtaattgtgcagataataaggaaaagttaaaggtatagaaaatgataggtgccccagttcytgataaggatgggactcagagagcaggaggctttggagatgaggtcgactcaccaccattgtgataggtgggaaggagatgacgccatgtgggacacaattatgttcatgcattttgtggcaaaagttgcagaattc

SEQ ID NO: 222278 - DNA, 426 bp, Homo sapiens
aaaattagccaggcaactacttgggaggttaaggcaggaggatcacttgagccaaggaggtcaagcctgcagcaagtcatggcaccactacactccagcctgggtgacagagcaacaccctgtctcaaaaaaaaaaaaaaaaaactaaattaaaaaataaaaaatagggaaatgtaatagtgattagggacagaagcactttagatatgatcagaaaaaaagcctytttaaggaagcaacatcctctttaagaaaatgacaaggggtcagttttagtgtaaacatctggggctgcatcaggaaggagcttggcatgtgtgagaaacggaaaaaagaaagcaactgcagctggagtgcagtgggcaaacatggggcataggagaggagctcagcgagagaagtgagggctggctcctggaggggcct

SEQ ID NO: 222279 - DNA, 596 bp, Homo sapiens
atatttaaatttactgcttcatttaaattatcagcttaattgaataagaatattactaagagaatctgcatttttttaaactcaccaaaatgttaattatcttagtatatttaaaaagtagcaataagarggcagcttttacatatttttaggttgaaattccattcagagctacatcttgcaactaagtggtttcttgtgtccaaaggagacagatttccactccctgtttgggaaccactcaagcagattacacaggcatcaagactagctggctctgtcatttcattttatttgcaagggaagagtccaccctttatctttttttttttgagacggagtttcactcttgttgcccaggctggagtgcaatggcacaatctcggctcacggtaacctccacctcccagattcaagcgattctcctgcttcagcctcctgagtagctgggattacaggcgcccacgaccacacctgacgaattttggtcaggctggtctcgaactcccgacctcaggtgatctgcctggtgctgggattacaggcgtgagccaccatgcccggccccttcatcttttttaatactttagttccca

SEQ ID NO: 222280 - DNA, 596 bp, Homo sapiens
atatttaaatttactgcttcatttaaattatcagcttaattgaataagaatattactaagagaatctgcatttttttaaactcaccaaaatgttaattatcttagtatatttaaaaagtagcaataagagggcagcttttacatatttttaggttgaaattccattcagagctacatcttgcaactaagtggtttcttgtgtccaaagkagacagatttccactccctgtttgggaaccactcaagcagattacacaggcatcaagactagctggctctgtcatttcattttatttgcaagggaagagtccaccctttatctttttttttttgagacggagtttcactcttgttgcccaggctggagtgcaatggcacaatctcggctcacggtaacctccacctcccagattcaagcgattctcctgcttcagcctcctgagtagctgggattacaggcgcccacgaccacacctgacgaattttggtcaggctggtctcgaactcccgacctcaggtgatctgcctggtgctgggattacaggcgtgagccaccatgcccggccccttcatcttttttaatactttagttccca

SEQ ID NO: 222281 - DNA, 596 bp, Homo sapiens
atatttaaatttactgcttcatttaaattatcagcttaattgaataagaatattactaagagaatctgcatttttttaaactcaccaaaatgttaattatcttagtatatttaaaaagtagcaataagagggcagcttttacatatttttaggttgaaattccattcagagctacatcttgcaactaagtggtttcttgtgtccaaaggagacagatttccactccctgtttgggraccactcaagcagattacacaggcatcaagactagctggctctgtcatttcattttatttgcaagggaagagtccaccctttatctttttttttttgagacggagtttcactcttgttgcccaggctggagtgcaatggcacaatctcggctcacggtaacctccacctcccagattcaagcgattctcctgcttcagcctcctgagtagctgggattacaggcgcccacgaccacacctgacgaattttggtcaggctggtctcgaactcccgacctcaggtgatctgcctggtgctgggattacaggcgtgagccaccatgcccggccccttcatcttttttaatactttagttccca

SEQ ID NO: 222282 - DNA, 516 bp, Homo sapiens
ctcttaaaacataagtgaaattgtgcttagagtaaaacccacaattcctacaatggaatgactataaagccctccctgctttttcctttctcwctttatttcccaaaaatcccctgtcctcaagccttctttactctgctccttgaacacatgatgtaagttcctgcgttagatcctttgcactagtggtttcttctgcatagtgttctttcttctaataactgaaagacaaacccctttacctcctcttaaatctttgcagtagtatcataatactgtaaagggcaaccaaattattatttaaaatgctacttgtttcccctcctcaccgtttctatctctttacttagacttatttctgttgtgtgtattcccccagtagaatgtaagattcacaagtacagggatttttctctctcttgggttcattaagagtccttagtgcctagaagagtgcttggcatgtggtggtgatcaataaatattgaattaatcaaaattcaggcacagaaagag

SEQ ID NO: 222283 - DNA, 451 bp, Homo sapiens
ggagaaatgaatttggagttatgggaagggmaggtaccagagagatcagtaaagagattgatattaatgtataggaggtcaaataggcaagatttacagtttattggaagtgagggttagggtaggagaactctaggatggagctcaaagtttccagatggactgtggagggattaactgataatacaaataccggaggaggaacaactttgggagtttatgataagctctatcaaactggtacaacttaaagtacacatgggacagttggatatacagggtatatgtttacgatgataatctggaatcttcatgtagaacagtggttctcaaaccttagtatccatcataatcatttagagagcttgtgaaaacagattgctgggacccacccccacagtttcattcagtcagtctgaagaatatgcatttctaacaatttcccaggtga

SEQ ID NO: 222284 - DNA, 451 bp, Homo sapiens
ggagaaatgaatttggagttatgggaagggaaggtaccagagagatcagtaaagagattgatattaatgtataggaggtcaaataggcaagatttacagtttattggaagtgagggttagggtaggagaactctaggatggagctcaaagtttccagatggactgtggagggattaactgataatacaaataccggaggaggarcaactttgggagtttatgataagctctatcaaactggtacaacttaaagtacacatgggacagttggatatacagggtatatgtttacgatgataatctggaatcttcatgtagaacagtggttctcaaaccttagtatccatcataatcatttagagagcttgtgaaaacagattgctgggacccacccccacagtttcattcagtcagtctgaagaatatgcatttctaacaatttcccaggtga

SEQ ID NO: 222285 - DNA, 482 bp, Homo sapiens
atccattaattaaataaataaaagcaggtcaatttgtattgccagatgaaaactaaggaacatgatttcctacagaaattctttgttattgacatcattcaccatgaaaaagacatagtttcagcccctgcatcatttatgatgactattacggggcaggacacttcctttttctgctggatggacagatgcccttggcttccacatggtttacatgggtcctcaaaactgagaagaggtaatgaaggaatgctgaaagaaaaattgaggctcaaagcagattaattacaggtcataaaagagaatgttggcaatcaatgaagatacaaattccaagaaaatgagtctctacagtgtcaggctgagcaattagggaagaaaatgtaacgaagagtccaatatagtctaactacttaattgttgagtggttcttggagcataaaaaccatgggaaaagcamaaatctcctgtctttctgcctg

SEQ ID NO: 222286 - DNA, 600 bp, Homo sapiens
tctcaagttagttttctttgcctcagacatagtcaatgattggaaggaatctacactttcagtctcagcacacacaattcacatgccagtcttgcattccaatcagctccaaacattttatgatcacaaagcctgaaacttgacatttctatcttgtgtcattttggagagaaatgtcctcctaatttctttttcccattctaaatataatcctgcccacttgtgggagctcagctcagattacaccacactgaagaagtctctcctaaccatgtcctgctctgggtgytcttatttttggcatattgtttttactactcacttgataatttgaatagagtgattcattcattctttctgtctctctttacacacacacaaacacaaacacacatgcattcccatgaaagcactactgttctagaatagtgtcaaagagtaaaatttttgtacccatcattccgtccctccttttccagccaatggtcattgaatcaggtacagcatatacactttatacaaattggcctaatttgagactctactaaacatgtagagaacatatatatatattggattaattagctatggattccgcat

SEQ ID NO: 222287 - DNA, 516 bp, Homo sapiens
gccctgggatgtaaccatcattacgctctttgattctatgaatttgactgttttagatgcctcatataaatggaatcatgcattatttctgtgactggcttatttcacttagcatgtcctcaaggtgcatctacgttgtcacatattacagaatttctgtcttttaaaaggctgactagtacttcattgtacgtatataccacattttctttatccacttctctgtcaatgaagatttacatttttcccatactttggctattgtgaatggtgctgcratgaatatagaggtgttaatgtctcttcaagattttgatttcaattcttttggataaatacccagaagtggcattactggatcatataattccttgggattttttttaatgtaaatagtcatattatctgcaaatagagaaacatttttacatcttgttttccattctttgtcttttatttcctttctttgccttattgcaatgactaagattttcagtacaatgttgaacagatgtg

SEQ ID NO: 222288 - DNA, 513 bp, Homo sapiens
ccacttttggtctgatattctaggatgatggtttattatggagtaacttttaaagagaaagttaaatagtgcttttgaaccagtatttaacttgggattcttaaacaccaagggctcgacaacgtaatttagaatcataaactttttaactcagcataagccaaacatttaagcacagaatcccccactttatttatttatttccatagcatctgttaatgtraatgtattttgggaaactgagttctcatttgaaattcagagagattaaatcacttgctgaatgaatattgggctgtactgtattaaattactgatattagacttgttgacttacaaaaggcccttccatgtggttcagcctaatgtcgtatgattgcttactacaagcctagagtcctaacttccggtttagttcactttgaagattcaacttgtgaggatgtgtttatactatcaccatcatcagtatcagctaccaatgcacattgattgagtgcttattttgggtat

SEQ ID NO: 222289 - DNA, 649 bp, Homo sapiens
atttatgtggagcaggagctgtccaggcctctgtagtccctcctggcctctgtagtccctcctggcctgtttctctcatttttatcaccagggtggaccaagcatgagactgtgtaacttctgtttctaacagctcccctggctctgaatttgcacacttctattctcctgtccacattgatccagaagtatcagttctgtacacagcttctcattaaattccctcagtggttaaatattagcttctggaggaagctgaaattccttcctgtggcattcagggcctccatgatgtggttcccatatccctctcagtctcatttccccctctcctcctcctccaatgtttctccaattacactgaaactatttgcagttgcctggatgggccattttgcttcccgcctccacagcttccaacaggtggtttcttctgcctgaaaatcttcatctcacaygacccaactgcactccaactgcctaactgtgctcctcccttaaaactaaagggggccatccttgacctctgcctgactccagccagtttaggtgccttctctaggccctcccacaacactgtactgccctcggccacactacctgccaccttctcttgtaagcatttgcctgtcctcacacacactgtaag

SEQ ID NO: 222290 - DNA, 457 bp, Homo sapiens
ttaattttctgcgccagctcctgaggaaacatttcccccaccggggtgtcagagcagcatcaaaaggaaacagaagtagtagcgttcatcttcctgcagggcgagccaatgagcgcgcagagccgcgcgggcccgggaggcaggatgtgtaggcggcgagtcctcctgcatctcgctaccgagccagaccgcaggctgcgcggcgcggcgcaggcacagccaaagtgcccgagcccgcgtccccgcgtcggtacaaaaggagaaatgaggggatgaggccgaatgagtggtttctaatcgcgagaggccccatatggaatcatgaacttccgcaacattaggaactgacaactytctttaaaagcagaaagcatctgaaatttaccagatggttcctgccatggaaattaggtcatgtgatggctaaaaccacaccaaaaaaaatgcaaggctcagc

SEQ ID NO: 222291 - DNA, 438 bp, Homo sapiens
taaatgcttaggatttctttgccaaastgaggcagagaatttctaattaaaacccaagtcatttaagtatatgcgaatttttaacagaattaccctagagcaataatttgcaaatgactggggaacacaagggcatgtttaatttgaaagaaaaacatttttaaaggtacgtttgatatgatcagcctattgctcagcaaagaactgctgtttggacatttcacttggctacaaagatgtgaaaggcatgaatcttatagccactgaattgtgttggtctcggtgagctcataatccagggagtgatctgtattagctactgacttgcttccaagtaccatttgaagtgttgatcataatctttaagtacttagagccctgagcaatttagggattgtgtgtctctatgcagtcactgagataagctatttttccccc

SEQ ID NO: 222292 - DNA, 609 bp, Homo sapiens
agagataggagtagattgagctaggagtagatgatgttagaaacagagacgagaggttcaaaagttaatagagaggtgatggactgggtacaggaacatggagagggaccagccgtggaaaggaggagtgaggtggtttccagcggtggaaagagggaggagtgaggtggcttccaggagtgagctgggaaatcagcctgtgcccactgccagcacacagtctactgtttgccagagaaagtctcactgggggctcactcgaaagaaagagtgggtctacatcagctttgagtttcmcttaagattttgaaaacagggctgggtgtggttgctcattcctgtaattccagcattttgggaggcctgacctcgggtgatcagttcaagaccagtgaaacctcgtctctactaaaaatacaaaaactagccaggagtggtggcgtgcccctataatcctagctactcgggaggatgaggcagaatcgcttgaacccggaaagcagaggttgcagtgagccgagatcacaccacggcactccagcttgggcgacagagtgagactccatctcaaaaaaaaaaagatttttgaagacagatggtaaaagatct

SEQ ID NO: 222293 - DNA, 609 bp, Homo sapiens
agagataggagtagattgagctaggagtagatgatgttagaaacagagacgagaggttcaaaagttaatagagaggtgatggactgggtacaggaacatggagagggaccagccgtggaaaggaggagtgaggtggtttccagcggtggaaagagggaggagtgaggtggcttccaggagtgagctgggaaatcagcctgtgcccactgccagcacacagtctactgtttgccagagaaagtctcactgggggctcactcgaaagaaagagtgggtctacatcagctttgagtttcacttaagattttgaaaacagggctgggtgtggttgctcattcctgtaattccagcattttgggaggcctgacctcgggtgatcagttcaagaccagtgaaacctcgtctctactaaaaatacaaaaaytagccaggagtggtggcgtgcccctataatcctagctactcgggaggatgaggcagaatcgcttgaacccggaaagcagaggttgcagtgagccgagatcacaccacggcactccagcttgggcgacagagtgagactccatctcaaaaaaaaaaagatttttgaagacagatggtaaaagatct

SEQ ID NO: 222294 - DNA, 517 bp, Homo sapiens
cccctcttgtgagcccgtttcagtacagcagaagcctgagccatcagctctgtatggaactgggtttccttttggactgcaaagctgattatctttctgaagagtgtttcagtcaagatcatatgagattccaggccctgaaagtattcctgcaatttttcaggaagaaagaagtcagcaactcattcatatattatgttagaatcaaaattggtttagggccgggtgcggtggctcacgcctgtaatcccaacagttggggaggctgaagtgggtggattacctgaggtcaagagctcaagaccagcctggccaatgtggtggaatccgtttctactaaaaatacaaaaatyagccgggcatgctggtgtgtgcctgtaatcctagctactcaggaggctgaggcacaagaatcgcttgaacctgggaggccgaggttgcagtgagccaagatcgtgccactgcactccagcctgggtggagaggagttcacaccaacccagcgctggagctgagt

SEQ ID NO: 222295 - DNA, 622 bp, Homo sapiens
taggattgaaattcaaattttaggaactagaattgttttttctagttctgtgaagaatgatgatggtattttgatgggaattgcattgaatttgtctattgcttttggcagtatggtcattttgacaatattgattctacccatccgtgagcatgggatatgtttccatttgtttctgttgtctgtaatttcyttcagcagtgttttgtagttttccttgtagaattctttcacctccttggttaggtatattcctaagtattttattttattttttttttttgcagctattataaaagaggttgagttcttgatttgattcttagagtggtcactgttggtgtatagcagtgctactgattttataccttgattttgtatcctaaaactttattgaattcgtttatcagatctgggagctttttggatgagtctttagggttttctaggtatacgatcatatgatcggcaaacagcaacagtttgacttcctctttaccaatttggatgcccttgatttctttctcttgtctatttgctctggctaggacttccattattctttattagtcagtgaatctaatttttgagctgagcactgtgctaattgtaccaagaagct

SEQ ID NO: 222296 - DNA, 590 bp, Homo sapiens
aagaaggcattagctttgagggcatttgctgaatcaatttttatagctttgtagcttcacgaggctcagaagtcaggagacaaatcctgggttctgattgaaggtggaaaatctaagtgaaatccccttcccttcccaccaataaatttgggattccaaagggactatacacttagtattagggtgaccaggaaatatgctcatctccctttccagggggatctgcaaggaaaactgcttctctccaacattagtcttattccattgaaaattcataaccctaagctggtcttcccatgagtttgcagcccaaatttgtatcaagtgagtgtttgtaaaacctcaagctgagaatttatttcaagtggttctgaaatggtagtggccctcagatgcttgagaaaaggtaacacagatcctctctggaggaattgatcttgtatttcagacctcttgggatttccacggataaagtcctaaggaaaaataagcagttcataataaaaaaaagtcacagaaytcaccagaaaacatgatttgttaaataaaagccaacaggaacaatggtgaatagaatcagacctaaagat

SEQ ID NO: 222297 - DNA, 405 bp, Homo sapiens
tatatggccatttaatttgtgataaagttaatatgctaatcgttaatctattgtcccccccgcttctgaagtatgcctctatactcaatttgtgacatggctgaaactcaaaacccatttctactttggcaggtgactccctgtagaccgacccacagagggcgcaagagggagcgtggaggaccagacgagggaaaagattctttttttctctctctcttgggaaaagagggaagagcttcttgctccttccggtttgcttcctgttcctgtccgcttagccccgcagtgttcattgggtggtcctrtatcctggtttctcaacactttcagaactaggctcattgtttaggatctcagttccagaatgccctttctcagacaccaaaatgaattccaaagaga

SEQ ID NO: 222298 - DNA, 516 bp, Homo sapiens
tgtcaaatgttctcatccaagcatagcctacatttacccagccatcatcagcattgattcagcatgattgcaggcaaagtatggatgacctaaattcctataatattcttttttgcatggcagagacaaggaatgataagaaagaataaaagcaggctgaggccatatgcagcagccataaataaaaaaacagcaagtctaaaaggaaatggtctatacaaaaaatgctaaatttgcagtttttacgggttacctctgcaaagctaggaggtgggcaaggcccaagacatgtgcacagctaaaaccaaactgcactccatgatgtttgagagcctgactacccagtgttacctgcttgcatgcctgtcgacactccaaggcaatagccagttcacagcagcctaagccaacccagccatcagacttcttaaacacaccttaaaaacaaaatgtttaaatgttttggtcataagtagcaataaaaasagatagcatgccagatgtttcaaggctact

SEQ ID NO: 222299 - DNA, 507 bp, Homo sapiens
agatctcaccctatgaggctctttatttgactggtcctcctgaattgtaccccttatattaaaaccattatttaaagtatagtgcttcccagagttctgtgagttggtctagcaaattattgaacctgagggggtcatgggaaccgtggatttatagccagttggtcaaaagtgtgggtggcctggggacccttgaactraagctagtgtctggattaagggcaatcttgttggggaccatgccctttaacttgcggggtagatgctgattctgggtggcagaactgaattacattatatccagttggaagtaaaacagaatatagagaaatgaggtggttcctggaagggcatgtgggttttaaaagaggcactgtgtttaggaatagggatacaatagtgaacaaaagttatgctctctaacttcacccaggttaccacctggtagtaggacaaaatctagacaagagtaaagaattcaaggacaccgataaattaacagggaaa

SEQ ID NO: 222300 - DNA, 579 bp, Homo sapiens
gcagaatggtcagggattgaggatgaggagtaccagttttttctaccagtcctaggtcccaaggggaaaaaacatacaaatggaatataacatttcttgccaaaattgaaccaaatgaatcatccacacatgtaacttgaagtaaatgtgtgatgcctgtcttaaatgtgatgaggaaaattaaatctaatcaggtgacatttgaaacctctctatggggtggccaaataccaccaagtagattttgatcaaatttcctgcattttacttaaagcaatatcgagaaacctttgaattgtcagagctgttctccaattgctcagcaagtctgggcttcctcactggctgtctgggcactttaggcatcagagaatcatggagctggccctctgagtttgtrcaagtgacatagaaacaccatggtcagttccaatcagacctcccctgtgctggggttccttctcctggggctctctgcccatccaaagctggagaagacattcttcgtgctcatcctgctgatgtacctggtgatcctactgggcaatggggtcctcatcctggtgaccatccttgact

SEQ ID NO: 222301 - DNA, 579 bp, Homo sapiens
gcagaatggtcagggattgaggatgaggagtaccagttttttctaccagtcctaggtcccaaggggaaaaaacatacaaatggaatataacatttcttgccaaaattgaaccaaatgaatcatccacacatgtaacttgaagtaaatgtgtgatgcctgtcttaaatgtgatgaggaaaattaaatctaatcaggtgacatttgaaacctctctatggggtggccaaataccaccaagtagattttgatcaaatttcctgcattttacttaaagcaatatcgagaaacctttgaattgtcagagctgttctccaattgctcagcaagtctgggcttcctcactggctgtctgggcactttaggcatcagagaatcatggagctggccctctgagtttgtacaagtgacatagaaacaccatggtcagttccaatcagacctccccygtgctggggttccttctcctggggctctctgcccatccaaagctggagaagacattcttcgtgctcatcctgctgatgtacctggtgatcctactgggcaatggggtcctcatcctggtgaccatccttgact

SEQ ID NO: 222302 - DNA, 582 bp, Homo sapiens
agtttggtcctgccagagaagctagatattgaaggaaaaaaaaaatcccacaagggagggaaccacaaaaagaaatgtcccaaaatccataaacagactccttttaagtccttggctgactcctaaattgtacttttgcaggatgagactacaaggaacccaggggaaggtgaacatagactatagcagttagcatttgctgggcagacgatttagaattcagattatgccaagttagaagggcctagtaaaccccataagggccaaaccytgggagtacatacgacatccaagagctaagagtaaagctgaaaaaccttaacaaaacctgaaactgcctccagaggaaggaggtatttgtcagtaatttaactgcctgctggtgtgaaaacaacattcctccaaagaaggtaacaaaatcctaaatcccacaaagtatcatgcataatgtccattatacaatcaaaaattactagaaatgagaaaaataggaaatatgacccatagttaagagaaaaaacaatcatacccattggtgacccaactattggaattagcagataaagaatctaattatgataa

SEQ ID NO: 222303 - DNA, 330 bp, Homo sapiens
ctatattaaatctgaaggactctcatctcaatagtgggatttctaacactggtatctagatggggtagatattaaggcaggggtatagcggaagtattttacaccatacaaatmtgtgcagaagattgtgcctgatatgaaaaaacctcctcattggggctactttgttcattttctagaactctgttcttaaatgtgacaatattacagtttttgtagtgtaaggctatgtaattaaggatacttaagtgcatatatctcatgcaccatttttatatacaaacattgggattcctattgctgtgttttcttggagaaggtagaataact

SEQ ID NO: 222304 - DNA, 410 bp, Homo sapiens
ggaaaggtgcaagaccttgagaaccatggttttttggctcaaaacaaaatcattggtgagtaacattytttaaaatatcgtactcatctctaagcattaacctttttttagaatgaaagataattacactactcttacagtgcttaaaattgcatattggggctgggcatggtggctcatgcctgtagtctcaacagcttgagaggccgaggcgggagcattgcttgagtccaggagtttgagaacagaatgggaaacatagcaagaccacatctctacaaaaaataaaataaaataattagctgggcatgatggcatgcacctgtagttccagctattcaggcagctgaggtgggaggatcactgcaggccaggagttcaaggctgcagtgccccaggactgtgccact

SEQ ID NO: 222305 - DNA, 584 bp, Homo sapiens
tgccactgaaccacagacattgagggtaagctcaatgctttattctttttgtatatttccacagaaatcagcacagtcattttcagaacagagatattcaaaaaaaattattgaatggaattgcagcaccagtgcactctcatcttcccttaatttaccagtcatctgatgccccttgtctatggttcattttatggtacattgtgtcggctctcaggatgttttatataatctgtttcaggctctccctaactggacastgtgtgtcatgagagaaagaaattcataccttgaattcctcttctatcttttgctttctatcttcaccaacagtgcctaccataatgtcccttccacagaagataatttaatctcattacattaaagttacatctataaaaattcaaagaagcagcatatgttttatttatactggtgatgcttctagcaccaataaagcctttatatgttttccttaagcatagtccctagattcatatcctctgttttctttctttctcttccctttacagtagactgaaactgtatatacatacatataaatcagaaactacaaccttcat

SEQ ID NO: 222306 - DNA, 613 bp, Homo sapiens
attttttttggatgagaatgtaaatgttattatgcctttaatttcaaattctacttgttcattgttggtatataggaaggcrattgacttttgcatatttgcatatttgtaccctgcagccttgctataactgcttattagttcccagaagttttttttgttgattcttttagattttctccatagacaatcgtgtcatttgtgaacaaagagtctttttctttcttcccaatctacgtaccttttgtttcctttcttatcttgtattagtctggacttccagtatgaaagaatagtgagagagaacatccttgcctttttcctgatcttagtgcaaaagcactgtgtttcttaccattaagtaggatgttagctgtaggttttttgtagatgtcctttatcaagttgaggaagttcccctctattcctagtttgccaagtttttatcatgtgtgttggattttgtcaaatgctttttctgcatctgttgatataatatatgatcatgtgatttttctttttttgcccgttgatgtgatgggttacattaattgattttcaaatgttggaccaggcttgcatacctgggataaataccacttggttgtggtgt

SEQ ID NO: 222307 - DNA, 613 bp, Homo sapiens
attttttttggatgagaatgtaaatgttattatgcctttaatttcaaattctacttgttcattgttggtatataggaaggcgattgacttttgcatatttgcatatttgtaccctgcagccttgctataactgcttattagttcccagaagttttttttgttgattcttttagattttctccatagacaatcrtgtcatttgtgaacaaagagtctttttctttcttcccaatctacgtaccttttgtttcctttcttatcttgtattagtctggacttccagtatgaaagaatagtgagagagaacatccttgcctttttcctgatcttagtgcaaaagcactgtgtttcttaccattaagtaggatgttagctgtaggttttttgtagatgtcctttatcaagttgaggaagttcccctctattcctagtttgccaagtttttatcatgtgtgttggattttgtcaaatgctttttctgcatctgttgatataatatatgatcatgtgatttttctttttttgcccgttgatgtgatgggttacattaattgattttcaaatgttggaccaggcttgcatacctgggataaataccacttggttgtggtgt

SEQ ID NO: 222308 - DNA, 644 bp, Homo sapiens
acatattttcttagatttatgcctaaatatttcattttttttggatgagaatgtaaatgttattatgcctttaatttcaaattctacttgttcattgttggtatataggaaggcgattgacttttgcatatttgcatatttgtaccctgcagccttgctataactgcttattagttcccagaagttttttttgttgattcttttagattttctccatagacaatcgtgtcatttgtgaacaaagagtctttttctttcttcccaatctacgtaccttttgtttcctttcttatcttgtattagtctggacttccagtatgaaagaatagtgagagagaacatccttgcctttttcctgatcttagtgcaaaagcactgtgtttcttaccattaagtaggatgttagctgtaggttttttgtagatgtcctttatcaagttgaggaagttcccctctattcctagtttgccaagtttttatcatgtgtgttggattttgtcaaatgctttttctgcatctgttgatataatatatgatcatgtgatttttctttttttgcccgttgatgtgatgggttacrttaattgattttcaaatgttggaccaggcttgcatacctgggataaataccacttggttgtggt

SEQ ID NO: 222309 - DNA, 579 bp, Homo sapiens
gactaactgattcactccctctccagctttccatcacacttaatccagaaactttcacttccagtaatggcgagctagataattaggatgacaaggacaacttaaaaaactgagagaaataaattttttaaattttcttacatgtactaaaaaggtaacaaaataataaaataggcttgggccaaaatctagggtaaaacaagaacccacgaggtaaactcaccattcaaagcctctttctcccccctcacaccttgtttgtgctctagacccacatgatcagggacaggccagaaacctgaccacaggtatcaggaatkccagctcctgagaaagctaacctgatgactacttcattgtttttaacttcatctatttctatgaaacacattgattgtaccatttttttaaagtgttaagattattaggtatgtaaatttgctgcaattgtttttaaataaaaatactatctcttagaataatgaattttaaaaatacctctctctctgaaggcatttactagtctgaatgaaatatctgtgtagtcaggctgagtttttggtagtcttataggggaag

SEQ ID NO: 222310 - DNA, 580 bp, Homo sapiens
tgatacattaagttatttttctttctgcttggatttccaacctgtctgtctccaagggaaaggctgtctgaacccagcagggagaggagaggagcccctgagttgctgcagaggccattcgaatccctgagtcagcatgccccacgccccatgcacctgctcttagagggagagaacagatgaagccattgtcctccagcccgcttcagctctgaggtcctgcttcccctccctccagtccctcagatctcagcactgttgatgtgcagtctcgccacagaaagtatgcatgttcccataagggagaagggagggcccggacaccagaccaagccagggccagacagacctgggcagctggycaggaagacagggacagcacccagcacccagcctgagaggatagtaaatcaaagccccacccagtctgtgtccttggctgtggaagtatagcagagcacagcatggggttcagagacaatgcctaggtgacctagcaagttagatgagcctagtacagtgctctcaactgctgtcttcagaggagctactctgctcacctgaggatttgttagatatg

SEQ ID NO: 222311 - DNA, 540 bp, Homo sapiens
ttatctattgctgtgcaacaaatcaccgcaaaacttagtgtcttaacacaacaaatayttattatctcacagtttctgtgtgtcaggaattcaggtgtgacttagctcagagcatctggctcaaagtccctcatgatgatgtaatcaaggagggtaggatccacttccaagctcattcacatggctgttggcgggcctcatgtcctcactatcacctggagatatcagtttcttgccatatgggcctctccacataagaactcacaacatggccacaggcttccaacaaaacaaatgagccagcgagtaagagggcagcccagaacagaagccagagagtctttttgtaacctaatcttggaagagacatctcaccactttcacagtattctatttgttagaaaacatttgctaggtccagcttacatgcaagggaaggaaaacacaccagggcatgaatgccaagaggtgggggctactgggggctatcttggcggcaacctaccatacctgttgcattgtaataatctgcctcttctt

SEQ ID NO: 222312 - DNA, 164 bp, Homo sapiens
aggaaaatagagagaaagcagacttatgctgccatttagcaaagtattttctgccagagaaatggatactcagagtggtgagggcacacgaagcttcggcagggggagcccgtcctaagtagagaggctaaaasagagtgcagaatcactgacacaggactggg

SEQ ID NO: 222313 - DNA, 445 bp, Homo sapiens
cagaactatagccccacattaattgtgaccgtgggcacccctctcagagacagggttttccatctgttggtccacttagactgcatggtcactggtcaactatggttgctcttccttgttggaaacccagacagcctctggaaattagttaacttgtggatgaaaacaagaaatatatattcatatcttgccttgctcataccaattgctatcgtaggtgacagattcttgcatcagtaattttagagacagctgaaattgttcatgatagatgtccacttgaaggttacataacgggatattaacactgcttacatcagaggagaggtcatgggtggggactggcgctacaatttaccawctttttattgtatgtttcagttgttataatcaaacatgtgttacttttgtaatttgaaaaacatgctataaacaaactgaatat

SEQ ID NO: 222314 - DNA, 460 bp, Homo sapiens
gagccaactggtaaagatggcttagtgattgtgttggttattactgagtgtcaatttgattggattgaaggatacaaagtattgatcctgggtgtgtctgtgagggtgttgccaaaagaaattaacatttgagtcagtgggctgggaaaggcagatccacccttaatctgggtgagcacaatctaattcactgccagcacagctagaataaaaagcaggcagaaaaatatraaaggagagactggcctagcctcccagcctacatatttctcccatgctggatgcttcctgcccttgaacatcagactccaagttcttcaattttgagactgagactggctctccttgcccctcaagcttgcagacagcctactgtgggaccctgtgatcgtgtaagttaatacttaataaattcccctttatttatatatctacctatatagatatccatatctatata

SEQ ID NO: 222315 - DNA, 448 bp, Homo sapiens
tggtaaagatggcttagtgattgtgttggttattactgagtgtcaatttgattggattgaaggatacaaagtattgatcctgggtgtgtctgtgagggtgttgccaaaagaaattaacatttgagtcagtgggctgggaaaggcagatccacccttaatctgggtgagcacaatctaattcactgccagcacagctagaataaaaagcaggcagaaaaatatgaaaggagagactggcmtagcctcccagcctacatatttctcccatgctggatgcttcctgcccttgaacatcagactccaagttcttcaattttgagactgagactggctctccttgcccctcaagcttgcagacagcctactgtgggaccctgtgatcgtgtaagttaatacttaataaattcccctttatttatatatctacctatatagatatccatatcta

SEQ ID NO: 222316 - DNA, 460 bp, Homo sapiens
gagccaactggtaaagatggcttagtgattgtgttggttattactgagtgtcaatttgattggattgaaggatacaaagtattgatcctgggtgtgtctgtgagggtgttgccaaaagaaattaacatttgagtcagtgggctgggaaaggcagatccacccttaatctgggtgagcacaatctaattcactgccagcacagctagaataaaaagcaggcagaaaaatatgaaaggagagactggcctagcctcccagcctacatatttctcccatgctggatgcttcctgcccttgaacatcagactccaagttcttcaattttgagactgagactggctctccttgcccctcaagcttgcagacagcctactgtgggaccctgtgatygtgtaagttaatacttaataaattcccctttatttatatatctacctatatagatatccatatctatata

SEQ ID NO: 222317 - DNA, 434 bp, Homo sapiens
ttcagtgttggcttgttttagctgatccatctgtaacacaggagggatccttggctgaggattgtatttcagaaccaccaactgctcttgacaattgttaacccgctagrctcctttggttagagaagccacagtccttcagcctccaattggtgtcagtacttaggaagaccacagctagatggacaaacagcattgggaggccttagccctgctcctctcaattccatcctgtagagaacaggagtcaggagccgctggcaggagacagcatgtcacccaggactctgccggtgcagaatatgaacaatgccatgttcttgcagaaaacgcttagcctgagtttcataggaggtaatcaccagacaactgcagaatgtagaacactgagcaggacaactgacctgtctccttcacatagtccatatcaccac

SEQ ID NO: 222318 - DNA, 581 bp, Homo sapiens
aaaagcttgggtgtgcatagacactgaggttgagtggtgtctttgggcattttgagcattgacaccaaagttccagcatcaaatcttagaatatcaagcagccagatggatcacctgaggtcaggagttcacgaccagcctgactaacatggtgaaaccccatctctactaaatacaaaaaaattagccaggcatgatggtgcatgcctgtaatctgagctacttgggaggctgagacaggagaatcgcttgtgtacctgggaggtggaggttgcagtgagctgagatcacaccattgcactccagcctgggcaacgagagcaaaactctatccccccgcaaaaaaaawaaataaaaataaaagaatatcaagcagccaaagaagcaggaaaacatgacacataatgaagaatctaataatctagttgaaattgacagacatgttggaaatagaagaaaaggacattagagcagttagtataattgtattttaattaaatggggaggttgaagattttttaaatatcaaattctgtagataaaaagtatgatttacagtctgaaatggaagaaggcagtgg

SEQ ID NO: 222319 - DNA, 581 bp, Homo sapiens
aaaagcttgggtgtgcatagacactgaggttgagtggtgtctttgggcattttgagcattgacaccaaagttccagcatcaaatcttagaatatcaagcagccagatggatcacctgaggtcaggagttcacgaccagcctgactaacatggtgaaaccccatctctactaaatacaaaaaaattagccaggcatgatggtgcatgcctgtaatctgagctacttgggaggctgagacaggagaatcgcttgtgtacctgggaggtggaggttgcagtgagctgagatcacaccattgcactccagcctgggcaacgagagcaaaactctatccccccgcaaaaaaaataaawaaaaataaaagaatatcaagcagccaaagaagcaggaaaacatgacacataatgaagaatctaataatctagttgaaattgacagacatgttggaaatagaagaaaaggacattagagcagttagtataattgtattttaattaaatggggaggttgaagattttttaaatatcaaattctgtagataaaaagtatgatttacagtctgaaatggaagaaggcagtgg

SEQ ID NO: 222320 - DNA, 513 bp, Homo sapiens
cttctcttcttcttgtctcttgtctattttctaaggtgcctctttgttgcttggggcaaaaaaagtccatttttaatccacacccaacaaacatctacccttacgtatccggtttttagggttttgagtttgttgtttgttttctcagcttctcatatttggaatactggaaattcctaaagtggagaatgacagaacgtgaatcacagctatggtgaagccacaggctctggatgaaaaacctaatctgccagggtttgaagttaaacacattaatcttctgtgcctccatttctatctgtccaatgggmtaaatcagaacacttaggttgtccagtgtttaaatgagcagtgcaggaaaagcgtggagccaatgcctgtcacgtagtaattggtccacacgcatgagctcctatcagcgccatggtctccagcatttccatcaggttttgatctttgaaatgtccttcttgatatgaatggatcattcctcaaacattctctaaccgatgg

SEQ ID NO: 222321 - DNA, 551 bp, Homo sapiens
tggcccaatgacgtgaacaaaagaaaactcrgggtctaggattgaggggaggcagcctttttagtggagacctgtgacctggaggcccagggtcaccctgagaggggaggggtcttgctggtcgctgggtccgggactccaattgcacacagccagtggcatggagggtctgtgaccacgattgggcaatttcccccattctgcttatggagcaatagagaggaacctcactggaattatacagaaaggtcccagtgagacttgaactctgatcactgtattcagagtccaaagtgctcaccattacaccatggaacctcacactagcttataactggaggtaactgagttcatacttagcagccatagttcccacacacctatgttaaggcatttcttctgatccctcaagcaacaccaaggaaggtggacctgcgagagaggagtcatcctctttctttctttctctctgccctctcctttgatcaacttttatcatttcatttgcacctcagaaaatgaggcaaaatccagtttgggcttagggccag

SEQ ID NO: 222322 - DNA, 551 bp, Homo sapiens
tggcccaatgacgtgaacaaaagaaaactcagggtctaggattgaggggaggcagcctttttagtggagacctgtgacctggaggcccagggtcaccctgagaggggaggggtcttgctggtcgctgggtccgggactccaattgcayacagccagtggcatggagggtctgtgaccacgattgggcaatttcccccattctgcttatggagcaatagagaggaacctcactggaattatacagaaaggtcccagtgagacttgaactctgatcactgtattcagagtccaaagtgctcaccattacaccatggaacctcacactagcttataactggaggtaactgagttcatacttagcagccatagttcccacacacctatgttaaggcatttcttctgatccctcaagcaacaccaaggaaggtggacctgcgagagaggagtcatcctctttctttctttctctctgccctctcctttgatcaacttttatcatttcatttgcacctcagaaaatgaggcaaaatccagtttgggcttagggccag

SEQ ID NO: 222323 - DNA, 551 bp, Homo sapiens
tggcccaatgacgtgaacaaaagaaaactcagggtctaggattgaggggaggcagcctttttagtggagacctgtgacctggaggcccagggtcaccctgagaggggaggggtcttgctggtcgctgggtccgggactccaattgcacacagccagtggcatggagggtctgtgaccacgattgggcaatttcccccattctgcttatggagcaatagagaggaacctcactggaattatacagaaaggtmccagtgagacttgaactctgatcactgtattcagagtccaaagtgctcaccattacaccatggaacctcacactagcttataactggaggtaactgagttcatacttagcagccatagttcccacacacctatgttaaggcatttcttctgatccctcaagcaacaccaaggaaggtggacctgcgagagaggagtcatcctctttctttctttctctctgccctctcctttgatcaacttttatcatttcatttgcacctcagaaaatgaggcaaaatccagtttgggcttagggccag

SEQ ID NO: 222324 - DNA, 551 bp, Homo sapiens
tggcccaatgacgtgaacaaaagaaaactcagggtctaggattgaggggaggcagcctttttagtggagacctgtgacctggaggcccagggtcaccctgagaggggaggggtcttgctggtcgctgggtccgggactccaattgcacacagccagtggcatggagggtctgtgaccacgattgggcaatttcccccattctgcttatggagcaatagagaggaacctcactggaattatacagaaaggtcccagtgagacttgaactctgatcactgwattcagagtccaaagtgctcaccattacaccatggaacctcacactagcttataactggaggtaactgagttcatacttagcagccatagttcccacacacctatgttaaggcatttcttctgatccctcaagcaacaccaaggaaggtggacctgcgagagaggagtcatcctctttctttctttctctctgccctctcctttgatcaacttttatcatttcatttgcacctcagaaaatgaggcaaaatccagtttgggcttagggccag

SEQ ID NO: 222325 - DNA, 536 bp, Homo sapiens
aagagctgctgctactatcataactgctgtcactgctgcagtactttggtcttttcattatctcagtactctcaggcatagaacacagaggctaaaaaagatggaaatgtgttattttgttagarttcttaaaaaaggtttattgatatgattagttactatttttaatttccccctatgcttgctgctttttactgaaggttgagaatccccccaaatactattgctgccatgctgcttagcctacagtgctatgcattgattgttgtttctgcaaaatattctttcttaaatgatatagtcatgatgaggaatatgttgttcctacatgattggaataaagggccagagtatccataaacaaagaataacaaaataaagggaaaatatttgagataaaaatataaaaataagaaatataatcagcttttttcattccataagagattactcatcaagactcagagatctacctttgtcttatcattaacgttcagagttactcaataaatgtgtatgcatgtgcacgtgcaagt

SEQ ID NO: 222326 - DNA, 536 bp, Homo sapiens
aagagctgctgctactatcataactgctgtcactgctgcagtactttggtcttttcattatctcagtactctcaggcatagaacacagaggctaaaaaagatggaaatgtgttattttgttagaattcttaaaaaaggtttattgatatgattagttactatttttaatttccccctatgcttgctgctttttactgaaggttgagaatccccccaaatactattgctgccatgctgcttagcctacagtgctatgcattgattgttgtttctgcaaaatattctttcttaaatgatatagtcatgatgaggaatatgttgttcctacatgattggaataaagggccagagtatccataaacaaagaataacaaaataaagggaaaatatttgarataaaaatataaaaataagaaatataatcagcttttttcattccataagagattactcatcaagactcagagatctacctttgtcttatcattaacgttcagagttactcaataaatgtgtatgcatgtgcacgtgcaagt

SEQ ID NO: 222327 - DNA, 574 bp, Homo sapiens
aagactacatttacacagttcctggcacctaggaggcctgcaatttagttctcttttagttaatttcctgtgggtccattttgctttctatcacctcagctttcttgtttttctatgagcccttcctagttccctcttctctcttgactagtctaaagcaaatcaataaacactagctcaccctgcagttggaacacccctgtaatgctgttacttggtcagcatctccttgtccatcgtgaagggaaggtaagyatttgggattcctagaggtgccctggttgccttcctccagaaccgaattgtcttactttattccatgatggcatcaatagatgcatgcataatttttcagctcatattcctgatttaagttcatatttctcctcaatgtatacagccccatcttaagattttttcccttagggataggttcaaattaccttgcctcaatgtctgtgggtattgaaggtggagacaccagcaattactgcagttagcgtttagtactgcagttatctccaaacccctgagtggctgtcacctatcattaggatcattaggtattatggtg

SEQ ID NO: 222328 - DNA, 574 bp, Homo sapiens
aagactacatttacacagttcctggcacctaggaggcctgcaatttagttctcttttagttaatttcctgtgggtccattttgctttctatcacctcagctttcttgtttttctatgagcccttcctagttccctcttctctcttgactagtctaaagcaaatcaataaacactagctcaccctgcagttggaacacccctgtaatgctgttacttggtcagcatctccttgtccatcgtgaagggaaggtaagcatttgggattcctagaggtgccctggttgccttcctccagaaccgaattgtcttactttattccatgatggcatcaatagatgcatgcataatttttcagctcatattcctgatttaagttcatatttctcctcaatrtatacagccccatcttaagattttttcccttagggataggttcaaattaccttgcctcaatgtctgtgggtattgaaggtggagacaccagcaattactgcagttagcgtttagtactgcagttatctccaaacccctgagtggctgtcacctatcattaggatcattaggtattatggtg

SEQ ID NO: 222329 - DNA, 561 bp, Homo sapiens
ttggctatgttccaatgccacaggcctctttgctgtttcccatgtcaaagaactcaagatcccacctcaagacttttgtacctgttgttcctcatgccagaatattgatctccccatatagctatactatgaggttctgctcaaatgtcacctcctcagggaggtcttcctggactaccctgtctaaattagcactggcaatcatcactctctagcccttaatcagcgttatttttctacatacacaaacacacacttgttatttatttaaagcctaattcttcttctagaatgtagractttgtttccttcactggcagtatttccagtgaatagaatacagtagtgcccccttattcgaggttttgctttctgtggtttcagttacccacggtcaactggtgtccaaaagtattaagtggaaatttccagaaataaggaatttgttagttttaaattgtgtgcctttctatgtagtgtgaagaaatcacataccattccattttgtgctccctagagtgtatccttttgcccagcacgtccatgctgtatatactgcct

SEQ ID NO: 222330 - DNA, 561 bp, Homo sapiens
ttggctatgttccaatgccacaggcctctttgctgtttcccatgtcaaagaactcaagatcccacctcaagacttttgtacctgttgttcctcatgccagaatattgatctccccatatagctatactatgaggttctgctcaaatgtcacctcctcagggaggtcttcctggactaccctgtctaaattagcactggcaatcatcactctctagcccttaatcagcgttatttttctacatacacaaacacacacttgttatttatttaaagcctaattcttcttctagaatgtaggactttgtttccttcactggcagtatttccagtgaatagaatacagtagtgcccccttattcgagrttttgctttctgtggtttcagttacccacggtcaactggtgtccaaaagtattaagtggaaatttccagaaataaggaatttgttagttttaaattgtgtgcctttctatgtagtgtgaagaaatcacataccattccattttgtgctccctagagtgtatccttttgcccagcacgtccatgctgtatatactgcct

SEQ ID NO: 222331 - DNA, 590 bp, Homo sapiens
attaagaatacaatctctgtggcccacacctgtaattccagcactttgggaggctgaggcaggcagatcacttgaggccaggagttcaagaccagcctggccaatatggcaaaaccctgtctctaagaaaaatgtaaaaattagctgggtgtggtagtgcatgcctgtaatcccagctatttgggtggctgaggcacaagaatcacttgaatccaggaggtggaggttgcagtgagctgagattataccactgcactccagcctgggcaacagaatgagactctgtctcaaaaacaaaaaacaatctccaatgaatgaaagtcaaatgtcttcaggcacataagatttggcaagaaatccaagamatagatttttcatttgtattttagaggctgatttatcattcatagtaataaaatattgaataatgcattagaaggcagcctatatgagaattctactactttgttttatttttgtgcaagtctgcaaaacttctgaatatatagtcttgtaatatatactgtagtaaacagattaaaatatttaccacatgtagtgaacacacaataaacaatttgatgtctgct

SEQ ID NO: 222332 - DNA, 523 bp, Homo sapiens
aataaaaataatattgctattatatttttataccagtagaatggcagtgatattgtcttaagaaagattctgaaactgcttctttgattagcaagcatttttgctgcgccatctaacatcccctctagtaaggtgtttactggatgtaacaggatgttgaattgaaccgtttctttgtctcagatttgcaaataaatctttcgaaatgaagacagtaatccttctcttctgaagagaacctccaaaaatccttgcaggacctacttaagaggtggcagaactatccctgctattatcctctccatttacataaggaagtcaaggggaataattagggaagttattcgcttagtggacagcacattcttgggacrcctacctgcccccacacaccagatcaagtgagaggagagctaagacagccttttacatgtgtaagggtggctaataaaaggatagactggcttcttctgtacaggtagatatctgcatatgaagcagacttgctgatttgagtaaggga

SEQ ID NO: 222333 - DNA, 445 bp, Homo sapiens
caattcacattcttctgaagttccaggggatatggaactttcaagcttctctcattgtctttggcttttgacagcttgactatcaaaaagatgatgagttgtggatctaggtgttgacttcttcaaatttattctatttgcagtttgttgagtttggatctgcagactaatgcttttcattaaacttgggaaatttttgactattatttcttgaaacatactttcttcctctttctatccttttctctggtactctcattatgcacccgtttwtacttggtgtcccacatgtctccaaggctctgcccatttttcttcattctctcttgattctgctcctcagaatagatcatctcattgatttatcttcaagtgtattggttcttcctctgccagctcaaatgtgctgctgagttcctctagtgaattttttgtttcagttatt

SEQ ID NO: 222334 - DNA, 449 bp, Homo sapiens
ggatgtttagcctaagagctttaaaaaaatcatttaacaaacgtgacaaaaaaagacaacaaaaacaaccaaatatgttcacttttttaatccttaaaaaaattgttgaaaatataaggaaataaatgtcagagcagagttcctaaggtataagtcatcttttccctgtgccacttttcctccttaatcatgggggacctactggcatgggtggccctctgtattgygactgctttggccttcctccttcagtggttcttcttatgcacagtggccctttccctttgcaggcatttcttctgaagtgtggcccaaggctgggtcctggtctccacagctgacacctagcattgccctgaccttgtcccactccctgttatgtgtgggtgaactgaaggcagaagggcagagattcaattcagcttctcccacctcctaaccacgtgatt

SEQ ID NO: 222335 - DNA, 418 bp, Homo sapiens
gaaagcaaagaatgattcatgatcaatactctcttctatgtcatcctgtcctctagtctgttgctatgataaggctctaataattacccattcaaccccacacacatcaccatttttctgacttgtttcttagcattctcactctcatttacggttccagccacactgtcctctttactctttgttccttgaacatttctagcatgctttcaayatggagccttagcatgtattgctcttccctctgcctaataacattcttcccccagatatttacagggctcacttccttcaggtctctgctcaaaatcaccttatcagtaaggcttcctctgattaattatataaaacagaaggtcgagcatggtggctcacacctgtaatcccaacacttggggaggctgaagtaagaggatgg

SEQ ID NO: 222336 - DNA, 541 bp, Homo sapiens
gtaaccccagagaagtagaaaaaaagaaaacagagagatgaaaaatagagaataaacaaaaaataaaatggtagatttaaaccctaacagagtaacaacattaaattacaaatttatacattgtattataaatgtaaatgtaaacagtaagagattagcagaaaggactttaaaatatgacctaacaatgtggtatctacaaataactcacttcaaataacacaacataggtaggttgaaaatasaagtatggaaaaagatataccaggcgacaattattcaaaagaaagctggagtggctaagttaataagggaaaacacagacttcagagcaaagaaccgtatcaaatagagagggacattaccttcattataaaaggaatgatccaagaggacatagcaatcttaaatgtgtatgtactaaataacagagttatactctgtgtatgtactaaataacagagctataaaataggtgtagcaaaaactgattgaactgaaagaagaaataagacatatcacaattatacttgcagaattc

SEQ ID NO: 222337 - DNA, 403 bp, Homo sapiens
tcgctaaaccatctgctgctttgctgacaaggacagaccaaggaatttccatgctgcggtctgtcagcgtctgtcacagggccaccaccctttgawtgggcgaggaacttggaactgagacctgtcctccaggagaccaatgtgaccctcccagggcagagggagtgctgccacttcacacgtcctctcacccgggcttatctaactggccacaggacaagttctgtgttttgtcggcctgggaaatctaatggaaaggactattattagaaatatttatcttatcaaggaaaatatgctcttaaaatgttcaagaaaggatgctgcctggttcccaaggaatagcctgaaagactatatatatatataatatacactcatacacatatacatattatacaca

SEQ ID NO: 222338 - DNA, 583 bp, Homo sapiens
agtgatgcctttgagcaaatttgtgttttattaattgcaattacacatcyccatgtttttgaatagtatgagtaggtgtaaaatattatgcatgcagtctatagataatgcttgcagccccacaattttaaatgcctcatcaggcatccatgtcctatagactaggaatcactggtttatgagttcgctacccctgagctgagagtggacaaggtgagctcaccttgtaaaggatcatgcttcccttctgagtccagaattcttttgtgggaaggaatcttagtttagggcagagctctgacatttttctgtcttctctattcaataagagtacaaaagggggaggatctcccctcactgattatgcaatataattactacagccgtgaatgggattaacagtcgtgggttcagtgtgacaaatttaaaaacaactcagtgagctcatttttaatgtctctttcctctttccagttcagatctcagagaaatttgaactaacaggggtgagttcagtcaaagctggctgtgtgcaaactatcaactggtaacagaatgctggccatgggaagaggaggagttt

SEQ ID NO: 222339 - DNA, 583 bp, Homo sapiens
agtgatgcctttgagcaaatttgtgttttattaattgcaattacacatccccatgtttttgaatagtatgagtaggtgtaaaatattatgcatgcagtctatagataatgcttgcagccccacaattttaaatgcctcatcaggcatccatgtcctatagactaggaatcactgrtttatgagttcgctacccctgagctgagagtggacaaggtgagctcaccttgtaaaggatcatgcttcccttctgagtccagaattcttttgtgggaaggaatcttagtttagggcagagctctgacatttttctgtcttctctattcaataagagtacaaaagggggaggatctcccctcactgattatgcaatataattactacagccgtgaatgggattaacagtcgtgggttcagtgtgacaaatttaaaaacaactcagtgagctcatttttaatgtctctttcctctttccagttcagatctcagagaaatttgaactaacaggggtgagttcagtcaaagctggctgtgtgcaaactatcaactggtaacagaatgctggccatgggaagaggaggagttt

SEQ ID NO: 222340 - DNA, 525 bp, Homo sapiens
ctatctttatgctgttctttctgtggtcccatatgaatatagtattctttccgaagttgttgttaatgataagtaacctctttaaaatttttctttgtttcaataagcttaaataaatctattttttttgttggctgtgtcttgcattagtaaggtactaatacatgacaaaacttaccttcaaaaatttataattaatcctttcacttatgatataaaaataaaataaaaaatcatgggtcctgggttaagcacaatatacagaaaaaacaaacytaaaatttatatggaacttcaaaaaacccagaagagccaaagctatcctgagcaaaaagaagaaaactagagaaaccacattacctgacttctaattatgctacaaagctacgccaaaatagcatggtactggcataaaaacagtcacatagaccagtggaacagaatggaaaaccccaaaataaatgcatacatctacagtgaactcattttcaacaaaggtgtcaagaacatacattggggaaagga

SEQ ID NO: 222341 - DNA, 525 bp, Homo sapiens
ctatctttatgctgttctttctgtggtcccatatgaatatagtattctttccgaagttgttgttaatgataagtaacctctttaaaatttttctttgtttcaataagcttaaataaatctattttttttgttggctgtgtcttgcattagtaaggtactaatacatgacaaaacttaccttcaaaaatttataattaatcctttcacttatgatataaaaataaaataaaaaatcatgggtcctgggttaagcacaatatacagaaaaaacaaacctaaaatttatatggaacttcaaaaaacccagaagagccaaagctatcytgagcaaaaagaagaaaactagagaaaccacattacctgacttctaattatgctacaaagctacgccaaaatagcatggtactggcataaaaacagtcacatagaccagtggaacagaatggaaaaccccaaaataaatgcatacatctacagtgaactcattttcaacaaaggtgtcaagaacatacattggggaaagga

SEQ ID NO: 222342 - DNA, 525 bp, Homo sapiens
ctatctttatgctgttctttctgtggtcccatatgaatatagtattctttccgaagttgttgttaatgataagtaacctctttaaaatttttctttgtttcaataagcttaaataaatctattttttttgttggctgtgtcttgcattagtaaggtactaatacatgacaaaacttaccttcaaaaatttataattaatcctttcacttatgatataaaaataaaataaaaaatcatgggtcctgggttaagcacaatatacagaaaaaacaaacctaaaatttatatggaacttcaaaaaacccagaagagccaaagctatcctgagcaaaaagaagaaaactagagaaaccacattacytgacttctaattatgctacaaagctacgccaaaatagcatggtactggcataaaaacagtcacatagaccagtggaacagaatggaaaaccccaaaataaatgcatacatctacagtgaactcattttcaacaaaggtgtcaagaacatacattggggaaagga

SEQ ID NO: 222343 - DNA, 494 bp, Homo sapiens
tgttagccatacagaaccctgaaggtagaagcgacagccactgcaaagaccctaaggaagcaaggtacctgctggaatatctgagaaactgcaaggagtcaggtgtgaaggagggtagtgagggaggggaggaggagcaggagatgaggtcatagaggtgaaagggacacagactatacaaggtattacagactattgcaagaaattacagtgagatggggagcagtgagagaggctgagcataggtgtggcatgatctaatttatcttataaaaagatccctttaggtgctgcattgaagatactagargggaaaggggaaaccctccgagtcaggaggctccagttaggaggctattattgtaatcaaggtgagaaatgattttgactcagaccagagtgtaaagaatagtatacggattttaacatatactttgagagtaaagtcaacaggatttactgtcaggttggatgtgaatgtgaaaggaaggtag

SEQ ID NO: 222344 - DNA, 556 bp, Homo sapiens
ctgatcatcctcccctaggtttcatttaggtactatgaggtatagagtactgtgacgagcctggaagatcatataggaggatacacaatcatttctattcttaaagaattcctaatcctaactgaaaggagaaaatcggttcaaacacattgaaaacaacaaaagctgctccgtgagcattcaatcagaaaacatttatsagttttataatagagaataaataatagataaataaatgaatagagaacctcctctagcatcccatcatgagtactctcaaaggttccttttagggtttttcaatatctctataattcatatatgtttattgaatggctattatgtgccagatctctgtgaagagttccagcccttcctagcttatgaggaaccctctactgagggtgaagtcactcagatcctagaacatgctaagctcatctaatagggactgtcaatgactctcttttttcatgaagtacagagccccaagaataatttacctcaaaaaataatttccttggcctcaaaagatactcacactatatgaaaatgt

SEQ ID NO: 222345 - DNA, 435 bp, Homo sapiens
tgtgaacagtatagtcatttttctatttctacagcaggcctatggaaacataacctcatttatctacttggaataaaagcttggctagcctacataaagtaggcttttttggtgtcccaacatttatagcctatacagataatgaatgtttttctgagtgcctargtgataaccactaattcccaggttacaagttcatctatacagtaccatgtacccagaaaagcctatcggtccagatttcaaatattcagctgcatcatatccatagtttcaattacactttataaacatatttacttgttttggagttggaaaagaatataatcacaatgcaagtgactttaaacttgcaatattcaaaggttaaggtttctaggaaaaaaaacttatgcattattgttttgaaaaatcatgagcaaattgaaaaaactt

SEQ ID NO: 222346 - DNA, 566 bp, Homo sapiens
tttatctgttaagatattctgccttaaactaggtactgggctcccctgatagagacttgtcatgatgtccagtgccccaacagaaacatgtttgtttgtttgtttgtttgtttgtttcattttaccatgaaaagccaggctactcacaattcccaagccacaataatgtgttatgagaagataaatgagagtgatgagagaccctgtatttcgtcttggttgctaacactattgcaggtgctttgttgaacaaagctcttaagacaaagccatagcaccagtagcaagcacaagagtctgatacaaaggtcaggaatggtctgactgtggaacacaggccagagagtgattattttaggcaggagggctcctgctacagtttcttttcacacttttatrcaaacactggtgagggtaccagagcttacatagacagtctgagtttgagataaaagtcatcctgttaagaatatttgggctccagcctggatcacagagagtcctcagagtggcaaaagaggatcacacacaaatcttaattggatgacccgactgaagaagaagaa

SEQ ID NO: 222347 - DNA, 363 bp, Homo sapiens
catgtttacgaattcgagctcggtacccaccaagctgacccccagtttcaggcttgtccaagaacaaggtgagctccacagccatagtcatcagggaaggcctgtggactcagccccgaggccagcctcrgtggatacaggctccaggttcactcagtacctggccagctcatgtaaccctaggctcacctttattccaaacctatgttttaggacccatagcctttaaaggttcttccctcttgtccattacaccactttaccaatcacttcaatggcaaaatttccttcagttcttgtatatcagcttagtagagtcatagagtagaatacaaacattgctacatatataactagcaaagg

SEQ ID NO: 222348 - DNA, 574 bp, Homo sapiens
atgaccaagaaaccaaaagcaaatgcaacaaaaacgaaggtaattagctgcgacctaattaaactaaagagcttttgcacagcaaaaggaaccttcagcagagtaaacagacaaccaacagagaaagtcttcccaatctatacatctgtcaaagaactaatacccagaatctacaacgaactcaaacaaattggtaagaaaaaaacaaacaatcccatcaaaaagtgggctaaggacatgagtagacaattctcaaaagaagataaacaaatggtcaactaacatttgagaaaatgctcaacaycactaattatcaggcgaatgcaaatcaaagccacaatgtgataccacctgactcctgcaagaatggctataatcaaaaaatcaaaaaacagtagatgtaggtatggatgcagtgaacagggaacacttctacactgctggtgggaacgtaaactaatacaaccactatataaaacagtgtagagattccttaaagaattaaagcagaactaccatttgattcagcaatcccactactgggtatctaccccaaggaaaagtggtcattatt

SEQ ID NO: 222349 - DNA, 574 bp, Homo sapiens
atgaccaagaaaccaaaagcaaatgcaacaaaaacgaaggtaattagctgcgacctaattaaactaaagagcttttgcacagcaaaaggaaccttcagcagagtaaacagacaaccaacagagaaagtcttcccaatctatacatctgtcaaagaactaatacccagaatctacaacgaactcaaacaaattggtaagaaaaaaacaaacaatcccatcaaaaagtgggctaaggacatgagtagacaattctcaaaagaagataaacaaatggtcaactaacatttgagaaaatgctcaacaccactaattatcaggcgaatgcaaatcaaagccacaatgtgataccacctgactcctgcaagaatggctataatcaaaaaatcaaaaaacagtagatgtaggtatggatgmagtgaacagggaacacttctacactgctggtgggaacgtaaactaatacaaccactatataaaacagtgtagagattccttaaagaattaaagcagaactaccatttgattcagcaatcccactactgggtatctaccccaaggaaaagtggtcattatt

SEQ ID NO: 222350 - DNA, 561 bp, Homo sapiens
tctacgtccatcaggaacatgttctttagttcacttttcttgttatgtccttttctggttttggtattagggtgatacaggcttcagataattatttaaggaggatttcttctttttctatcttttggaatagtttcactaagtggcgtcagttcttctttgaatggctgatagaattcagctgtgaatccatctgctcctggacttattttttgttggcaatttttttattactgttttaatctcactgcttgttatttgtctgttyagagtttctgtttcttcctgattcaatctgggacagttgtaaatttctagaaatttttccgtctctctagattttctagttcgtgtatataaaggtgttcatagtaaccttgaatgatcttttgtatttctgtggtatcagttgtaatatcacccattttgtttctaattgagcttatttggatcttctctcttcttttcttggttaatcttttactggtgtatctattttgtttatcttttcaaagaaccagctttatgtttcactttattttgcatttttttgtttcaatt

SEQ ID NO: 222351 - DNA, 448 bp, Homo sapiens
tagaattccatgtagggaagaacatacttaaagaataaagataaagatatgttcagatgaaagaaatgtaagagacttcatcattagcacagctgtactacaaaaaaagttacaaggcttcttcaggatgaaggaaaagactgaaatggcaactaaaatctgtgagaaggaataatgagcatgggaaatggtagatatgtgggtaaatacaaaataggccatatgcttccttttttatctacattccttaaaagcatttgactttaaaggaaaagttataatgttgtcatataaaaatagtaacatacatagatttaacatgaataacaataccactaaagagtaaatatctggtgtccttataagacaggaggacatgtaaaraaggggagaaggctatagaaagatagagaaaaagaacagtcaacctaatattctacattcagta

SEQ ID NO: 222352 - DNA, 428 bp, Homo sapiens
caccagatagtgcttgataggcgatgaacaagtttgcttctgcaatgctactgtggctgactgcccttcccctaacacattcttccttagacacttcagtacatttagacaggtcttacagccaagattcaagatccattctttctatycaaaaataatttgaacatatcatttattctaatcaagtgtcaattttggaatataacatacaaatagcaatattttattatgattttattattgtttttaatgttagggtctcattctgtcgcctaggctggagtgcaatggtgtgattatggctcactgcagccttgacctcctggacccaggtgatcctcccactttagcctttcaagtagctgggactacaggtgtgtgccacaatacccggctaattttttaaaaattttaataaagacagggtc

SEQ ID NO: 222353 - DNA, 429 bp, Homo sapiens
ttgataggcgatgaacaagtttgcttctgcaatgctactgtggctgactgcccttcccctaacacattcttccttagacacttcagtacatttagacaggtcttacagccaagattcaagatccattctttctattcaaaaataatttgaacatatcatttattctaatcaagtgtcaattttggaatataacatacaaatagcaatattttattatgattttattattgtttttaatgttagggtctcattctgtcgcctaggctggagtgcaatggygtgattatggctcactgcagccttgacctcctggacccaggtgatcctcccactttagcctttcaagtagctgggactacaggtgtgtgccacaatacccggctaattttttaaaaattttaataaagacagggtcttgctatgttgttc

SEQ ID NO: 222354 - DNA, 395 bp, Homo sapiens
tatcaccatgaacgcttagtctcccccaccagcagactaatggctccttgcgagtggagtggggacttgttcactggcacccctattgccaaacccatgcttggtacatagcacatgcctggtgactatgtcccgagttgttgacttgactgcacggtaggatcyaggcataggctctgtggcagagtccccactgagcctagaccaggctccggaaggagctttcctgaatgaattctttgcattgtctaattgcctatttgtctctatttcttaagagttaataaaagggaatgaattattcatacacagcaacaacatggatgaatcttaaaataattgtgcttagtgaaagaagccagacaaaaaagattacatactgtatgagttcatct

SEQ ID NO: 222355 - DNA, 593 bp, Homo sapiens
ttgtaatgtggttgaatctgcttaggacatgcgaatgggaacacacagacatagacacaccagatgaaggaggtgaatctctcaagatgaacacgcattccccatggggtttggccagggagaaggtgtatgttccaggtacacagatcctgaactacacagaaagatggagatatcatgggctctcctctcaattatctgtcagcttggtggggtgctaggggcaggctcataagttactaattacaggacaatgtagtcagtgcctgatagatggaaaagtcctatttttttttcttttctttcttttttagacggagtctcactctgtcgcccaggctggagtgcaatggcatgatcttggctcactgcaacttctgcctcccgagttcaagtgattctcctgcctcggcctcccaaatagctgggattacaggcatgtgccatcatgcctgactaattttygtatttttagtagagatgaggtttcaccatgttggccagacaggtctcaaactcctgacctcaagtgatccacctgccttagcctcccaaagtgtggggattacaggtgtgagccactgcacccagcc

SEQ ID NO: 222356 - DNA, 404 bp, Homo sapiens
tgaattctgctggtaatttctaaaagcttggcagcagattcttccctagagcctccagataaggccctgaatggtcaatgcctcaatttcagtagagaacacaattgaacttgccttaacttttgacttacggaactgtgatattatgtaatacatgggtattgttttaagctgctgagtctgtggtaatttgttacacagcaatagaacaccaatacacatggaacgtagcacgaagccaggaacccaagtgaatgctgagagaccagaagggattgtgtcacttaaggaatwctatgatctctggaaaaatatgggaggatttattggaaaaagccttaaaagaactccaccattgaaaagccagtatttgaatatttgccacgccccagttgagtggagaa

SEQ ID NO: 222357 - DNA, 517 bp, Homo sapiens
aaattgttatagagtgcaaagcttctagccaaagaaataaattcctaatcatggaatgccagattacaaactgtgtgaagagaaatttccatgatgaaccacttcccgatctcactagcaatggcctagttcacctgcatgtaatccagtccatctagctatttatttcttacattacttctctatggctgtggctgtgttgggctgtgcagtgattagatgaaaaatctatgcatggtgtccatgcgtagattcattctgaaagccctgatgttgccaccrgcctgtgtcaggctggcttctcctgactatgaagagaatctctatcattcttacatatttactaaatggagctctttctccccttataaatattttgtattttgacgtggtttcatcactaaatgcatctcaaataattttacttgaataactatgaacaagcctagtgattcttcatactcctgcgttcagttgtaaacctgaatgtgctctttgttcgtaaatggaaaaggaa

SEQ ID NO: 222358 - DNA, 591 bp, Homo sapiens
catagagggaaagctttacaatgacattggatttgacaatgatttcttggttgtgttaccaagagcacargccacaaaaataaaatagataaatgttttgtttgtttgagacagggtcttgctctgtcacccagactggagtgcattgccataattatggctcactgcagccttaacctgccaggcttaagcaatcctctcatctcagcttgtcgaataactgggatcacagatgcatgccaccacacctggctaatttttctgtgttttagtagaggcaaggttttgccatgttgcccaggctggtctcaaactcttaggctcaagcaatccacccacctcaacctcccaaagtgctgggattacgggtgtgagccaccaggcccagccataaaatagataaattatactacattaaacttagaaacttctcggcatcaaaggacacaatcaacagagtgaaaaggcaaccaatggaatggggaaaaaatgtttgcaaatcatacatctgataaggtgttaatatccagaatacataaatagctcctacaactcaacaacaacaaaaacaaaactatctgatttaaaaat

SEQ ID NO: 222359 - DNA, 582 bp, Homo sapiens
tgaattcatgaatatttgctgagtccatgaatgtggaacccacggatagggaaggctgactgcacctacattatgacctggcaattccacacctaggttactcacccgggagaaataaaagcatatgtcctcaaagaggcttgttcaaaaatgtccatagctttattcataaataactgaaagctgaaaacaaccaataggagaatgaataaactaactgtggtaaattcagacaatgaaatactacacaataaaaaagggaggaaccggctgggcgcggtggctcacacctgtaatcccagcacattgggaggccgaggtgggtggatcacctggggtcaagagttcgagaccagcctggccaacatggtgaaamcccatctctactaaaaatacaaaaatagtcaggtgtggtggcacgcacctccaatcccagctactcgaaaggctgaggcaggagaatcagcttgaatccaggaggcagaggttgcagtgagctgagattgtgccactgcactccagcctgggtgactctgtctcaaaaaaaaagggggggtggggggaggaaccattgatacatac

SEQ ID NO: 222360 - DNA, 519 bp, Homo sapiens
tgagaggttgggggtggggataagatatagttcaatcactgaacaccaagcaaggaactaggctaagaatactgagggaaaagtcaagacttatttcctcaaagagggaatctcttccctaaactaccaaacaggtatcttgtttattattttcgtctacttggcggggaggttgttttgccactcgtttcacagtatctctggagcccacagtggctgttcctattttgactaatcaaacccttctttgaccaacatacacaagattataaagaaagaaatttaaaagaccacaggtgcttgactgggttaggaggtataaccaggttccagtgcaattctgatctaccctgtgtattyagccctcatccctcacacggatctgcaggcattcctcccctctgaccttcggacacatgcttaaaattctcttcaatgaaaaatttgtaccaccacagcttatgaaataatctgattcaaatatgtaagttcttcaatgaattccaaccaattcagatc

SEQ ID NO: 222361 - DNA, 645 bp, Homo sapiens
tagtacctactgattagaatggtcaaaatccagaacactaacaccaccaaatgttggtgagggtgtgaaacaacgggaactttcattcatttcaggtggaaatgcaaaatagtacagatagtttggaagacagtttggcagttacaaaactaaacacactcttaccatatgatacagcaatagcactccttagtatttaaactaacgaactgaaaatttatgaccatacaaaaaactggacagatgtttacagcagcactttcagacatgtattatagaatayttacatgtacatgtttgaattatgcttgttttatgttgaaatataatctgtaatttacatacatcaagataactcagtacattaagtattatttacagagagagatccaaaatatatctcaagatgtaaggcagattccactaagcttgactttctaaataaccttttaaaaattatgtagttatttcaaaatatttttaattaaaaagacacacacagatatgaactctccaacacaaacatacagctgtatagcctagtgtaacattataagacacatgccatagtaagcagcatccagatcaagaaacaggactttgccagccaccctagaaaccctatgtgggccttgtcccaatcat

SEQ ID NO: 222362 - DNA, 645 bp, Homo sapiens
tagtacctactgattagaatggtcaaaatccagaacactaacaccaccaaatgttggtgagggtgtgaaacaacgggaactttcattcatttcaggtggaaatgcaaaatagtacagatagtttggaagacagtttggcagttacaaaactaaacacactcttaccatatgatacagcaatagcactccttagtatttaaactaacgaactgaaaatttatgaccatacaaaaaactggacagatgtttacagcagcactttcagacatgtattatagaatatttacatgtacatgtttgaattatgcttgttttatgttgaaatataatctgtaatttacatacatcaagataactcagtacattaagtattatttacagagagagatccaaaatatatctcaagatgtaaggcagattccactaagcttgactttctaaataaccttttaaaaattrtgtagttatttcaaaatatttttaattaaaaagacacacacagatatgaactctccaacacaaacatacagctgtatagcctagtgtaacattataagacacatgccatagtaagcagcatccagatcaagaaacaggactttgccagccaccctagaaaccctatgtgggccttgtcccaatcat

SEQ ID NO: 222363 - DNA, 645 bp, Homo sapiens
tagtacctactgattagaatggtcaaaatccagaacactaacaccaccaaatgttggtgagggtgtgaaacaacgggaactttcattcatttcaggtggaaatgcaaaatagtacagatagtttggaagacagtttggcagttacaaaactaaacacactcttaccatatgatacagcaatagcactccttagtatttaaactaacgaactgaaaatttatgaccatacaaaaaactggacagatgtttacagcagcactttcagacatgtattatagaatatttacatgtacatgtttgaattatgcttgttttatgttgaaatataatctgtaatttacatacatcaagataactcagtacattaagtattatttacagagagagatccaaaatatatctcaagatgtaaggcagattccactaagcttgactttctaaataaccttttaaaaattatgtagttatttcaaaatatttttaattaaaaagacacacacagatatgaactctccaacacaaacatacagctgtatagcctagtgtaacattataagacacatgccatagtaagcagcatccagatcawgaaacaggactttgccagccaccctagaaaccctatgtgggccttgtcccaatcat

SEQ ID NO: 222364 - DNA, 584 bp, Homo sapiens
atttttcaaagctctcttctatggtttcatctagacttctacattactaagattatcactaaaaatggcaaatgattattttagactatatgtgatacagtaccatctttaaggcaagcactaacatctaatatgcctgtatcattaccaccctaaaatcatattttctatggactgaagatcatctgaggtattttgtaagtgatggcaaatatttcctgggcctgmaaatgcattactctaacccttctggtagggttttaaaatctgatagagcctgattttttttcttcaaaatggtaaaaataataataataataataataatcatcatcatcatcatcatcatcattcattctattgttgatggatggcaagtggccagcaataaatatatgccagattcagcaacctgttaaaatagactgcattacttaatatgagctttgaatgcaatgacttccaattttcttcagctattttatggcttaaaaattgggcaaagaccgccataaatttaggaagtaaaagaaatgtcaagtttgtcagcagaggtgaaattgttttattattccaaaagacta

SEQ ID NO: 222365 - DNA, 539 bp, Homo sapiens
aacaatttatattacaataattgttaagcacaataaatgcaaagcactttataaagagaagatcaaaattcttctctagtcattagraaatgtaattcacatcaggaagaaaatagatatataacgaagggatattgggttattaaagggtcacctggtcctaggtactcagaagactagtcaaataaataacataaagaccattcttatcagggtagagagtgataagcaaaatcaagaaggcacaaaagtaacatgaagaagttcatggatattaatgcccttttccacactattcaaaatattcagagtattaggaaaatagcagtagccaagtcagaccaaaagattcaggagcaaatgtcagtgagggtactttaattactgctccattttattggtccagttttacccatgagactgtcagttctattttggaaaatttggctacaatgtttcgggtattaaagtgccatattgaacagttacacagcttctcccaatctgttttcttcaactccactacaactgattgaaag

SEQ ID NO: 222366 - DNA, 539 bp, Homo sapiens
aacaatttatattacaataattgttaagcacaataaatgcaaagcactttataaagagaagatcaaaattcttctctagtcattaggaaatgtaattcacatcaggaagaaaatagatatataacgaagggatattgggttattaaagggtcacctggtcctaggtactcagaagactagtcaaataaataacataaagaccattcttatcagggtagagagtgataagcaaaatcaagaaggcacaaaagtaacatgaagaagttcatggatattaatgcccttttccacactattcaaaatattcagagtattaggaaaatagcagtagccaagtcagaccaaaagattcaggagcaaatgtcagtgagggtactttaattactgctccattttattggtccagttttaccmatgagactgtcagttctattttggaaaatttggctacaatgtttcgggtattaaagtgccatattgaacagttacacagcttctcccaatctgttttcttcaactccactacaactgattgaaag

SEQ ID NO: 222367 - DNA, 569 bp, Homo sapiens
atcatcactgtgtttatattttataagcagtccttctaacccatataactctctctgatgctcaaagtagtaaggataattggacctgcatttacagaagaaaaacacaacaaacaaaaatcagaagccaaagctttgtgttgggggtctggagggggtgggggcatctcttttttcaaagagccctaaatgtgttcacacttggctgacttacactgggaaaaatgtgctgtcctcgtacaaagccaagggctcatgtcctctggcctttgtcctcaaaccttctctatgaccagtgtcataaaccccattcatttcataatgagccacttcttctgaaccacttcttccttatgctgtaactggccaggtaaccttggacctatctctgataacttctctaagcttcagaacccttgccaataaaatctgggtaatcccttctttgcttgaaagcttggaggcagacctttcccattttagatccaagcttcctarccatgtgttcaagaccctacacagtctggttccaatgccaacatcctggacagccctctcctccctcctcc

SEQ ID NO: 222368 - DNA, 603 bp, Homo sapiens
tctattcaaaggcaaagagggaaaacaaccagccctagttattgctttttactgaattttcaagtaccccaggcttgttatatgctgcccattaactttcactaaaacatttaatctcgagtgtccctctcttcttctgtatctctggctaaaaagtgcaaaataagtgaaaacgttcacatgaatcccatgtgcatgtcatacaaaacacaggtaaatggttaacaattctaggggggaaaactggcatctagcttataaagagagaaacaaagaaaaygaaaacaaattatagcaatgcaacaatggcaaaataaaataatcactattaacaaagaaaactaccaccatttagtcacattttgaaagttacatttattaagtagcattcaacagatatttaaataagcaattttcttaacaggtaacaaattgtaaggaaaatgtttcaaatagaacatctcaaaacccaaatgacccaagggaaaaaaacctttttcttttgtatagtcaacattttacttagtttggtaaaacacagaattatttttaggccatgaagggtcatgcaaaataataaggattgttcgtcaaactcactcc

SEQ ID NO: 222369 - DNA, 575 bp, Homo sapiens
aaatcatgggagcatttcccctgtactgttctcctggtagtgaataagtctcgtgagatctgatggttttataaatgggagttcccctgcccaagctgtctcttgcctgctgccatgtaagacatgtcttgcttcccctttactttctgccatgattttgaggcctccccagcctgcggaactgtgaatcaattaaacttctttcctttataagttacccagttctggatgtgtctttactagcagcatgggaacaaactaatataccttcctttcaatttttctgmgaacctaaagctgctttgaaaaaaaaagccttgaaaaatagaagtgagtagggtatatagtatagtaactgagaactctgcctcaagagccagaccattcttatttttgacccactcactcattactgtctgtgtgaccttggacaagttatgtaaccttactgctttattttttttctatctgtaaattgggaataggggttgtttctaagttcgatgtctggcacatagtaaatgctcatcaagggtttgttgtttttattactatcaatacatatcaaagtagat

SEQ ID NO: 222370 - DNA, 575 bp, Homo sapiens
aaatcatgggagcatttcccctgtactgttctcctggtagtgaataagtctcgtgagatctgatggttttataaatgggagttcccctgcccaagctgtctcttgcctgctgccatgtaagacatgtcttgcttcccctttactttctgccatgattttgaggcctccccagcctgcggaactgtgaatcaattaaacttctttcctttataagttacccagttctggatgtgtctttactagcagcatgggaacaaactaatataccttcctttcaatttttctgagaacctaaagctgctttgaaaaaaaaagccttgaaaaatagaagtgagtagggtatatagtatagtaactgagaactctgcctcaagagccagaccattcttatttttgacccactcactcattactgtctgtgtgaccttggacaagttatgtaaccttactgctttattytttttctatctgtaaattgggaataggggttgtttctaagttcgatgtctggcacatagtaaatgctcatcaagggtttgttgtttttattactatcaatacatatcaaagtagat

SEQ ID NO: 222371 - DNA, 575 bp, Homo sapiens
aaatcatgggagcatttcccctgtactgttctcctggtagtgaataagtctcgtgagatctgatggttttataaatgggagttcccctgcccaagctgtctcttgcctgctgccatgtaagacatgtcttgcttcccctttactttctgccatgattttgaggcctccccagcctgcggaactgtgaatcaattaaacttctttcctttataagttacccagttctggatgtgtctttactagcagcatgggaacaaactaatataccttcctttcaatttttctgagaacctaaagctgctttgaaaaaaaaagccttgaaaaatagaagtgagtagggtatatagtatagtaactgagaactctgcctcaagagccagaccattcttatttttgacccactcactcattactgtctgtgtgaccttggacaagttatgtaaccttactgctttattttttttctatctgtaaattgggaataggggttgtttctaagttcgatgtctggcacatagtaaatgctcatyaagggtttgttgtttttattactatcaatacatatcaaagtagat

SEQ ID NO: 222372 - DNA, 575 bp, Homo sapiens
aaatcatgggagcatttcccctgtactgttctcctggtagtgaataagtctcgtgagatctgatggttttataaatgggagttcccctgcccaagctgtctcttgcctgctgccatgtaagacatgtcttgcttcccctttactttctgccatgattttgaggcctccccagcctgcggaactgtgaatcaattaaacttctttcctttataagttacccagttctggatgtgtctttactagcagcatgggaacaaactaatataccttcctttcaatttttctgagaacctaaagctgctttgaaaaaaaaagccttgaaaaatagaagtgagtagggtatatagtatagtaactgagaactctgcctcaagagccagaccattcttatttttgacccactcactcattactgtctgtgtgaccttggacaagttatgtaaccttactgctttattttttttctatctgtaaattgggaataggggttgtttctaagttcgatgtctggcacatagtaaatgctcatcragggtttgttgtttttattactatcaatacatatcaaagtagat

SEQ ID NO: 222373 - DNA, 479 bp, Homo sapiens
aatttgtggttccttggttaactaatccaacctttcactgaatctttctatggtaactctgctcatcattttctttctctggtccctcctttctcactatatgctattgccttagtcttcttgatagtccaagaagcccagggttttttgtagctgagagttggaattggttttataaccccttaggattgaagatcatcctctcaaagtattgcacagaatgtaacactttccaaatgtggtgtctagcatgatactgatatgagacawccttaccccctgtaatcaagatattgtatatttcctggcaagtaaatttcaagccttttggctctacagattctctgtttcttggtttagaggaaatttagcaggtgatgtgttatagtatggagtcacttatatgttaaaagctacattgtgacatgggagatttcagtgatgaaaaaccggaagtgggaaatctgcagttggcaact

SEQ ID NO: 222374 - DNA, 572 bp, Homo sapiens
ttaaattggaaggctgctgtgcaccaatttttgtgtttagtattaaggcctcttgaatgcatgcttttgagaaatgtatactgctctgtgcaaatcatacaatttatccatcagcttccatcattaatttaacatatgggtagcagagaagccactactcactcagttctcaactgactgccttaatgatgctttctccccygtccttggttcttccacttagtatttctagtgtcatcttcctcctatttgattcttcttcactgcttcttcctccttgctcaggaagacatgaataaagaagcagtgagttgtttgtttctttattttcctgcctgtgtactagaaggagccagacctggtacattcatttgagataagcagggttgggttgtagttaaatgtttgcagagaatgttccaaggaaaacagagtatgggggtttagatggggaaagtgccctctgagtcagtatcagatgaggcctctgttgtggtgctgggaaggtggtgcttgggctatggagaaacaatcccacaacctgaataatagcctgtggccaacagaattct

SEQ ID NO: 222375 - DNA, 581 bp, Homo sapiens
agcttagagttttggaaagaaaagaagagcacatyacattgtgagatatctctttttctttccccttcctccgcctttgccaaagataaggacatctcttccatttcagaaaagaagactctgtcttttaagttgtccatatagaaaccactttgatttgtttcaaaataggggaattaccacacgtttcatttcactccttctgtcttctctgaggatattggaaatatgatgtaataaataaaaagcaagaacacactaaataaaaagccagaaatctgggtttactgactatgtacccctaacaaattaggtcagctctgggcctcagcttccttgtctgtaaaataaggataataatagatatctcagaaggtcactagaagaattctgaatgatgcgtgtcaaacatcaagcatactccctggaacatagcagccatccaacaatcggtagctattcttatttgttactatttatatcaaacttttaataaaagtagcaaaatacatcaaatcatttcataggattttttggagggaaacttgccaagttagtttttttgtttgtttttgtttatt

SEQ ID NO: 222376 - DNA, 581 bp, Homo sapiens
agcttagagttttggaaagaaaagaagagcacattacattgtgagatatctctttttctttccccttcctccgcctttsccaaagataaggacatctcttccatttcagaaaagaagactctgtcttttaagttgtccatatagaaaccactttgatttgtttcaaaataggggaattaccacacgtttcatttcactccttctgtcttctctgaggatattggaaatatgatgtaataaataaaaagcaagaacacactaaataaaaagccagaaatctgggtttactgactatgtacccctaacaaattaggtcagctctgggcctcagcttccttgtctgtaaaataaggataataatagatatctcagaaggtcactagaagaattctgaatgatgcgtgtcaaacatcaagcatactccctggaacatagcagccatccaacaatcggtagctattcttatttgttactatttatatcaaacttttaataaaagtagcaaaatacatcaaatcatttcataggattttttggagggaaacttgccaagttagtttttttgtttgtttttgtttatt

SEQ ID NO: 222377 - DNA, 524 bp, Homo sapiens
ggaatgttttctctaagccagtggttctcaaagctggtcctcctcctggcagcatcagcttgtgttaggaatgcagattcctactgaaccccatgcttggatcccaggaggtggtgctctcacaaggctccaggtgacagcgctggcccaggtggtctggtttccagcctgagaaccagctctatttgtgcagaagctcctaggcctggggccttccccagagccccagccccagttttggatcaaaactccaaagtcagcccctttcctggtcttttgcctctctcagcctcagtgggtggcagagacagccagtgtgggcatggccagtgccctggcctggcgccggaggtggctctggctgggccactgacttgctgagtggtgacactgggggagtcactgtacttctctcctctcaaaaaggcagggtgttctctgaatgttttccaaaaaagatgtgagcaaaaaaatatttgttcttggagctctctgrgggcctatgctctggataaagagaattc

SEQ ID NO: 222378 - DNA, 564 bp, Homo sapiens
actcatataggactcactgccactttgtcattgttgctatccccattcgatgtgtgaggtaatggaagcacagggtggccgagccctttgcccagagctgagctggtggaggcggtggggtgcacgctcaggcagtctggctccagtcagtccatgcggctgctctactgtgtccaatggatggcagctgctatttgtgttatattatttctccttccccggtcaccagaaccaactccagtctttaagttcacggtgacagttaatgggaagcttgctcaggcaagatcttctcaccacagcgtttctgagtggaaaacaggctgggccccactgcaggcaaacgccctcatgttgacaggagccaggcagattagctacgtggacggttcagctcaattcccaaacatttagccaacaccaacgaggtgccaggcagtrtgctagcaccagggagcagaggagggctgggaagatggaggacacaccctgggcctgtcctggaggggcagagtatacccaagagggccgccataccccagccatactccagtttctcgttta

SEQ ID NO: 222379 - DNA, 233 bp, Homo sapiens
ctgatgttaggaggaaaaattctttctccaggtcaaattagacttctgcagatcaaataggataccaagagaaggaggcactttggccaggatggggaggggctaaagagcaggaaacaagcttggggcgagctggaaatatgtgtaacacaggcttgtaggagcacaggcttccagtggcrgggaaatctccaattgggtgtgtagtaaagacttaaacctgttaaaataaa

SEQ ID NO: 222380 - DNA, 517 bp, Homo sapiens
gccacctccaatgccaatgaccaagcttttcgaacactcagctatcrgttttgttgagttctccaatgtttttctcttctctacttcatttatttacattctaattcctattcattgttcgtttattttgagtagatggcttcttttttgagtttcttcaagtgaaatattaggttctcaatttgagattactcctttgtttcttttctctttctcaatatattcacactgacagcaatgcatttccctctaaggactgctttagctacttctcataagttataatatgctgtgtttttgttttaatttatcttattttctgattttttgtgattttctttttaatcatttagttttaaaagagtgtttcagaaaaaatttttgtcttaaacaccacattgcttgatattattaatttcaggctgggcattgtggttcacacctgtaatcccagtactttgagaggcccagatcagaggactgtttgagcccaggagcaagaccaacctgggcaaca

SEQ ID NO: 222381 - DNA, 517 bp, Homo sapiens
gccacctccaatgccaatgaccaagcttttcgaacactcagctatcagttttgttgagttctccaatgtttttctcttctctacttcatttatttacattctaattcctattcattgttcgtttattttgagtagatggcttcttttttgagtttcttcaagtgaaatattaggttctcaatttgagattactcctttgtttcttttctctttctcaatatattcacactgacagcaatgcatttccctctaagractgctttagctacttctcataagttataatatgctgtgtttttgttttaatttatcttattttctgattttttgtgattttctttttaatcatttagttttaaaagagtgtttcagaaaaaatttttgtcttaaacaccacattgcttgatattattaatttcaggctgggcattgtggttcacacctgtaatcccagtactttgagaggcccagatcagaggactgtttgagcccaggagcaagaccaacctgggcaaca

SEQ ID NO: 222382 - DNA, 561 bp, Homo sapiens
cagcaggaaggagggtgcaatgatgtaaataattaaagaagtcacaatgccagtgggggacctcagccttaaaaatgtatgcccatggctcatagaacaaaggggtcaaggatccaaaagaaatggaaactcaacccrgatactgctagatataaataattacaacaaacaaagacaaaacgcaaggatggatgacctgaaggctgaaaggagtcaccctaggaaataactgagctcctttgcccagctttgagaactgagccacatctcagacccagagtccattgctagaaggagagcccagaggccctggtgggctccttcaaccccacagcaactgcaatgactccctcagcctcccccagagagccagatgggcattcactctggtaactgtatgccatgaaatggcaaatacccagacactcctagtagacacagtgtgtgatccaacctcctcccagggacctaaagcattaacttgctcccctattactcatgaggtgcatttagggcaaagtaacagatggacacctctgtcaggtccagcttagagggatg

SEQ ID NO: 222383 - DNA, 561 bp, Homo sapiens
cagcaggaaggagggtgcaatgatgtaaataattaaagaagtcacaatgccagtgggggacctcagccttaaaaatgtatgcccatggctcatagaacaaaggggtcaaggatccaaaagaaatggaaactcaacccggatactgctagatataaataattacaacaaacaaagacaaaacgcaaggatggatgacctgaaggctgaaaggagtcaccctaggaaataactgagctcctttgcccagctttgagaactgagccacatctcagacccagagtccattgctagaaggagagcccagaggccctggtgggctccttcaaccccacagcaactgcaatgactccctcagcctcccccagagagccagatgggyattcactctggtaactgtatgccatgaaatggcaaatacccagacactcctagtagacacagtgtgtgatccaacctcctcccagggacctaaagcattaacttgctcccctattactcatgaggtgcatttagggcaaagtaacagatggacacctctgtcaggtccagcttagagggatg

SEQ ID NO: 222384 - DNA, 613 bp, Homo sapiens
gagctgtgggctaggcgagggagaccaggggctgccaggttgttttaggctgagaggaaaaggacaaacagaagacagcmaaagcaaacatgtacccacagagatgagaacagcaggcagaactagtgtagcaggggcacgttaggagcaaaggaaaagacagtgggtgggactcagggaagatcacatttgcaaaagaattctgtcaacctaaacttcaaagtcaattggctaccattaccacctttcagttcctgtttggagcaagtaagtcaatgaagaaaggtgtattttccaacagcactgacataaagctgtaaggatgcaagaatgtgatatgactacagtaacaaaaacacagattgacttttgccctcgccatgtctatgataaaggaatatcaccaattagttcagatacagaaacatcaatgacttttaaacatttgctgaacattgatcctttttcattcattcaagcaaatgcttaaatgttgaagaattgtgtcccgctatgaacttttaaatgatgaaaattaagacagttccttgccttcaagttgttacagtctaacttccctgcacatatgtaaaaatccaccaaaacatagaga

SEQ ID NO: 222385 - DNA, 577 bp, Homo sapiens
gggctgccaggttgttttaggctgagaggaaaaggacaaacagaagacagcaaaagcaaacatgtacccacagagatgagaacagcaggcagaactagtgtagcaggggcacgttaggagcaaaggaaaagacagtgggtgggactcagggaagatcacatttgcaaaagaattctgtcaacctaaacttcaaagtcaattggctaccattaccacctttcagttcctgtttggagcaagtaagtcaatgaagaaaggtgtattttccaacagcactgacataaagctgtaaggatgcaagaatgtgatatgactacagtaacaaaaacacagattgacttttgccctcgccatgtctatgataaaggaatatcaccaattarttcagatacagaaacatcaatgacttttaaacatttgctgaacattgatcctttttcattcattcaagcaaatgcttaaatgttgaagaattgtgtcccgctatgaacttttaaatgatgaaaattaagacagttccttgccttcaagttgttacagtctaacttccctgcacatatgtaaaaatccaccaaaa

SEQ ID NO: 222386 - DNA, 488 bp, Homo sapiens
agcatccagtgctcatgctcaggccatcacctgctgcctccctgttggaggctgagagagaacatctgccctgcaggctccgccctcccactgtggagcttaagggagcgctgtgcttcacatggtgcaggtgtcccatgagtggtaaccccctccctctcccccttcccctccctccaccactgatggctgtagctcctccagtctaccagacccttgcaaatagtccagctcctgcccagcctttgagaagcaggaactggtgacggtcatcccatcctgacacttccccctcttcgctgctgtggccacttgctgtcccctggccacaagatgtgagcttttcatagagtccctgaatggttctgtattgctggtcacaaaagatctttgtttgtttggttggttggttggttttttgagkttttgtttttttttttttctttgagatggagtctcgctctgtcactcaggctggagagcaagtg

SEQ ID NO: 222387 - DNA, 404 bp, Homo sapiens
ttcttgctctgttgttgctatgtcacatgggacctgcccgttagagctaaacagtcagttttgctgtttctaggcaggaaaaygctcacatcacaagtaaatgtcgaggcatcccaggaggtttccctggtaatgtatattttcattagtcaattccagtcttaaaggtactattctcctgactttttaacgttttcctagggtgccatcctgtatgtgaaatccaaaattgatgatttcttctcaaaggcagtgttaccataattcacaccatttagatatattataaaaaagtgtttaaatctattcaacattgttcattaagcttctgtcagaatcataaaaatatcttgtcatgcctgattaattcaactgagttcagttttgaaacagcactgctgttc

SEQ ID NO: 222388 - DNA, 404 bp, Homo sapiens
ttcttgctctgttgttgctatgtcacatgggacctgcccgttagagctaaacagtcagttttgctgtttctaggcaggaaaacgctcrcatcacaagtaaatgtcgaggcatcccaggaggtttccctggtaatgtatattttcattagtcaattccagtcttaaaggtactattctcctgactttttaacgttttcctagggtgccatcctgtatgtgaaatccaaaattgatgatttcttctcaaaggcagtgttaccataattcacaccatttagatatattataaaaaagtgtttaaatctattcaacattgttcattaagcttctgtcagaatcataaaaatatcttgtcatgcctgattaattcaactgagttcagttttgaaacagcactgctgttc

SEQ ID NO: 222389 - DNA, 404 bp, Homo sapiens
ttcttgctctgttgttgctatgtcacatgggacctgcccgttagagctaaacagtcagttttgctgtttctaggcaggaaaacgctcacatcacaagtaaatgtcgaggcatcccaggaggtttccctggtaatgtatattttcattagtcaattccagtcttaaaggtactattctcctgactttttaacgttttcctagggtgccatcctgtatgtgaaatccaaaattgatgatttcttctcaaaggcagtgttaccataattcacaccatttagatatattataaaaaagtgtttaaatctattyaacattgttcattaagcttctgtcagaatcataaaaatatcttgtcatgcctgattaattcaactgagttcagttttgaaacagcactgctgttc

SEQ ID NO: 222390 - DNA, 590 bp, Homo sapiens
cgctcctgggggtttcagtttcgacccctccgcgtccattctggcttctgcgggctccgcccagggcgtccgcttcgcccgagctccggacccaggtcctgccctgtggagaccccggagtgggtgcgccgctgccggccgatacccccgggcctccgggtccacagcgtccggaaaaaaacggcctttcgaagacctgggatgactcgctggtcgcggcaagggacccttggttcccgtgtcagaaggatcaaggaaatgcggggcctgttgrggtgaggagcacgaggtccctccttcatcctcgcggggactttgtcaccggctcagtgtgtagacctcaccgtcccactcgaatctgtggggctccgacagtgtgggccccgcgaggacccccatcctccttgccctggggccgctacaggagggcgccgggacgcactaggtcctgagtgtccagggtccggcaggggcgtcaggttgtcgcctcccggatcccgccgctcgcggtccagggctcctggtttctacgctgggctggggacccggagcatgcatgtcgtggggcggagaaaaccttgggatggttg

SEQ ID NO: 222391 - DNA, 590 bp, Homo sapiens
cgctcctgggggtttcagtttcgacccctccgcgtccattctggcttctgcgggctccgcccagggcgtccgcttcgcccgagctccggacccaggtcctgccctgtggagaccccggagtgggtgcgccgctgccggccgatacccccgggcctccgggtccacagcgtccggaaaaaaacggcctttcgaagacctgggatgactcgctggtcgcggcaagggacccttggttcccgtgtcagaaggatcaaggaaatgcggggcctgttgaggtgaggagcacgaggtccctcctycatcctcgcggggactttgtcaccggctcagtgtgtagacctcaccgtcccactcgaatctgtggggctccgacagtgtgggccccgcgaggacccccatcctccttgccctggggccgctacaggagggcgccgggacgcactaggtcctgagtgtccagggtccggcaggggcgtcaggttgtcgcctcccggatcccgccgctcgcggtccagggctcctggtttctacgctgggctggggacccggagcatgcatgtcgtggggcggagaaaaccttgggatggttg

SEQ ID NO: 222392 - DNA, 586 bp, Homo sapiens
ccatcccaaggttttctccgccccacgacatgcatgctccgggtccccagcccagcgtagaaaccaggagccctggaccgcgagcggcgggatccrggaggcgacaacctgacgcccctgccggaccctggacactcaggacctagtgcgtcccggcgccctcctgtagcggccccagggcaaggaggatgggggtcctcgcggggcccacactgtcggagccccacagattcgagtgggacggtgaggtctacacactgagccggtgacaaagtccccgcgaggatggaggagggacctcgtgctcctcaccccaacaggccccgcatttccttgatccttctgacacgggaaccaagggtcccttgccgcgaccagcgagtcatcccaggtcttcgaaaggccgttttttcccggacgctgtggacccggaggcccgggggtatcggccggcagcggcgcacccactccggggtctccacagggcaggacctgggtccggagctcgggcgaagcggacgccctggcggagcccgcagaagccagaatggacgcggaggggtcgaaactgaaacccccaggagcg

SEQ ID NO: 222393 - DNA, 462 bp, Homo sapiens
aaggtcaggtggataaaaagatttttcttctctctgactgttgcaacaacacagttaaatccttcagttccctgcggaagaaaataaatgtcacacgggcctggaaagcacagaatccagtactgaaaaaggtggtggacatgctcacagagcaactgctggacattcagctggagaatgacacacccagggataagtttaaaatggtccaggacaggagggagcagacagtagtaggttggaggcaattattgatttcctgtagcaatataaatccgagagggccagaggcaargacaggatatggcagcgagagcaagagcaggaggttggaagtgggacagggtggtggcacaggatttgtcaagaccagagctgatctctttccaagggggcagaacccctcaccctgcaggccaggatgtctcgtgagcgggaaggtgatggacatagtagtggatc

SEQ ID NO: 222394 - DNA, 450 bp, Homo sapiens
cactgtgtccaccagaagtgtctgggtatttgctgtttcatggtgtacagttaccagagtgaatgcccatctggctctctgggggaggctgaaggagtcattgcagttgctgtggtgttgaaggggcccaccagggcctctgggctctccttctagtaatggactctgggtctgagatgtgactcagttctcaaagctgggcaaaggagctcggttatttcctggggtgactcctttcagcctccaggtcatccatccttgtgttttgtctttgtttgttgaagtaatttaaatctagcagcatccgggttgagtttccatctcttttggattcttgacccctttgttctatgagccatgggcacacctttrtatgactgaggtccccacctggcattgtgacttctctaattatttccatctttgccccctccttcctcctgacagttg

SEQ ID NO: 222395 - DNA, 547 bp, Homo sapiens
ggtggactatagtgacattttgggtctcttggaatgagtgtcacttcagagccagtgtccagtaatacccaaaatgtctgattatttctttttccccaatgcatagccacttgataaatggccatakgttcctttgaggaagtctataaagaagagtaacagtataaagttttggcagtataacaggattcttcctcaagggcttccccttcattcaaggggttgtgggtctgttaactggctgaagtctgggagttcgttggacagtgagtctatgttttggtgattcaagttagacattgttcactcaaactagaatgctcctgcttatacagatcaaggaagaatttatatccatctatttcttttctagggacatgatgatcaaccagccaatgccaaaggtctccgaaagttacactattttgattattgctttgactcccctgtccatcacagcaaccacactcaccttgtctttgatgatttagttctgccatttggcccctgctgccccaggatccgattgcctctattgcattcaggg

SEQ ID NO: 222396 - DNA, 609 bp, Homo sapiens
agatctggatttgaattctggcaccaacacatccttcctaactgtgtgacttctctctgttacagtttgcccctctgtaaattcaaggtacataatggcaccctggaaacaatgggtggcactacactgccctttatcagtaaggtaactaaatgtctgtgactataggaagttgccaggatgtgggactttcagggctaaatactkgaaggtccttgggaaaccaaggtgagcaccaggtccatgttgcctccttcaggaacaacaagttcttgaccagtcagctctacaaagtatcagaatcattccaagtaaccatcttgaccatttatgaagtaccagccacaccccaggcccattatatttatcaatgattcttaaacctgagcttgcatcatgatcacctggagagcttgtcaaaacacagattgctgggcccaactccagggattctgattcagtaggtctgggttggggcctgatcttttgcattcaaaaaactcctaggtaatgctgctggtccagggtatacactttgagaaccactagcccaacaaaataccaattaggagagtatatgggaaagacacttgaaaaaggaaggaagct

SEQ ID NO: 222397 - DNA, 492 bp, Homo sapiens
tgtctattaaattcacttgcccatttttaattgggttgttctattcttgctgagttgtaaggattccttatatattttagatactaaacctttttgagagatataattttcaaatattttatcccaaagacaatcgtgtcttttcactctttatactgtcatttgttgcatatttttwaaaaaatcgatagtctaatgtattcatgttttctattttgttgctttgtgctcttggtatcatatctagtaaattattgctagatctaaggttgtgaaaaattgcctaaatgtttttctttaagagttttataggcttagctctcatacttaggtgtttgattcatttggaatttttgtatttagtgtgaggcaagggcccaacttttttcttttgcatgtggatttccatttgtctgaacataaatttgttgaaaagactattcttttcccattgaacagccttagcaaccttgttgaaaataagttgactgt

SEQ ID NO: 222398 - DNA, 492 bp, Homo sapiens
tgtctattaaattcacttgcccatttttaattgggttgttctattcttgctgagttgtaaggattccttatatattttagatactaaacctttttgagagatataattttcaaatattttatcccaaagacaatcgtgtcttttcactctttatactgtcatttgttgcatattttttaaaaaatcgatagtctaatgtattcatgttttctattttgttgctttgtgctcttggtatcatatctagtaaattattgctagatctaaggttgtgaaaaattgcctaaatgtttttctttaagagttttataggcttagctctcatacttaggtgtttgattcatttggaatttttgtatttagtgtgaggcaagggcccarcttttttcttttgcatgtggatttccatttgtctgaacataaatttgttgaaaagactattcttttcccattgaacagccttagcaaccttgttgaaaataagttgactgt

SEQ ID NO: 222399 - DNA, 516 bp, Homo sapiens
aatggttacaccaatttacattcacaccaacagagtaaaggttcccctttttcccacacacttgccaatacttgttgcctcatgtctttctgataatagccattctaacaggtgtgaggtgatatcccattgtggttgtgatttgcatttccctgatgattagtaatctcgagcatttttatatgcctgtttactgtttctattttctatttggagaaatgtctacttaggttctttgctaatttttaaatcttttyttgtgtcttttgctatttggttgtttgtgtttcttttatattttggatattaaccctttattagctatatggttcatgaatattttctcccaatccatagagtgccttttcattttgcagattatttcctttcctgtgaagtaactttttagtttgatgtagtcccacttattttttgttgttgttgttgttgcctgaactttttatgtgaaatccaaaaaaaaaaaaaaaaaatcactgctaagaccagtgtcaagaa

SEQ ID NO: 222400 - DNA, 516 bp, Homo sapiens
aatggttacaccaatttacattcacaccaacagagtaaaggttcccctttttcccacacacttgccaatacttgttgcctcatgtctttctgataatagccattctaacaggtgtgaggtgatatcccattgtggttgtgatttgcatttccctgatgattagtaatctcgagcatttttatatgcctgtttactgtttctattttctatttggagaaatgtctacttaggttctttgctaatttttaaatcttttcttgtgtcttttgctatttggttgtttgtgtttcttttatattttggayattaaccctttattagctatatggttcatgaatattttctcccaatccatagagtgccttttcattttgcagattatttcctttcctgtgaagtaactttttagtttgatgtagtcccacttattttttgttgttgttgttgttgcctgaactttttatgtgaaatccaaaaaaaaaaaaaaaaaatcactgctaagaccagtgtcaagaa

SEQ ID NO: 222401 - DNA, 603 bp, Homo sapiens
ctatctggtgttcaaggcaattagttaatccttgaatgtctcataaagcatctatttgctattactagaacaatttaggagaaacaagtagaaaaccagatttgtggtagagaggatrggaaagtgtcagtgaaatgctattttacggctattgctttattttccaactggttagactggagaaccaatggtcacatttgttttgttatgatttaggtagtcaaaacttaacaaaagcaatgtttcattttaccataaaaacgtgcatttaaaactcactaaaataatctttgctctttctcataacaagactgtgtgttatcattattgagcacatggtatattctagccaattaacttacatctaatctttgtaaccaaaggactttcgttctttgttaatttcaactgtctggcatcaacaatcttccgtttttgcttgtatcactccaaaatagcataatgtactacctctcctaaagtacattaacaaaagcttcctcctctcttcccactttatacccatccagtcttttctccttaatctgatgaagttgctcaagacaagtgttcatgtcaagatcattgatgacttcataccgt

SEQ ID NO: 222402 - DNA, 603 bp, Homo sapiens
ctatctggtgttcaaggcaattagttaatccttgaatgtctcataaagcatctatttgctattactagaacaatttaggagaaacaagtagaaaaccagatttgtggtagagaggatgggaaagtgtcagtgaaatgctattttacggctattgctttattttccaactggttagactggagaaccaatggtcacatttgttttgttatgatttaggtagtcaaaacttaacaaaagcaatgtttcattttaccataaaaacgtgcatttaaaactcactaaaataatctttgctctttctcataacaagactgtgtgttatcattattgagcacatggtatattctagccaattaacttacatctaatctttgtaaccaaaggactttcsttctttgttaatttcaactgtctggcatcaacaatcttccgtttttgcttgtatcactccaaaatagcataatgtactacctctcctaaagtacattaacaaaagcttcctcctctcttcccactttatacccatccagtcttttctccttaatctgatgaagttgctcaagacaagtgttcatgtcaagatcattgatgacttcataccgt

SEQ ID NO: 222403 - DNA, 508 bp, Homo sapiens
tcagggtgaccatcttgcccagagaccacgcattgaaactcctagaaggaggttggattaaagatgatggggcacatctgggggcaaatttaagccttgctggtttgatactgggtgctaagcagagtggttaacgtctgtgttttatcacatgtattttgctctggccagaatgaaaaaataaataaatttttcctttatgatgtgttttggctcccagggtgatgatgctgcaagcgaaatcactagggccgctcagggaaagggaacccagaagcctggcatgctggcaaaaacataagaatttcttacatcagatttctggattctctctctctgtgcaartggttgaatgaatggaaaaaaagaatcagtgtttatctcctctttaaagttttgattaatgcaaaaaaaattctaatgctagtcttaacctggtgtactttgtgctatgagttcatttttctgtgttgagggatactttaggataaaacaagggcttagaaca

SEQ ID NO: 222404 - DNA, 508 bp, Homo sapiens
tcagggtgaccatcttgcccagagaccacgcattgaaactcctagaaggaggttggattaaagatgatggggcacatctgggggcaaatttaagccttgctggtttgatactgggtgctaagcagagtggttaacgtctgtgttttatcacatgtattttgctctggccagaatgaaaaaataaataaatttttcctttatgatgtgttttggctcccagggtgatgatgctgcaagcgaaatcactagggccgctcagggaaagggaacccagaagcctggcatgctggcaaaaacataagaatttcttacatcagatttctggattctctctctctgtgcaaatggttgaatgaatggaaaaaaaraatcagtgtttatctcctctttaaagttttgattaatgcaaaaaaaattctaatgctagtcttaacctggtgtactttgtgctatgagttcatttttctgtgttgagggatactttaggataaaacaagggcttagaaca

SEQ ID NO: 222405 - DNA, 470 bp, Homo sapiens
cgatcttgtcctccacctcatttatttattttatatttatactgatgttagtgtggagattttttgcgtgatttcatgttcaaagtaacttctggtttgtgaagttgttatcagtgctcactcaggaaaacctatccatgagtagagtgagaacaggaagaagagggtatctgggtcgatatttggaattcttgttgtctctgatctgtgttcatctgtgggtggcctccatgcctccccagagctgctttgaatatcaccatttttccatrcagaaaatgtggcaccattacttactgaatcttacatttttattgtgtgagtatttatagatgtgacacttgtctaagtaacactttcaaagtggataactgcttagaatcatcaagctattgaggttaagacatgtgagcctgtttgtccttaaattcaagacttactgagtaaatatgtgaataacaaccaatgac

SEQ ID NO: 222406 - DNA, 513 bp, Homo sapiens
gggccattagcacatctaggaattctttacactcagactgaagtctaatgagtatactaagaaagtataatgcccaggctatgtttatctaaaataatgtattggaaactgacgatgggcagtctagataagaaaattaccagaatctacctgttagcagagtgaattgcagatggtcatctactccacagattggcaggactgagcctagaggtcagcattaggaaaacatgggcaacaggaaagcattttaaatatttgttggtacayttaatctgatggatataatcctgttgacatatctagttggacagatctgtatgtggtagattcatttgttagactttctgacaggcttatgtttgccagaagagatgtgaaaactttcagcatagataagaaaaagccatgtgaaaaccatacgtattgcaacagacagtgtgttgtctgagaggcaagaagataactttaccaggaaaaaaaaaatggccattttatgaaagctattagtcc

SEQ ID NO: 222407 - DNA, 513 bp, Homo sapiens
gggccattagcacatctaggaattctttacactcagactgaagtctaatgagtatactaagaaagtataatgcccaggctatgtttatctaaaataatgtattggaaactgacgatgggcagtctagataagaaaattaccagaatctacctgttagcagagtgaattgcagatggtcatctactccacagattggcaggactgagcctagaggtcagcattaggaaaacatgggcaacaggaaagcattttaaatatttgttggtacacttaatctgatggatataatcctgttgacatatctagttggacagatctgtatgtggtagattcatttgttagactttctgacaggcttatgtttgccagaagagatgtgaaaactttcagcatagataagaaaaagccatgtgaaaaccatacgtattgcaacagacagtgtgttgtctgagaggcaagaagayaactttaccaggaaaaaaaaaatggccattttatgaaagctattagtcc

SEQ ID NO: 222408 - DNA, 460 bp, Homo sapiens
gagaaacccttccttatacacaaatatagggaaatgaattgtcttgtaacaaaacaattaaaatattaacatatttctgtcttttcaattttacaacatgtatagaataatctaagaacaaaaagatgtatgaagatttatgaaaactatgacccaaataagagaaaacaccattattagaaggctactcagagaygaaccattctggagttagcatacagaacccttaaaatagttatttttagttttgttaaaaatggcagtaaaatatataagtaaaaatgagtaaaatcaatacagaaatgaaaattctaaaaatagaattaaaaattctataactgaataagacaatatctgataccagaaatgtactggatgggcttaaaagcaaactggagaaagactaagtaaggattgctgaacttgaaagtaggccaatagaagttatcaaaactgcaat

SEQ ID NO: 222409 - DNA, 647 bp, Homo sapiens
gtgcctatttttattcatttgtttccgtgtttcctggaggaacagtttgttcacagatcatattttttttcttgagctcttcttttctcattgttatgttttctttggttaactacactttataggttttctcatttggattatccaacttgggatggtgaaattttaacatcccaaccctgactgaaaattttccttgttcaactgaaatggagttgagctttggtgaaatgwggttaaatatgggttggctacagctttgtctgctcttgtacacttttcacagataaaaattacactaggttgtacttttatgccccagaattaatgactgaatatgcagtatgtagtattataatggttccatggcataattgggatcttaaacaccctttatgacatttccagccaaaaggttgcgtggaattcaaaatctcagtacacctaatcaaattctagggaatatgaaagaataatggaaaaaattgaggacttaatgttctaaactccttcaataagttaattataaaatgaattattgagttaatgtgcactttactttcatgcaggacaattttcctttagtatttcctaatgattcaaaaaaaattgaaaagggcagattttaatgttagcatttttactaa

SEQ ID NO: 222410 - DNA, 560 bp, Homo sapiens
tgagctttggtgaaatgtggttaaatatgggttggctacagctttgtctgctcttgtacacttttcacagataaaaattacactaggttgtacttttatgccccagaattaatgactgaatatgcagtatgtagtattataatggttccatggcataattgggatcttaaacaccctttatgacatttccagccaaaaggttgcgtggaattcaaaatctcagtacacctawtcaaattctagggaatatgaaagaataatggaaaaaattgaggacttaatgttctaaactccttcaataagttaattataaaatgaattattgagttaatgtgcactttactttcatgcaggacaattttcctttagtatttcctaatgattcaaaaaaaattgaaaagggcagattttaatgttagcatttttactaatagattctatttttcaagcaaaggcttcatgtaaatgtggatggtaaggcttttctacctaaaagattttcttagattaaaaactaaggtgtgagccgttttagttatttaaaaaggtcccgtccctct

SEQ ID NO: 222411 - DNA, 647 bp, Homo sapiens
gtgcctatttttattcatttgtttccgtgtttcctggaggaacagtttgttcacagatcatattttttttcttgagctcttcttttctcattgttatgttttctttggttaactacactttataggttttctcatttggattatccaacttgggatggtgaaattttaacatcccaaccctgactgaaaattttccttgttcaactgaaatggagttgagctttggtgaaatgtggttaaatatgggttggctacagctttgtctgctcttgtacacttttcacagataaaaattacactaggttgtacttttatgccccagaattaatgactgaatatgcagtatgtagtattataatggttccatggcataattgggatcttaaacaccctttatgacatttccagccaaaaggttgcgtggaattcaaaatctcagtacacctaatcaaattctagggaatatgaaagaataatggaaaaaattgaggacttaatgttctaaactcyttcaataagttaattataaaatgaattattgagttaatgtgcactttactttcatgcaggacaattttcctttagtatttcctaatgattcaaaaaaaattgaaaagggcagattttaatgttagcatttttactaa

SEQ ID NO: 222412 - DNA, 591 bp, Homo sapiens
tatttatttacaagtctttgtgtggacatagtttttatttctcttgggtagaatactaggagtggaattgctgggtcatagagcagatttatgtttaamtttaaggctatggtccccagtagttttggcactagggactggttttgtggaagacagttttccatggatggggcagcggcagatggcgaaatggtttttggatgaaattgttccacctcagatcttcaggcattagattctcataaggagcacacaacctagatccctcacatgcacagttcacaataaggttcctgctcctatgagaatacagtatcaccactaatctgacaggaggtggggctcaggtggtgatgctatcttgcccattgctcacctcctgctgtgtggcctggttcctaacaagccaaggactagtacaagtccatggcctgtgggtgggggacacctgctttaaagaactaataaaatgtttgccaaagtgacatgtaatttcacatctctgccagcaatgtatgaaggttccaatttcttcacctcccagctagtacttggtattatcttctttattataaatcttctgtcaggtat

SEQ ID NO: 222413 - DNA, 597 bp, Homo sapiens
cccactgcctggccaaaccctgtttaaatccttcaatagccagctgagatcatgtcctcagaggtcattttctttttttattaatttaaaaaagcgttatttgtttactcctctgagctatagttgctcattttctgtaactgcattttagcccttatcaccttgtattatgcttacaggcatacttcattttattgtacttcactttattgagatttgcaaatattaaagttttaacaaatcgaaggcttgtggcagccctcagcctagccagtctgttaacaccaattttccaacaatrtgtgctcactttgtgtcttggtgtcacattttgataattatcaaaatatttcacacttttttattattattgtatctgttatggtggtctgtggtaagcaaactttgatgttattattgtaattatttgggtgcaccatgaactggacccatataagatggcaaactttatcgataaacctgtgttttctgactgctccactgactagctattccctttctctccctttcctcaggcctgcctactccccgagaaataataacaccgaaattaagccaattagtaaacctacaatg

SEQ ID NO: 222414 - DNA, 597 bp, Homo sapiens
cccactgcctggccaaaccctgtttaaatccttcaatagccagctgagatcatgtcctcagaggtcattttctttttttattaatttaaaaaagcgttatttgtttactcctctgagctatagttgctcattttctgtaactgcattttagcccttatcaccttgtattatgcttacaggcatacttcattttattgtacttcactttattgagatttgcaaatattaaagttttaacaaatcgaaggcttgtggcagccctcagcctagccagtctgttaacaccaattttccaacaatgtgtgctcacttygtgtcttggtgtcacattttgataattatcaaaatatttcacacttttttattattattgtatctgttatggtggtctgtggtaagcaaactttgatgttattattgtaattatttgggtgcaccatgaactggacccatataagatggcaaactttatcgataaacctgtgttttctgactgctccactgactagctattccctttctctccctttcctcaggcctgcctactccccgagaaataataacaccgaaattaagccaattagtaaacctacaatg

SEQ ID NO: 222415 - DNA, 597 bp, Homo sapiens
cccactgcctggccaaaccctgtttaaatccttcaatagccagctgagatcatgtcctcagaggtcattttctttttttattaatttaaaaaagcgttatttgtttactcctctgagctatagttgctcattttctgtaactgcattttagcccttatcaccttgtattatgcttacaggcatacttcattttattgtacttcactttattgagatttgcaaatattaaagttttaacaaatcgaaggcttgtggcagccctcagcctagccagtctgttaacaccaattttccaacaatgtgtgctcactttgtgtcttggtgtcacattttgataattatcaaaatatttcacacttttttattattattgtatctgttatggtggtctgtggtaagcaaactttgatgttattattgtaattatttgggtgcaccatgaactggacccatataagatggcaaactttatcgataaacstgtgttttctgactgctccactgactagctattccctttctctccctttcctcaggcctgcctactccccgagaaataataacaccgaaattaagccaattagtaaacctacaatg

SEQ ID NO: 222416 - DNA, 576 bp, Homo sapiens
aacttgtttcactcaatgctgtgtttgtaagattcttccatattgttgtatgaaacagtggtttattctttcttatttctgtatagtaagctcattgtatgaatgtatgacaatttatttatccattttcttgttgatggacatttgggttgtttccagttggagttatttgaaatagagttgctgtgaacatttatgtcttctggtgagcatgttttcataggagtcaggattgatgggtcattgaccaaggacacgtgcagtcttttgtagayactgccaagaattttccgaagtgattgtaccaatttgtgttcctataagcaatgtgcctaagttcccattgcttcacattgtccctccttgatattgtcagtctttttgatttgagtcatgctcattgctgtgttatattaaattgtgactttaatttacactttttttcctgactaggagagttgagcacctaagtgtttatttggcattttgacactcttgtttgtgaagtgcttgttcatgtctttcattcattttcttttcttacaagactatttccctttttctttttgacttcag

SEQ ID NO: 222417 - DNA, 565 bp, Homo sapiens
ggatcttttctcttcagggccatgtttccagatagaaaaaccctgaaatgcatctctgaaaatgtgaagtttgatgagggaagacaagcgattgtcttggtaggggtcatggtggcaggttggcaagataggggtgggagcaatatacagtccyagagtgtatattgctgggaggagtggaaagggtattgatctagctgattgataagcctagattctagtcctgggcatgccactaacccactactgaatgttggggaattctcattccctctttaggccacagagtcctgcctttctgctctttaatattccttccagtttcgatcgtctgtgaattaggaaagagagaaaatgaggcagttcccaaaaatgggtctcctccttggccctagtaccccctacccaagataatccagggagctctgccctgacatgagtttcctgaaggagattctctgtggctatgtgaaggcttcagcctgaggtatcagcctctggacagagaatggtatgtctgcaagtgcctgcaggtagaacccacccactagggcaggttcctaca

SEQ ID NO: 222418 - DNA, 393 bp, Homo sapiens
agacgccgcctaaggacataaacaaagtgaaaatcatccctcatcttaccacctgagataaccagtgttgacactgtggtgtgtgtccggcatagatgtttctctatgcatatttttgcattcatatagaatacagatgaaatcctgttagctatgtggttttgcagcccacgtttcccacttaataacagcccacrgacatctttccacattaataactgcagatcttgatcatcgtcttttcacagctgcacagtcttgggtgcattacatctcccgtgcaatcaggctgtttcctcagcagcattgctaaggcatcttctccccacctggctttccacgttcagccacatgggccttcctctgcacactggaacacttctttccacttca

SEQ ID NO: 222419 - DNA, 393 bp, Homo sapiens
agacgccgcctaaggacataaacaaagtgaaaatcatccctcatcttaccacctgagataaccagtgttgacactgtggtgtgtgtccggcatagatgtttctctatgcatatttttgcattcatatagaatacagatgaaatcctgttagctatgtggttttgcagcccacgtttcccacttaataacagcccacagacatctttccacattaataactgcagatcttgatcatcgtcttttcacagctgcacagtcttgggtgcattacatctcccgtgcratcaggctgtttcctcagcagcattgctaaggcatcttctccccacctggctttccacgttcagccacatgggccttcctctgcacactggaacacttctttccacttca

SEQ ID NO: 222420 - DNA, 468 bp, Homo sapiens
tctaattgtcaatagtgattatttctggcaggtgagtgggtacaattattactgacttggggagggtcttttggcgtttttctgaagttttcaagttttaaaaattaagtccaggctcagcgtggtgactcacacctgtagtcccagcagtttgggaggtggaggtgggtrgattgcttgagcccaagagctcacgaccagcctgcgcaacatggtgaaaccccacgtctacaaaagaaaaaaaaatacacacacacacacaaatatatatacacaccatgctgggcatggtggcgcaagcctgtagtcccagctactcgggaggctgaggcaggagaattgcttgagcttggaaagttgaggctgcagtgagccaggatcgcatcacagcactccagcccgggtgactgagcaaggccctatctcaaaaaaagaaaaacaattaagtccatatatgttaggtaatta

SEQ ID NO: 222421 - DNA, 510 bp, Homo sapiens
gtgaataagcaaggcagatcaaatcttggttatcctggagcaaacttgtaatgggggaggcagaccataaaaagacatacagaaatttccttttagcagtgacaaatgggctgcaggacactaaagccaggcaaaaggatagaggagtgggcaggtaggggtactacttcagagagggtggcagggatgcagaggcatgagaatgtcacagcactgtaaatgctgggtgacctgtggccacggatgggtctctatcccccaaggacagaggtcatgtcctattcatctctgatgtccaagtatcagccacaggcctgtgtgtggtaagcactgctcagagaatgtatggatgcatgtctctactcgacgatggaacaggctgaaatacaccactctcccttgatatgtaggtctcagaccgccccccraccttagtaaggtgaagtctctgggtggttcttaaaaggccctcaaatgtcaagtacaaaatgtgacatctgccacactttc

SEQ ID NO: 222422 - DNA, 377 bp, Homo sapiens
gagttattttccctctttgttatgtcaatcttaaaaagtcttttgctaataaatatttcatagtcattggaagtgtctctcctttccctttatctgctggaatgtacctttaaaagcaatggagatgaatttgagrtgcctttgccatgggacatacagaaaaataaagctaatgtttattgagtgtcaaactgttttagacgcttgtattttaactcattgtgtcctcccactactctgtaagggagataccatcatcatcaccaccatcatcatcatgctcctggtgaaacagacaggacattgagacatagggaagtaaccatacccaaatttacagaagtagtgaatggaagagttgggatttgaacccaaac

SEQ ID NO: 222423 - DNA, 652 bp, Homo sapiens
atcaagtgcctactgtgtgccaggcactgtgtgtgggctgaaaaactgaactctagtcattgttcttatggctctcatctaattggtagtaacatataaagaataatactggctgtgtgctgtaataaagtgtattagtaacctgttgctatgtaacaaattgttactcacttgattgcctaaacaatatgcatttattacatcctggtttccatgagttaggagtcagggcaatcgttagctgtttcctctgctcaggatcttgcagggctgcaatcaaggtgttggcagggctctgttctcatttgaaatcttcacatggggaggatccacttccaygcatgcaatcaatggcagagtccatctctgtgacagtatgactgagggcccacctttttcctggcggttggctggaagcctctctctatttcaagaagttactcacgtttcaccatgtggtccacccacgttagttgacacctcgaaaaccacaagggggtctctctatctgctaagataatgccttgtacaacatattgtaatcatacgaacaacatcccattgttctcattgaccttctatgaaggtcacagtaaatgatgtttcaacatcctaaaagtatagtctttttttcaaagccaggtggaacctt

SEQ ID NO: 222424 - DNA, 652 bp, Homo sapiens
atcaagtgcctactgtgtgccaggcactgtgtgtgggctgaaaaactgaactctagtcattgttcttatggctctcatctaattggtagtaacatataaagaataatactggctgtgtgctgtaataaagtgtattagtaacctgttgctatgtaacaaattgttactcacttgattgcctaaacaatatgcatttattacatcctggtttccatgagttaggagtcagggcaatcgttagctgtttcctctgctcaggatcttgcagggctgcaatcaaggtgttggcagggctctgttctcatttgaaatcttcacatggggaggatccacttccacgcatgcaatcaatggcaragtccatctctgtgacagtatgactgagggcccacctttttcctggcggttggctggaagcctctctctatttcaagaagttactcacgtttcaccatgtggtccacccacgttagttgacacctcgaaaaccacaagggggtctctctatctgctaagataatgccttgtacaacatattgtaatcatacgaacaacatcccattgttctcattgaccttctatgaaggtcacagtaaatgatgtttcaacatcctaaaagtatagtctttttttcaaagccaggtggaacctt

SEQ ID NO: 222425 - DNA, 652 bp, Homo sapiens
atcaagtgcctactgtgtgccaggcactgtgtgtgggctgaaaaactgaactctagtcattgttcttatggctctcatctaattggtagtaacatataaagaataatactggctgtgtgctgtaataaagtgtattagtaacctgttgctatgtaacaaattgttactcacttgattgcctaaacaatatgcatttattacatcctggtttccatgagttaggagtcagggcaatcgttagctgtttcctctgctcaggatcttgcagggctgcaatcaaggtgttggcagggctctgttctcatttgaaatcttcacatggggaggatccacttccacgcatgcaatcaatggcagagtccatctctgtgacagtatgactgagggcccacctttttcctggcggttggctggaagcctctctctatttcaagaagttactcacgtttcaccatgtggtccacccacgttagttgacacctcgaaaaccacaagggggtctctctatctgctaagataatgccttrtacaacatattgtaatcatacgaacaacatcccattgttctcattgaccttctatgaaggtcacagtaaatgatgtttcaacatcctaaaagtatagtctttttttcaaagccaggtggaacctt

SEQ ID NO: 222426 - DNA, 393 bp, Homo sapiens
gaattcaattcccttaggtctggggcaggcgcaggagccccaggaggagaggggaccctcgtaacagcggaaacactcagtggaccttgctgggttaacggagccctcttactctccaagagacctgaggaaaataatttcattgttctaagccttccttcccaaaatgggaacaagaccactaacagctagtgtgttgtgcaaagtacaccagtggccatctggtgtgtgtttctgagcacagacccaggagtctctgactaattctacactctgtcacttacttgctgtatgaccttgggtaattgacttcacttctctgtgcctgttacctcctctggraaatagagatcatatcagtacctggttgacaaatgagttaatacattcccc

SEQ ID NO: 222427 - DNA, 570 bp, Homo sapiens
tctctctctctttctctctgtctctctctctcccccagccttcagaactgtgagctaataaatttatatgcattttaaactgcccaatctcaggcactctcttatagctgctaaaatgacaaagatgagtactatcagcaaaacctaggagcctgtgagaaacgcaaactctcaggctccatcccaaatctactgaggcagagtgtacttttccaaaaatggccacagcaatatttcgagtttcatgtgccccctagggccctgtcatgccatcayagagtaggtcaaattgtgttcccccaaaaatatgtccaagttctagcccccagtacctgtgaatgtgacctaatttggaaatggggtctttgcaggtgtcattaagttaaggatctcaaaaagagatcatcttggatttagggaggattctaaattcagtgacttctgcccgtataagagaacggacagggagatttgagccacaaagaaacatgcagggaagaacacacgaagacaggggcagagactagagtgacactgccacgagccgaagaccaccaggaaccagcaaaa

SEQ ID NO: 222428 - DNA, 502 bp, Homo sapiens
tttggtctgacctactgtacacagtggcttgggatccttcttgtttgttctgttccttttatgattcaaccatcgagttcttagatagttgcttcccttcttcaaaacctgacatctctaatttataagattttgactaagttgttgccattttagagtattgagatgggccttctcaaaagtagaagcacaaaaatgtagcaaatgtgtatttttgcgggcttcatattatcattttttcctattgtgattcaaaatctataatgttgtcccttctgctgtcagagaaaaaaatgygggaaggagaaactacaaaatgtctcctgagcatgcttgtgttttcattttccttgagcagcggggcttggagagagctgtttgatggcggcagagggggtggccctgtccctccctgggtgccccagggcccagtgagtctttcctgttgttggagcactgcaggcactttggtgggcaccaggtgctggcaacccatggacag

SEQ ID NO: 222429 - DNA, 554 bp, Homo sapiens
ttggaggtggggcctggtgggaggtgtttgggtcatggggacagattcatcataacttgatgctgtcctgctgatagagtgggttcttaggagatctgttgtttgaaagtgtgtggcacctcccctcacttgctctcttgctcccaccctctccatgtgagaagcctgctcctgctatgccttctgccatgtctggaagcctcctgaggcctcctcaaaagctgagcagatgccagcaccacgttccctgtaaagcctgcagaactcagccaattaaacctcttttctttatgaattacccagcctcccatatttttttataggaacagaaaaacagcctagcacaacacrtttctctgccccctgtatttctgtaaatatagagcttcagtcagtttcagaaaggatttatttggcagaaatacttgaaatacagagcaaacatctgccttggtgaattgccactatttcttctataactacatttatgttctatttgaatttcactgtcatcacttttttttctgttgcagttttagccctgttgattaatt

SEQ ID NO: 222430 - DNA, 534 bp, Homo sapiens
gggtttttttttttgttgttgttgaggttttttgagctgatttttgataaggctgttgcagyactaagcgatataagatgctgtggatggtagactgtcacctaccttgactaacagctcattgttgagtgacttttgtgataaaaggtgtacctattgtcagattgcaaatgatgtggaaagtaaaaataggacacagattagtgtcaaggaccacggtactgtggctggagtcagctgattgaactggaatagcagtaccagaccctggaaaagtgtcatcagcagtgagaccccactgatagcctgaagaaggttgtctgatgcaaccaatctgccagtagcatgtgatgtggttcctctcaccatgagacaaatgagtccttttccaggactcataagtctaggatgaggtggcagcctctgcatcaggaacatagagtcttttactttgtatccactctatgatgatagatatgttgctgtgtctggtatgatgatggatccagcagcagtggtagcagtcttaaccgt

SEQ ID NO: 222431 - DNA, 584 bp, Homo sapiens
ccattgcagttgctctcctgcacacaaacagtgagcaattggaatttgaaattaaaaacacaatgccatttatgtaaacattcccaccaccagtgaaataattaggtataaatctaacaaaatatataaaagatctatgaggaaaactacaaaattttgattaaagaaatcaaagaaggactaaataaatagagagatattccatgtccatggatagggaggcctagcattaacaaaatgtcagttcttcccaactttctctctagattcaatgcaatccccatcaaaatcccagaaatatatcacttggatattgacaaattgattccaaagtttctatggagaggctaaaacaaaaacaaaaaccaaaaaaaaacaaaaacaaaaacaaaaacaaaaaaaaacaagaacagayaacgcagtattagaaaagaagaaaatcaggggggtaacactacccaatttcaagatttgcaagaaagctacagcaatgaagacagtgtggtagtggcaaaagaatagatgaatagaccaatggaacagaatagaaaatcccaaaatagacctatacaaatatttgacaa

SEQ ID NO: 222432 - DNA, 621 bp, Homo sapiens
tcacagcctgcgccttctctgtctgcacactggtagacatcagagccacaggctggctctgcagaacccttctgccagccctgactggggctgactttggtgcacttgtgacagttcagtgtggtccccatgsggcacccctgctcttctcaggcagcttggaccttcgcttgcccccaagtctgcagagctcaacaactattgcctcttccttgcaaaggcatgtctggcacaggcagccctgggccatggggcggcactgtgctagcaacctgcaccctacaccctgcctcacccccatatcctgagctgattagtctgctaagaaaaacctgccaacatctctggtttattttagaagggcctgggggcaaaacagcttgagagctgtgactgggggaggagagagacacaaacggattcatcctccttctgccactgcccaacaattgaagaccaccaactgaagagaaacaactgagggtaccaactgagtgcactaaccgaaggcaaccaatgtgggcatccactgaaggccaccaagtgaaggccagttgccctgccaaccagaccacatcctggttcagaggaaacaatcaggtccagaatcccctgcatgca

SEQ ID NO: 222433 - DNA, 621 bp, Homo sapiens
tcacagcctgcgccttctctgtctgcacactggtagacatcagagccacaggctggctctgcagaacccttctgccagccctgactggggctgactttggtgcacttgtgacagttcagtgtggtccccatggggcacccctgctcttctcaggcagcttggaccttcgcttgcccccaagtctgcagagctcaacaactattgcctcttccttgcaaaggcatgtctggcacaggcagccctgggccatggggcggcactgtgctagcaacctgcaccctacaccctgcctcacccccatatcctgagctgattagtctgctaagaaaaacctgccaacatctctggtttattttagragggcctgggggcaaaacagcttgagagctgtgactgggggaggagagagacacaaacggattcatcctccttctgccactgcccaacaattgaagaccaccaactgaagagaaacaactgagggtaccaactgagtgcactaaccgaaggcaaccaatgtgggcatccactgaaggccaccaagtgaaggccagttgccctgccaaccagaccacatcctggttcagaggaaacaatcaggtccagaatcccctgcatgca

SEQ ID NO: 222434 - DNA, 629 bp, Homo sapiens
gcaaattactgtacactaatgtgcctcatgcagtatctgacattcaaacatccccttggccccgtygtgactgattttttttggaaactagaaataatacagatttcagcaggtgttttcagaagaaaacattgccatgagctgagattactgtatgatgtcaagtcttatttcatatatcaatacatattcacattcataatccaaaacgcacatattcaatcaaattaacaagactaacagtggaaattttctaaaatttatacactaagtgcatcacatttttctaatgaacacttttatagagcaacttagactctatggtttccacaaatgaagaggctcatggaagagaaaaccaccacgtaatacaagattttcaatgtgatcatcattgctacttttaagtagcaattacccagtaaatatattgtgaactgctttgtgagtatggtgatttatttcaacttgttggtcctttgattatcttaaaaataggaataatgccaattgtataaacttgttctaaaaataaaaggagagaaaaataatcctccaccttcatatattgtacaattacaaaattaaaggcattgtgtccagatttttacacacttaccttattgaag

SEQ ID NO: 222435 - DNA, 629 bp, Homo sapiens
gcaaattactgtacactaatgtgcctcatgcagtatctgacattcaaacatccccttggccccgtcgtgactgattttttttggaaactagaaataatacagatttcagcaggtgttttcagaagaaaacattgccatgagctgagattactgtatgatgtcaagtcttatttcatatatcaatacatattcacattcataatccaaaacgcacatattcaatcaaattaacaagactaacagtggaaattttctaaaatttatacactaagtgcatcacatttttctaatgaacacttttatagagcaacttagactctatggtttccacaaatgaagaggctcrtggaagagaaaaccaccacgtaatacaagattttcaatgtgatcatcattgctacttttaagtagcaattacccagtaaatatattgtgaactgctttgtgagtatggtgatttatttcaacttgttggtcctttgattatcttaaaaataggaataatgccaattgtataaacttgttctaaaaataaaaggagagaaaaataatcctccaccttcatatattgtacaattacaaaattaaaggcattgtgtccagatttttacacacttaccttattgaag

SEQ ID NO: 222436 - DNA, 573 bp, Homo sapiens
atgtttgtgactttgtctcactttaacaagacagtaattgccaaagattgcttagaaaaagtcagtaggactagatagcaaaatttagtctatcggtagtcaccaagtagtaacactaaattgatagagaaaaacaatttattggttaccaaggattaatcaaaaggttgtttcaattaatccaacatgcaaattctgttggtaagcataaaaatttgaaagaagttcagtgttcaaagaagtaacaaagcaattatgtgcattaatattcattgtatagctaaagataacattcaattcactatgaaagcaatcctatttcattctaatactctatagaaggctcctaaataaaaggttagaggttttgacttaaaaaacaaaaaactctcacaaacctaaaaaagtgtttagaaacaactcttagtaactagccatgctggttagtatgtaatgaaaaagaaaagctatgctgtraagatactaatcattactacatttagacagaagggaaaatgtgcacatcaaaacactaaaaacattcacgtactactactactactactacaacac

SEQ ID NO: 222437 - DNA, 577 bp, Homo sapiens
ttgccaacctatagaattaagaggagccttctctaaatgcacgatttactcattgttgtaaatttatacttttcaaatttagataattttattccaaaatgttgtcaaagccacccttgtatttgtttaagcagtgaacagctgagctccgtcaaagagactgcaagactgttttcttttgctttagtttgattttaccaagcagggttcgttacacacattgggcattaaataaagatatatatttgttgaacatgtggattgcaggttctcactgaaaaggaggaaggttatctattccagattaaataaatttgagaggttaaggatatgaaagcttgtcataactaaattgttgcccagtgtttatctgaaaaaataatggctttacaatttgcattgtaacaatagaagtatgggcatctatacacactgcatagggctgcgctgtmccttctgccaatcattggtcttatgtggctatttaagcttaagttcaaattagttcaaagtaaataacattgaaaattcggttcctcagtcacaccagccacactcccaggactcagtagccaga

SEQ ID NO: 222438 - DNA, 548 bp, Homo sapiens
atattttgaaatctacaaaagcacctttctcttcccaagcagcttttctgaaacgtattctgcagcctttctctgttggcctctggcacacagatatgagaaatctgattcctgcacttttcctttctgtttgtgaaggaagaataaactgcattttgccaggtgaacaggagcataaattcagccgagatggtgtctcattaatcagttcgcagggctggagaaatgataccagactgggatccccatactaactgcatcaacttagaaatgaatcatttacttataggaaaggaaaaatacaaaaatggtggaggggagccagctatttttcatccaattcctctttggtttttacgattgaaaaatggaataatttaacagaacaggtacatacaataggtacagtgcacrcacacttcccgtaatgcaaattggtgtctgacagtggagaaaggaaggaatgccagaaggcacgtctgcatttggagagatgaggagcataaatctgagagggagattaaactcaagcttcatgaagcttgctc

SEQ ID NO: 222439 - DNA, 548 bp, Homo sapiens
atattttgaaatctacaaaagcacctttctcttcccaagcagcttttctgaaacgtattctgcagcctttctctgttggcctctggcacacagatatgagaaatctgattcctgcacttttcctttctgtttgtgaaggaagaataaactgcattttgccaggtgaacaggagcataaattcagccgagatggtgtctcattaatcagttcgcagggctggagaaatgataccagactgggatccccatactaactgcatcaacttagaaatgaatcatttacttataggaaaggaaaaatacaaaaatggtggaggggagccagctatttttcatccaattcctctttggtttttacgattgaaaaatggaataatttaacagaacaggtacatacaataggtacagtgcacgcacacttcccgtaatgcaaattggtgtctgacagtggagaaaggaaggaatgccagaaggcacgtctgcatttggagagwtgaggagcataaatctgagagggagattaaactcaagcttcatgaagcttgctc

SEQ ID NO: 222440 - DNA, 614 bp, Homo sapiens
aacacaagagccaagtcaggtaaacagtgtggccagcccccaagatggagagaggcctacggaagttttagagacaatccagccattgatttatttttctgtgcatatgatactgcagagattctagaattctcctctcctcctctgccattctaacaccaacatttctgcccctccaccccaccatcttccttgcacagaattcccagagctgcagacctgaattcacctgtgcatggtcttgactgctgtccttgctgtttgcagagagtgtcatctgccagctaccacagcaccccaagaaagtgaaggcagaaagaccaatgccagggggacaggagtggtgagggggggagtgggagcatccagaactcatctcctaaaaacaactkccctcttgtgaactgcaggtcttagttggcagggagaagccctcagcccagctgtggacaccagaaaggatcttcgggatgattggaaggcagcctccagacatgagcctacctgcaccccctaaagagacaggaagggagggcagatgtgagaggcgtggctcagagacagttttctggatgacatcttggtctagtattttgggggtgacttgctgctta

SEQ ID NO: 222441 - DNA, 628 bp, Homo sapiens
atctgtgtttgtgataggggcacgtttcccatggtttttctctattattctttgttggcatttagcatatggaagtaaaaagtgaaaatctaagatgggggttattaactgtgattctaaagtaaatagaaaatgtgccttaatgctagttaaagcactttagaaaaaaataagaataatttttagaaataagaaaagtaaacctttgaagacactttcattacrcatttagagaaatactaccgagagtccttcaatttcaaactcgggaacagtgccagatttaatctatgtttgccttgagtgtcttttagttttagatttgattttgggaatgttttaatgttttcacttttgttgaagatgtgatgaccattatctttccaattcatttttatcttgatatattcatattgttaattactgttgtatttcaattttctccctagtatttttgttccttcgtaatggcttcatggttcactggaccgaaatgactaaaatgaaagatttccaagatttcttctgggagtaatttacaaaagaccacccttttttaattgctcctcgtgtttagtactggatgtctgcttcagagagaaatcaatctccgtcttttaggtgccat

SEQ ID NO: 222442 - DNA, 398 bp, Homo sapiens
tggagaggggagaggaaagaagaaaccaggttaaraaacacagcaggtatgagggctgggaagaggccatggaggctgagagaaagcaaagaggaaggtgaggctggaaggctggtggtcagaagctccaccttatagcagtgtggcagagatactgcaagaggccagcatggatgctggtcaccagccaggaggacactctaggggtccatggggggcatgtagcaggaaagatgaaggtggactttctggagaagcagaaggccctctgccagccccactgtgggtggcacttggctgcatgagccacattatagaggcttcaccaaaccaggtggggacatgtttttctcatcaagctggaaggttggaagctgctgtgcaggatgggaacagtg

SEQ ID NO: 222443 - DNA, 490 bp, Homo sapiens
tggaggctagagtgtcacccaagcttctgagttagggactaggtagaaaatggtgccaagaaccaaacgtgcagaagaggagacgtagctatggagtgggaagcacaggtccagcttggaatgcgagcaggagcaagtgaggtatgcacagtgccctcagctggagatgtctgtctgaccaccaaaggccagaatccggagcttgggaagtagagacttttaaggctccagcaaggaatcgttgaagccaagggaaaagactagctcgccaatgggaagacggaaggagcataacctgccctaaattttgggggtggaagaaatgtctgttgatggtcaagtgatagccmggcactatagaaattcaaggaaccatgtcatgaaaccaaaggacatttaaaatattgtcagccaattatgtcagtctacaattgcattcaagctacaggtataaaaggctgagattataaaaataatgaaaatttcctat

SEQ ID NO: 222444 - DNA, 603 bp, Homo sapiens
tgtgaaggcagacccgacttcaggacctcattcagagygagagcctgggaacgctggtgtgaggcagcaccgtgccctcgccgtgcacccagggggttttgtgagacgaggtgagccctggagacacaggccttagagggtgacggtggtaaccaaacacccagagccgcctgcagcagccatggagaggagagctgtcacatatggacatctcaagcccttctcgggccttttattttgtgcctgcatcacctctcgaggtagtaagctccacaagcacactcccgacgttgtcaggaagcaccgccttgcacacacatcaaagctgccctcttatgtttcaaatgaaaagacataattcaagggatgcctttgtagccacatattctaggatttggacaactcattctagttctacctatacctttcattaaaaaatgttcacaggcaggattctttaccaaaaaaatgcacacacacaactagcctcttgagaaataaaaacttcatgttcactgccctcttagaacagcctcagtcataattgtggccatacggatagcctcaacaatcctatttaagtggctattttaactttaaaaa

SEQ ID NO: 222445 - DNA, 455 bp, Homo sapiens
attttgtttgtcctgaccgccatccacaatgtatctcagaaactaacacctggggtggtttgacccaggccagttcctgtctaggcacattgcagggctcagaagctgccatgatactttttggatgaaagaatcatataaactgggaatactacatatttctccttgatattcaaatggcctcccaactttgggagggaagagcatacagaagaaacattaatgagagaataaaaggtttgtgcctgaatttaagtgttcagtggtctctggggaggtgggaacattctctctctgcttggcaaggccatattccctgaagagtggcattcccatggttcccactactgttcaggtacgtttctatgcccaataaagcrtagttgttgaaagtcgtgtgtgtcggccgggcgcagtggttcatgcctgtaatcttagcactctgggaggctgag

SEQ ID NO: 222446 - DNA, 589 bp, Homo sapiens
gggtgctcttttttttttatttagatggttttagagttttgttttgtttttgagacagggtgtcactctgtcacccaggctagagtgcagtggctcagtctttgcttagggcatcctccacctcccaaattcaagcaattatcccacctcagcctcccgagtagctgggattacaggcacacgccaccatgcccggctaatttttgtattttttggtagagacagcatttcaccttgttggccaggctggtctcaaactcctgacctcaagtgatccrcccacctcagcctcccaaagtgctgggattacaggcatgagccattgtacccggctggttttagagtttttaaatatgaattttggttaagtaccaaatagtgattaagtctgtattttgtgacaagtattatacaaaatgttgtggctttttttttttttttttttttagttctttgctgggtgcagtggctcacacctgtagtcccaactcgggaagctgaggcaggaggattgtttgagcccaggtggttcaggccagcctgggtgatgtaatgagaccccatctccaaaaaaatttttttaattaaa

SEQ ID NO: 222447 - DNA, 522 bp, Homo sapiens
ctctgtgcctttggggaaaccatttgccttctctgggcctcggttttctcaaccataaaaatctttcattcatgcaaaaaatatttattgaatattttccatgtgtctgaaactacatcaaaacctggggatacagcaggaaacaaaacaacatccctgctttcatggaactgcgcacctaaaaggaagaagctgaggcaaaattaatacacatggaaagtttatytgagccaagcttgaggattgcaacccgggagcatagatgcaagttgccctgaatatacactccaattagcagcagttacaagtggatttttaatggcaaaaaaagctgacagggagtggactgctacaaagttttttgtcaggaattcttaatggtttacagaaataacattggttagtgattggctgtaaattgttaaactatacgacgtgggttatagtgttgtgtatggcattattaggttaatttatagctacttgtggcaaaagtaagcagtctcaagagatgaatacata

SEQ ID NO: 222448 - DNA, 391 bp, Homo sapiens
cccactgggattttggtagactgaagagaaaaaacaaactagtattcaagtttaggccaatgggctggttacgcatgtctaattcaggygtgtggggtccatcaataacactgaagcactctcagggcagggaaacacctgcatgtctttttatctgtaacaaattgggggtctgaaatttaaaggactagaattacatttttaaaagggaattggatcagtgatttctaatttctctctaaacactaacatgtaggattccatgattctggtctctttcagggatgtcaaagtggtggcaactaagccacttgaattttcagaaaagttcaattccaaatgtcctgcaccaattttccattcagaactcagtttctgtatctacagtgtt

SEQ ID NO: 222449 - DNA, 421 bp, Homo sapiens
ccactgggattttggtagactgaagagaaaaaacaaactagtattcaagtttaggccaatgggctggttacgcatgtctaattcaggcgtgtggggtccatcaataacactgaagcactctcagggcagggaaacacctgcatgtctttttatctgtaacaaattgggggtctgaaatttaaaggactagaattacatttttaaaagggaattggatcagtgatttctaatttctctctaaacactaacatgtaggattccatgattctggtctctttcagggatgtcaaagtggtggcaactaagccacttgaattttcagaaaagtwcaattccaaatgtcctgcaccaattttccattcagaactcagtttctgtatctacagtgttgatggcaaatcagtggcaagagcaaggatct

SEQ ID NO: 222450 - DNA, 596 bp, Homo sapiens
aatcaatctctcctccctcatccaagcagcttggccaccgcctcccttctgtccgtctctaaggctgggggtatggtagggacagccgtaggggaatctttccagggaccagatgggattttacaagtgaccatggtctggcctggtttccttgcatctgagcagaccacagaggccagctgcagcggctggctggaggggctggctggtgcttacagtgacagggcaagaaggcttactrttctgggcctgtggattagtcacctcaagaggcaggaacagagccctgaaaaatgcaagcgggatcagcccagcacagtcctgccaggaagggacagaagtactctaagccagaagttaggagacgtgggcttgtctggtcctggctctgccaccaacctgctgtgtgacttggagagctcatttcacttatttgggtctcaggctccttagcctgtaaaagggaggagaagattcacttggcccccaagggccttcccatctctaatgtcctcagactgcaaccctgcctcctgctgacctggggccctcgtcaaaccttgaggacacttaaggactcagcaccgactgctggg

SEQ ID NO: 222451 - DNA, 523 bp, Homo sapiens
gatttttagtctcaatttcatttatttctgctccgattattactatttctttccttctactaattttgactttggtttgttcttgcttttgtagttctctaaggtgcatcattagattgtttatttgaagtctgacctagcaattccactcctgagtacatacataaatgcatgtctacgtgtgtcaggagatatgcacaagaatgttcacaactaccttgtttgtaatgaccccaaccaaaaatgttttcatatattaacccaagagtagttgtactttttagaattaaaccccaaaattttctttagttttgtgattttctcattgttttaatggttgctttgccatcttatcctctatgtctctttagcttcactgtataatttccttatgtttatctctgctatgggttgaatatggcttgtccccaccaaaactcatgttgasacttggtccccaatgtggcagtgtttttaggtagcacctttaagacataattttagaattataaaatcattaaga

SEQ ID NO: 222452 - DNA, 453 bp, Homo sapiens
gaattcaaaaattttcctactctgtgtgagttcaggggattttgattttacagctcatgaaaccttagtcattctttgccatgccttgtgaaattttgtagtatgtgtggacagctttgtatttgtcaacagactcaagggaagtcctatgcagtctttgtgtacctaagtgccccttttctagtacattgttttacaaatkacagccaccacagcctccccaaactccctctctatctccttaactcagcatgcatgtcatgctctctttgagactctttgtcctccaacatagtagtctggaaagtgcatctgtgcattgaactacagctgtcacatggctgattttgtttgtttctattcgctaatggatcatgggttaatatctgaaaccagttgtttcatattttttgccatttcctaagttgttaatagtggggaagttaagtccag

SEQ ID NO: 222453 - DNA, 453 bp, Homo sapiens
gaattcaaaaattttcctactctgtgtgagttcaggggattttgattttacagctcatgaaaccttagtcattctttgccatgccttgtgaaattttgtagtatgtgtggacagctttgtatttgtcaacagactcaagggaagtcctatgcagtctttgtgtacctaagtgccccttttctagtacattgttttacaaatgacagccaccacagcctccccaaactccctctctatctccttaactcagcatgcatgtcatgctctctttgagactctttgtcctccaacatagtagtctggaaagtgcatctgtgcattgaactacagctgtcacatggctgattttgtttgtttctattcgctaatggatcatgggttaatatctgaaamcagttgtttcatattttttgccatttcctaagttgttaatagtggggaagttaagtccag

SEQ ID NO: 222454 - DNA, 469 bp, Homo sapiens
atacatatgtgtatgtgaatctatacacgtacacctttctattttttaaccctccaagacaatgtttatttttttaattttgtgcaaatttctaaatatcctaccatttaaggcaaagagtttgcattaagaaaggtcagaaaataggcttacgtttattcaaaagcatctcaccttgcacaytactgttgttgttttttaaacacatacaacttttaagtgtggacactggatccccaatatctaaaaaattatttctaataacaaacacaagtttttgaggaaaaaatgatttgaaatatagacaatggatccccaattcctaaaaaattatttccattaacaaacacaagtctcggtggtggggtggtggggagaaccagaaagagcagctttgaaatgcagggaagcaaagtaaaatggaaaagaaaaagtaactgaagtttactaatactgaaactttcaacag

SEQ ID NO: 222455 - DNA, 282 bp, Homo sapiens
cccctttccctttcctcaacctctctccccttcattcctggcttcccttttccttaatggtctttccctttctattctctcacagttcctatcagggcgtcctgtgactcgccttgccacatctgtgtctctggaacccaggacctctggacctcaggttccyaagacttcagtcctggtctgctcaggaattgaagatgtaaggaattgaagataggagagataccttgaaaaagtagagaacagtcatgaggcagctttcatcacacccttttaacattt

SEQ ID NO: 222456 - DNA, 549 bp, Homo sapiens
cacagctcagtcaccagtgattactgcccaccagggttctgtgagatacagtccyacctatgtctccagcctcataatgctttatttttgtgttcaatttctgtgttccagaactgctgaccatctttctatcccattgactgctcccttcacaggccttggccggtgctgtctctctatccggggggcctggcccttcttttgcccctcacctgtttctcattcactcacccttcagttctcagcccaagcattacttcctcaggtaaactttctctgtctaggtcagattcctttcatatatactctcataaagccagattcctttttcagagcacttttctccatttataattaaaaaatcatgtatgcggttatttcgttaacatctgtctctctcactgtgctgtatgggctctaggagagagaagatgggcacctttctgctattcttgtatcccagcatccaggacagggtctggtacacagtgagagctcagtaaatatctgctgggtgaatagaggcatctgcatgataggaaagaaaga

SEQ ID NO: 222457 - DNA, 512 bp, Homo sapiens
tcaccagtgattactgcccaccagggttctgtgagatacagtcccacctatgtctccagcctcataatgctttatttttgtgttcaatttctgtgttccagaactgctgaccatctttctatcccattgactgctcccttcacaggccttggccggtgctgtctctctrtccggggggcctggcccttcttttgcccctcacctgtttctcattcactcacccttcagttctcagcccaagcattacttcctcaggtaaactttctctgtctaggtcagattcctttcatatatactctcataaagccagattcctttttcagagcacttttctccatttataattaaaaaatcatgtatgcggttatttcgttaacatctgtctctctcactgtgctgtatgggctctaggagagagaagatgggcacctttctgctattcttgtatcccagcatccaggacagggtctggtacacagtgagagctcagtaaatatctgctgggtgaatag

SEQ ID NO: 222458 - DNA, 525 bp, Homo sapiens
cagctcagtcaccagtgattactgcccaccagggttctgtgagatacagtcccacctatgtctccagcctcataatgctttatttttgtgttcaatttctgtgttccagaactgctgaccatctttctatcccattgactgctcccttcacaggccttggccggtgctgtctctctatccggggggcctggcccttcttttgcccctcacctgtttctcatycactcacccttcagttctcagcccaagcattacttcctcaggtaaactttctctgtctaggtcagattcctttcatatatactctcataaagccagattcctttttcagagcacttttctccatttataattaaaaaatcatgtatgcggttatttcgttaacatctgtctctctcactgtgctgtatgggctctaggagagagaagatgggcacctttctgctattcttgtatcccagcatccaggacagggtctggtacacagtgagagctcagtaaatatctgctgggtgaatagaggca

SEQ ID NO: 222459 - DNA, 534 bp, Homo sapiens
catcccccctccacagctcagtcaccagtgattactgcccaccagggttctgtgagatacagtcccacctatgtctccagcctcataatgctttatttttgtgttcaatttctgtgttccagaactgctgaccatctttctatcccattgactgctcccttcacaggccttggccggtgctgtctctctatccggggggcctggcccttcttttgcccctcacctgtttctcattcactcacccttcagttctcagcccaagcattacttcctcaggtaaactttctcygtctaggtcagattcctttcatatatactctcataaagccagattcctttttcagagcacttttctccatttataattaaaaaatcatgtatgcggttatttcgttaacatctgtctctctcactgtgctgtatgggctctaggagagagaagatgggcacctttctgctattcttgtatcccagcatccaggacagggtctggtacacagtgagagctcagtaaatatctgctgggtgaataga

SEQ ID NO: 222460 - DNA, 525 bp, Homo sapiens
cagctcagtcaccagtgattactgcccaccagggttctgtgagatacagtcccacctatgtctccagcctcataatgctttatttttgtgttcaatttctgtgttccagaactgctgaccatctttctatcccattgactgctcccttcacaggccttggccggtgctgtctctctatccggggggcctggcccttcttttgcccctcacctgtttctcattcactcacccttcagttctcagcccaagcattacttcctcaggtaaactttctctgtctaggtcagattcctttcatatatactctcataaagccagattcctttttcagagcacttttctccatttataattaaaaaatcatgtatgcggttatttcgttaacatctgtctctctcactgtgctgtatgggctctaggagagasaagatgggcacctttctgctattcttgtatcccagcatccaggacagggtctggtacacagtgagagctcagtaaatatctgctgggtgaatagaggca

SEQ ID NO: 222461 - DNA, 430 bp, Homo sapiens
tgcctccatgatctaatcaccccaccaggccttacctctaacactggaaatcacatttcttttctttctttttctttctttctttcttctttcttctttctttctttctttctttcyttctttctttctttctttctttcttctttttttctttctctttctttctttcctctttctttctctttctctttctttctctctttctttcttttcctttcaggcagggtctctttataagtccattttcttgctgctgataaagacatgtgaaactgggcaatttacaaaataaagaagtttaatggacttacagttccacatggctgggaggcctcacaatcatggcagaacgcagggagaagcaagtaatgtcttacatgtatggcagcagggaaggagaagagagcttgtgcaggaaaacttccatttt

SEQ ID NO: 222462 - DNA, 559 bp, Homo sapiens
gttagaagggagcacctcctcctcagtcctgtcatttccccccatgtggaaggaatccatttgcacaatacttctggcttctctctgctctccctcctccctcaatcccccaagaaggagcagctacttagctccctggtgagtctagaaggagagcatgggtaggcatagggaccaggccctttgtctttcttttcatggcctggagcagtccacaggagcttatgtattcctctgccctaagttttaaaaggacatgcctctacagagaggtgcctgtggttttaggtatgtaactccagycgcaatatctagtaaacaaggtttcaaaccttgagagatagaatagagacatattcagggaatcagaaagcacaataaggatgagagttcctaccacaacccaagcagatggctttacactttggtggtgcttgcctgggtttttaccatggctctttaaagcaatttatttggagccatcattttgctgggagctgagttggcttttggctactgaacctggaagaggagctctaagttagactgcagtgttttg

SEQ ID NO: 222463 - DNA, 559 bp, Homo sapiens
gttagaagggagcacctcctcctcagtcctgtcatttccccccatgtggaaggaatccatttgcacaatacttctggcttctctctgctctccctcctccctcaatcccccaagaaggagcagctacttagctccctggtgagtctagaaggagagcatgggtaggcatagggaccaggccctttgtctttcttttcatggcctggagcagtccacaggagcttatgtattcctctgccctaagttttaaaaggacatgcctctacagagaggtgcctgtggttttaggtatgtaactccagccgcaatatctagtaaacaaggtttcaaaccttgagagatagaatagagacatattcagggaatcagaaagcacaataaggatgagagttcctaccacaacccaagcagatggctttacactttggtggtgcttgcctgggtttttaccatggctctttaaagcaatttatttggagccatcaytttgctgggagctgagttggcttttggctactgaacctggaagaggagctctaagttagactgcagtgttttg

SEQ ID NO: 222464 - DNA, 514 bp, Homo sapiens
gacagagccagacaagacatcgagggcaatgactgaagattttagcttgaactattttactttattttccttgggaatttaatctttgaactgtaagttcaaactggatgggcccacccacattagggagggcaatctgytctatttagtctaattattcacatgttaatctcacccagagagaccctcacaaaacactcagaatcatgtttgatcaaatgtctggacactctgttgcccagtcaagttgacacataaacttaaccgtcacaatcatgaaggtggtctctcagctccacaacattttttgggttatttcagttggttcagaactctgagctgttacttttaggtctcatcaaagagaagagaggctcggcttccttcacatttgcggttaaaagaaagctagtccaagattatgcccacttcctctctgttttgtcttttgtcactcctcaaagtccactctcctctttgatgtcttgtggcaggccagatctcactaacacag

SEQ ID NO: 222465 - DNA, 365 bp, Homo sapiens
tgactctcaaatgcattattccaagcaraagaagctattctcaaaagactgcaaactgtgtgattccatgttgatgacactcttacaagacaaaactatggggacagcaaacataccagtggctgccagagatcatggtagaaaaagaggttcacaaccaagggaaataagagaaggagttgtggtcagagataactctgacttcctggttgtcactcctgcccccacatggcgtgtgacttgtttcagctccccaaggcttaaggtgctatcctgggaagcagtgggtttctccttccctggaattaaccaagcagaggctggaggaactcttagcagagaggtgacagaagtcctgaaagctt

SEQ ID NO: 222466 - DNA, 365 bp, Homo sapiens
tgactctcaaatgcattattccaagcaaaagaagctattctcaaaagactgcaaactgtgtgattccatgttgatgacactcttacaagacaaaactatggggacagcaaacataccagtggytgccagagatcatggtagaaaaagaggttcacaaccaagggaaataagagaaggagttgtggtcagagataactctgacttcctggttgtcactcctgcccccacatggcgtgtgacttgtttcagctccccaaggcttaaggtgctatcctgggaagcagtgggtttctccttccctggaattaaccaagcagaggctggaggaactcttagcagagaggtgacagaagtcctgaaagctt

SEQ ID NO: 222467 - DNA, 563 bp, Homo sapiens
acatggcagagcacaaatgaatgaaattccaggcattccatttggaggcagggatggtccgtccggagacacaggtgggtctaaaatcctgcaaagattggaagggcttcatgtggcctaggaatgatgacagatttgtgggtcttaacagtgaccaccatatggagacacattccaagaacagaagttgagtgtgcaaggtctgcagacwgacgcccagctctgtcactttctaactgggtgtgcctggacaacttatgaaaagtagtttcacatctttctaaaatggaaatatgaatatattaatggtacctactgttatagggccaataggtttctatgaccgctgtgcagtaacagaccacttacactaggtcagcagggtttgcagcagagaaagagtttagtgatcacagggcactgagtgagaagatagaagaagatcctcaaatccatctccctgagaagttctgggctggggtttttaaggatatcgtggagggtgagatgccagaaaattggggttgttgattggttggggtaagggggaagaaataatcagc

SEQ ID NO: 222468 - DNA, 540 bp, Homo sapiens
ggatgggttttccacatgcccagtagcctgccagaatttgggagaggctgcatgcacagtgtgtttactggagttgtacacatgctcacttgaggcattctttccttaccagttcraatgttcctagaaggtcacataccagttaaactccaccattttgcctcttaatgcacatgcttaagcccacttgcccaactcctgtgatcttattgggaagctgcttatcaccattttaaagtttttcccatctattgggagactgtctttttttggtgctggctgtgaccaattattattttagagacacaacgtaacacccgcctgaccatcattgatggtcacctgacattcctagttaggcgagtcctctcctgccctgcttctgtctgcctgactacctactgtaacatcatgagtactcatgagcagataggttcttttccgcaggggccaaatttggaaacccttgaggagcttttggaacccatgaccacttggatccctttggaaatgccctatgaactactctatggttcaata

SEQ ID NO: 222469 - DNA, 540 bp, Homo sapiens
ggatgggttttccacatgcccagtagcctgccagaatttgggagaggctgcatgcacagtgtgtttactggagttgtacacatgctcacttgaggcattctttccttaccagttcaaatgttcctagaaggtcacatascagttaaactccaccattttgcctcttaatgcacatgcttaagcccacttgcccaactcctgtgatcttattgggaagctgcttatcaccattttaaagtttttcccatctattgggagactgtctttttttggtgctggctgtgaccaattattattttagagacacaacgtaacacccgcctgaccatcattgatggtcacctgacattcctagttaggcgagtcctctcctgccctgcttctgtctgcctgactacctactgtaacatcatgagtactcatgagcagataggttcttttccgcaggggccaaatttggaaacccttgaggagcttttggaacccatgaccacttggatccctttggaaatgccctatgaactactctatggttcaata

SEQ ID NO: 222470 - DNA, 540 bp, Homo sapiens
ggatgggttttccacatgcccagtagcctgccagaatttgggagaggctgcatgcacagtgtgtttactggagttgtacacatgctcacttgaggcattctttccttaccagttcaaatgttcctagaaggtcacataccagttaaactccaccattttgcctcttaatgcacatgcttaagcccacttgcccaactcctgtgatcttattgggaagctgcttatcaccattttaaagtttttcccrtctattgggagactgtctttttttggtgctggctgtgaccaattattattttagagacacaacgtaacacccgcctgaccatcattgatggtcacctgacattcctagttaggcgagtcctctcctgccctgcttctgtctgcctgactacctactgtaacatcatgagtactcatgagcagataggttcttttccgcaggggccaaatttggaaacccttgaggagcttttggaacccatgaccacttggatccctttggaaatgccctatgaactactctatggttcaata

SEQ ID NO: 222471 - DNA, 402 bp, Homo sapiens
gaactatcctgggcacttggccaccaagttggaaggtctggctagaaaggccatataaaccctgttgttggggtgytatttgttgagtgcttaccacttgaaagacactactgaacactttgcatgcattggccagctcacaagaattccatttttagagtggaggccataagttgcccaggtcatatggtgagtaagtggaaaagttagggttcaaagctgggccaaagggcaaaacccatgctcttaatgaagattcttttactgcctggttaacactatgggggaaaaagggaacaggccacagctccctctcccaggcttagagagcttgggatagatcttaaaaggaggaagcagagattgtgtcaggctgtatttggtagcactgcttggggatag

SEQ ID NO: 222472 - DNA, 426 bp, Homo sapiens
ttattccagacatacctaaaatgaactatcctgggcacttggccaccaagttggaaggtctggctagaaaggccatataaaccctgttgttggggtgctatttgttgagtgcttaccacttgaaagacactactgaacactttgcatgcattggccagctcacaagaattccatttttagagtggaggccataagttgcccaggtcatatggtgagtaagtggaaaagttaggkttcaaagctgggccaaagggcaaaacccatgctcttaatgaagattcttttactgcctggttaacactatgggggaaaaagggaacaggccacagctccctctcccaggcttagagagcttgggatagatcttaaaaggaggaagcagagattgtgtcaggctgtatttggtagcactgcttggggatagcc

SEQ ID NO: 222473 - DNA, 399 bp, Homo sapiens
atttgagagcagcagcgactctggaagcccaccagggaggtggtaacagcctcgaaagaaaaagcgctggagcctagggggatctcaaaatgaggtttcctgtctcagcaataattcctaagccacactaacgaaccagaacactagttggygaacactagcaaaaccaaagggagcacatgagctgggacactggggatctcaccaatgtggatggttgaccaatgacctgagtattcctccccaccccaacccagcctcctgggatcacactaactattgggaaagttctgaacttgaaacaatcacgagggagataggatttatgctgataatggctggagttatcctttccaacaacccagcagaatggggacttgcagtcataactcaagttga

SEQ ID NO: 222474 - DNA, 591 bp, Homo sapiens
ttttaaatttctcattgtttattgctggtatagagaaatataagtaatttatatatattaatgctgtatcctgcaactttgctaaactttttttttcagttctagtagcttttttgtcgattaggaatttctacatatayaatcatgttgtatgtgaataaaacattttatttcttcttttccaatttgtatgcctgttatttctttttattgtaatactgcaatgactagggcatccagtacaatactgaacagaagtgacaataatggacatctttgtcttgttactggctcgagtgggaaagtattcagtcttttggcattaagtacaatgttagttgtaggtttttttaaaataaaagctcgttatcacttctaatctgtttcctaagagtttttaacaggaacaggtgatcaattttatcaaatactttttccgcatctatggagatgatcatacaattgttctttgtgaatatattaattgaattacattgattgattttcaaatgttaaaacaacctagtgttcctggaataaatgctacctggtcataagatattatcacttttatatattgaaggattcagt

SEQ ID NO: 222475 - DNA, 634 bp, Homo sapiens
agacaacgataaagtgacaccgaaacaaaagaacagacaatgtctgctattcacctgggtgggtctcttggcctataaggtctccaatctatcttgttggtatcccaaagtctgattccttgataaacagcagcttctgtactttaaacacttaccactggcaaacatagtgccatctgtttttgtgtgtcatctcatctactccacacaacagccctgagagataggaattatcatctccttttatagaaggggaaattgagactcaaataggtgacatcacctgctcaaggtcactcagccaataagtgatggaggctcagcttgaacttggagctgtcggactacacagtaaagcattcaagccctgtgctagtctcttttctagatgcctttcctattctggaaatttcccttctcaaaatacattgaactaattctctgttgcaaggcagaaaggaatttccyacccacacaaggcaggaggaaggcggcaagatgatgactggaagagtttctggtcaggggctgggagtcccaatgccctggttcccatgcctgctcctgccaccaataacctcatgttctagaactaagaatttggcttctagaaagtcttaatgaataaggttag

SEQ ID NO: 222476 - DNA, 520 bp, Homo sapiens
ggtggtgggtggggtggggggtagaaggcaatacctaatttgcccagaatgtcagtaatgtgtgaaattatgttcattcatccgtttttcatttattcaacaaacatttattgaatacctattatgttgagacacaggacaagtgctatgtgagatttatttttccttgtatggtttctgccctccagaaatttacaaatcctatctgccttgcagatactatcaaccaacctatctacttttyttccctccctccctcccatctcccttctatctatccctcctagaccttgttccagacagggactaggaagcttgaaaggactatttccacaactttgggatcaggccaacttcagtttgatttcatctctgtcactaaggggagagccaggtgaccttagatgttatatcacctctctgggactgttaccatcttctgtataaaacagggatacttatggcggctacttcacaggcctcttgaattacatgattttatatatatatatatatttat

SEQ ID NO: 222477 - DNA, 591 bp, Homo sapiens
cgcccttgaaaatgccaccatcaccatacttcatgtttccttgctttctttcttcagaggaatccaagcaccttgcagagggagcccactccttgtcacagactctcctggaggctgaaacaggggcagtctgcagagaggagaggtgtagagaggcgcgatttagaaataagaaaaccaaatcgtaaagaagcctaatgtcttgttgcaacatctgaaagaaacaagatgaatatattccactaggtgggaagcttagggtagtgggaagaacatggattcaggactttgagaaacatggatttaaattttgatccccaatgcctctctgcacttcactgttatctataaaataraggaaataaaaatactatacattcaagtcttaacaccaacagttaactagttgtgtaaccttggacaagttatgtgacctctctgtctgagcattgtcatttgtatatgagatcatggaggttaaatgtccaacctgttgtcactgtgcacctcaaaataataaataaaacatttcatctctcaatcaaggctaaatccactttctctgctcttcaaaacttgaccctgccagca

SEQ ID NO: 222478 - DNA, 611 bp, Homo sapiens
caaaggcgaacagtaggatcagaggcatagaagaataaaagtggtggtatgttgaagtaagaggtaataaacccatctatcatacgactggagaaagggaacaaagctgaaatagtagattcgagtactgtactgaacactcagagtacaaagagcaaacacactgtatctgttctcaaatagctttttagtaccacagggcagcatactgtgagaggtggmtaagacagaacggtcagaatgccaagagaacaccatgaaggaagagcctttacaccatgttcaaagaagtgaactggattcagttggagatgggaagtcactgagggatctgagttgtattttatatatcagttggaagtaggatggtccaaaggaggaaaaggctcaaagcagagagccaatgaggaggttacagccatgatccagataaaagacaaaggctaaaactaagaaggaaacatagaaaacagagaagacagatttcaacaatattgaaaaaattattttctcatctattatgagctaaacactagggatacaagcagcccgtgtttaagaagcacataatctagtgggagattaaaaaacacagaattataacaaagaat

SEQ ID NO: 222479 - DNA, 412 bp, Homo sapiens
ttcacgtcctaatattattaggacacaaccatttactgtatttttgagaagcatagtgtgcatattataagacaaaatggcataatccaatatcatatgcataaaaaataaaattaaaataatacaaataatataaaatcatataatggcctgaaatcagaatgcatgatgatgatgagctaatttttccaagtatttattttttccaaattctttcacatctattttaaagttaacactcaagacaatcttatgagacattttataacccctttttgactaaagacaaataattcatggaatataatggcttgcccaaaattagtatgtttcagagctgaggaaaagcaaatggaagacttgatttttacaytgacttccaatattttattatacagtcacttatcttttt

SEQ ID NO: 222480 - DNA, 261 bp, Homo sapiens
aagcaatttttatataatagatataattttctttcaaataaattagagaaaaataytatgcatatttgtaaagactcagaagggatcggacatttagaaaagagaatcaaaatgtttataaatgttttcataagacattataattttatatatcctaaaatattaattattagatgctgaagaggacatatttcaaaggacatcaaaatagtcaatgaaaaaccaagagcaaaattcactcagcatcctatgtatactgtc

SEQ ID NO: 222481 - DNA, 549 bp, Homo sapiens
gagtggtgccattattgatcatttatattcattggttaatttygattaacaattgtatcaatggaggttaatctcaaagaaggttaatggcagctaccatctcttataggctatttggaaaaatatacaatgaaaggtaatgaagcagcatggaattatgaccctagttcctgtcattctactgacatagtcatcttattgccaaattgacagtctaattcagtgaaatcaggccatgaaacatcttttgaataatgttagacaatcctgcatatcaaagaagtagagggtggaaagaactcagttataggaaagtagtgaaattggaaaaacaagcaagaaaaggtaatcccattatcaaagagaaaaggcacctagaagttcaatgtaaacctctgcctgcagggtcgggaggggtgaatcaatgacatcaaccactcacaatgctccgttgtcacatgtatctcaaacatatgccaagaaataattcagtccctttgcattattgatattattattcgaaacaacatcaaacccatagataaatct

SEQ ID NO: 222482 - DNA, 598 bp, Homo sapiens
tttctcatgctgggggacgtgcaacacctgcagcataattaggtactcaaaatctgtttgtattttaaaagtgctttatataactgttattatgcatcaggggacgccttcggctcagctgctaacctttycatagctgagttcaagagagcagggtaaggagtccacaggagattcaaagtgggtgaggaatttggaggaaggctggtttatcgagagaaagcagcaccccacacccatgaacatttatatttttatccctggtgttaaatcaattcccctctctccaccctgactcagggagcagagatcattaagaacacatttaagtgcttaattgggttttgaaggaggtttctccattaacattaattaaagtctccctgggctcatgaaagctcatttgccaggtaggggtttcccaggttcactcctctttccattgctgcctcagcagaactatttttcttgcctggattccataggaagcttccagtgcaagaggtaagaaaaacagggtaaagcgaagggacaccattgcattctgcgatggaagattgggccaagtagagagaagtcctgttgcatatgattttac

SEQ ID NO: 222483 - DNA, 598 bp, Homo sapiens
tttctcatgctgggggacgtgcaacacctgcagcataattaggtactcaaaatctgtttgtattttaaaagtgctttatataactgttattatgcatcaggggacgccttcggctcagctgctaacctttccatagctgagttcaagagagcagggtaaggagtccacaggagattcaaagtgggtgaggaatttggaggaaggctggtttatcgagagaaagcagcaccccacacccatgaacatttatatttttatccctggtgttaaatcaattcccctctctccaccctgactcagggagcagagatcattaagaacacatttaagtgcttaattgggttttgaaggaggtttctccattaacattaattaaagtctccctgggctcatgaaagctcatttgccaggtaggggtttcccaggttcactcctctttccattgctgcctcagcagaactatttttcttgcctggattccataggaagcttccagtgcaagaggtaagaaaaacagggtaaagygaagggacaccattgcattctgcgatggaagattgggccaagtagagagaagtcctgttgcatatgattttac

SEQ ID NO: 222484 - DNA, 551 bp, Homo sapiens
gtatctctctacctttcacaccatgtttttgaaaagaaaacacagaaaggcagtctatggttggtatatgagaaaccattttacacattgtaaaactatttccaagggtaagttgttgttataaagttcaaagaaagacatgctcaatatttgcctactawtttttttagcttccatatacactgagttacctctgatcctaattgatcatcagtaggtagtggagataaatatgtgtttcctattatttatttaagacccaatgaactcactaagagccattcatactttataatgtattggctgagcaagaatattgtcatttttcaatttaacactaactttaatttatagagtagctattacaatagctggagatagcaattttagttttgaggtaccagaatcagaaagatgcatccacagtgcccatgtgggataatcattatggctttgtaatattgtttgtttctaaaattggcaatgtatttacaaagcgactaagtgaacactacttttttgctttatttaatgataatataatgatagct

SEQ ID NO: 222485 - DNA, 551 bp, Homo sapiens
gtatctctctacctttcacaccatgtttttgaaaagaaaacacagaaaggcagtctatggttggtatatgagaaaccattttacacattgtaaaactatttccaagggtaagttgttgttataaagttcaaagaaagacatgctcaatatttgcctactaatttttttagcttccatatacactgagttacctctgatcctaattgatcatcagtaggtagtggagataaatatgtgtttcctattatttatttaagacccaatgaactcactaagagccattcatactttataatgtattggctgagcaagaatattgtcatttttcaatttaacactaactttaatttatagagtagctattacaatagctggagatagcaattttagttttgaggtaccagaatcagaaagatgcatccacagtgcccatgtgggataatcattatggctttgtaatattgtytgtttctaaaattggcaatgtatttacaaagcgactaagtgaacactacttttttgctttatttaatgataatataatgatagct

SEQ ID NO: 222486 - DNA, 436 bp, Homo sapiens
caggggtccagggatcagatagtatgattgattgtggaaaggctttggagatgaatatgtttatagtattttaaaataggtcctgtatcaaggtttgaacttatttgtatttctgtatgtgaatttctgtgttgcaaatcacccatggtttatagagtcatatttagaacagaacaactaagagtgtccttttttccccattatattgtactctacacaggtaatgacagcaagtcacccaaagatgtaaagtcatgatcatcgttggtctatgtcaggcaacagttccaagaggacagagacctccasagagggaggagacgtggagaacacttgtgatgttacaagcaattctgttttattatataaggaagaaatatgtttcttttttttttttgcaagctccgcctcccgggttcacgccattctcctgcct

SEQ ID NO: 222487 - DNA, 637 bp, Homo sapiens
taagtattaggattcaagtgaatgaaatctagagaaacttcatgaaaaagaataagcaaagctgctgcccagggggctgagagagagtcaaagattcctagaaataagggtgataatatgtgaaagtgtccaacctgaataatagaaaaaaaagtaaagataagtgcacagagtgtaagggatggatggaatacattcaaatggaccaatatatgcattctgggagtccaaaatggagaacagagggagtaaagggcatgaagaatatttgaagaaatactggacaaaaacttcccaaatttgttgaaataaataaatctacacatccaagaagctatatgaatccaagtaggagaaacaccagaagtccacgcagatactttatagtcaaactgttgaaagtcatagaaaaagagaaaatcttgtacattgttggtgggaatataaaatggttcggcggctgtaaagaagtttgamaattcctgcaaagttaaacaaagaattaccacgtgaccctgtaattccactcttacgtatatacccctccaaaattgaaacagatactcaaacaaatacaggtacacacatgttcacacaagcattattcacaatagaaaaagatggacatagacctggt

SEQ ID NO: 222488 - DNA, 437 bp, Homo sapiens
gcaacccctgtagtgagcctgttcaactgtgagaacctgttgagtctcatcaaggaactttcaggagaacaagggtggcaggtaacaggatgtttccacttcgggttctgataggataatggcaaaattacactatattcaatgggtgcttggacttagtagactttatcggttgattccctttgttaagcttttgaatttgctaaatatccccctcacggtatcctttgctcatgacccctaatcccccacaaaccagcaaaaaaaaaaaacaaaaaaaaaaamcagaaatacattttgccacaaattatgttcaatgagttggatgatttcatatcatgaaattcatgacagtgattttagtaacctgtgtaattccctcctcccttccaaaataggaataaagggaggaaaaaagatgtcgatacggtttggct

SEQ ID NO: 222489 - DNA, 438 bp, Homo sapiens
tgagcaaggtagggcccctgggcggctgttgaaattacactccatgttattcggaaggtatcacttgagtattattcattccgaacatatcctttttctttttttcttttttgcaagtcacttcattttgaaactcacttgcagttctgcagagtgggctgtatgagcccccaccctctacctccagacctacgtccacatctaccctgtgtttggattctcagctgagaatcccttggtcacamaggcctgtttgaagaggtgatcagggagagcaaaggctgaagagaccaaggagaacccaagagagctcatctagcaaactcattttcacactcttaatgaagattttttttttttaaagctttggttataacggcacagcctccggagacagaccgagggggagtactttgcttcctgattacggggagtgat

SEQ ID NO: 222490 - DNA, 556 bp, Homo sapiens
caatataaatgtcatcttggtaaagtgcattacataaaatcaaagtgtcttaactctgacacaccagatcagctgagttaagacaatggcaaccagtgaagcggcctattttgagtgtagttttccttcatatttttttatctatgtctcctttcgaaaaatataaaagtctcacagacacagttatttgaaataccactaacrcaatgaaaaacaaatcaaacactgggaatgtttgcttttattttttcccaaactacacattctcgtttccccattctgacatttccccaaatctaccacctcctcccaggactgtgtgatccctattgataaccagtaattgttttcatgtaatcagaaaatctgatctctaatctcaagcactgttttaacttagctgcctcctgtgcttgcataagttacttattctctccagatctcaatttttccatctatcaactgtggatgctataacctgtctttttatctaacagggttgctgagattcaagaatgacaacaaattttaagacactttgtgaaatagagaacaa

SEQ ID NO: 222491 - DNA, 591 bp, Homo sapiens
gagggtgtaatttgtatttttatatccactctagctattggatggaaaatagattggaaaagacaccaggctattgcaatagccctgacaaaaatgatgggatggagtggaaacagtagagacagagaaaagcagaaaggatttagagagagagaagaagaagacaggcagagaggctcttcataaataaaataacttttgtgcaaaagtatgtgaataattcatgctcatctgcgtgtttaagtaccgaaccaaaaagatgagggggtaaaacaatatttccagttctatcaaatagaaacattcccaaacgtacacagcagtacacataatgatattacatatacctttgtccagcttcctgtattcattgttgaaatccctccaaattagctgtataaatttcattagtttttacktgggtgcatgaacattttagatatggttatattgcattttattcatttcttcctgataggtggattttcactttattggcaggattttttcctgcaactataaacaatgctctttcaaatgtatttattatatattggagtttttatttctatgttagagattcccaggagt

SEQ ID NO: 222492 - DNA, 579 bp, Homo sapiens
catgttagaaattatttgcatttcagccactagattttttttagagtattgtcgttgtttgtttagctgggcttcagttaaggtaaaaagcagactgaacatgtttggctgactaaattagattgtgacatttgataataaccagctcaacccctgatttcttaacaccatactcatgcttcataacttctctatattcttgcctctcactgaaaaaacaagattaaatatgtttttccttckaaatgtgtaaagatatcgaaataatacaacacaaaatatagaaaaagctttataagaatggtaaccatgtaaccaatatgaaattctgtctttaatattcaaattctcagatctttaaatggtgagaaggattctaacttctgaaaaataaatgttcttttattttcctgagttccaaaaatccaaaacaaaaaaagaataatggtgctccaagtatattattaaattgttctatttggcagacatgctttttttctttttaaccttttcttgaagctaaattgcctttaaaataatcatcttttcactggcaagattaatgttcactgaaatttg

SEQ ID NO: 222493 - DNA, 472 bp, Homo sapiens
aggcttaagcaatcctcccacctcagcctcccaggtatctgggactaaagtcatgcaccgccatgcccagataattttttttttttactttttgtagagacaaggtctcattatgttgctaggctgatcttgaacccctgtgttcaagtgatccccctgacttggcctcccaaagtgctgagattataggcatgmgccaacgtgcctggtcgcttctaatccagaacaaagcaaggagtctcaccacttctatttaccattttattggagatcctagcaaggataaagataaaaagataaagcaagaaaaggaaataaaaggtgttcagtttgggaaggagaaatacaactttcaattttttttttttttttttttgagacccagtttcactgtgttgcccaagctggagtacggtggcatatctccctgcaacctcagcctcctaggctcaagcaatcctcctacctcagc

SEQ ID NO: 222494 - DNA, 507 bp, Homo sapiens
ggcaagtcaaatcagatgaaaaactggaaccatggaactagtatatgtgggcatttggaaaagtgacagtagggtgggtatcagctagtggtggcaggattaaatttagagtcacttaaatgtatagagtcagtgatgcctaaactttgccatacagtccacgtgttagcatctatgtcattaagagtttgtgttcaaacaaaaaaataaaacacagagagatactgctttgactagtttaagaagaaaaagagtttatttttaaaaaattagattcacagaatctccagtgaagccagagaacctagtttggagaaaactatgcaatagaatctatcrtgaagattcaaaagtatcttcatagaagcaattctgatattcccaaagtagacatcataattacctctacaaagatagccttgcaaccaccacttttgtgaagcagcttttgcctatttgtcaattgttttatttttctttcttttcaaaatttatttgtaggaattc

SEQ ID NO: 222495 - DNA, 398 bp, Homo sapiens
aactgccattattaaaacaaggatcagtgtagaggtggccctgatgcccagaatccaaaggtcagctccctgaaagcctccccaaatcacagacgtttactatggcctggccctkttccatctgttacaactttactctgctcactggatttctcctacaactaacaactcaaaaatctcagtttagaattccatagagcaaaaacatattaaaaatacaaattttaggctggtggtggaggttcatgcctataatcccagcactttgggaggccgaggagggcgaatcacaaggtcaggagttcgagatcagcctggccaacatggtgaaaccccgtctctactaaaaatacaaaaaactacctgggtgtagtggcaggtgcctgtaatcccagcta

SEQ ID NO: 222496 - DNA, 530 bp, Homo sapiens
tggctgacacaagacacaaacctacggatccaagaagctgagtgaatcccaaacagcataaactcaaagaaacctatggcaaaatacctaattaaagttttgaatagcaaaaataaggaaaatgtctcgaaaccagccagagagaaatgatacattatctatatgggaacactcacttaaaggatgatagatttctcatctgaaaccacagaagccaggaagaaagtggcataatattttcaaatgctgaaagaaaaataaataaataaataaaacaactgtcaacacagaattgtggtgaaactatccttcataaatggaaggaaaataaaaacattctcacgaggaggaaaactaaaagcattatcagagatatggtggttaaaggaaattctcaaaaagaaagaaaaggataaaagaagtaatcttgcagcatcaggaaggaagaaggaataacagagcatttttttaatgagctttataaacttattaaaattacaaattatcrcagcatcttgcatccaagatga

SEQ ID NO: 222497 - DNA, 549 bp, Homo sapiens
ttgacttcagtttccctttctctgtgaggccttcgcttgccaccttatctaaaattacaacattctctctatccaagagcctttccccgctacctatttatttttctccttaattcttgtcatcctacaacaaatggtatattaatttattgtatttccctactagaacataagtccttcaagagcacggagttttgtccattcttgcccgtttgatctcttccattatgcctagtgtgggtaccatataagcactcaataatattaagttgatgcaaaagtaatcatggtttttgccattaaaagtaaccatgattacttttgcaccaacctaatatttggtgaaagaatacatgcaaggatacatgtaagctacttgtactagcaatgccctttcttactcaatttcagaarctcagacattgttacccttttccaatcctatttgtctaatagttattaacacacttcctacccctatgctgagtaatgagcttctattagtgaattgtgttcatgtaatatttagcaggactcagttttcccatg

SEQ ID NO: 222498 - DNA, 435 bp, Homo sapiens
atggtacttccatcagagcagagtattccgccaagctaggaggatctcttcatcctctagacagaaaagacagctgacctcagcccaacattctacttcataaaagatgttcatagtcatgatgtcattctatcctcactaatcataagaggttgataatattgatagttttaccttatagacaaggaccccaagcttcctcagtagaaatctagccattagttcatgtcacatgacttcacctccagatagaccttgttmtagcttggaatccatctgaagtgcattctaaactaggggaagcgtccatactttcttagctggagtatcctgagggagaagagctctaaagaataagaagagcaaggacacaacctgacatcatgttgctgccccacccggcacacccagccacacatatgtgcccacaagttt

SEQ ID NO: 222499 - DNA, 396 bp, Homo sapiens
aaactaaatgtggtctgagaaggactctatacttctatagttgcgtccttgtggaggaactgtaacctagcttaatagacaaaattaaaaacctaacttattagtacatacctgtaaaaatagctgaatgttggccaatcccggtggctatatttcaaccactcatagactgtgtaatgttsaaactgcactcaaataaggcaattcctgagctataatcagtctcactctttctgtacctcacttctggttcctgtatgtcactttttttggtctataaatttgttctgaccataaggcacccctggagtgtctgtgaatccgctgtgattctgggggctacctgattcgtgaatcgttcattaatcaattaaactcttttaaatttaatttggc

SEQ ID NO: 222500 - DNA, 620 bp, Homo sapiens
gaatctcaagctgccccatgaagcatttctggggctttcttgtcttactacacatagtttttagtgtttgagtaatacatttaggtgtatttgattccactgaagttagcacatataatattcaagtttacatacacaaagtacctactaaaatgtcaggcacacggcaggtatgtgccatccttcttctttacattcttaatatacagaataaaataatttccaaaatttttaatggcgtaatttagggtaaccttttctcacataaattttaagttctttgaaggccagaacatcattatatgcctcattttaaattcctaatttcatytagtataatgttgaactaataatatatactgattatcagattgtttaactttaatatgtaaagctttacaggaaatacatatgtgttgggagtacatatagttgtaagatgcaagaaaaaaacattctactagtccaagaattatgaaacatgttacttcacattgcatatttatgtaatcagaagacctctagaggaaatgaccattggaataaattaatatacccctggaagagaggaagtgcttagggagtattttgttgatgaaatgagctcaaaaggccattag

SEQ ID NO: 222501 - DNA, 488 bp, Homo sapiens
tctaaagagcttacatgatatggtggaagattctgggctttggaataaatcagacttatgttagaaccttcactctgctccttcgaacctatgcaaacttaggcaaattattcatagcatctaaggctcatttcttcatctgtaaaactgggatggtaataactacttcccaaagtttttgtgagaattaagaagaatgcatgaaaactactaagttgagtaagatggacataatagcactcaattataattagagtrattaaacttctaggtctctccagagtttttcttgtttaaaaattaaaaagtaccatattttttcctgattaaaattgtatgtgctcatttaaaacttcccatttatatatttttcattaaaacttgtttctagatataaaatacaagtgataaagtaaaattactaataatttcaacatccagaactaattactttaattggtatgtacgatcttttttttttctctatg

SEQ ID NO: 222502 - DNA, 376 bp, Homo sapiens
taacttaaacatcagtgacggctagggctatagaagtagaaaagatgtctttccgatatatagattttcattttacttaatggagttgggaatttgctcaaggacctgactactaaatattaaccaaaagacaaaagtgggcaaaagcccccctacagatttgcaggtgtattttttctgtgtataggttttctgtgtctacaaatgctagaaataaaatgtcagcattcacacatacacttstcgttaaacacagatttttttgtgttatctgtagtatgctacaagatagatttcctttttacctttcatagcaaattttaagaatgtcattttttaaatgttgaaaaagagcaattttcagtggtgcacaagt

SEQ ID NO: 222503 - DNA, 202 bp, Homo sapiens
tgatggccttgatcctggaggaaataaatttgacaaggaggttaaaaatacagggcccgaaggcgagtaatagcaagatggctgttatggkaactagaaaggggagaagccatgtcacccaactccagaagttggtataagagtttgaaaggtgttgtctgatttcagaagccttttcctgtaaatgccaggcagtgtcttg

SEQ ID NO: 222504 - DNA, 613 bp, Homo sapiens
ggttggaagtgcagccttcaaagccaactgyttggatttggaatcttgctcttccatttacaagctctgcaaccttaggtaagtcacttatcttctctgtgcctatgtcttcatctttaagagggaaagtaacaatagctaccttattgttattaagatgattaaatgagatggtatctgtaaagctcttagaaaaatgaaatgataaatactaaataaatgatttgataaatcaaataacatacagagacatacatgtgagtaatctctcaacagatcgtagtattttcttccacttttctctcctattttcttaaactacacctagaaaaaggagcgaattaaatgcttccaaaaggcagtctttatgaacaaataaatacacacatcattcctatttatagaaaaccagtccttgctttgcacggttcccgaatgcatgaatttaagttgccacagtttgttaagatggtcctccaacaacttggctccaatgacagttaccatggtatattaactggataattacataaagtacaaacttcctgttagcacttctgtcctcacccattgtacaaatgacagatgtgcatcatgatcactgaccaatcgt

SEQ ID NO: 222505 - DNA, 607 bp, Homo sapiens
cagatttcagagaaaacatggccctgccaacacctcaattttggacttttagcctccagggctgtgagacagtaagtttccattgcttaagccactcagtttatgggattttgttatggaacccttaggaaatgaatacagatgacttttttcttaaaaatatatatatttataccagtgtgcagatgggtggataaaggaaaaaacaacaaaaaaawtttttttttgaggtagagtctcactctgtcacccaggctggagtgcagtggcatgatctcagctcaccgcaacctctatctccagggctcaagcgatcctcccaccttagcctcctgaatagctgaggtgtgcaccaccatgcccggctaatttttacattttttgtagagatggcgttctaccccatgttgcccaggttagtcttgaattcctgagctcaagggatccacctgctttggcctcccaaagtgttgggattacaggcgtgagtcaccacctggccagaaaagaaatttaatacttgaatatgatttttaaaaattaaatactataaaaggatataaacagaaaagactctctcttctacccctctaccatccacctcaag

SEQ ID NO: 222506 - DNA, 529 bp, Homo sapiens
agcaatggcctggtactttttgagctccagatattccggggtcaacttgtgctgtgtgggagcaaacaagagcaaaggcatcagaatactctggtgcaacagtcttctctctccctatatacatttcacctattgytctcctgagtatcatgagtcaagtctgaataactgccaatgaccctctctcactttggagagtggttatcacattaacagctgcgttcctgacttaaaattccttcattaagctcatgacttaatgcaagagaagctgttcactttttaataaaaggatgggggagttggaaaacaatttgtgataactaatgataataactaatatttctaaagtgactttcatttcatctagttgaattcaacctggaattggtctggagtttctgttgattctcttttctaaaaaaattatttttatttttgtagagatggggtctatgttgccaggctggtctcaaactcctggcctcaagcaatcctcctaccttggcctcccaaagtgtcggaatca

SEQ ID NO: 222507 - DNA, 595 bp, Homo sapiens
tgcagtggaagggggtcaaatcctggcaggaagatagatgatgggaggcagttaccaagatctaggcaaggatgagtgagagcagaaccgaggccrtggcaggagatggggaaagcaagggtcagctatgaggatcaacacagaaaacggagagggcttagtgaatgagtaatcatgggaagtgagtgagaaggaagaatttagaatggctcctgtgtttttgacttgggcaacaggtggtgccatttcccaagaggagcaactatgggtgaagagacactgcattcagattcaaatgggttgcatttgtggtccctacaaaattggcaaatggggaaattattctagccaagccaataagaatttaataaatacaatgaacatatacatagcactctacagtttatacagaacttttattgaaatgtgagacatgactgaagcagtgtgtggtggggatgtgggggtggtgagttctaaggggaatttatttggagaggaggagcaagatgtttgcagagaacactgaaaatccagcactggatgccaagcgcggtggctcatgtctgtaatcccagcactttgggaggccaag

SEQ ID NO: 222508 - DNA, 455 bp, Homo sapiens
aactaattccatcttactagagcgagaactcactaccaggagaacaacaataagccattcatgacagatcctcccccatggcccaaacacttcccaacaggccccacctccccacactgccacattgaggatcaaatttcaacatgagatttggtgggaacaaacaagccataaccaagccatagcattctgcccctggccccccaaaattyatgtccttctcacattcaaaacacaattagacaattttctcttctaatagttccaaaagtgttcactagtcccagtatcaagtcaaaagtccaaagtccaacatctcatttgagactcaaggcaagttccttctagctataaacctatagggaaatttacatttttccccttaagattcaataatttgagtctataaaacaatctgatactagacagattagtaggaaaaaggcattcaaatt

SEQ ID NO: 222509 - DNA, 407 bp, Homo sapiens
ttgcattctatctggtttgtgagatgacctttcaccttctgatgaattgcctttatgcttaggatcactacagtgggctctgttacttaaaacaagagtactaattaataaatcagatcactgaagtcatattgacccactgtgattgctatggtttggtggtgattatgagaagggtatttactcagcaggtagaacttggccatagaactccttcatggcaaataggaagaagcatggcttttgttaaactgagcacatacattgctgakcataacacaaactaccctggtgcatagtttcccttttccatctagagcttgttctggatttgttctgggaaaagcctatgggtttaatttggagctggtttatttcagtcagttggggagttgttttgtggtact

SEQ ID NO: 222510 - DNA, 581 bp, Homo sapiens
attgggaggaaaataaactgaaaattgtagtattaaagaacacatttgtctttaggatgtggaataagaataccagaatctccaggtttataaattagatatatgaatatgtatttcatattccttttctcctaatttccattattcatggaattataagcatagaggagaaaaaaataaactatttctaggacygacttcactgcattcagatcttcatgtttaggctatggtgctcaatggaatgagagatgggaaagatgtatgaaacctagatgtgcctgtgagtagctcatgattatgcaggggatcgggggattgtataagtgttgctatgagtgcaacacaaagctcagtgtgaaataaaccctaggagtggcaaaactaaatgtgatctaggttaaggaagaaagatgtatttagatgaaactatttggagtgtgtgtgtgtgtgtgagagagagagagatagaaacagagagagagagagaggtacacagagagaaagaataatgcagatgtttctaaatggaaagggcacagttatactcggcacatcaaaacaagaggactagcaggttg

SEQ ID NO: 222511 - DNA, 581 bp, Homo sapiens
attgggaggaaaataaactgaaaattgtagtattaaagaacacatttgtctttaggatgtggaataagaataccagaatctccaggtttataaattagatatatgaatatgtatttcatattccttttctcctaatttccattattcatggaattataagcatagaggagaaaaaaataaactatttctaggactgacttcactgcattcagatcttcatgtttaggctatggtgctcaatggaatgagrgatgggaaagatgtatgaaacctagatgtgcctgtgagtagctcatgattatgcaggggatcgggggattgtataagtgttgctatgagtgcaacacaaagctcagtgtgaaataaaccctaggagtggcaaaactaaatgtgatctaggttaaggaagaaagatgtatttagatgaaactatttggagtgtgtgtgtgtgtgtgagagagagagagatagaaacagagagagagagagaggtacacagagagaaagaataatgcagatgtttctaaatggaaagggcacagttatactcggcacatcaaaacaagaggactagcaggttg

SEQ ID NO: 222512 - DNA, 552 bp, Homo sapiens
cagtaatcttctctttcatttgggggtactttagggttctcaaaggaatttcccatgcagtgtcacctatcagttccccatcagggtatcatcaagtaatctaccttggaacaatgagaaacaatctttgctaaacttctctgttcaacacaaagtgtatcaaaatctagagaactcaragaagatccacaggagagcaacaaaaacagaaattaaacaggctttccaaggagagattaaaagaataggaattgtttcagttagaggagtagaaagtgactataaattttcaagccataaaagaataccacataaacaatggtagttagccatgagccagtttcactgaagacagaaaaggacaaagctgacagcttgaagaggaataaattagcattaaatctaaggaagaaattgagagagctatgatttagcactaataagaataatcagacatgtaactatcaaaggaagtctgtgtttacatgacacatacaatgtagatgaggttcttttttaagttaagggagttgttatttttcagaatgtttt

SEQ ID NO: 222513 - DNA, 502 bp, Homo sapiens
aggagagaggagtagaaacttttggaatctaggtgaaagagaatagtggtttggattatgatggtggcatgagattggagagaagtgatagattcaagaratgtttaggaggtagactaggcagaattcaatgaatcatgtgatgtgaaaagtaagggaaggaaaataattcaggatggtgtccaaagtctctgttttggacatctgggtgatgatgttccattctttctgatttgtacgtgacattgcagtggatgtggctgcctgctctatgctggctgtcagaaactccagccctagacctctcacctggcttcctgtcctcccttcttcatcttcattgggaaagtgcttttgtgggaagggtagtgaagccaacctggctttcaaaggctgtaaggttgttagagaaaggccatccattttgacctacttctccctctgggacatgataaacgctattgctacaagaggttttttttttttgttttttttgtttttt

SEQ ID NO: 222514 - DNA, 500 bp, Homo sapiens
aggagagaggagtagaaacttttggaatctaggtgaaagagaatagtggtttggattatgatggtggcatgagattggagagaagtgatagattcaagaaatgtttaggaggtagactaggcagaattcaatgaatcatgtgatgtgaaaagtaagggaaggaaaataattcaggatggtgtccaaagtctctgttttggacatctgggtgatgatgttccattctttctgatttgtacgtgacattgcagtggatgtggctgcctgctctatgctggctgtcagaaactccagccctagacctctcacctggcttcctgtcctcccttcttcatcttcattgggaaagtgcttttgtgggaagggtagtgaagccaacctggctttcaaaggctgtaaggttgttagagaaaggccatccattttgacctacttctccctctgggacatgataaacgctaktgctacaagaggttttttttttttgttttttttgtttt

SEQ ID NO: 222515 - DNA, 512 bp, Homo sapiens
cagtgactttttgcctacaaaaaacagacttcacctgtaaagacacacatggactgaaattaagggggatgggaaaagatagtccatgcaaatggaaaacaaacaaacaaaaaaaaaaaacaagagtaattatacttatattatattagactacatagctttcaatagaaaaactataaaaacagacaaagaaggtcatatagtgaaaaagcagtcawttcagcaagaggacataacaattttaaatatatatgcacccaacaaaggagcacccagacatataaaggaaatattattagagctaaagagagagagagacctcagtacaaaaataactgtagacttcaacaccccacctttggcgttggacagatcatccagagagaaaatcgacaaaaaatattgaactcattatgtactatagaccaaatggacctaatagatatttacagaacatttcatccaaaggctgcagaatacacattctcctcaggacatggatcattatcaag

SEQ ID NO: 222516 - DNA, 572 bp, Homo sapiens
aattcacctaatattaaactmaaacaatgatataatcatcattatctaataatactaatattaaaattctgattgtgtatgaggtactatatcaatatgttccatatatgatatcactcttttttctttttcttttctttttatttttgagacagagtctcactctgtcgcccaggctggagtgcagtggctcaatctcagttcactgcaaccccagcctcctgggttcaagcgattctcccacctcaaccttcagagtacctgggattacaggcgtgcgccaccacacctgactaatttttgtagttttactagagattgggcttcactatgttggccaggctgatctctaactcctgacctcaagtgatccacctgccttggcctcccaaagcaccaggattacaggtgtgagccactgtgcatggcctcttttttttcagaatttaacatttatatggcacttactttataccaggcactgttcttggtacattaaggatataacctaatttaattttttaacaatctcataaattacatgctattattatttccactctataaattgg

SEQ ID NO: 222517 - DNA, 572 bp, Homo sapiens
aattcacctaatattaaactaaaacaatgatataatcatcattatctaataatactaatattaaaattctgattgtgtatgaggtactayatcaatatgttccatatatgatatcactcttttttctttttcttttctttttatttttgagacagagtctcactctgtcgcccaggctggagtgcagtggctcaatctcagttcactgcaaccccagcctcctgggttcaagcgattctcccacctcaaccttcagagtacctgggattacaggcgtgcgccaccacacctgactaatttttgtagttttactagagattgggcttcactatgttggccaggctgatctctaactcctgacctcaagtgatccacctgccttggcctcccaaagcaccaggattacaggtgtgagccactgtgcatggcctcttttttttcagaatttaacatttatatggcacttactttataccaggcactgttcttggtacattaaggatataacctaatttaattttttaacaatctcataaattacatgctattattatttccactctataaattgg

SEQ ID NO: 222518 - DNA, 572 bp, Homo sapiens
catctgaggtttgaaccatatacatgatttctgtctagatccatgccataaattagtgccaaaagagccacagaaactatgaaaccatagacatagttcaaagtaaactctttcccttttccgaaaacttgatatcttttctgcaagcttaagctcatcttcttagctcccccttggactttgccttatttttacccaattcattccattattgttattgttgttttcttctctctcactttytcactgtctctctctcaatttctcactgtctctctctctctgccccttctctatctccctcctctctacctgatatggttttgctctatgttcccacccaaatctcaccgtgaattgtaataatcctcacatgtcaggaatgtgaccaggtggagataactgaatcatggaggcggtttcccccataatgctctcatgatagtgagtgagttctcaggaggtctgatggttttataaggggcttctccccactttgcttggcacttctcctttctgccaccatgtgatgaaagatgtgtttgcttccccttctgccatgattgtaagtt

SEQ ID NO: 222519 - DNA, 572 bp, Homo sapiens
catctgaggtttgaaccatatacatgatttctgtctagatccatgccataaattagtgccaaaagagccacagaaactatgaaaccatagacatagttcaaagtaaactctttcccttttccgaaaacttgatatcttttctgcaagcttaagctcatcttcttagctcccccttggactttgccttatttttacccaattcattccattattgttattgttgttttcttctctctcactttctcactgtctctctctcaatttctcactgtctctctctctctgccccttctctatctccctcctctctacctgatatggttttgctctatgttcccacccaaatctcaccktgaattgtaataatcctcacatgtcaggaatgtgaccaggtggagataactgaatcatggaggcggtttcccccataatgctctcatgatagtgagtgagttctcaggaggtctgatggttttataaggggcttctccccactttgcttggcacttctcctttctgccaccatgtgatgaaagatgtgtttgcttccccttctgccatgattgtaagtt

SEQ ID NO: 222520 - DNA, 572 bp, Homo sapiens
catctgaggtttgaaccatatacatgatttctgtctagatccatgccataaattagtgccaaaagagccacagaaactatgaaaccatagacatagttcaaagtaaactctttcccttttccgaaaacttgatatcttttctgcaagcttaagctcatcttcttagctcccccttggactttgccttatttttacccaattcattccattattgttattgttgttttcttctctctcactttctcactgtctctctctcaatttctcactgtctctctctctctgccccttctctatctccctcctctctacctgatatggttttgctctatgttcccacccaaatctcaccgtgaattgtaataatcctcacatgtcaggaatgtgaccaggtggagataactgaatcatggaggcggtttcccccataatgctctcatgatagtgagtgagttytcaggaggtctgatggttttataaggggcttctccccactttgcttggcacttctcctttctgccaccatgtgatgaaagatgtgtttgcttccccttctgccatgattgtaagtt

SEQ ID NO: 222521 - DNA, 512 bp, Homo sapiens
caggaatcattttgaaggataggaatcaattagtttgtctgaagcagcgggatcatgtagtagaggtactggtagtatacaatgagaatagaaagatagattgagtctaacctaagttgggactttaataaacaagcaagagtgattatattttatcctgtgggcaatagggaagtgctaaatgttttcaaacagttaagtcgtatgaaaaaaactgcagtttagaacaattgctgtcgcaagacagggaagagaatgaaggcaagggggcttgtcagagacgagatacattgggatggtgatttaagatcataaatcaaaaagtagtagtagaaatggagaagaaatttctaacatataaacaaagcccctattggttgattgayatagtcagaatggagagtacaattcaagaaaataccaggacctttgtcaagaagaaaaggcaggtttcttcaaagaatacagagaataccaagactttatcaatgcttttccctgcaaagtaaaat

SEQ ID NO: 222522 - DNA, 530 bp, Homo sapiens
tctaaataaataaatagaaataaaaatatctacttaattcaaaaacaagcaggtataggagaataaatggacaaatggaaaaaaacccaaaatattatatttgaatagaacttttattattaattacataaagtgtaagtagaccaaatacctcaattaaaattcaaagattgtcagattggatttaaatattagaaggacaaagtttggctgattgtgaagaatggaaaaggatattactgtagttgatgttgctaggaaagacaaagatggacatttcataatgaaattaggattaatacaataggaagatataacaatcctaaatttatgtgcatctgataatacaccatcaaaaatatgtaaagcaaatattgacaaaactgaaaaaagagacagatccatagttatagttagaatttaatgcatctatctcaataattgacagaacaaacaagaaagaaaaargttagtaaggatatagaatatttgaacaacaaaatcaagcaaattaacttaatttatgtata

SEQ ID NO: 222523 - DNA, 453 bp, Homo sapiens
gtttttttagaagatggagagaagtaaacacttctcaatattgtattaggcaaatgtattcttggtatcaaaatataacaagggctttacaagaaaggaaagttaaaagccaatatcactcttaagcatagatacaaaaatcctaaacatgatattggcaaatcaaatccaccaatatataagtggcataatatattacgactaagtgggtttctttgcccaggtctggattgaaaaatcaaccaatatcatccaccacattatctggtttggctctgtgtccccacccaaatctaatattgaattatgatcttcactgttggaggaagggcctgatgggaggtgattggataacrggggtggatttcccccttgctgttctcatggcagcaagagttctttatagcagtgtgagaatggcctaataaagaaaattggtaccagagaagtggg

SEQ ID NO: 222524 - DNA, 453 bp, Homo sapiens
gtttttttagaagatggagagaagtaaacacttctcaatattgtattaggcaaatgtattcttggtatcaaaatataacaagggctttacaagaaaggaaagttaaaagccaatatcactcttaagcatagatacaaaaatcctaaacatgatattggcaaatcaaatccaccaatatataagtggcataatatattacgactaagtgggtttctttgcccaggtctggattgaaaaatcaaccaatatcatccaccacattatctggtttggctctgtgtccccacccaaatctaatattgaattatgatcttcactgttggaggaagggcctgatgggaggtgattggataacaggggtggatttcccccttgctgttctcatgrcagcaagagttctttatagcagtgtgagaatggcctaataaagaaaattggtaccagagaagtggg

SEQ ID NO: 222525 - DNA, 599 bp, Homo sapiens
gtcaatgatcagaaatatacatatgttttagcatattcagagtgatcctacatcctgggacagtcttaatttatgcctattatattgatataattataccaagtttagtttcaaaagacatcttcattggataataaactatatatgcattctagatatattcatttactgaagttctaaatagttatataaatgattgaaataaatgtgttagtataatatgtgttaaccaaaaaaaaatctggaaaaaaacataatgataagtgaagaaagtcaagttgcaaatagatatataccccattgataatatttatgtataatttgcaacaaaaagcaatactacaaatataagcatatacatatgtagaatattacatatatgtgtgtatgtrtatatatatatatatatatatatatatatatatatatatacatacatatgtatgcacacctgtgccagtaaagttttatttttaaaaaagatctgagatcaaaaaggtaaaaggataacatttgttaagtcaggcatttattatgctgttgaattttccataatttcaaaaataattaaaattatattttaaaaacatttttaaaat

SEQ ID NO: 222526 - DNA, 619 bp, Homo sapiens
cacagccaaaccaagattaagcaaaaagaacaaatctggaggcatcatattacctggcttcacttttcacttcacttcaaactatactataaggcttaggcaaagactttgtattagtccatttcacactgctgacaaagacatactgggcaatttacaaaataaagaggtttaattggactcacagttcaacatggctagggaggcctcacaatcatggtagaaggcaaggaggaggaagtcacatcttatgagcgtggtggcaggcaaagagagagcttatgcagagaaactctcatgtttaaaaccatcagatctcatgagactcattcaccatcacaggaacagcatgggaaagacctgcccccataaatcaatcacytcccctggcttcctcccacaacatgtgggaattgtgggagttacaattcaagatgagttatgggttgggacacagctaaaccatatcattctgcccctggcccctcccaaatctcatgtccacacatttcaaaaccaatcatgccttcccaacagtcccccaaagtcttaactcatttgagcatcaactgaaaagtccatagtctgatgtctcatctgaaacaaggcaagtcccttc

SEQ ID NO: 222527 - DNA, 630 bp, Homo sapiens
ttatgcttttgtgtgttgttatgatgatgagtattgcccttttgttttcatgcttaaaactctgagcatttcttgtagaaccagtttagtggtgataaatttccttagcatttgcttatctgtgaaagactatttctccttcatttatgaagcttcttcatttagcaggatayaaaattcttggctcacaggttttttctttgaaaaaagtgagaataggaccccagtctcttctggcttgtaaggtttctgctgagaattctgctattagtctgataggatttcctttagaggtgattagacacttctctcgtgctacttttaagatttttttttcatgttgactttggatagtgtgatggctacatgccttgatgaagttcattttgcaaagtatcttccacatgttctttgatcttcttttatcgtgaagtctaaatctctagcaaggccacagaaattttcctgaattattccctgaaataggttttccaaactttttgtttttgtttttgttttcccttgggaatacctactactcatagttttgctcactttacataattctatattccttgaagactttgttcattttttacattattttttctttattttcatctttaaact

SEQ ID NO: 222528 - DNA, 468 bp, Homo sapiens
accctggcagggtttgaacctctaatggcaggtgcaggcactgaacctggaagggttcagagttcaggtcactggagcaactttccagggagggatggaggtgcttctgtccttccgaagaactcccatggagcattgggggacattcctggaatccacagcccagcagayggtagtgggactcatccagttaccatgccctctaccagatgggtctctctccagtgtctggcagcaagcagcaggccagaacagctagcccagttcttagcagactgcatttagatcatgaagatgccccaggctgaaagaatccatgcctaggggcagaaagtgtggctctcaggctatactctttccagtctggtccatgaagggaggggttgccagctttcatacagcagtgcaaaccatgccacactctcctctcagttctgaccatgaaaacatctctctgcctgatgtcag

SEQ ID NO: 222529 - DNA, 586 bp, Homo sapiens
gagagtgtggtaatgcaggatgaaagtaaagagagacttttaaggagagagtagtcaactaggttaattgtggcaggtaagtaaagttatgtaaagtctaaggggtgtcctttaagcttagcaataatgagatccttggagactgttaaaagactagtttagtgtggcaggaagatggacataggaatagttgacccatgtctctcaaacatcagctgtttcagagaagcaatgataaccaactggtggcacataaagactagattctgggcctgggcacagtggctcacattatctcagtaatttgggaggccaatgcggaaagatcacttaagaccaggatttcaagaccagccaggataacacagcgagacctcatcactacaaaaatttaaaaaattcactgcatgtggtggcacacrcctgtagtcctagctactcagaaggctgaggtgggaggagtgcttgagtccaggagttcaaggttacagtgagatatgatagtgctgctactttccagcctgggtgtcagagcaagaccctgtatctaaaaaaataaaataaaataaaataaaatggatttcct

SEQ ID NO: 222530 - DNA, 574 bp, Homo sapiens
gtctttgacaaagggttccagaatgatgaagaagctgaatgtccaggtcaacttactttttctgttgtagaaacagaagtccaggggacttctccatgtgtggtgctgtgcagactctggggatgagcactgcagtaaaagataatttttccccttacggtctaaatgtgcatttttcctcagttctacaatccaaagggatatcacattttcactccaagttctgggatgttcatggtggtaatcttgcctctggatagctactagttgttgagaagaaaagatggagaactcttaatcttccattttgctaaagtcactccacaaaggagtcaatcttgcttccaactgccaggcagggaaggaactggatgtttgcctttttcagttcccattacttctattgccacacggtttaatgagtytttattcatggctgcccccctcattggttaggtgatgtaacatgcttgagattaacaagttatggctgtgtttaacttacatgcctaagctcagccattatttttcaagcatgtcagttattcaagagttggctgggcctggggaagct

SEQ ID NO: 222531 - DNA, 574 bp, Homo sapiens
gtctttgacaaagggttccagaatgatgaagaagctgaatgtccaggtcaacttactttttctgttgtagaaacagaagtccaggggacttctccatgtgtggtgctgtgcagactctggggatgagcactgcagtaaaagataatttttccccttacggtctaaatgtgcatttttcctcagttctacaatccaaagggatatcacattttcactccaagttctgggatgttcatggtggtaatcttgcctctggatagctactagttgttgagaagaaaagatggagaactcttaatcttccattttgctaaagtcactccacaaaggagtcaatcttgcttccaactgccaggcagggaaggaactggatgtttgcctttttcagttcccattacttctattgccacacggtttaatgagtttttattcatggctgcccccctcattggttaggtgatgtaacatgcttgagattaacaagttatggctrtgtttaacttacatgcctaagctcagccattatttttcaagcatgtcagttattcaagagttggctgggcctggggaagct

SEQ ID NO: 222532 - DNA, 397 bp, Homo sapiens
tatgttccctcccattcaagagagggaactgagaagtgaactcctgcctcctctaaacaagctttctgttgggatgaggaggggatggggcaagggcaagaaaaatgccatggaacttttcctaccatttcaaaagtggctttttcttcattgggcatttgattggttgttataaaactctgactgttttccagagtccctataaggttaattcaaccatttgggtttttttttgtttgtttggctgtttttttattactctaagttgggggaaagagagagtttggaatttcctagtccaccactttgctgacatcactctctctatctctawacttttacactgatttttaaaaagatgatagaaatgtgttcacatatttcttaagtaactaaa

SEQ ID NO: 222533 - DNA, 546 bp, Homo sapiens
aaggagagaaaacaataaaagttttctctctgattttgagccttgatgattagttctcgggctaattttaaacatgaagatgatttagaggaaagactaaatactttcctttcagttcaggtctgctgggttcaacccagttatttgcatgaaaggacaacaatagcactattatgtttatttttaaaaaagataagtagatctttcttcctcccagtgtctcatgagaatagcgtgaattcacagggacggcacatggaaccattatattctctttacccaaaatggatacaggacacattagcaatcttaagatggagaaactgggcagagagattgacttaggagagataaaaataatttaatgttacacatgtggtagttsagttaaaaataaagcatttggatagaaaaatcttcatgaaattaagaatgtgaaagtatagtgagagaaattagaataagaaaacagatacaaaaattttcagtggtctaaagctgacctctaaaaccatgaaaacaaacgtctcccttgggagagaatgc

SEQ ID NO: 222534 - DNA, 573 bp, Homo sapiens
ttattagccagttggagagagagctaagaaataccatatctatataattatcagagaatgtgataaaaagctactactctgtacttgtgtgccaaatgctgtaaaagtataaatagagggcaatatatttcgctttggacgggaggttttagaaggccgcacaagagggatattcagtctgatgcttgatgtagacagaagggagagaagggcatcccagacaacatgggcaaaggcatgggaggatttggtgggtgtgtgggcccatgataattctgtgtggctggagccttarggagcaggcaggagacagcctggaaggtctgatgggtcagattgctaaggagtgtggttccccaggaaaaacattttagtgtggaagtgaagtgataagatcctcattttagaaagattgctctttatgtaatagcaacccaggtaacacgtgataaagcaatgatctgagggagtgagcatgtagagggaaggtgtattagagaattaggccaattaagggcacatgcctgagaggagccatatagagaagttggaattgacaggacctattctctg

SEQ ID NO: 222535 - DNA, 450 bp, Homo sapiens
gagaatatggggtgcagctcaaaatgakacttgcatattctaccctattgcaagatcagcagggactaagtttacttcggacaggaatctttcctttactgaatgaatagaaataaattctgggctgaaatctttgctccatttgggctctttcagaagagagcccaggatgatagaggcacaaaggtcacacaaatgcctgcatccaccttatttttcaaagctcctaccgcacacacactcatccagaaatgcctgggcaggtgccctatatttcaagatgaaaccaatcttcaacttgaggtccattctcacttcactgtcatatctaagaaggaagtaaaaatataaacctgacttcaaagcttcaaaaaaatacatagatttttaatgaagtttacttaaggacaaaaacagtatgctatagttaacattttatggcaaaaccct

SEQ ID NO: 222536 - DNA, 573 bp, Homo sapiens
agatccagagtgtcagaatgaataagaattcaccaaccaagtatctgctgtctttaagagacttgcctaacacataaggactaacataaacttaaggtaaaggggtggaaaaatatattgcattcaaatggacacaaaactgagcaggagtaactattcttatatcagacmaaacagactttaaagcaagaatagttttaaaagacaaagagggacaatccataacaataaaaggactagtccagcaggaaaatattacaatcctaaatatatatgcatctaacactggagttcccaaatttataagacaatcactgctagatgtaagaaatgaaataggaacacaataatagtggggggcttcaatactgcactgacagaactagaaagcatcaagacagaaaataaagaaactataccctagaataaatggacttaacaaatacttacagcacattctactcaacaacaacaaatatttacagcacattctactcaacagctgtgaaatatatattctactcatcagaacatggaacacaggccaaaaatcaagtctcgataaatttaaga

SEQ ID NO: 222537 - DNA, 573 bp, Homo sapiens
agatccagagtgtcagaatgaataagaattcaccaaccaagtatctgctgtctttaagagacttgcctaacacataaggactaacataaacttaaggtaaaggggtggaaaaatatattgcattcaaatggacacaaaactgagcaggagtaactattcttatatcagaccaaacagactttaaagcaagaatagttttaaaagacaaagagggacawtccataacaataaaaggactagtccagcaggaaaatattacaatcctaaatatatatgcatctaacactggagttcccaaatttataagacaatcactgctagatgtaagaaatgaaataggaacacaataatagtggggggcttcaatactgcactgacagaactagaaagcatcaagacagaaaataaagaaactataccctagaataaatggacttaacaaatacttacagcacattctactcaacaacaacaaatatttacagcacattctactcaacagctgtgaaatatatattctactcatcagaacatggaacacaggccaaaaatcaagtctcgataaatttaaga

SEQ ID NO: 222538 - DNA, 614 bp, Homo sapiens
ttcaccttaataaaaaatgtctgagtgtgaacagagaaacaatcaaagctgaatctgggttaagggaccaaaaacagaggcatgaacacctggaggtcacattggagattgcagattctgagaggtggaaaaacacgtgtctgaggataatgaaaaaatataaaacagctctctgcctgttgagcacaataaacatttgaaagatgtggacggttggtaaaaagtagataacactgctcgggggccatcrggtcacaatctcttcacagaagagcattgcacattttgactcaacctcagaatcagccctcatgtgtttgctttacttacatttccaaccactgctctctcctggacctcagaatacctatatctgcttcctgcaaacacactcaaagttagtttctatttcttcctccctacaatcccagtatgactgaagtccattggaatttagaaccttgctgcttagtgtggtccatggacaggcagcattggtgtcacctgggagcctcttagaaatgcagaatctcagtccctattccccaatcagcattttaataagattcccccaagtaatttatatgcacatttaagtttgacaaatttccaac

SEQ ID NO: 222539 - DNA, 596 bp, Homo sapiens
ttcattttcacaaaaccccattacatattcatttatttattaaaaaatttttttgaacacttgctatatgctagatactgtgttaggtgctagggttacggtgataaacaaaacagttattgtctctgtttctgaagagcttagggtatagtgggagaaatagatgttaaaaaagtaaaaataaatatttaatgatatgataaatgacatagaaggtgtaacagaataataagatctatttcattttattttatttatttattttttgagacagagtctcactctgtcacccagactggaatacattggcatgattttggctcactggaacctccacctcctgggttcaagcgattctcctgcctcagtctctcaagtagctgggattttaggggtgcaccaccacgcctggctaatttttttgtatttttagtaaagacggggtttcaccaagttggccaggctggtcttgaactcctgacctcaagtgatctccccccttggcctcccaaagtacwgggattacaggtgtgagccaccatgcccagcctagaagattcattttagaaagagtggtctgggaaggtttctcttag

SEQ ID NO: 222540 - DNA, 580 bp, Homo sapiens
aggaggcaacctgactatggaggtagagattggtgtgatgcagccacaagccaaagaaaaccaaggagtgttgacagcaaccagaagcygggagaggcaaagagcagattgcccgctacagcctccagagggagcacagccctgcccacactgtgattttggacttctggcctccagaactgtgagagaatatgaatttctgttacgccacctactttatggtatttctatttcagcagcctcaggaaagtaatacattgccccagggtgatttttcctttttagttagaatcgcttgtatagaagttttccagacatcacctctttcccattacatttacctgtttggtgttctattcttcaagaacatgattttgactaatctaacacgataaacctaccagatattcaggggatactaaaagttaacatgtaatctgtctgtggagaccttttattttaacagtgcttttttgagtaccatgtcttaacccaaaggactctgagtgaattttagacactacaggccctcaagtggataaaaattacagaatttccgtggcctttaatgttttctggt

SEQ ID NO: 222541 - DNA, 604 bp, Homo sapiens
tatgaaatgattcttttttatcccgggcaatattctttgctctgaaatctacattattagtattagtatagcgattccaactttattttgattagcattagcatggtacattttttctatccctttagctttaacctatttttgtctatatttaaaaggatttcttttaggcagtatacagttagatattgcttttataatctratctgacaaattatgctttttaattggagtatgtatgtatgtatgtatgtatgtattttgagactgagtctcactccgtcacccaggctggagtgcagtggtatgatcttggcttactgcaacctccgcctcctgggttcaagtgagtctcctgcctcagcatcccaagtagctgggattacaggtgcaccccaccacgcctgactaatttttgtatttttagtagagagagggtttcaccatgttggccaggctgatcttgaactcctgacctcaactgatctgccctccttggcctcctagagtgctgggattacaggcatgagccactacgcctggcctttaattggagtatttagaccatttatatttaatgtgattactgatatagcctggttta

SEQ ID NO: 222542 - DNA, 350 bp, Homo sapiens
atttcacatatattaattttggtaaaagatgatgtattttaattaaacgaaatatcccatataaatatatttttttatttttttccaggaattttgacaagataattaaacawaattgagcatgtatatcatttcactgccttaacagaggctcttctccttccagactaccttctgagaatgttagcaaatctattggtcccacaaatacagttgtgatacaaaccattaacagtgccatctgttggtagcaggcaatgttgatatgctttctttctatggtgcaatttcattcttatctatagacatccctaggttgaaaggagcttctcttctcccagatggttatt

SEQ ID NO: 222543 - DNA, 287 bp, Homo sapiens
tgaaaggtagatttggatccagacatttttacctgggtgggtatggagtatgactacccagctgcaagcacgggaraaaagtatcattcttaatcacatgggcaggacataggagtagctagtactcaaaatgtttcagggatccaagagagggacacaggctaaagaaagaaggaagtgggatagagctggaatagagacttgaactgacaaataagcataacaataggtgaaacttggaaggccagacaagccagcataatttggcacaagggatgtgcatgtaa

SEQ ID NO: 222544 - DNA, 287 bp, Homo sapiens
tgaaaggtagatttggatccagacatttttacctgggtgggtatggagtatgactacccagctgcaagcacgggagaaaagtatcattcttaatcacatgggcaggacataggagtagctagtactcaaaatgtttcagggatccaagagagggacacaggctaaagaaagaaggaagtgggatagagctggaatagagacttgaactgacarataagcataacaataggtgaaacttggaaggccagacaagccagcataatttggcacaagggatgtgcatgtaa

SEQ ID NO: 222545 - DNA, 287 bp, Homo sapiens
tgaaaggtagatttggatccagacatttttacctgggtgggtatggagtatgactacccagctgcaagcacgggagaaaagtatcattcttaatcacatgggcaggacataggagtagctagtactcaaaatgtttcagggatccaagagagggacacaggctaaagaaagaaggaagtgggatagagctggaatagagacttgaactgacaaataagcataacaataggtgaaacttggaaggccagasaagccagcataatttggcacaagggatgtgcatgtaa

SEQ ID NO: 222546 - DNA, 302 bp, Homo sapiens
atctatcagtgattcaatatgcttatatagaactaacaatttttatacggtcttgaatgagaattacatttttagatcttgaaccttaatatcaaaagggctctacaaatgtaagaattagcatatctatatttttctgaagttactgtctctccttttgttatcattgaatcagcttttatttaaacaagcaaaaaaaaaaaatcctcatagaatctgttatccaggaagatcattaaacgttayctaaaactcaaacaatatgggaccccttcttctcctatcagtgaatcgctattagc

SEQ ID NO: 222547 - DNA, 600 bp, Homo sapiens
gaaactctaaagagcaaaatgaaggaggaccactacattggatagtgtggaagagttagtaggcgagctttaaacatcaattttgattgtgcgatggccttttcactcagtaacaaattttccatcatatttcaaatagtttgagttgccattaaagttgcctctggataaacatctttttatcagtatttttttagtggttccayctcttcaatgctgcagcaataagaaaccaaatttcaggacagatagatggggtggaaaaaataactaggctagaagttctcacgaccaacagactcaacccctgatgtaaataaatcactacacatttcttggcctccatttcttcatctggcaaataaggggaaggactagttgatatcttccttaattccttaattcaattagctgtctggcatcatgtagacatcatctaagaacgccgtaggtcttttatcattataagacagctgccaatttaagtgattcaaagagcatatgatgtgttgggttaatttttgtaactttggaaatttacatttcaaaaatgtgttttaatgccttttccccttatcaaagtagaaatgcagtgcaaga

SEQ ID NO: 222548 - DNA, 505 bp, Homo sapiens
ttttatttgtagaatggcctttccttggagccattataaagcatcagtatggcagaagaatcattggaaaataactgccaaccagatttgctatctgtattctaagtaaaagatgctgattagaagtcagatgtagctcaggatgagtaacatcagggattctggaaactttttgagaatttcactgcaaactagaaatgagatgggatgtttaatttgctaactttggagccaagaatttgaagagcatactgtatagartctgatgcactgacttttatgaggaaaatgtagatattattagggtagaaactgttgccttgcaatttaaaaaattacaattgtattcttcacttgtcttgttcagataatattatatagttaaaagttgattgaaaatttatgtatgcccaacattacatttgatgctttttcatctaacttatttgctactaaaaacaatgtgtaatttagatgcactttccttattttaaagagtaacgca

SEQ ID NO: 222549 - DNA, 587 bp, Homo sapiens
agggggccattaagctcttttgtatcctcccagtgagactccctgctgcagtctgcctgccrggtgctgtgggctccctggggaaggctggcaccctagcgagcatcacaggagtctacagaggctgacattttccgtaaaattcctccatttcctagcaagctcagcatactaacagcctttccatttaggctgcctcctggattactttacacaatttgtgtgcatggttgagggagtctaaaacatcttctcagactccataagggtcttggcaaccaaccaatgggtctttccttggtaacattttggcatcagctaccttgctttgctgggaagagttttgtctatacctagcattggagtggtctgcaaaacccctttagactttgagtggcttgtattctcaggatctaactgagaatctggcataccatgtttctataaaatactttaaacatacatcattacataaaggagtataacaagatgattatatatggcatttatcacctcttgctcatatcccagacataatatccaactgaaagtatttattcatccatttgttaactcagtcacccacc

SEQ ID NO: 222550 - DNA, 645 bp, Homo sapiens
atatggctatttaaatgtaaattaattaaaattaaattaaattaaaatttcagttccttttctgtactagccttatttcaaatgctcagtagccacatgtgactagtggctactgtattagcyagtgtgggtatagaaagtttccatcactgtggaaagttctactggacagtgctattatagtgcatcagttatttagaactacaactcactacctgtctttcatttataaaatagtcaaaaactcctatcttccaatcagaacttttttttctttttttgaaacagggtctcattctgctgcccagggtggagtgcagtggtgtaatcacggctcactgcagccttgaagtacccaggctcagtgatcctcccacctcagcctcctgagtagctggaactacaggtgagcgccaccacacctggctaatttttgtatttttttgtagaaacaggattttgtcatgttgcccagtctggtcttgaactcctgggctcaagcaatctgctcacctcagcctcccaaagtgctgggattacaggtgtgagccaccacaccaggccaagaacttagtttttagcaagtcaagtgagatttattgaattttactgttaggcactatggaaaacacaaggacagataaa

SEQ ID NO: 222551 - DNA, 524 bp, Homo sapiens
ttctctgtttcacatcttttaaggcaagtcaacataatttaatttgcctaggatttgccaagaaatatggctgaaaaagagagatgtaacctggttctttatgcaaatatcaggaaaccctgatagctagctatttatcagtcagtcaatctaggagccctaaacaagtaactcaaattagtagtccccaaatttaagacctatgsctaggccttcacgggttaacagcaaaatgaaaaaactaaggacaatataaattttccataaacccaaatttattaaacttaaatgaatgtttatattttttctcctttttactttttgtttttaatacagcctatcttttatgaaattatactaattttttttaactgtttctatttgctaagataaacagcaatcccatgtgatgtccccaaatctcttttgaaatatccttgaaatcctaaactcttggaagcacctattacttttatatatctgttttctcgcctgttagatggagggtattcattcttattcca

SEQ ID NO: 222552 - DNA, 567 bp, Homo sapiens
tcattctgtatcaagattacctgtgctaaaatcctcacttttctacttgtacgttgtatgagcttgaattagtgactttctctttctaggcatcagtttactcctatacaaatgggttattcatttgtacctaccttccgtaactattctggtggttaaattattcatatgaagactgccacaaagattcaataaattagttactattagtactttttaagtactttcatcattcagattttatataaatcccctacttatataaatgtttgctcartattttaaatagtgtatgtttactttaaaatataaatattttattttaataatgtttcttattgtttatgcacgtgcaaagagcacactgcattagtcattgtatggttaacattttaaaaagtcagttttcgtgtttcaaattttgaaactttaactatggttttacacagggttatgctttgagaattttggaatgctggaatgtgtttctttatttaaaatataatgtcatgcctcatgccagagctgcctaagtagcatacattataggttcaaccaataagtatt

SEQ ID NO: 222553 - DNA, 557 bp, Homo sapiens
gctgctttgcattttcactaatataaaaattagtaatttctaaataactgttgaacaatttttacctcttccaactttgttctttcagtttagcacatgacttcaactatcttaaacacagctaaacattacagaaacaatgtttaaattttttagaaaagttaattttgycctgcaaataaaaatatattgtagatgactaaatctaatttaattgtttgaagtctcatcttatttaatcaaaatcaggtaccaaattcctacaagagtggagtttgtcccataatctggatggatggatgtattctaaatttgttcacaagggtatctgagaagatataaatagatcagtgggttaaaaaaaataaccatcattgtctggaaaattgctaaaaatacattcaacaaaacaatgggcaatagcccagtagtttattcttagaagaacggcacatttattttttgtgtaggacataaatgaagggctcaagtaacttccagcttttttaagaagttattgaggaatcaaaataccatagagtagtagttaataagtc

SEQ ID NO: 222554 - DNA, 557 bp, Homo sapiens
gctgctttgcattttcactaatataaaaattagtaatttctaaataactgttgaacaatttttacctcttccaactttgttctttcagtttagcacatgacttcaactatcttaaacacagctaaacattacagaaacaatgtttaaattttttagaaaagttaattttgccctgcaaataaaaatatattgtagatgactaaatctaatttaattgtttgaagtctcatcttatttaatcaaaatcaggtaccaaattcctacaagagtggagtttgtcccataatctggatggatggatgtattctaaatttgttcacaagggtatctgagaagatataaatagatcagtgggttaaaaaaaataaccatcattgtctggaaaattgctaaaaatacattcaacaaaacaatgggcaatagcccartagtttattcttagaagaacggcacatttattttttgtgtaggacataaatgaagggctcaagtaacttccagcttttttaagaagttattgaggaatcaaaataccatagagtagtagttaataagtc

SEQ ID NO: 222555 - DNA, 557 bp, Homo sapiens
gctgctttgcattttcactaatataaaaattagtaatttctaaataactgttgaacaatttttacctcttccaactttgttctttcagtttagcacatgacttcaactatcttaaacacagctaaacattacagaaacaatgtttaaattttttagaaaagttaattttgccctgcaaataaaaatatattgtagatgactaaatctaatttaattgtttgaagtctcatcttatttaatcaaaatcaggtaccaaattcctacaagagtggagtttgtcccataatctggatggatggatgtattctaaatttgttcacaagggtatctgagaagatataaatagatcagtgggttaaaaaaaataaccatcattgtctggaaaattgctaaaaatacattcaacaaaacaatgggcaatagcccagtagtttattcttagaagaacggcacatttattttttgtgtaggacataaatgaagggctcaagtaacttccagctttttyaagaagttattgaggaatcaaaataccatagagtagtagttaataagtc

SEQ ID NO: 222556 - DNA, 609 bp, Homo sapiens
gagtacatatctattgagaaaatattataactaaaacattaggattaaagtgctgtactaagctgcttctgcttctggttcaaacattttgctttttttttaataaaaaaaatatttctttgaaacaaggttttactctgttgcccaggctggagtgcagtggagtgatcgtgactcactgcaggcttgacctccttggctcaagcaatcctcctacttcaacctcccgagtagctgggactatctaggtttttgttttcttttgttttgtttcgtagagatgaggttttactatatygtccaggctggtcttgaactcctgggctcaagctatcctcccacctgggcctcagaaagtgctgggattacaaatgtcagccaccaaccaggccttagtttgctgtttttattgttacttcaaagcactattgttattccaaacaccttcattgtatctattataagaaatgttctaatcaagttgaagcaagctatgattctactccattcaatttcacatttcacaatctcaatgctataagcaccaaaaatgtgctttctgttatttaatctattttagagtgaggtcttcactcttattttatgtgc

SEQ ID NO: 222557 - DNA, 594 bp, Homo sapiens
aaggtcagcacttgatttctcaatgaccttcagggtttttaaaatctaaattgagaacttgaacgacactatatgccaactagccctaacacacatatacagaactctgtacccaacaatagcagaatatacattcttctcaagtgcacatggaatatttaccaggaagacctttttttaagtccataaagtgtttctcagatttaaaaagatcaaaatcatgcaaagattcttctctgatcacaatagaattaagccagaaatcagtaacagaagggaactggaaaagtagcaaatacgtggaaagtaaacaacrtgctcttaaacaaccaatgggttaaggaaaaactcactagggaaattggaagatattgtgaggttaatgaaaatgaaaacacaacataccaagattcatgagatgcagccaaatcagtgctcagaaataaatttacagctgtaagagcctacatttaaaaagaagaaaggtccaggtgtgatggctatgcctgtagtcccaacagtttgggaggccacggtggaacgatcacttgatctcaggagtttgagaccatcctgggaaacattgtgagacct

SEQ ID NO: 222558 - DNA, 594 bp, Homo sapiens
aaggtcagcacttgatttctcaatgaccttcagggtttttaaaatctaaattgagaacttgaacgacactatatgccaactagccctaacacacatatacagaactctgtacccaacaatagcagaatatacattcttctcaagtgcacatggaatatttaccaggaagacctttttttaagtccataaagtgtttctcagatttaaaaagatcaaaatcatgcaaagattcttctctgatcacaatagaattaagccagaaatcagtaacagaagggaactggaaaagtagcaaatacgtggaaagtaaacaacgtgctcttaaacaaccaatgggttaaggaaaaactcactagggaaattggaagataytgtgaggttaatgaaaatgaaaacacaacataccaagattcatgagatgcagccaaatcagtgctcagaaataaatttacagctgtaagagcctacatttaaaaagaagaaaggtccaggtgtgatggctatgcctgtagtcccaacagtttgggaggccacggtggaacgatcacttgatctcaggagtttgagaccatcctgggaaacattgtgagacct

SEQ ID NO: 222559 - DNA, 563 bp, Homo sapiens
tggttatttgggaatagatattagaggaatacctaaacaccagtacacagggaaataggcaaacragtgatgaagactgcaatgtagtttagattctaatgaacctagatttcgtcttgtagctgcaatctttcccactagaaatgaccttttctttctctaatttcccttcgcagattatacgttatttgctatactgctggtgtaaaatcatttgtttgtcttatctattctaaagaatataaacacataaagagagaatctactgattattttctgtgtcatcattatatttaaaccagggctataaatatatagacagtaaaaaattatgtatgtcaaataaacggtgtttcttgcttctgcattatagagataatgctcttgataacttcattaaaatgcatgtgactttaagtgtttcttctaatgaaaataagaaagtttcatctaattgcttcaagatgatgctaccgtcgaagacctaagaaaaatgggagctatgtttcaaaatgcgaacctggggttagtgttaccaagcacactgtcttcctactgaagct

SEQ ID NO: 222560 - DNA, 514 bp, Homo sapiens
atcattacttagtcattgacacttttctttaaataaaagggaggatgtcatcttactccctcaatcctttgtggatggcagtggaaggaaggcaagaaatttaagatggtgagtgtcaccgcaagatgcaggcagggactggcagaagctcatcactcctgcagcctgctatttctttctgaggaccaagtggactccttgaatgtgtgtgcacagagggaagaactctccttcctgctcctctggagtgatacggtgttccttgaagcataggcttttcaaaatttcctggtcattatgacatctatttctactcctctctaccctgcttctcccagtaggtttgtctccaacgtggtttctttcttcttcatatctcttagmagtcttgttggggcaaaagaagtgagggatgattcagctccagatctgaatgtgctggaaacatgggagattagggatattgatccatttgcacagcactgatttttgtcttcacagactactactgcta

SEQ ID NO: 222561 - DNA, 571 bp, Homo sapiens
acacacacacacacacacacacacactcacaatggaggaagaaaatgagtagaatccttcagcagagacaccaaagaaatttagagtattagtaataagccatgttgctaaaatttcctattttcagtgtcagaagctaagtataatctcaatctttgctkgtttattctttatggaacaaatccccattttccatgcagatggttgccttgggtcatgttgggtagagatcatgaacttagacagttaaaagaaaaattcacattcatgattttcaaaatattccccataattttatctgtctctattattatttttcataattggatttctggtcataggtgtggatgataatctgcagaatggagacagtcacacatgatttaaattcaggtctattcagtttgccttgtaactctcagaaaaggctttgtgcagcttctctctgtgacccacttttcacccacacgaggaatccagttttctgcaggtgctagtgtgtcagtgcgtaaagttcagttgagctgatgagtaaccaagctgactttggtgttcctgggcagctgggagc

SEQ ID NO: 222562 - DNA, 462 bp, Homo sapiens
aatattgtggagtggaattgctagatcatggggaatattaacgtgctgtgtcagtagatattgccaaaatgttcccaaagtgtctatctatacacactcccaaaagcaatgtatgaaagtgcctgttgctctacattcttctcaaagtatggtattataaatcttttcgattttagtctttctggtgatgtatgttggtatttcattgtgattttaactgcatttccctgatggctactgaggttgaatgataccgtatctatttaactatctatctatctctctctctctccagaaaaataagatgtccaaatataaatgtataacatatgcatgtgtgtatatatatatatatatatatatgtatatatatatatatatatatayacacacacacgtatatataatttggacatatttttcatgcatctgatcaattctcttgctcatttcaaaagtttg

SEQ ID NO: 222563 - DNA, 601 bp, Homo sapiens
cttgtcttggcaattttggaacatgtggcatcttctttcttggctccaataaattgcagtgtttgctgctcatcttctttaacaggagttcgtaccctattatgaaaatggacatctgaatataataggcagtctaagcccctgaagatatcttggtttgaagacagaaagaaacttacaaatgaggcaataaaaaataaattgcacaacgttgcatttactaactaagcaagataatagagtgtgaaaaccgaaggggctgagcaagcaagcttctgcccccttcacagctgagctttmatgtgacccgcatgctaatcctgtcatgtgtaagatgcattattgagatgacattcattattggcattaggtattcagtttgtttgaaatttttcattactaaccttcgcttttccaaagccgataactcagtggcaaaaatttataccttctgttattcttaaagggccaaatttggcataaaattctagtgcttaaaatgcaattttatttcaggggaaaattgggcttcattggagtgagactctattaaatattacagagggttactagctagcctaactgttaaatctgaggataa

SEQ ID NO: 222564 - DNA, 578 bp, Homo sapiens
caactcattgttcaaatgaagcaacaaagaagatgcccataccattattagttctgactgcaactgacacctggggaccttgtttcaagagatttgaaaatgtacatttatctatgaaaaaaatcattaaagtcattgggggaaaaacttgataattacaatgaaaactgaaatttaaagttgattttatagagatgtgtgctgttttagcatggatataaatgtaaaggctgtgcgactttgttgtttgagcccagctgttcatttggggtcaaatgtctctagggtcataaggaaggattatctcttagtaccctttctgtyttcagattcgtaatcttagggtttaagtgctgctttcttcatgcatataattaagctcacttactagacttcaaattaattgagatggaaagagtaactctaagagatttttcatgtgttaggtccttcagggattaaaagggtaactatctcaaattcggatgctgttaaagttactgggacattggtctttgaatcaaaggaggaagttagaacattacttatttaatggaaattatgtcatttccaaaaat

SEQ ID NO: 222565 - DNA, 452 bp, Homo sapiens
ccagttgtattttcttctatataaatatccaattgacccaacatcatttattaaaaaggtcaccttttctccactctctacagagaacacttttcatacatatgaaagctgaagcagttttcttctaaagactgtaactggtagggaaarttacctctcatccttggtcagtctgttgtaaacatctgggttactatatcagagaagattttgaggtcacatgtgggctccatgcaagagtaccatgattgataagcagtaccttccattgtctcattagaaaatgaagaaggaagcagcaactattttatatctttggactaaacaataacaagaagaagaaataaaatagcatgaagaaagagagataaattacattttggaagccatcatatcctaaattttattcttttctaattcccaacttcctgactgttctgtagttcatattt

SEQ ID NO: 222566 - DNA, 552 bp, Homo sapiens
aattagtatttccattttaaaagtgaataatttgagtgtggaagagtttaagtaacataagaatgactctgagttagaatacctttctgaattcttctttgtttgttttgtcttattcacattgtgttattgttagatgagtgattgtgaataactggtacctttaagagcaacactctccactggaagaaagatgtcacatgttccaaagacccaytaaagatgctcaagggaccaagaagagggttcgacttagtaaagccactccagtacttcactcttgcttatatctctaaatgtggctgcctcttctggctcatgtgtatagacttagataaataattagaaaagtaactattatttttagaggaattaccacaaccagggtctgtactaagcacctaaaattagatgtttttatttaattttcacaacttaaagacaggtacaatgatcacattttgcagatgaatacactgaatctcagggtgactaaatgttttcatcaaagtcacaaaggtgattaatgacacagccagaatttgaacctag

SEQ ID NO: 222567 - DNA, 419 bp, Homo sapiens
ctaatgttagtaattaaggggtcaccttgggtcttctttttcaagttgcattatcttgtagagatattttcgcaagtggttattctagtggaataatcctccagggctctgccgcttgagaagtaagtcctgtgctttttcatatatgattcagagagaatattacatgctactcatcttctggtggaagagaaagaaataagtgatcacaaagccctttggtttgcaaagaaaacatttgaatttacaatgttatatttctttgtatcccaatgacttcaaagtaaataaaaagtaaatcaatgtcactggatccatgaaatayatgtatctggacatgggatctatttctgccacatagtgatattaggaaaaacacttgccatatgttcatactatgaaaaattaatccaagatct

SEQ ID NO: 222568 - DNA, 519 bp, Homo sapiens
tatgcagtaaggacactgacacatgttcagaaagtcatgcaaatatccctttgctgaaaatatgtccaacaccctgaggcataggagagggtgaaaatgaaatttggaagagttaggagttcatgcaccatagcatgaaaggaaaaggatgcagggacccaaggctttttaagtgtaactagtctgcctgctccttctccatrtacctactgaaatctcctgctttttatccagaagtgtgtatgactgagattctggttttggaacaaggtgaggacaggcaagatggtggtcttatttaattattcaatagagctgacattacaagacttgatcacctggaaagcaaaaagatgcatctgaaggcaggtcagctttttctttgtcttttctcaggattaatctaaaacaattatgatccacaacagatacagaaagttcttttctaaggccagtggtagagaaagcaacttatttgaggggctttggtcatcgtgttggctcctgaatcccttcagg

SEQ ID NO: 222569 - DNA, 519 bp, Homo sapiens
tatgcagtaaggacactgacacatgttcagaaagtcatgcaaatatccctttgctgaaaatatgtccaacaccctgaggcataggagagggtgaaaatgaaatttggaagagttaggagttcatgcaccatagcatgaaaggaaaaggatgcagggacccaaggctttttaagtgtaactagtctgcctgctccttctccatatacctactgaaatctcctgctttttatccagaagtgtgtatgactgagattctggttttggaacaagrtgaggacaggcaagatggtggtcttatttaattattcaatagagctgacattacaagacttgatcacctggaaagcaaaaagatgcatctgaaggcaggtcagctttttctttgtcttttctcaggattaatctaaaacaattatgatccacaacagatacagaaagttcttttctaaggccagtggtagagaaagcaacttatttgaggggctttggtcatcgtgttggctcctgaatcccttcagg

SEQ ID NO: 222570 - DNA, 352 bp, Homo sapiens
ttgtttttttccttatcccatccctttcctttcttccttcctcagaattaatcactgttctgaacctgtttatctttatgttttttccatacatatttgtattcctgaatgaaattttatttttartattgatcactttataaaacggatgttatctgtcaatttagaaagataaatacaaaataattgtattagttcattctcacactgctataaagaactacgtgagactgggtagtttataaagaaaagagatttaattgactcacaattccacagggtgtacaggaggcatggctgaggaggcctcaggaaacttacattcatggcggaaagactaaggggaagcaag

SEQ ID NO: 222571 - DNA, 560 bp, Homo sapiens
ggcacagtcttcacatggcagcaggagagagagagagagagagaagtgggaagtgmtagacacttttaaaccatcagatcttgtgagaactcactcactatcataagaacagcaaggggaaaatccacctccatgatccagtcacctcccaccaggtgtctgccttaacactgggaattacaattcaacatgagatttgggtgaggacacagagccaagccatatcaataataaaatttacttttatccactttaaaataataaaaatacatttacaaaactaaattatggttttgataggtttcatatgtatttatatcttctgagatttatttacattgttgaaaatagctgggatttattaattttcagtgcagtataatgttcaatttgtttccacttaaagttgatggatatgtaggttactttctatcacagaatatatataacataattttataatgttacattacttttttgttcatgtctgctggtacacatatgtgcaacaggaagtgatatgtcatacatttccaacattactagagtatgccaaattt

SEQ ID NO: 222572 - DNA, 519 bp, Homo sapiens
tctactttttaaccatcccctctttatccctccctccccactacccttcccagtctctggtaatcatcattctactgtctrtataaatgagttcaattttattttttagctcctacattttagtgagaacatgcactatttgtctttttgtgcctggcttatttcacttaacataatgtcctccagttccatctatggtgttgcaaataacaggatttcattcttttcattgctgagtaatattctattttatgtatctatctcattttctttaaccattcatctgttgatggacacttaggttgctttgatttcttggctattgtgaatagtgctgcaataaacatgagggttcagatattgctttgacatactgatttcctttcttttggataaacatctagcagtagggttgctggatgataggtgatatagttagactttgtgaccacacccaaatctcatcttgaattataatccccataatccccatagtccccatgtgtcaagggagagacc

SEQ ID NO: 222573 - DNA, 519 bp, Homo sapiens
tctactttttaaccatcccctctttatccctccctccccactacccttcccagtctctggtaatcatcattctactgtctatataaatgagttcaattttattttttagctcctacattttagtgagaacatgcactatttgtctttttgtgcctggcttatttcacttaacataatgtcctccagttccatctatggtgttgcaaataacaggatttcattcttttcattgctgagtaatattctattttatgtatctatctcattttctttaaccatycatctgttgatggacacttaggttgctttgatttcttggctattgtgaatagtgctgcaataaacatgagggttcagatattgctttgacatactgatttcctttcttttggataaacatctagcagtagggttgctggatgataggtgatatagttagactttgtgaccacacccaaatctcatcttgaattataatccccataatccccatagtccccatgtgtcaagggagagacc

SEQ ID NO: 222574 - DNA, 573 bp, Homo sapiens
ttttgggttgagttgcctatctgtctraaagcattaggaacttcattgctgtggaaaatgaaatgctgacattctggcatacagcagcatcctgaattagctattgctgtcgtgacaaattaccataatcttagtggcttaaaacaacacaaggcattaattatttttttttaaattaaatttaaaaaatttttttgagatggagtctcacactgttgcccaggctggagtgtagtggtgtgatcttggctcactgcagcctctgccttctgggttcaagcaattctcctgcctcagcctcccaagtagctgggactacaggcacctgccaccatgcccatctaatttttatatttttagtagagaaagaattttcaccatgttagccaagctggtctcgaactactgacctcaagtgatgcacccacctcagcctcttaaagtgctggggttacagatgtgagcctggcctaatttattatcttaaaatttgtagggtggaagtctgatagaggtctcactgggctaaagtcaaagtgtcagtaaggctgtgttcttttccagaggctccaa

SEQ ID NO: 222575 - DNA, 578 bp, Homo sapiens
ctggattttgggttgagttgcctatctgtctgaaagcattaggaacttcattgctgtggaaaatgaaatgctgacattctggcatacagcagcatcctgaattagctattgctgtcgtgacaaattaccataatcttagtggcttaaaacaacacaaggcattaattatttttttttaaattaaatttaaaaaatttttttgagatggagtctcacactgttgcccaggctggagtgtagtgktgtgatcttggctcactgcagcctctgccttctgggttcaagcaattctcctgcctcagcctcccaagtagctgggactacaggcacctgccaccatgcccatctaatttttatatttttagtagagaaagaattttcaccatgttagccaagctggtctcgaactactgacctcaagtgatgcacccacctcagcctcttaaagtgctggggttacagatgtgagcctggcctaatttattatcttaaaatttgtagggtggaagtctgatagaggtctcactgggctaaagtcaaagtgtcagtaaggctgtgttcttttccagaggctccaa

SEQ ID NO: 222576 - DNA, 353 bp, Homo sapiens
ggcgaaagggcgggtggggcatgagggttaaaggactatgcattgggtacagtgtacactgaccatgtgatgagtgcaccaaaatttcagaaatcaccactaaagaacttattcatgtaaccaaaaccagctgctccccaawaataatgaaaatgtttgaaatattgagagaattactaaaatgtaacacagaaacatgaagtgagcacatgctgttgggaaaatggcaccaatagatttgctggatatagggttgccacaaaccttcagtctgtaagaatacgatatctgcacagcacaataaagtgaagtgcataaaacgaggtgtgccagtataagcagtcgagacctca

SEQ ID NO: 222577 - DNA, 455 bp, Homo sapiens
gcagtgatgagaaccagttactaatggcatacatcacacatttcaggtattttgggcattagcacactaaatcttaacgttggctgtagattagaatcacctgaaaagcttttamgacttatcaatgctggccaggcatggtggctcatgcctgtaatcccagcactttgggaggcccaaggtgggtggattgcttgagcctcggacttcaagaccagcctgggcaacatggcaaaacgctttctctaaaaaagaaaaaaagaaaagaaaagaaaagtaaaaaagagacttagtgctgggcatccctgaattaaatcagaatctctgagggtgaggccttggcaatgacatttttaaaaagctctccaagtgattctaatgtgcagctgggattaaaatttgtggtttcagagatgtaaccaggaaaatcctcgtttaactttaatgaagtttgc

SEQ ID NO: 222578 - DNA, 447 bp, Homo sapiens
aaggagcatttcaattttaataaartttgtttataattgcaccataatcacatactatttatggaaaaattaatgaaagaggtataagacctccacactgaaaacaaggcatttggattcccaaagaacaacattgaaggacttaatgctacttgatttcaagccttcctatgataccattaccaatcaaacagtgtgttgtaggcatatgaatagacaaatagatcattgaaacagaatagagtccaaaaatagatccacacatgtacggttaactaattttgacaaaggcactaaggccattcaatagagaaaagatagccttttcaataaatggtgccgtaacagtttatacccatgtaggaaaaaaaaaaaaagctttgatcccttaaccacacaccataattaactaaaaatcaatcataaacttaaatgtaaaaagctaag

SEQ ID NO: 222579 - DNA, 520 bp, Homo sapiens
gagccactgttgatcaacacacacacacacacacacacacacacacacacacacacacactcacgagccatgttcagcatttgggacctgagctaagcttctcctgttaggaaattgctcagtacataaaattgtaattcttggacagcactcattttcttaatgttaaattttactttaattgcccaattcataaatatctcttccttgaagtcacatgaaagaataatcattcaaaggttattgaaaaaccctttccagcaaaatggccacaggtagccacattttaatcaaaattytccacaaacatagtcattagaaaggcaaaggaagtaaattagtattgataattccttgacatttggtgcaaggtgctgaacagtgaacatgtcaagggtattttataacttgaatttgtgttgcttttggtcaaaaactcttggaattgcttcttttcatctcaaagcagagcatgaaatttcaggctggcatgaagaaatagcatctcccaaaaggccta

SEQ ID NO: 222580 - DNA, 542 bp, Homo sapiens
agatctatacactaaaaactataaaacactgatggaggaaactgaagacacaaataaatggaaagatatccatgtccatgggttggaagaattaatatcagtaaagggtccccactacccaaagcaatctacagattcaatggaatccctatcaaaattccaatggcatttttcacagaaatactttttatcctaaaatttatatggaaccacaaaagatgccagatagccaaagcaatcttaacaaagaaaaataaagctaaaggcatcaaagtctctgatttcaaactatattgcaaagctatggtaatcaaaacagtatggtattgacataaaaccrtacacataagtcaatgaaacacaataggaatcccagaaataagcttacacatatatggtcaactaatctttgacaagggtgtgaagaatacacaatgaagaaagaaaaatctctttgataaatggtgttgggaaaactggatatccacaggcaaaagagtgaagtcggacttgtgttttataccacatacaaaagttaactt

SEQ ID NO: 222581 - DNA, 542 bp, Homo sapiens
agatctatacactaaaaactataaaacactgatggaggaaactgaagacacaaataaatggaaagatatccatgtccatgggttggaagaattaatatcagtaaagggtccccactacccaaagcaatctacagattcaatggaatccctatcaaaattccaatggcatttttcacagaaatactttttatcctaaaatttatatggaaccacaaaagatgccagatagccaaagcaatcttaacaaagaaaaataaagctaaaggcatcaaagtctctgatttcaaactatattgcaaagctatggtaatcaaaacagtatggtattgacataaaaccgtayacataagtcaatgaaacacaataggaatcccagaaataagcttacacatatatggtcaactaatctttgacaagggtgtgaagaatacacaatgaagaaagaaaaatctctttgataaatggtgttgggaaaactggatatccacaggcaaaagagtgaagtcggacttgtgttttataccacatacaaaagttaactt

SEQ ID NO: 222582 - DNA, 323 bp, Homo sapiens
tcattcttaaatttgtaatatttttattcatttgccaactggccacttaggtgtaatcatgtaattatctaactttttacttytagttttcactcctttaagtctttttctaaagcacgttaggaaaaaggagaaggcatggtatctatttaagtcactttgtagatttactttcaaaagagaatgttaaattactaagtttaagattagcaattctaatgcagtttagaatttaatatatcttttatttacctgggtacctctgtgttccaccatatttgaaagttgtgtataaaacttttcactgggagaagttcttgcta

SEQ ID NO: 222583 - DNA, 432 bp, Homo sapiens
gtaattatctaactttttacttctagttttcactcctttaagtctttttctaaagcaygttaggaaaaaggagaaggcatggtatctatttaagtcactttgtagatttactttcaaaagagaatgttaaattactaagtttaagattagcaattctaatgcagtttagaatttaatatatcttttatttacctgggtacctctgtgttccaccatatttgaaagttgtgtataaaacttttcactgggagaagttcttgctattaagggagacgttcttgctattgaagaagttgttctttttactaatcatttcatagcacatgtaagtatttaccttgtattaagaactgtgctaaggagtggagatttgtatgaagatgaatgcattgccctggcccagaggagctcacagtccatttgaagtcacag

SEQ ID NO: 222584 - DNA, 436 bp, Homo sapiens
agatctaagcagatgagcatattacgttctcggtaaacatagaagaggttgtttctgattgaagagtttttggaaggctttgtggagaaggttgtatctttgtggaaggataggtaggattttaacaggtagatatgggagttgggagcagcacacataccttaggaagaggatatggaggcagtgatcacagaggagaacataagctatttggggagtaaaggatgtcctggtgtgattgaatctctgattgtgtaagacgtatgggtgtgggatttgaggaggagctaagaagtcgtggggatttgaagtttatttataggagtctcytgaaatatctctataggacatacagagccacccgtggttgagagtagggaagtcacatgatgagaaagaagcactgtctcggtcagtttgctttgacaagagtgtg

SEQ ID NO: 222585 - DNA, 350 bp, Homo sapiens
agaaatagaaaccatagtaaaagaaccaaataaaacttctggatcttaatcgtacaatacataagttgaacacttcactgaataagcttagcagtagattaaattagacactgcagaatgaaaaataaaaagaagacatagtaatggaaactatccaaactgaagcacaaagagaaagaaggttgaacaaaaaaatgaagacagcctcagttacctatgagacaatatcaagcagtcttacatgcattataagttgctttggagttgtaaatagagaaaggaayggaaaaagtggttgaataaataaaggcagcacattttccaaacatcaagatccaagaagcacaacc

SEQ ID NO: 222586 - DNA, 194 bp, Homo sapiens
gagatctcatgtgcagcgggcacggtgctgggggtttggtctcaaggctaaggaggtggaggagattgggcttccaaggaacaggtgaataaatagattcattgagttgtggtggttctatttcctcttcccaccaaaaccacatgcgggaaacatakttcctcaaagtctgtggtgtgggttttaagtttttt

SEQ ID NO: 222587 - DNA, 194 bp, Homo sapiens
gagatctcatgtgcagcgggcacggtgctgggggtttggtctcaaggctaaggaggtggaggagattgggcttccaaggaacaggtgaataaatagattcattgagttgtggtggttctatttcctcttcccaccaaaaccacatgcgggaaacatagktcctcaaagtctgtggtgtgggttttaagtttttt

SEQ ID NO: 222588 - DNA, 532 bp, Homo sapiens
tagtacgttacacccggaagtaaagagacgcatacaccgttgggtgcactttatagtctggctggcaaacragcgacaccgacgcgcagagttaagtgctgggacttcccaagcctggaaagcagaccgtgtctctgcaactacgcggctgccacgagcgctgagcggccgggcatttggcctcgaggaggaggcactgtaagggcggcgcaagagggcggaacgcgggacgccaggcaccctagctcccgacggacgcagttttcagttgcacgggcgagctccgggccggctgcggagcgactccccgccgccaagtgggcggcgtggctgtcgggaaagaagggctggggcctgccgttcttcctcccgagtatcccctccagctggacgaccccacgctgcagcacgggcttccggcttctctcctcagtggccaattcgagggcacagcgggctccggaggcgcggcggcaagcctatcccgcctcccaaccacagcctccagcacccgagagaacggccgcccaca

SEQ ID NO: 222589 - DNA, 484 bp, Homo sapiens
ggtcactgcaaacactgtatctgaatggggcagcaagaaacagcacacatattgtgagtatctcctctgctcacactatcctccattgccctattggactttgcttacaaaacactagttcaaaggtaaaattattaagaatttcaggccaggcatggtggctcacgcctgtaatcccagcattttgggaggccaaggcaggtggatcacttgaggtcaagagttcaagaccagcctggccaacatggtgaaacttgtctctactaaaaatacaaaaaattagctggtgtggtggtgggcacctgtaatcccagctacayggctgaggcaggagaattgcttgaacctgggaggtggaggttgcagtgagcctagattgtgccattgcactccagactggacaacaagagcaaaactccgcctcaaaaaaaaaaaaaaaaaaaaagaatttcaaacagtgacagcagaatattaaaccaagtgt

SEQ ID NO: 222590 - DNA, 431 bp, Homo sapiens
tcatacaattttttattattttaaaaatctaataactttaccaagaagtgtttagggaggtacttagtgtgtgagctaggatattagcttaggtttagacctttcaactgggaacatttggttaccagcaactttccctctgggagcaagaggtcagctgacttcatgagataattttcaagatcacactaagatgatctgggctttatttattttcagcagcagctgcttagctaactgttacccatcttttgttcctccatcttcacgcatggatagttagtaaaatgcgtaaagagaaatagctgcacaaaacrgaaatgatggcaggaaaattccttcacccaaggatttgaacatttatactgatcttggactataggaccgtcaacgagtcaggggaaattcttcggtaacaaagtgcttttgaa

SEQ ID NO: 222591 - DNA, 591 bp, Homo sapiens
tcaaattgggctctcaatttgcatttaagggattgacaaaactaggtgtattacaaagcttcgcatgttggctgagttgtaaggactcaaaaacaataaatgggttcctaacatgaatttaccgtaagacccagaaacttctcctctttggttaataaccaaacaaagcaaaatgaggtattcaaactaatccctctacwtgaataattatagcagcactgttcacaatagccaaagggggaaaacaacgcaaatgtccatcatcaactgataaatgaaaaaacaaataatgaatttcatacaatatcatgttgtatagcgatgaaaagaaatgaagtactgatacatgctacactatgaatcttcaaaatattgtgctaaaggaaaaaagccagacacaagaggtcccatattgtatgtttttatttatatgaaatttccagaataggcaaatctgtagagacagacacagaaagcaggttgatggttgtcaggggctgaaagaaatggctgcttactgtgaacagagtctatttagggttgttaaacaattgttagaactagataaaagtggtggtcatacagaattgt

SEQ ID NO: 222592 - DNA, 591 bp, Homo sapiens
tcaaattgggctctcaatttgcatttaagggattgacaaaactaggtgtattacaaagcttcgcatgttggctgagttgtaaggactcaaaaacaataaatgggttcctaacatgaatttaccgtaagacccagaaacttctcctctttggttaataaccaaacaaagcaaaatgaggtattcaaactaatccctctacttgaataattatagcagcactgttcacaatagccaaagggggaaaacaacgcaaatgtccatcatcaactgataaatgaaaaaacaaataatgaatttcatacaatatcatgttgtatagcgatgaaaagaaatgaagtactgatacatgctacactatgaatcttcaaaatattgtgctaaaggaaaaaagccagacacaagaggtcccatattgtatgtttttatttatatgaaatttmcagaataggcaaatctgtagagacagacacagaaagcaggttgatggttgtcaggggctgaaagaaatggctgcttactgtgaacagagtctatttagggttgttaaacaattgttagaactagataaaagtggtggtcatacagaattgt

SEQ ID NO: 222593 - DNA, 591 bp, Homo sapiens
tcaaattgggctctcaatttgcatttaagggattgacaaaactaggtgtattacaaagcttcgcatgttggctgagttgtaaggactcaaaaacaataaatgggttcctaacatgaatttaccgtaagacccagaaacttctcctctttggttaataaccaaacaaagcaaaatgaggtattcaaactaatccctctacttgaataattatagcagcactgttcacaatagccaaagggggaaaacaacgcaaatgtccatcatcaactgataaatgaaaaaacaaataatgaatttcatacaatatcatgttgtatagcgatgaaaagaaatgaagtactgatacatgctacactatgaatcttcaaaatattgtgctaaaggaaaaaagccagacacaagaggtcccatattgtatgtttttatttatatgaaatttcmagaataggcaaatctgtagagacagacacagaaagcaggttgatggttgtcaggggctgaaagaaatggctgcttactgtgaacagagtctatttagggttgttaaacaattgttagaactagataaaagtggtggtcatacagaattgt

SEQ ID NO: 222594 - DNA, 583 bp, Homo sapiens
tgttagctctgtcttataaataaatataattttattgctcaatgctttttgaagtgtgaaaggggccattgaggtcatatttaaatgcctataagagggttttacatctgcaatctccaaagagacattgataatgggaccataaaagaatacttgtgaagctagtccttagtgccactgactttttgcagtagttgtgagcatggttytatgaaggatttgatatatgttgttgcttaagtagaagggtccatgtttcacttggaattaattcagccctttctcttacagaggagcctctgcttctgttctgctctaatgacagcattctcattagaaagcccagaggggttctttaaaaatgtaaatgagatcacattactaggactaccctcaaaaccctccagacttcccatttattggacagaaaagtttaaaattcttacagtggcttgcaaagccttttgcctctgaccttatcttctattgctctgtgttccagagattttggcctctatgctattgattgtgtatactaaacatgctcccatctcaaggttgtcacatttgctgtttctactgc

SEQ ID NO: 222595 - DNA, 583 bp, Homo sapiens
tgttagctctgtcttataaataaatataattttattgctcaatgctttttgaagtgtgaaaggggccattgaggtcatatttaaatgcctataagagggttttacatctgcaatctccaaagagacattgataatgggaccataaaagaatacttgtgaagctagtccttagtgccactgactttttgcagtagttgtgagcatggttctatgaaggatttgatatatgttgttgcttaagtagaagggtccatgtttcacttggaattaattcagccctttctcttacagaggagcctctgcttctgttctgctctaatgacagcattctcattagaaagcccagaggggttctttaaaaatgtaaatgagatcacattactaggactaccctcaaaaccctccagacttcccatttattggacagaaaagtttaaaattcttacagtggcttgcaaagccttttgcctctgacctyatcttctattgctctgtgttccagagattttggcctctatgctattgattgtgtatactaaacatgctcccatctcaaggttgtcacatttgctgtttctactgc

SEQ ID NO: 222596 - DNA, 605 bp, Homo sapiens
tataacataaatagaatgagaaaaaaatagctccacagaagaaatgtccacagaaagacatttaatttagcattcatacctgatgttactaacattgagcccttagaatatgttggccrccgtagtaaacattttacatttgttacctcatttaatccttacaataactctataagataaggcacctatcagctttcttttatttcaaatgaagaaaaggctcaggagtttgagtcacctgaaagttcaactaggaaatgcagaatttctccataggacatactcttagccacagtgcaagtttaccataacctaagagccaacattattttcattggaataaaagacaagaaataatatgcactgtcatcaggattatttaatactagtctgagtgtattgctcagacaataagaaaagaatcagtaatttacctatttgaaaattgatgacaaaataatcgttattttaaggtgctatgattagaaaaatagaaaatgcaaaagaggcaactacaaaatactgcaagtaatagaagtaaactggatgattataaactaaatatacaaaatcaataatttccttataaatgagacattacaggt

SEQ ID NO: 222597 - DNA, 513 bp, Homo sapiens
gggaggagggatgtcacaaggtcagagcaggatcaagagagaaggggggatgtaccacatacttttaaacaactagatcttgtgtaaactcactcatcaccaaggaaatgttggtaggccattcatgagggatgtgctcccatgatccacacacctctcaccaggccccaacaccaatactgaggattacatctcaacatgagatttagagaagacacccaaactatatcaactgtcatacagattagaaagttatagtccyattaaagtgtcttgttgatttgggaaattgatgtgacaagtgagaaagttaggatagaacatgattgtgtcaaaatttaacagtgatttccttctaatacaattatataaacatcattttaaatatatttttaagttttctacaatgcatatatttcttttctgtttaaaataaactttactgagctatgatttgtatagcataaaatgcagtcattttaagtgtacaatttgatttatattgacaaatgt

SEQ ID NO: 222598 - DNA, 646 bp, Homo sapiens
caccttctgggtggacataactttgaaggggatactcttaaattcagtacacaccatatggatgaaccacaatttatttcttcattggtcagttatttccattttctggcttttacagtaagtgtgctatttgtgtaaacactcttgagraataatgtgtttttttttctttccaacatttattttaggtttgggagtacatgtgaaggtttggcgtatagatcattttatcatctggataataatcctagtacccagtaggtggattttcaatcctcaccctcctcataccctccaccttcaagtaggctgtggtatttactgttccatgttttgtgttcccgtgtactcattgtgtaactcctacctataagtgagaatatgtggtatttggtttctttttctgcattaattcatttaggataatggcctccagctccatccatgttgctgcaaaagacacaattttcttctttattatggctgcatagtatcccatggtgtacatgtaccatattctctttatccagtctgccactgatgggcatctatgttgatttcccattgtgaatagtgctgtgaagaacatatgagtgcacgtgtctttacgttagaactatttatattccattgggtatatacccag

SEQ ID NO: 222599 - DNA, 646 bp, Homo sapiens
caccttctgggtggacataactttgaaggggatactcttaaattcagtacacaccatatggatgaaccacaatttatttcttcattggtcagttatttccattttctggcttttacagtaagtgtgctatttgtgtaaacactcttgaggaataatgtgtttttttttctttccaacatttattttaggtttgggagtacatgtgaaggtttggcgtatagatcattttatcatctggataataatcctagtacccagtaggtggattttcaatcctcaccctcctcataccctccaccttcaagtaggctgtggtatttactgttccatgttttgtgttcccgtgtactcattgtgtaactcctacctataagtgagaatatgtggtatttggtttctttttctgcattaattcatttaggataatrgcctccagctccatccatgttgctgcaaaagacacaattttcttctttattatggctgcatagtatcccatggtgtacatgtaccatattctctttatccagtctgccactgatgggcatctatgttgatttcccattgtgaatagtgctgtgaagaacatatgagtgcacgtgtctttacgttagaactatttatattccattgggtatatacccag

SEQ ID NO: 222600 - DNA, 553 bp, Homo sapiens
ggtggaaacaattcagagctaaaaaaaaaaaaagcaacctggtatcttcgagatggaagacatagggaatttaaattcagacatatgtaacatggaaaaaagggactagctagattttacttgagaagcaaatgttttggtccatatgatccagattcatatgtctttgcaaacttggcctaactgcaccatgctccatcagatgaatttttaaagacccaaagttccccagtgaaatcacaatgtatctttaatttgaagttgttttcaaactcataaactcaaagtgttcaaaggccaactaaaatgagttcagattcctaattttctttattaacagcaaatactaaaatactgaaataaagcatttaatgtaaattcrcatagctgtagcagtataacacactattttaacttgcttctgtcaaacactcctgttagtcaaagctaaaaataaaaagcatccttccaaatgattcatcaggttatttcctaatcaatagtacataatcctgacaaaattacattgactaatagtttaataacatctgca

SEQ ID NO: 222601 - DNA, 460 bp, Homo sapiens
agtgaccttcaactaagtcacttaacctccttaaacctagaatttcccattaataaaacagaggggatagttcttttcctacagggtaatgataaaaattatgtaaataatgtatgaaaacatcttgtgtrtatctatttccttatgatagttataggctgatgtagaaagtcaaacccacgggcatcttgataatttgttagaaagccactccctaatgggacaatgtgcctagacaaaagagtttggaagtaaggtagagatgctaattagctgtcaactgattttgaactgatcaacataacaaagcttaaatagactctattgctattatcagtgcctgttaattcactcagagtatatgagcaaactataaacctgcaaaggattacagaggatgcttagcgcagtgaagccctgtactgaatgaacaaataagcccccagggaagcttttaaaa

SEQ ID NO: 222602 - DNA, 461 bp, Homo sapiens
ctgtttcttcatttactgagtgaccttcaactaagtcacttaacctccttaaacctagaatttcccattaataaaacagaggggatagttcttttcctacagggtaatgataaaaattatgtaaataatgtatgaaaacatcttgtgtatatctatytccttatgatagttataggctgatgtagaaagtcaaacccacgggcatcttgataatttgttagaaagccactccctaatgggacaatgtgcctagacaaaagagtttggaagtaaggtagagatgctaattagctgtcaactgattttgaactgatcaacataacaaagcttaaatagactctattgctattatcagtgcctgttaattcactcagagtatatgagcaaactataaacctgcaaaggattacagaggatgcttagcgcagtgaagccctgtactgaatgaacaaataagcccc

SEQ ID NO: 222603 - DNA, 464 bp, Homo sapiens
atcctgtttcttcatttactgagtgaccttcaactaagtcacttaacctccttaaacctagaatttcccattaataaaacagaggggatagttcttttcctacagggtaatgataaaaattatgtaaataatgtatgaaaacatcttgtgtatatctatttccttatgatagttataggctgatgtagaaagtcaaacccacgggcatcttgataatttgttagaaagccactccctaatgggacaatgtgmctagacaaaagagtttggaagtaaggtagagatgctaattagctgtcaactgattttgaactgatcaacataacaaagcttaaatagactctattgctattatcagtgcctgttaattcactcagagtatatgagcaaactataaacctgcaaaggattacagaggatgcttagcgcagtgaagccctgtactgaatgaacaaataagcccc

SEQ ID NO: 222604 - DNA, 574 bp, Homo sapiens
tgtggaataagtcctactcaaaagccaggctgtggaagaagaatcatgaggtgtttagggaggcccagtcacctgctggtgtgtgtcggaggaggaagttagtccagtcattgtcaggtaacccaatacaaataccacctctggatattagagctcgaagttgaccaaaggccatgggttcaagcccctgaattagctcggagactggagaggttatgtctcttgacggagacaggagaarctctttatgttaacattctcctcaaggtttgactcaccagttcaaaatatgacttctctgaggccctcacagttcctacagcccacagcaaccccttcttccccttcttatctttgataagataaccatcttatcaaaggtcctaagagtcagagatggggtatgatttggagttctcccatgaggagcattgctgatttgctgtgggtctcaggattcttcctgcaaatgtagattgtgtacacatcagagtatattacctttgactgagcaggtaatataggggcggcagttttctcggtgttttatatacaccctcatttaattcttatc

SEQ ID NO: 222605 - DNA, 574 bp, Homo sapiens
aatgctcagttctattactaaccgtgtcctaaaattcacgctagataatagtaattctcaaaggcatttcctcctaatattttccatatttgccaaagcaagagttagaaaggtgaacactatttaaaagkttaaaaaccatctatacctacgtatcaaactaaaggcaagaaatatttttattatgtcatatctttaagtgtaatttaattgctgtatttatttcagtgtaaaggaatcaattaaaaatgaaactatttcatatgataaaaagtaatttgttttacttcaacatttaaaaccatgctttacaagggtgcattattaatacaataatattttaatatgagcaatttttgtaattgcatctaaacttcatatctacattttacttagtatctttttttctgcaaggtttcttctacaaaatcatagttgcaaatgcattaccaatatctttattaatataactaaacttcacaatatctcacagcctttaagaagtcccagaatacttgaacatttaaaatcacattttacccctccttcagaggttaaatgctaccacctggag

SEQ ID NO: 222606 - DNA, 593 bp, Homo sapiens
actcaaagcaatcttgaccaaaaaggacaaagctaatggaatcatacaatgggatttcaaaatatattacaaagctataggaatcaaaacagaatgatactggcctaaaaatagacacrttgattaatgtagtagaagagagtccaaaaataaccctgcgtaactagtgtgagttgattttcaacaaaggtgctaagaatccacattggagaaaggataatctctacaataaatgctgttgggaaaaccggatattcatatacagaagaaaaaaaatgaaccctgatttcacccttatataagaatcaactaaaaatagaacaacaacttaaagataagatttaaaataataaaattactagagtaaaacagaaaagaaaaaactgtgtgacatttaatatagtttcgatgtcctctccaaatctcatgttgtgatgtaatcctcagtgttgaaggtagggcctagtgggagtggtttatgtcatggagatagatcccgcatggcttggtgctgtctttgtaatggtcatctggttgtttaaatgcatgacatctcttctttctcccccaactatctttcttgcttttgttct

SEQ ID NO: 222607 - DNA, 593 bp, Homo sapiens
actcaaagcaatcttgaccaaaaaggacaaagctaatggaatcatacaatgggatttcaaaatatattacaaagctataggaatcaaaacagaatgatactggcctaaaaatagacacattgattaatgtagtagaagagagtccaaaaataaccctgcgtaactagtgtgagttgattttcaacaaaggtgctaagaatccacattggagaaaggataatctctacaataaatgctgttgggaaaaccggatattcatayacagaagaaaaaaaatgaaccctgatttcacccttatataagaatcaactaaaaatagaacaacaacttaaagataagatttaaaataataaaattactagagtaaaacagaaaagaaaaaactgtgtgacatttaatatagtttcgatgtcctctccaaatctcatgttgtgatgtaatcctcagtgttgaaggtagggcctagtgggagtggtttatgtcatggagatagatcccgcatggcttggtgctgtctttgtaatggtcatctggttgtttaaatgcatgacatctcttctttctcccccaactatctttcttgcttttgttct

SEQ ID NO: 222608 - DNA, 502 bp, Homo sapiens
taatactcaaagcaatcttgaccaaaaaggacaaagctaatggaatcatacaatgggatttcaaaatatattacaaagctataggaatcaaaacagaatgatactggcctaaaaatagacacattgattaatgtagtagaagagagtccaaaaataaccctgcgtaactagtgtgagttgattttcaacaaaggtgctaagaatccacattggagaaaggataatctctacaataaatgctgttgggaaaaccggatattcatatacagaagaaaaaaaatgaaccctgatttcacccttatataagaatcaactaaaaatagaacaacaacttaaagataagatttaaaataataaaattactagagtaaaacagaaaagaaaaaactgtgtgacatttaayatagtttcgatgtcctctccaaatctcatgttgtgatgtaatcctcagtgttgaaggtagggcctagtgggagtggtttatgtcatggagatagatccc

SEQ ID NO: 222609 - DNA, 499 bp, Homo sapiens
ctggttaaatgtttgtgaccaaaatattgatagtgatatggacggtaaagtccaggctgataaggtcgagccactgcttcagacattttaagccataagcattgacagtttccatgtgatgttaatcttgcaggtgcacagagtaaaagagtaaagaaaacttggcagcaactgcctagatttcagaggatgtttgagaaagcctgggtccccaggaaaaagtgcgctgcaggagtasagccctcatagagaacatctgacagagcagtgtggaggtaaattgtggggttgaagccaccacacagtgtacccactgaggtactgcttagtagagctgtgggaaaggagccaccatcctccaggcccccagagtggtagatccacctgcagcttacaccttgtacctggaaaagttgcagccactcaacaacctgtgagagcaggcatggggactgaaacctggaaagccacataagtggaaatgcctagggccttgtga

SEQ ID NO: 222610 - DNA, 499 bp, Homo sapiens
ctggttaaatgtttgtgaccaaaatattgatagtgatatggacggtaaagtccaggctgataaggtcgagccactgcttcagacattttaagccataagcattgacagtttccatgtgatgttaatcttgcaggtgcacagagtaaaagagtaaagaaaacttggcagcaactgcctagatttcagaggatgtttgagaaagcctgggtccccaggaaaaagtgcgctgcaggagtacagccctcayagagaacatctgacagagcagtgtggaggtaaattgtggggttgaagccaccacacagtgtacccactgaggtactgcttagtagagctgtgggaaaggagccaccatcctccaggcccccagagtggtagatccacctgcagcttacaccttgtacctggaaaagttgcagccactcaacaacctgtgagagcaggcatggggactgaaacctggaaagccacataagtggaaatgcctagggccttgtga

SEQ ID NO: 222611 - DNA, 499 bp, Homo sapiens
ctggttaaatgtttgtgaccaaaatattgatagtgatatggacggtaaagtccaggctgataaggtcgagccactgcttcagacattttaagccataagcattgacagtttccatgtgatgttaatcttgcaggtgcacagagtaaaagagtaaagaaaacttggcagcaactgcctagatttcagaggatgtttgagaaagcctgggtccccaggaaaaagtgcgctgcaggagtacagccctcatagagaacatctgacagagcagtgkggaggtaaattgtggggttgaagccaccacacagtgtacccactgaggtactgcttagtagagctgtgggaaaggagccaccatcctccaggcccccagagtggtagatccacctgcagcttacaccttgtacctggaaaagttgcagccactcaacaacctgtgagagcaggcatggggactgaaacctggaaagccacataagtggaaatgcctagggccttgtga

SEQ ID NO: 222612 - DNA, 457 bp, Homo sapiens
cagtgcaatcaaatttgaacttaaaattaagaaatgaactcaaaaccacacaactacatggaaattgagcgatccgctccttaatgactcttgggtaaataataaaattaagataaaaatcaacaggttatttgaaactaatgaggataaagagacaatgtactagaatttctgggatggagctaaagcagtgttcagagggaaattcatggtrctaaatgcccacagcaaaaagttaaaaagaactcaagttaacaacctaacatcacaaatttttttaacaaaaactagagaatcaagagcaaacaaaccccaaaactagcagatgacaacaaataaccaagatcagagctgaactgaaggagacggggacataaaaaattcttcaaaaaaaaaaaaacccacaaatccagaagctgtttttttaagagaaataaaataaaataaaatagactgc

SEQ ID NO: 222613 - DNA, 336 bp, Homo sapiens
agaaattgttctaaaataaagscactaataaatagcctaccaaggcaaaaacagcccagcaccagaaggactaaaggatgaattctaccagaggtaaaaagaagagctggtaccgtttctactgagactattccaaacaattgagggactcccctctaactcatttatgaggccagcatcatcctgataccaaaacctggcagagatacaaaacaacaacaacaacaacaaaaacttcaagccaatatatttgatgaaccttgatataaaaatttttcaataaaaggctggcaaaccaaatccaggagcacatcaaaaagcttatccatcgtgatc

SEQ ID NO: 222614 - DNA, 336 bp, Homo sapiens
agaaattgttctaaaataaaggcactaataaatagcctaccaaggcaaaaacagcccagcaccagaaggactaaaggatgaattctaccagaggtaaaaagaagagctggtaccgtttctactgagactattscaaacaattgagggactcccctctaactcatttatgaggccagcatcatcctgataccaaaacctggcagagatacaaaacaacaacaacaacaacaaaaacttcaagccaatatatttgatgaaccttgatataaaaatttttcaataaaaggctggcaaaccaaatccaggagcacatcaaaaagcttatccatcgtgatc

SEQ ID NO: 222615 - DNA, 634 bp, Homo sapiens
tgatgaaccttgatataaaaatttttcaataaaaggctggcaaaccaaatccaggagcacatcaaaaagcttatccatcgtgatccagttggcttcatatcygagagggtataaactgttggttcaacatatgcaaagcaatgaatgtgattcatcacataaacagaacaaaagacaaaaaacacatgattatttcaatcaatgcagaaaaggcttttgataaaattcaacatcccttcatgttaaaaactctcaataaactaggtattgaaggaacatacctcaaaatagtaagattcacatatatcaaactcacagccaatatcacactaaatgagcaaaagctagaggcatttcccttgcaaagtggcacaacacaagcacaccctctcttaccattcttattcaacatggtattggaagttctgaccagggcaatgaggcaagagaaagaaataaagagtattcaaataaaaagaaaggaagcgaaattatctttgcagatagcattatcctacatctagaaaaccttatcatctcagcccaaaagctccttaagctggcaagcaactttagcaatgtctctagatacaaaatcaacgtgcaaaacttgctagtattcccatacaccaac

SEQ ID NO: 222616 - DNA, 634 bp, Homo sapiens
tgatgaaccttgatataaaaatttttcaataaaaggctggcaaaccaaatccaggagcacatcaaaaagcttatccatcgtgatccagttggcttcatatccgagagggtataaactgttggttcaacatatgcaaagcaatgaatgtgattcatcacataaacagaacaaaagacaaaaaacacatgattatttcaatcaatgcagaaaaggcttttgataaaattcaacatcccttcatgttaaaaactctcaataaactaggtattgaaggaacatacctcaaaatagtaagattcacatatatcaaactcacagccaatatcacactaaatgagcaaaagctagaggcatttcccttgcaaagtggcacaamacaagcacaccctctcttaccattcttattcaacatggtattggaagttctgaccagggcaatgaggcaagagaaagaaataaagagtattcaaataaaaagaaaggaagcgaaattatctttgcagatagcattatcctacatctagaaaaccttatcatctcagcccaaaagctccttaagctggcaagcaactttagcaatgtctctagatacaaaatcaacgtgcaaaacttgctagtattcccatacaccaac

SEQ ID NO: 222617 - DNA, 634 bp, Homo sapiens
tgatgaaccttgatataaaaatttttcaataaaaggctggcaaaccaaatccaggagcacatcaaaaagcttatccatcgtgatccagttggcttcatatccgagagggtataaactgttggttcaacatatgcaaagcaatgaatgtgattcatcacataaacagaacaaaagacaaaaaacacatgattatttcaatcaatgcagaaaaggcttttgataaaattcaacatcccttcatgttaaaaactctcaataaactaggtattgaaggaacatacctcaaaatagtaagattcacatatatcaaactcacagccaatatcacactaaatgagcaaaagctagaggcatttcccttgcaaagtggcacaacacaagcacaccctctcttaccattcttattcaacatggtattggaagttctgaccagggcaatgaggcaagagaaagaaataaagagtattcaaataaaaagaaaggaagcgaaattatctttgcagatagcattatcctacatctagaaaaccttatcatctcagcccaaaagctccttaagctggcaagcaactttagcaatgtctctagatacaaaatcaaygtgcaaaacttgctagtattcccatacaccaac

SEQ ID NO: 222618 - DNA, 523 bp, Homo sapiens
acagagtagggtcgccaaatgtcacagaggaccacagagggctaggcttttctcacrtggaaaaagatagaagcaaagggaatccagagccagagtctttatgggggtttctatgggaaaagcaaggccggacagaataaacaacttaatattggctggtttgaataatttgaaagggccttgaggtataaagacggtctccagtttttttttatatttggccctaggtgatttagggcaaggtaaatcttggcttggtgtgtaaagagttagacaaggctgtgaatggagctatagactttgggctatagaccaaagattggctcgattgcacatgcaagacatgctcccaacctggccctttactaactcaaagaattggctagccctggccctggcagtctttacatggctagtagcctttgtaagatgtcaacacatcataaaatacataacatttaaaaaaatgattaatacagtagtcaaatgtgacaatgtgcagagagatcagaagttagatata

SEQ ID NO: 222619 - DNA, 523 bp, Homo sapiens
acagagtagggtcgccaaatgtcacagaggaccacagagggctaggcttttctcacgtggaaaaagatagaagcaaagggaatccagagccagagtctttatgggggtttctatgggaaaagcaaggccggacagaataaacaacttaatattggctggtttgaataayttgaaagggccttgaggtataaagacggtctccagtttttttttatatttggccctaggtgatttagggcaaggtaaatcttggcttggtgtgtaaagagttagacaaggctgtgaatggagctatagactttgggctatagaccaaagattggctcgattgcacatgcaagacatgctcccaacctggccctttactaactcaaagaattggctagccctggccctggcagtctttacatggctagtagcctttgtaagatgtcaacacatcataaaatacataacatttaaaaaaatgattaatacagtagtcaaatgtgacaatgtgcagagagatcagaagttagatata

SEQ ID NO: 222620 - DNA, 523 bp, Homo sapiens
acagagtagggtcgccaaatgtcacagaggaccacagagggctaggcttttctcacgtggaaaaagatagaagcaaagggaatccagagccagagtctttatgggggtttctatgggaaaagcaaggccggacagaataaacaacttaatattggctggtttgaataatttgaaagggccttgaggtataaagacggtctccagtttttttttatatttggccctaggtgatttagggcaaggtaaatcttggcttggtgtgtaaagagttagacaaggctgtgaatggagctatagactttggkctatagaccaaagattggctcgattgcacatgcaagacatgctcccaacctggccctttactaactcaaagaattggctagccctggccctggcagtctttacatggctagtagcctttgtaagatgtcaacacatcataaaatacataacatttaaaaaaatgattaatacagtagtcaaatgtgacaatgtgcagagagatcagaagttagatata

SEQ ID NO: 222621 - DNA, 568 bp, Homo sapiens
ctgggcattttaaagtggtgtcagataaacttggcagccgtttctttccacagatattcttagttgaagcttttggtctcttcttcactcatgggatggttcctcttgccctggttgcagaatagcgttcgagcagtgaggattctcagcttytctgttttacagccctagagacttggctgctgcagctgggtatcaagcaatgattttcacatgcctttttcatcactttttttctaggagaagattgcttttgacattcatttttaagttacatgtcgttttccaagagtatatctctcacaaaagctttagaatgccagtaataaatgtattagtagctaagaagctcagtctggcaactaccttgtctgctttaagtcagtgtgaaatacttccaataatttaactcttcttaaacaatcacttgatgtaatatttaaatctaaacattaaaatcttctgtggtttttgatctgtattagttcagtactacatagattaaatatttgatatctgtacctgaatttgatctatactcagccagcaggagaaatcgaagggagca

SEQ ID NO: 222622 - DNA, 561 bp, Homo sapiens
gaattcgagtcccagaagaagaagaatgcaagaaatagcacaattccaggcaaggagaagagatacaacactcaggttacttttaagaagaggaaagtaccttttggcctcaactcccagcttccagtaatttgataaaatgacgaacacagaggaaagaagagaggcaactgctgaggtcccctaggcctttgagaaaacggagttgtacctttggcaacataagtgcatatctacaagaaaggcgataatgtakacacgaagggaatgggtactgtccaaaaagaaatgcctcacaaatgtcaccatggcaaaactaaaagagtctacaaagttacctagcatgctgttggcatcattgtaaacaaacaagttaagggcaagattcttgccaagagaattaatatgcatattgggcatattaagcactctaagagccaagatgatttcctgaaagtgtgtgaaggaaaataaccagcataaagagggaagctaaagagaaacctgaagctgcagcctgttccacccagagaagcacactttgtaagaaccaatgaaaag

SEQ ID NO: 222623 - DNA, 616 bp, Homo sapiens
gtagccccttggcgttcaacagtatatacactgggccttatcaaagaagactgaagaagtggacactaacaagggacaggagattaatattggtctatgtctctgcccagacaacgtgatgcctatcagcttctggaacgtagatgtcattcagtggaggaagaagsggcagaaccttacgtttaaatcctgaataaggtacatttaccagaaagtatgtagataagcttgttctgctccagtgcaaaatgagagtttgagatggaacttaagtcctcatatagttacagttttgcatacttgattgcaggtcttcccctaacatctgtgggctgagaaggactggagcagtcaaggatccaggagctttgagattgtgtagattagtagatgcttactaagcagtaatgagtgttgttgttgacgttctgaactttggatcaatggttatcaatattatagcaacacgtatcagaaaaccaggatgagacttagacagaataatgcaagtggagtatttgacaaatacttctcactgcttgagttcaacactgtaccctcttccatcacacactgaagatgattgacggataagcagaataagaaggcctgttgg

SEQ ID NO: 222624 - DNA, 512 bp, Homo sapiens
ctttttacatataacttttgtggtttctttggcatacttttgtgttttactatgaaagcatggaaaaagttgtgtcattaatagagctttgcaagtagcaatcactatggatctctcaacccccagggccactggagaattgagcagcctaaatctctgcagtctggctggagactttgctgcattgctgatgatacatgttgatcaataattgttttccaaaaaataaagttttgatttgtgtactataaaaatcattgttcttttaaggctgaaagaatccctgctcccaaaaaggacatgattccttggtagaaaaaaactgatccctgagaaaattcaccttcagcatagctggtttcctagatacacrttttccctttgaatgtgatagccacagtggcaaagcttccagacgagggtccagttaccatttccataccgctgaaaaaagtaattggatgtgcagcattcatatgcacacacagcttattctgttaattgaggcataa

SEQ ID NO: 222625 - DNA, 525 bp, Homo sapiens
gaattcttttacccacatatttaacttttcttgcccatctcatcttgctactcccctttctttctttgtgtatatattgcatttgaagctcagcttgtttgaaactaaactcattatttgccctttcccacttacaaattaatcmctcaccacctgctcttttaaatataggtctttttgctaatctgtttccatttttcttgcccctagcattaaagcaattttcaaaccccatcagttcttccttcacagtctcctttttccattccctcctttattcccttggactactcccaagtctgctgtctctgtctctcttttctccattccatctgccagatcattgccaaattagcctctgctgaatattatttcaatcatgctatagccctgttaacaaaatatatacaaatataaataaagacacatctaccaaatctagttcggactctttagtttggagttgggtgggctacagggcctcccctcacccccacagagagttttgaaaaaaagacagttttt

SEQ ID NO: 222626 - DNA, 518 bp, Homo sapiens
accatagtttcaggctccaataagcacatacaacagtctatatggcacctgaagcaggtaggtgccttccttgtcttgtaaaaacccaaaggaaaatattctaatgcctcagaaccttctggctggctccaccattcagcaacgctgtcaggaagagtagctcttacacgaccctcacaactttagatccactttatgataaactggctaatgattagaaagaagtgcatctcagaactatcrgcctaacttagatgacacagacttctggatcaggtcttgcctttccctgacttttttgaagtctagggtctcattttgcaatggttcagaattggaactggaccacctgcctgaggctgcttgggctgcccacacagcttgtaaaaactgtatgtaaacatgaaatgcagctgcaaaacaaacctagttttcctcacaggaagttatccccctaaggaatcaggattagtgtgacaggcttgtgcaaactgctcaaatgagggccatctttggcc

SEQ ID NO: 222627 - DNA, 539 bp, Homo sapiens
tctatatggcacctgaagcaggtaggtgccttccttgtcttgtaaaaacccaaaggaaaatattctaatgcctcagaaccttctggctggctccaccattcagcaacgctgtcaggaagagtagctcttacacgaccctcacaactttagatccactttatgataaactggctaatgattagaaagaagtgcatctcagaactatcagcctaacttagatgacacagacttctggatcaggtcttgcctttccctgacttttttgaagtctagrgtctcattttgcaatggttcagaattggaactggaccacctgcctgaggctgcttgggctgcccacacagcttgtaaaaactgtatgtaaacatgaaatgcagctgcaaaacaaacctagttttcctcacaggaagttatccccctaaggaatcaggattagtgtgacaggcttgtgcaaactgctcaaatgagggccatctttggccaagtagtccaccatgttggagtgtacgctaatcaaagtgagggtggaagttttcatc

SEQ ID NO: 222628 - DNA, 432 bp, Homo sapiens
gatctctcctctctaccttaatcccacactcttgtcaaagcaaactgaccgagacagtgcttctttctcatcatgtgacttccctactctcaaccacgggtggctctgtatgtcctatagagatatttcargagactcctataaataaacttcaaatccccacgacttcttagctcctcctcaaatcccacacccatacgtcttacacaatcagagattcaatcacaccaggacatcctttactccccaaatagcttatgttctcctctgtgatcactgcctccatatcctcttcctaaggtatgtgtgctgctcccaactcccatatctacctgttaaaatcctacctatccttccacaaagatacaaccttctccacaaagccttccaaaaactcttcaatcagaaacaacctcttctatgtttaccgag

SEQ ID NO: 222629 - DNA, 419 bp, Homo sapiens
ctgtgagctcctctgggccagggcaatgcattcatcttcatacaaatctccactccttagcacagttcttaatacaaggtaaatacttacatgtgctatgaaatgattagtaaaaagaacaacttcttcaatagcaagaacgtctcccttaatagcaagaacttctcccagtgaaaagttttatacacaactttcaaatatggtggaacacagaggtacccaggtaaataaaagatatattaaattctaaactgcattagaattgctaatcttaaacttagtaatttaacattctcttttgaaagtaaatctacaaagtgacttaaatagataccatgccttctcctttttcctaacrtgctttagaaaaagacttaaaggagtgaaaactagaagtaaaaagttagataattacatga

SEQ ID NO: 222630 - DNA, 419 bp, Homo sapiens
ctgtgagctcctctgggccagggcaatgcattcatcttcatacaaatctccactccttagcacagttcttaatacaaggtaaatacttacatgtgctatgaaatgattagtaaaaagaacaacttcttcaatagcaagaacgtctcccttaatagcaagaacttctcccagtgaaaagttttatacacaactttcaaatatggtggaacacagaggtacccaggtaaataaaagatatattaaattctaaactgcattagaattgctaatcttaaacttagtaatttaacattctcttttgaaagtaaatctacaaagtgacttaaatagataccatgccttctcctttttcctaacgtgctttagaaaaagacttaaaggagtgaaaactaraagtaaaaagttagataattacatga

SEQ ID NO: 222631 - DNA, 451 bp, Homo sapiens
gatgacagctaaataactacactcaaggccttcttttcaattctccagggcccactgttggtccctttagcaatcagcttggtactgaccttgaatcagtcacttratctccctgtccctcaatttcctcagctataaagtaggcttgatgactgcctgctacctatcccacagggaataacgagttaatgctcattaaaagctttcagcttctcagatgttaggcaccatatattgtagataagtacaacgtagcaatctaataagcatcctctgggagttcagtttgtttttcctaattatcttttttaaaaatgacaaacctcagcaaattttcccaggcatgtggggtgcaccctttctcattccagaacatgccttactcttgggcatagtgggtgtatgctctcagggctacctgaaaggggtcttttctctgcttgccccagca

SEQ ID NO: 222632 - DNA, 532 bp, Homo sapiens
acagtacagacttccccagctgtagagcacatttcttatcatcaaacacagtgttcgaaatctgtctgctgagccaggcatgggtggttcacaccggtaatcccagcactctgggagggcgggcggagagaatcacttgagcccaggagtttgagaccagcctggggaacatagcaagaacctgtctctacaaaaaataaaaataaaataaaattaaaagaaataaaaataaatttttctgctagaaacttccgcagcaagaagttaacagaagcttattttctaattatctgtgcaccattatgttaaagcatgtagcatgtgctttaaagatatttactagaacagttcaatgtttactacagagaaattcaraagtgtaaaggaaccccagaatagacctggaaggcaggacaattgattgtcccacattttccccacttggggaaaagatttgtaatgtgtcatttccaaaataccttcttcgtatatcgtatttttctgcaaaacatgtattaataaatttatcatg

SEQ ID NO: 222633 - DNA, 445 bp, Homo sapiens
ttcatatgtttttcaatataatatggcagactgcctaacatttcattttgattatcataaattatgattactactacctatatgttgtaattactagttatagcttctcagaagaaacgagtgaaatagttttggttgtctgttaagaccaatgagggaatttctttttatttcctatggaaggaacaagmctattttaatatctcccagtggcacctcccatgcagaacctcactaaatacttggcaagttattttataaaatttcagttcaacattccagatacacaaagaaacgataatacaagagagacaaagtgacataaaggacctttcagcattgaagacagtcaaccactacgtaaagtaactatgaaagggcctctccttaacttttaaggaagaaaagaaacacagtaattaaaaaaaaaaaaaaagacgaattt

SEQ ID NO: 222634 - DNA, 445 bp, Homo sapiens
ttcatatgtttttcaatataatatggcagactgcctaacatttcattttgattatcataaattatgattactactacctatatgttgtaattactagttatagcttctcagaagaaacgagtgaaatagttttggttgtctgttaagaccaatgagggaatttctttttatttcctatggaaggaacaagcctattttaatatctcccagtggcacctcccatgcagaacctcactaaatacttggcaagttattttataaaatttcagttcaacattccagatacacaaagaaacgataatacaagagagacaaagtgacataaaggacytttcagcattgaagacagtcaaccactacgtaaagtaactatgaaagggcctctccttaacttttaaggaagaaaagaaacacagtaattaaaaaaaaaaaaaaagacgaattt

SEQ ID NO: 222635 - DNA, 584 bp, Homo sapiens
aagatcgcaccactgtactccagcctgggcgacagagtgaaactccctctctctctggaaaaaaaaaaaaaaaaaattaataggttaaataactttttctttagtcaaatatggttttagcatttggttgcttcttaaaacataataaaatttttataaaagcgccaaagaattaattatttgtgctctgaagtctgtaccttcccctgatatcaaataggtttgcacctgagtatcttgagggcagaatgtgggcttctgggaaaaacttgtttctgtctaaaatgtattcaaaaaagggaactttggcaaagtaccagtgaaggagtggtggatgatwgtgacatgtgggaaagtttatttcctcaggaaaatatccagagatatggcaaaggaagaaaaatgagttttgaaaaaaaaattaaggccaaggaagattttcatttaagttttggaggcagagattcattttcttaaaatatctaatggatttagaagatgacacaagctttaggaaggcaaagatgaagaatcaatggaatgatgaccaattcctgtcctagccctctgctattgtttctaat

SEQ ID NO: 222636 - DNA, 582 bp, Homo sapiens
gtttttacatttcagttttgtatatttaatttctaaaatttctagctggatgtttcttgtactttctatttctttgctgggattttctgtttattttgctgagtttttatttttccatttgtttcaggcatgtttgtaattgctccctgaagaaatcatatgatggatgctttaaaatctctcggataattctaagatttctattttcttgatgttgacatcaattgactgtattttttcattcagtttaagatcttcctggtttttgatatatatgaccaaatttttcaatgaaacctaaatgttttggttattaggttatgagactctggatatcatttaaactktctgttttatctgggttcctctgacatacctccaacaggggaaaggaggtattgcgtcattactgcaagatgggggataaagtaccagttgcacacttgacctctgttgacagccaaggaggagctccttgttacagctgggaaagggtgagagttctgaccctcccgtagacctttcctgatactttcctggcatgaaggaattggaatgccttctgtcatccacatcgtctcc

SEQ ID NO: 222637 - DNA, 593 bp, Homo sapiens
ataggcttgtctgtctgtgtttatgtgttttatccttagatttgccaatttggatctgtgttttgggtctttcatcggttttggaaagttcattggtcactatgtcttcaaaatttttctgccccatttttttttcctctttttctgagactttatatttagttccttgtatgttagattatwtgatattatcctgaaaatctcatgtatgttttaaaaaattacttttgtccctttgcttttgatttggatactttttattttccatttttttgtttgtttgtttgtttagaaacagtgcctcactctgttgcccaagctggagtgcagtggcatgattatagctcattgcggactggacctcctgggctcaagggattcttttgcctcagtagctggaatggcagtcacacaccaccacacccagctaattttttaatttaatttttatttttttttgtagagatggggtctcactatattaactagacttgtcttgaacttctggtgtcaagtaatcctcccaattcagcttcccaaagtgctgggattatagatatgaacctcttcctgttttcaagttcactattgtt

SEQ ID NO: 222638 - DNA, 568 bp, Homo sapiens
ctttatggaggttgacaaactgcttcaaaagccaccagaaaactcagccatggggctggaatggaaagcatatggtaagtcgtaaggagctagcagagcggcagttccagttagtgtttgtccccacaatgtgccagcagaggggaaggttggaggtcatttgagctggtagggtaagaacaagtacaaatctcaggggatatctgcgggggatcccggctttgctactgtgtaaacacagtaaaagccgcaggcgcacaaataataggaagtgtgtgtttaagaagtcaygtggcatgtagagtgaaaacagagaagcagacttgcccccaaggtgaacagtccagcacgtgcacaaagccatttcagaacacacacacacaaaaagaataggcagtgcagcttcttggagaaaagctgattttagttgaaaaaacaggaaaccccaagcactgcacggttttaggctttaaccctatcattctcgtgagcctcctgcccaggagggccattagtgcctcaggtccactcggtgcagaccccaaggtccttcccacccccacaaggt

SEQ ID NO: 222639 - DNA, 568 bp, Homo sapiens
ctttatggaggttgacaaactgcttcaaaagccaccagaaaactcagccatggggctggaatggaaagcatatggtaagtcgtaaggagctagcagagcggcagttccagttagtgtttgtccccacaatgtgccagcagaggggaaggttggaggtcatttgagctggtagggtaagaacaagtacaaatctcaggggatatctgcgggggatcccggctttgctactgtgtaaacacagtaaaagccgcaggcgcacaaataataggaagtgtgtgtttaagaagtcacgtggcatgtagagtgaaaacagagaagcagacttgcccccaaggtgaacagtccagcacgtgcacaaagccatttcagaacacacacacacaaaaagaataggcagtgcagcttcttggagaaaagctgattttagttgaaaaaacaggaaaccccaagcactgcacggttttaggctttaaccctatcattctcgtgagcctcctgcccaggagggccattagtgcctcaggtcyactcggtgcagaccccaaggtccttcccacccccacaaggt

SEQ ID NO: 222640 - DNA, 430 bp, Homo sapiens
ctaaacgcagggcaaagattttggatggcttttcttaaaaaaacaattttaacacataacgaggcagaaactggccattggaattacactgagctccttaatcccattaaaataagctgcgaactctagctgatgctctagggaagcagttgtcaaacttcagtgtgcactagaattgcttggtgggcttatcaagtcacagacttctggattccaccctgtttctaattcagtagaatttgcattcctaacaaattttcatgtatgcttgtgtaggaaccaaactttaagaaccaatgttttagagcaagagtttatctcctcccattttcaccctttcctcctatttcatcccaaactatttgcatgtgctattattttcctgggatctatatttttggtastgaattctgccttcaattcctgcaac

SEQ ID NO: 222641 - DNA, 596 bp, Homo sapiens
actttaaaatgatacaggcccctcaagtgtcttaggaaaaagtcattggtgctataaaacctttcagtatcatttttgaacccattgttcagactttgctaggttttaatctgattccttgtgatttattataatgtagcagcatacttataaaagtggtctgtgctgagtcagatagagagcccagcccattagaaacacatcataatttaagaatatgatgcagaatgcccttacacttatttgtgcccagcttcccaaaaagaaaattgttttgttaagaggaaggcagttaatttggctagaatccaaaaactcattcagcatggctgttttcccttatttcaaatgaaaaacttttctaatactaaaatatgtaatcctgctttgctttaaattcccatgtctgtcactcaacaggargcatagtgattcttaaatatttacggaacatttggtgagttgtaaagagaagtattattgcattgtaggtttttgcattgatgtgtcgatttttttgttttgtcccaagatttccttccagcaccttaatgaatgttcatatgatagaatgttttaagtatcagcaaagcatt

SEQ ID NO: 222642 - DNA, 533 bp, Homo sapiens
tcatattttgatatagcttgattggtgttatgcagtcataaattcatatataaacattttatgggtacaaatccattgctctcagttattaatgttgaagttattccatctttggccaggagactacaggttggctcctgagtgcttttgacaggatcctagtggttctgttccttctggtatgagaaggtgttctaggttcattttaaacactgtctcttccagacctggaattgaccctttctctaaggagctttggtttatttattaggcaaagatatttagacactacagtttgggtactaggggtacgcattactattaagtatgttaccatcactaatccttttcagttgtcagaactgggagtgaaaaaaaaacatacatatatatatatgtatatgcacatatatacacaygtataaagaaatttagagctcatactgatactttgcatttaatttggggctataaagtttttaatacatacacatatatacacacatacaagtagataggtaaagataaattca

SEQ ID NO: 222643 - DNA, 533 bp, Homo sapiens
tcatattttgatatagcttgattggtgttatgcagtcataaattcatatataaacattttatgggtacaaatccattgctctcagttattaatgttgaagttattccatctttggccaggagactacaggttggctcctgagtgcttttgacaggatcctagtggttctgttccttctggtatgagaaggtgttctaggttcattttaaacactgtctcttccagacctggaattgaccctttctctaaggagctttggtttatttattaggcaaagatatttagacactacagtttgggtactaggggtacgcattactattaagtatgttaccatcactaatccttttcagttgtcagaactgggagtgaaaaaaaaacatacatatatatatatgtatatgcacatatatacacatgtataaagaaatttagagctyatactgatactttgcatttaatttggggctataaagtttttaatacatacacatatatacacacatacaagtagataggtaaagataaattca

SEQ ID NO: 222644 - DNA, 407 bp, Homo sapiens
catctacctcaaaaaggtggatgacaatgaaaacaactaatgtttgctttgctstctctgcctttaacatagatcaggagggttgaaatcatccgaaatgggaggagacagaacaaactcataactgtaaattaaattctctgaaggaaagagacagtgttatgggagtgcaaggcaaatgaacctgacctaggatgatgtgagaaaagccttctcataagttcagttgagatctgaaaactgaacaagagtttactaggggggagcatattcttgatacaatgaacagtttgtgcaaaaatatagggggaccaaatatggtgcatttgaagagctgaaaggccagtgtggctgcaatgcaaagacataaaatttgagaattattgatatggaaatctaaatataac

SEQ ID NO: 222645 - DNA, 408 bp, Homo sapiens
aaggtggatgacaatgaaaacaactaatgtttgctttgctctctctgcctttaacatagatcaggagggttgaaatcatccgaaatgggaggagacagaacaaactcataactgtaaattaaattctmtgaaggaaagagacagtgttatgggagtgcaaggcaaatgaacctgacctaggatgatgtgagaaaagccttctcataagttcagttgagatctgaaaactgaacaagagtttactaggggggagcatattcttgatacaatgaacagtttgtgcaaaaatatagggggaccaaatatggtgcatttgaagagctgaaaggccagtgtggctgcaatgcaaagacataaaatttgagaattattgatatggaaatctaaatataactgataggtaaggat

SEQ ID NO: 222646 - DNA, 567 bp, Homo sapiens
caagaacccatagaatgggtatgtggccattgaaggtggcaataggtggagaagtatgttgatatgtgaagatgcattttgttacagccagtgaggaaaaacaaatcagtttgcttgcacatacacacaaacatactatggtctkgtgttaggcaaaactatgcacaaaataggataaaatttgtaacttctgagcatttgtattttaaagttttttgttcctttttcttacctttgatttctgaagtgagcatttataaaatttctagtaaaaatttattattaatggaataaattttgggaagagagaaatgtgaatcttgtacagataaaaataatttctcactattttttatcattattgtgagggttgttatcttgtttgaacttttagcttcttcagaagtaaaaagggaatctttttatctgtgcttgcagattttatgtatatactttattatgtatatatgtttttcttatgtatagattcattacatataggcaaactgatagattaatcatttcattatagttgtcttatcaaaataacaaatagcaaatattatt

SEQ ID NO: 222647 - DNA, 567 bp, Homo sapiens
caagaacccatagaatgggtatgtggccattgaaggtggcaataggtggagaagtatgttgatatgtgaagatgcattttgttacagccagtgaggaaaaacaaatcagtttgcttgcacatacacacaaacatactatggtcttgtgttaggcaawactatgcacaaaataggataaaatttgtaacttctgagcatttgtattttaaagttttttgttcctttttcttacctttgatttctgaagtgagcatttataaaatttctagtaaaaatttattattaatggaataaattttgggaagagagaaatgtgaatcttgtacagataaaaataatttctcactattttttatcattattgtgagggttgttatcttgtttgaacttttagcttcttcagaagtaaaaagggaatctttttatctgtgcttgcagattttatgtatatactttattatgtatatatgtttttcttatgtatagattcattacatataggcaaactgatagattaatcatttcattatagttgtcttatcaaaataacaaatagcaaatattatt

SEQ ID NO: 222648 - DNA, 567 bp, Homo sapiens
caagaacccatagaatgggtatgtggccattgaaggtggcaataggtggagaagtatgttgatatgtgaagatgcattttgttacagccagtgaggaaaaacaaatcagtttgcttgcacatacacacaaacatactatggtcttgtgttaggcaaaactatgcacaaaataggataaaatttgtaacttctgagcatttgtattttaaagttttttgttcctttttcttacctttgatttctgaagtgagcatttataaaatttctagtaaaaatttattattaatggaataaattttgggaagagagaaatgtgamtcttgtacagataaaaataatttctcactattttttatcattattgtgagggttgttatcttgtttgaacttttagcttcttcagaagtaaaaagggaatctttttatctgtgcttgcagattttatgtatatactttattatgtatatatgtttttcttatgtatagattcattacatataggcaaactgatagattaatcatttcattatagttgtcttatcaaaataacaaatagcaaatattatt

SEQ ID NO: 222649 - DNA, 567 bp, Homo sapiens
caagaacccatagaatgggtatgtggccattgaaggtggcaataggtggagaagtatgttgatatgtgaagatgcattttgttacagccagtgaggaaaaacaaatcagtttgcttgcacatacacacaaacatactatggtcttgtgttaggcaaaactatgcacaaaataggataaaatttgtaacttctgagcatttgtattttaaagttttttgttcctttttcttacctttgatttctgaagtgagcatttataaaatttctagtaaaaatttattattaatggaataaattttgggaagagagaaatgtgaatcttgwacagataaaaataatttctcactattttttatcattattgtgagggttgttatcttgtttgaacttttagcttcttcagaagtaaaaagggaatctttttatctgtgcttgcagattttatgtatatactttattatgtatatatgtttttcttatgtatagattcattacatataggcaaactgatagattaatcatttcattatagttgtcttatcaaaataacaaatagcaaatattatt

SEQ ID NO: 222650 - DNA, 514 bp, Homo sapiens
tatgtcttaggttttagggttatagagaaaaaagatacagcccttgcccttgagaatctcttggtttcagtgggaaacaatgaaataattacaatggactgtgctaaatgctgagatagaagcaaggatttttgggactggtaaataaagtgagttttggagatgacygaagttaacatggggaggcagaggaggggtgtttcaaggcagtgtgtgggaaagcacagaggagtgaaagggacgggactgctttgcatttactttctgtctatattgcatgtttaagttcatagcatcttatagaagatttttagttcagtggagaaatatgtaattttgtgaattataaattgtttttgctttcttacaggagggaaacactccacttttgtttgctataaattccaggagacagcatatggtggaatttttattgaagaaccaggcaaatatacatgccgttgacaatttcaaaaggtgcaatagtttttgttttctgttttcttttttccta

SEQ ID NO: 222651 - DNA, 514 bp, Homo sapiens
tatgtcttaggttttagggttatagagaaaaaagatacagcccttgcccttgagaatctcttggtttcagtgggaaacaatgaaataattacaatggactgtgctaaatgctgagatagaagcaaggatttttgggactggtaaataaagtgagttttggagatgaccgaagttaayatggggaggcagaggaggggtgtttcaaggcagtgtgtgggaaagcacagaggagtgaaagggacgggactgctttgcatttactttctgtctatattgcatgtttaagttcatagcatcttatagaagatttttagttcagtggagaaatatgtaattttgtgaattataaattgtttttgctttcttacaggagggaaacactccacttttgtttgctataaattccaggagacagcatatggtggaatttttattgaagaaccaggcaaatatacatgccgttgacaatttcaaaaggtgcaatagtttttgttttctgttttcttttttccta

SEQ ID NO: 222652 - DNA, 514 bp, Homo sapiens
tatgtcttaggttttagggttatagagaaaaaagatacagcccttgcccttgagaatctcttggtttcagtgggaaacaatgaaataattacaatggactgtgctaaatgctgagatagaagcaaggatttttgggactggtaaataaagtgagttttggagatgaccgaagttaacrtggggaggcagaggaggggtgtttcaaggcagtgtgtgggaaagcacagaggagtgaaagggacgggactgctttgcatttactttctgtctatattgcatgtttaagttcatagcatcttatagaagatttttagttcagtggagaaatatgtaattttgtgaattataaattgtttttgctttcttacaggagggaaacactccacttttgtttgctataaattccaggagacagcatatggtggaatttttattgaagaaccaggcaaatatacatgccgttgacaatttcaaaaggtgcaatagtttttgttttctgttttcttttttccta

SEQ ID NO: 222653 - DNA, 514 bp, Homo sapiens
tatgtcttaggttttagggttatagagaaaaaagatacagcccttgcccttgagaatctcttggtttcagtgggaaacaatgaaataattacaatggactgtgctaaatgctgagatagaagcaaggatttttgggactggtaaataaagtgagttttggagatgaccgaagttaacatggggaggcagaggaggggtgtttcaaggcagtgtgtgggaaagcacagaggagtgaaagggacgggactgctttgcatttactttctstctatattgcatgtttaagttcatagcatcttatagaagatttttagttcagtggagaaatatgtaattttgtgaattataaattgtttttgctttcttacaggagggaaacactccacttttgtttgctataaattccaggagacagcatatggtggaatttttattgaagaaccaggcaaatatacatgccgttgacaatttcaaaaggtgcaatagtttttgttttctgttttcttttttccta

SEQ ID NO: 222654 - DNA, 402 bp, Homo sapiens
gtctatagtaaatcatagctatctgtacccttggaattgaggccagaaatttccagaactctctttgctcttttatttttataatcttcttcctgataaagaaggtaacatcaaaaatkgagttgtattactaagcaagagaaatgatgagcaattgaacggtgatggccactgagttcacctcatgtgaaaggagtcatcattcccggtggttcaaactgcaattttatgttgccagtcaccagtgctgaggttaaagacttcttctgttttttggtttctggttgccttcagtgtctatgttcagggagaagatggggtcataaaagcagtccaactgcctattgagagaattatgctttccagaatgggactttggtgtcagggtgcaaacaataactt

SEQ ID NO: 222655 - DNA, 402 bp, Homo sapiens
gtctatagtaaatcatagctatctgtacccttggaattgaggccagaaatttccagaactctctttgctcttttatttttataatcttcttcctgataaagaaggtaacatcaaaaattgagttgtattactaagcaagagaaatgatgagcaattgaacggtgatggccactgagttcacctcatgtgaaaggagtcatcattcccggtggttcaaactgcaattttatgttgccrgtcaccagtgctgaggttaaagacttcttctgttttttggtttctggttgccttcagtgtctatgttcagggagaagatggggtcataaaagcagtccaactgcctattgagagaattatgctttccagaatgggactttggtgtcagggtgcaaacaataactt

SEQ ID NO: 222656 - DNA, 408 bp, Homo sapiens
tacatttatttaaatgataaaatggtaakacagtgggaggaaagcaatgactgagaagagacatgaaaatgtatctgaccttgagagttgcaacaaatattcccagccaaaccagtctgtttaatatgctttcatgcatgcaagtttatctgtttgactcaaactgtttaaacttataattccatcatggccactttaaatgtttttggaaacaaatacacatactttcacatatttaagaaaatcaccactccaatgtttctgttgaatcagacttttacatgatgttgtttaataaaatatggtaggttttgacatgtatgattttatcatataagtagcgtaactcctcagccaaaaatttagcatttgactctatagtagaaggctgagtcctgtacattatgt

SEQ ID NO: 222657 - DNA, 439 bp, Homo sapiens
tacatttatttaaatgataaaatggtaatacagtgggaggaaagcaatgactgagaagagacatgaaaatgtatctgaccttgagagttgcaacaaatattcccagccaaaccagtctgtttaatatgctttcatgcatgcaagtttatctgtttgactcaaactgtttaaacttataattccatcatggccactttaaatgtttttggaaacaaatacacatactttcacatatttaagaaaatcaccactccaatgtttctgttgaatcagacttttacatgatgttgtttaataaaatatggtaggttttgacatgtatgattttatcatataagtagcgtaactcctcagccaaaaatttagcatttgactctatagtagaaggctgagtcctgtacrttatgttctaaagatagacaaaaatctagagattttc

SEQ ID NO: 222658 - DNA, 216 bp, Homo sapiens
aaatcacaatagaatatgatcagggaaacagaacttttaaaactttgagagattttatctgtccaaatagatgtggaggtaaagstcttactatagggtggtgtctgggttagatatcagagtataaatgcaatttcctttttccaagattttaatttagtcaaatttttaaacaactttatgctttgagtttgttgtaattcagagaaatgcttt

SEQ ID NO: 222659 - DNA, 560 bp, Homo sapiens
ggcttctgtgtagaactgcctctcaaaccattccatggaacacctggttggtgaggtggctcatgccagtaattctagcacttggggaagctgaggcaagaacagtgcttgagcccaggaatttgagaccagccagagcaatataagtgagaccctgactctacaaaaaaaaaaaaaaattaaacagctggggcatggtggtgcatgcctgtaatcccagctacgttggaggctgtggtaggagggtcgcttgagctcagaatatcaaggctgcagtgagcggtgatcaagccactgcactccagcctgggtaacagagcaagctctgtctcataaataaaacgttttgtatagattcccatagaattgagttagacatcaggcatagrattattagccactttgatgtctgccttgggagtaaaacatataataaggggcagctttaaaccatctcaatcaatagcctctaacttctccagaaggttcttatttcatgaattcctaagcaggagactacctggattaagacatttggtggacaccattctgagatgaag

SEQ ID NO: 222660 - DNA, 547 bp, Homo sapiens
aactgcctctcaaaccattccatggaacacctggttggtgaggtggctcatgccagtaattctagcacttggggaagctgaggcaagaacagtgcttgagcccaggaatttgagaccagccagagcaatataagtgagaccctgactctacaaaaaaaaaaaaaaattaaacagctggggcatggtggtgcatgcctgtaatcccagctacgttggaggctgtggtaggagggtcgcttgagctcagaatatcaaggctgcagtgagcggtgatcaagccactgcactccagcctgggtaacagagcaagctctgtctcataaataaaacgttttgtatagattcccatagaattgagttagacatcaggcataggattattagccrctttgatgtctgccttgggagtaaaacatataataaggggcagctttaaaccatctcaatcaatagcctctaacttctccagaaggttcttatttcatgaattcctaagcaggagactacctggattaagacatttggtggacaccattctgagatgaag

SEQ ID NO: 222661 - DNA, 599 bp, Homo sapiens
ctttcctctgtcttgcttctactcctggaatatgaaacatttcattgctgcttggccttctggtataaatgggaggcttcctgagtcctcctaaaagcagaaaccactatgctttcattacagcctccagaactgtgagtcaattcaacctcttttctttatgtacatgcagaaaatcaatgctgtgaagtgaagctatgaaatgccttcaaggccttttccccaatcttttggctgttagcactgggcttctttgatgctaatatctgaagccttcttgaagttttcccctgataatggacttttcttcttttaccacattgccaggctgtgacaaagatagctgaaaatgtagaagcaggttcagaattcrgtaatggccagaggttagagcgtttggagagcttggaagaagacaggaagatgagggaaagtttggaccattgtaatgacttgttagttgtgattaaaaggctgacagaaggatggacagtgaaggccaggcttagaaggtctcagatgaaaatgagaaacttactgggaacaggggccaaggttttgttgttttgccttagcaaagaatttggctgcacagtgtc

SEQ ID NO: 222662 - DNA, 599 bp, Homo sapiens
ctttcctctgtcttgcttctactcctggaatatgaaacatttcattgctgcttggccttctggtataaatgggaggcttcctgagtcctcctaaaagcagaaaccactatgctttcattacagcctccagaactgtgagtcaattcaacctcttttctttatgtacatgcagaaaatcaatgctgtgaagtgaagctatgaaatgccttcaaggccttttccccaatcttttggctgttagcactgggcttctttgatgctaatatctgaagccttcttgaagttttcccctgataatggacttttcttcttttaccacattgccaggctgtgacaaagatagctgaaaatgtagaagcaggttcagaattcagtaatggccagaggttagagcgtttggagagcttggaagaagacaggaagatgagggaaagtttggaccattgtaatgacttgttagttgtgattaaaaggctgacagarggatggacagtgaaggccaggcttagaaggtctcagatgaaaatgagaaacttactgggaacaggggccaaggttttgttgttttgccttagcaaagaatttggctgcacagtgtc

SEQ ID NO: 222663 - DNA, 620 bp, Homo sapiens
cttctcctctctctgtcttgctcctacttctgccatataaaatagcccattgctgcttggtcttctggtatgattgggaggcttcctgattcctcctaggagcaggagcctctatgattcctttaaagcctgcagagccatgagccagttcaacatcttttctttatgatcttacagaaaattagtgctctgaagtggaggtatgaaatgccttcaaggtcttttccttcttgtcttggtaatcagctctcagcttcttttcatgcaaatatctgtagcctgcatgaattttccccccgtaaatggacttttcttcttttaccacactgacaggctgcaacaaagagagctgaaaatgtagaagcaggttgagaattgtgtaacagccagaggttggagagtttggaggacttggaagaagacaggaagatgagggaaagtctggaccattgtagagacttgttaaatagttataattaaaagggtgacagaaggatggacagtaaaggccaggcttagaaggtctcagatgaaaatgasgagtttactgggaacaggagccaaggttacatttgttttgctttagcaaagaatgtcactgcatgatgcccctaacctgg

SEQ ID NO: 222664 - DNA, 442 bp, Homo sapiens
tttggaagcttttaatggtcatttagtctgtcaaagaatcctgaatgtaaagcaaagagaaagatttgagcagatggtacagtaagataagtaacaaaagtaaagagaaagggtaacagagacaaatagatgaatggctgagttagtaaagtgaaatcattcacccttcatggtgggaagggtggcaggatggacagcctctgcagagcttctcttgcatcactgatcttgccactgagtgttgaatgataatgaactcaaccaacagtgaggtctagctgtgtaattgatgaaataatttccaattgttccttgctccttatcatctgtatgagaatttccaattattagtcatcaactaagttcctaacaacrtaatgtatataaatgatattaaaagcaaaaaacactgcacattatatgaagtacaatgaataataga

SEQ ID NO: 222665 - DNA, 594 bp, Homo sapiens
tagtgttgtacattctgtgggtttggacaaatatcatgacatgtatctaccattacagtggcatatgaagttgtttcactgccttaaaatatgtgctcttcctatttatcctgcgctccctgcctaatcacgagggcctcatttttatgagtagatgtatacttaatatatgtttctaaataaagacagtttacytcacatatgaatgcactggtaatattactagagtaaattcttaagtagataacactctaaatataactatcattagataaaacactatataaaacatatacccatcgggctccaaatatataacaatcatatagaaaatataacttagaagtcttacaaatttatatgtctagacaaggtggaataacaaggaccacacaccatcctcccacaaaacacaagtagaaacagtaaaatagatacaatggctttcagatattgaacaacaagcagtgcaggactgtgatttctgagagaaaataaacaaagtaaaaaaaagatcagcgaacttgaagatttttaggcttaaacattaagcaaacagataaaaaggcaaagaaaaaaatttcagggtaatat

SEQ ID NO: 222666 - DNA, 547 bp, Homo sapiens
aggtttttatttgctccccaaacaacatgcctccactttccttccctattctctttccaaaaagaataacatattcaggtttatgtgtatgttagcatcctttaggactctttaatctctttttgaagcactgtagaaagtaatgagatccccaaagaaagcctgaagggcctctaaataaccagaaaggaatagctaatctcttacagtcaagccttgtaaaaaagcaatttgttcattaatgatagaaataaagcatcttcacttgagaattaatcctcatcttccataaaacaaaatcaccttctgwatacatgtgaagagaaacagacaggactggagtcagtgggggtaaatcttgcataatacactagccttaatagtgctgctaaaaaaagaaaaaagaaaaaagaaagactgaaaatctcattagcaccttatctcatggagcactcaaaggtaatcagcaaaggaggggggtcttgcaatgcaattagtggctgttaaatttagagaaaattagaggggctattctctacccagttcc

SEQ ID NO: 222667 - DNA, 626 bp, Homo sapiens
tgtgagaaggctcatacaggactgaagaaaaggcatcagctctgtttgtgtggtgcttcccttcttctctcttaaaaaatttgctgcactcactctcccctgtcactctcactcttactggtctcagctcctaccttatcccttctactcacccactgctgtccgtagctgtcctcaggtcattcaagtatttatcttcccagtggaggcggatgcccagcagatcaacaggcctaaaaccattctcagccaggattacaaagtaggtaaagaatccagccagagcctggatcatccctgtgaatgacagagttgcaggacaggggagcctggttcagagaagggccccaaaaggtaggccaggggagggctgggggctgggacttgcttctggctgggctggtgtgtgtctgaagagtaatgcggaagaatcttgccatcagctgcctaagcctgtyatctctcatctctgtgggactttccttcaagccctgacatttgtttctaaactctgacccagagtcagctttgaatcacatggtcttaaaactaaaaaggactttagaggccactgattccctctcccaattttttcttttgagacaggatcttactctgttcatcac

SEQ ID NO: 222668 - DNA, 626 bp, Homo sapiens
tgtgagaaggctcatacaggactgaagaaaaggcatcagctctgtttgtgtggtgcttcccttcttctctcttaaaaaatttgctgcactcactctcccctgtcactctcactcttactggtctcagctcctaccttatcccttctactcacccactgctgtccgtagctgtcctcaggtcattcaagtatttatcttcccagtggaggcggatgcccagcagatcaacaggcctaaaaccattctcagccaggattacaaagtaggtaaagaatccagccagagcctggatcatccctgtgaatgacagagttgcaggacaggggagcctggttcagagaagggccccaaaaggtaggccaggggagggctgggggctgggacttgcttctggctgggctggtgtgtgtctgaagagtaatgcggaagaatcttgccatcagctgcctaagcctgttatctctcatctctgtgggactttccttcaagccctgacatttgtttctaaactctgacccagagtcagctttgaatcacatgrtcttaaaactaaaaaggactttagaggccactgattccctctcccaattttttcttttgagacaggatcttactctgttcatcac

SEQ ID NO: 222669 - DNA, 196 bp, Homo sapiens
aggaattcaatgatttgaaaagaaatactttataaaaatttgctccatgtattggctaaraaaaatataataaaatttggtagtgaaaattatatcgctaatgtttaccagtattactagtatgaataatacacataaggtagtgacttggaagctgctcaatacttcgttgctataacaaaatgcaatattttgt

SEQ ID NO: 222670 - DNA, 575 bp, Homo sapiens
tgatgtactctttcttgtattccagggagttagctatgctaccactcagccatttccccagcttcaaattcgtctaaggtgtgccacrggaacatggctgagcttcctatactgctgccagtgtattttctgggaaagatgtaaaaactggaagtttcctggatttttcattgataaagtttgcatattccagaattgcaccactatggtaaccaattaaattctgccactgtccaaatgtttatataataaatgagtttacttacaaatgttaagtgctacaaatactagcaacactatttctatgatgttctctagagatcatggtctctgcttcttattaaatcaaaagaataaacatacaggcaacctgagttctgaaaatccagtttaagaaaagtccttacagaactgctgtggttggtgttccctcctattgagaatgccaacctccttcttaaggacattctacaagtttcatccattcacaacaaatatccactgacatagttgtagccctatggatatgttagtgatcatgagaggcaaaaatttctgccctggaggagtataca

SEQ ID NO: 222671 - DNA, 617 bp, Homo sapiens
cctgtaatcccaacacttttggaggccaaggtggctggatcacttgaggtcaggagtttgagatcagcctggccaacatggggaaacctcgtctctactaacgattaaaaaaaaaaaaaattatctgggcgtggtggtgggtacctgttatcccagctactggggaggctgagacaggagaatcgcttgaacccaggaggcagaggttgcagtgagccaagattgcaccactgcacaccaggctggatgacagagcaagactccgtctcaaaaaaaatttaatttttaaamatatccctttgtaaggaaaaaaaacaattaccaacatgaaaatctggatgtctaatccctattttatataaaatatcatcaaccatacactaaagttcatgggtaaaactaaacactggcaagatctggagtaacttaactattacaatacaaacaatgacagactgtgaaactccctgagggcagagaccctgtctaattcatctctgtatccaacaattagcatcctgtagttaaatgttgaagagaggtaagctaacatccaaaatttaaatgtgagctattgaaaaattcaacttaacaatctgaaagttatctttttatga

SEQ ID NO: 222672 - DNA, 538 bp, Homo sapiens
aattatttaaacatttttggtatacatgatcaaagtttaccttatgaaataattaaggtatatgtgttacatttattttaagaggcattagactcacatgaaatacatctcatttcttttcttgacaacatcataaagtactggttcttcctttttttttttttttttttttttttttttttgagacagagtctcactctgtcatccaggctggagtgcagtggcgtgatcttgactcactgcaacctccacctcctgggttcaagcaattctcctkcctcagcctcccgagtagctagaattacaggcatgtgccaccatgccctgctaatttttgtatttttagtagagatggggttttaccatgttgatcaggctggtcttgaactcctggcctcaggtgatccacccacctcggcctcccaaagtgctgggattacaggagtgagccaccatgcctggccaaagtactggttcttaaaatgcttttacgtttaaaaagactgtgattatttctttcacatttttaccttactag

SEQ ID NO: 222673 - DNA, 529 bp, Homo sapiens
aagaggcagtctggcaatagcagctttcacccagttttaacatcctggcagctttgtttacactgtgaggggaaaaccacctactcaagcctcagtaatggtggacacccctctccccaccaagctcaagcatccyaggtcgatatcagactgctgtgctggcagcaagaatttcaagccagtggattttagcttcatgggctctgtgggggtggaatccactgaactagaccacttggctccctggcttcagcctcctttccaggggagtgaacagttctgtctcactggcgttccaggtgccactggggtatgaaaaaaattcctgcagctagctcgttgtctccccaaatggccgcccagttttgtgcttgaaacccaggcccttggtggtgtaggcgtccgagggaatctcctggtctgcaggtttcacagaccgtgggaaaagcatagtatcttggctggatagctctgtcccacaaggcatagtccctcatggcttcccttggctaggggagggagttccctg

SEQ ID NO: 222674 - DNA, 489 bp, Homo sapiens
ttgaacaagaaaagcaaaactcttgagctttcctatctctgttgcatgataatcctgctaaatggccattttgtcctttggcaacgtgagagtatttttaggaaaacacaatttgatttaaattaatgataataattttctaccaggaaaatataacaaaatatttcattcttcaacattctttcaactggagaaagaaattatagagactgtcttttgtattataaaattaaaggaaagatatgtattttgtcactactrttccatatttcacaaccaatcttgaagaccattttttggcaatgaagctatgtggctgcaaacattaagttcatgattaaaagaatatagaacctcacctgtattaaaatattaatgcagttattagcattgaaaaacaactgaataaacattaaacaagcaaggaaatattcaacaatataaaacattggtatgatgttctttaaaagaaaatattatgtgtctaat

SEQ ID NO: 222675 - DNA, 654 bp, Homo sapiens
cttgtgtacctagtgtgaagccattttacataattttttgtcarttactatccatgaagtctgttaagactcctagaatatttaaagttttcttttttgaaatctgctcttcatttaaaatataataatatttcttctttagcattttgagtttttaaaatctttaaaatacaatagtcaactggatatatttagtttactggtttataattctctatagtatattctctgcctttgtttccaaacagaatttgaaatgcaaaaaaagaaggacattcatgtactttgtgccttgtaaataatgtgacagtgacataaagtgaattaggaattatcttaaagactataaagtgtaatgacaatgagttcaaaagaccaatcacaaatcagctggaaaaattaataatgatcatgaaaaatctgatacttatataaataatttaacagtattgaaaattttatacatttttatggtgcctttacatatgacaaatttcattgtgatatttacagtgagaacaaatattggtatttctattttaatgagaaaaatgaagattagagaatttaaataatgtacttcaaaagagtccatagtgttttaaaccgtctgaaaatgtttttctaaccctacgtgctgaccacctgtctttt

SEQ ID NO: 222676 - DNA, 608 bp, Homo sapiens
cagggtggcaggacggagtgagtgcaacaagggaaatgccagatgcttataaaaccatcagatttcatgagcctcactcactatcatgagaatagcatgggggaatcctccccaatgatctgattatgtccacctggtcctgcctttgacatgtggggattatggagactacaattcagatgaaattttgggtggggacacacccaaaccatatcagatagtaagagtcatctttgtagtcctcatctcttctaaactgatatagatggtcctttctacctttcaaagtagttttatatacatatcttatttgctcctcaatgagttgtaaagtagataaagcaggtattgttacttccatyttacattcattactttttaaaattaaaacaatgtgagcacctactaaatagctgaactaactgctaggcctaataatatgaacaagttaaaattcctatttttggcaacattacaatctaatggcatagaaggaaaaataagtagtgtcatatactgtgattactgctataattgattaaatgtaaaaccactgaaaaggagcaatttctgttatctcagaaagtcagagtaggcttcacaaagga

SEQ ID NO: 222677 - DNA, 610 bp, Homo sapiens
atcctcacttcaggtcacttctcttgccacacaaaagatgatgagctggtacactgctcacagatctaccccttaggatgacttttttcttctctgttgttattcagagtaygcataagtgtaccttttttgctgttgctatccattttcagctagaactgcctaccaagctgacccaaccataaatcaagctgaagctttttctcctcctccagctagtcatatgggagctattttctcaccctaacacatattcctgtagttataagctaggagaaggtaactgcagtgagtgtgaaggtgacattggggtttgggctacctattaatgcagcttacttgttcccccggtcccacttgggttcaattctgtatataacatttctccagtataatggattgctgctagtgcccatctgaatttatgtcttggcagcctgacagaacccaggacataatggcaagttctaagtgtgtggttacttaatgtcccatagtcaagtgtccttcctttaccaggttccagtaacaccaaaaactgtttctcaaaaagcatagtattttctgcttcagatgacatggccttactccagaattccagaggcagcat

SEQ ID NO: 222678 - DNA, 477 bp, Homo sapiens
atgacagaggcaggagaacacaggaaaactgtaagtgactattgtccatcctacatgaatgcaaactagttttttattatcttttttaattttaaaggaaaaagktacatttgcttaattggtgactatataccatttatgggaagacttagtaatcttctctagcaatgatactacatctgacaaagcagctgtaactggggctgtggtagtctacagtcaccctccagaatctatgcgatctccgcaggggtgcgcctggtgaattcagcgatgctgtaatagggaccaccacccctaaatcttttaggtttttaatggtggcactaatctatgacatccccccacacacaatgtgactgacagtcatagagatgtaagtgattggctgatcatcagaacccaaagatccacctatgggaatatctctgccttttatgctcctctttagacaatccaattcttattattcatttt

SEQ ID NO: 222679 - DNA, 335 bp, Homo sapiens
gaattctttaaccagagacaaccagagagcaacagaaggtctgagataaaaaagcatcctctgtagcttctggaatagctctgcagggagaacagccaaggggctgaagcatggctgactttgtcatgaagagctcccaaaaattggccccagtctagtgagtcaatggattgtagagtataagcaataaatgayggccttaattgcagaaggggtgtcatgacaaacagaaaactaagtggaaaaagccttttcccaatcatggcagtgggcttcacttactgagtgccctttgtatgccagtccataagacttgctggaattatggaaatgag

SEQ ID NO: 222680 - DNA, 335 bp, Homo sapiens
gaattctttaaccagagacaaccagagagcaacagaaggtctgagataaaaaagcatcctctgtagcttctggaatagctctgcagggagaacagccaaggggctgaagcatggctgactttgtcatgaagagctcccaaaaattggccccagtctagtgagtcaatggattgtagagtataagcaataaatgatggccttaattgcagaaggggtgtcatgacaaacagaaaactaagtggaaaaagccttttcccaatcatggyagtgggcttcacttactgagtgccctttgtatgccagtccataagacttgctggaattatggaaatgag

SEQ ID NO: 222681 - DNA, 335 bp, Homo sapiens
gaattctttaaccagagacaaccagagagcaacagaaggtctgagataaaaaagcatcctctgtagcttctggaatagctctgcagggagaacagccaaggggctgaagcatggctgactttgtcatgaagagctcccaaaaattggccccagtctagtgagtcaatggattgtagagtataagcaataaatgatggccttaattgcagaaggggtgtcatgacaaacagaaaactaagtggaaaaagccttttcccaatcatggcagtgggcttcacttactgagtgccctttgtatgccagwccataagacttgctggaattatggaaatgag

SEQ ID NO: 222682 - DNA, 578 bp, Homo sapiens
ttcttctcacaaaactggttctggtcagtgtctgggcctgatactttcaaggcccctcgttcctagtgcaaatagcttctacagatctttccgctccaggctgccagccttgcctggatatagctggatcccaccatgaacacagcttaagctccagctgctatccccagtccaatgccaaagtgatattataatcctgacacaggactaattaaccatgcctaagtggttaggaaaggattcatggaggacagaatatttaagctsatttcaaggcgtaagttgaagaatgtaaggcagagagggaagtgaaagcaaaaaaaatgacgtatatatgtaaggacatagaaattatacaatcaggttcttaagaggaatttagtagtgttagagtagaagaggagggagaaagggctggtaagggaagttggaatcaggtcatttaggccttgcgggccctgacaaggaactgagttttaatgaataggggaatgtcactgaatgcatttttaagcaagagacagatgtcatcaaaacattcttttataaatataactctggtaggagcatatataata

SEQ ID NO: 222683 - DNA, 336 bp, Homo sapiens
aagtcaaactatcactgtttgctgatgatatgattgtatacctagaaaaccctaaagattcatccaaaaagctcctggaactgataaatgaattcagtgaagtttcagaatacaaaattaatgtacacagatcagtagctctgctatacaccaacagcgaccatactgagaatcaaatcaagaactcgacccctttcacaatagctgcaaaaaaataaaatacttaggaatatacctaaccgaggacgtgaaagacctctataaggaaaactataaaaygctgctgaagaaaatcatagatgacacaaacaaatagaaacacatcttgtgttcatg

SEQ ID NO: 222684 - DNA, 464 bp, Homo sapiens
tgaagcactgctgaattacatacacaaagcagagcagatgtcagcacctgattaatcagtactctactactggttagattccccaggcaagtcacttaaattatctccaaacagcttcctcatctgtaaaataaggataaaaattccttcctcacagagatgttatgagaattagaggagatttgaaaatgctccgtcaatcataaaatcatgcaaaattattcctttgtagaaatttgaggattaaatgtaataacatgaaggccacactaaccgcctggcacataaatacttaataaaagttattccccattctcactttctgtgtaatttgcagttaggaaatataaatcaaagacacccttgtcagactcacatccatttggctttaactagaactgtccttccctgctccttttctttttytttttttttttttttttggatacataatctttcactgt

SEQ ID NO: 222685 - DNA, 330 bp, Homo sapiens
tggaacttgcgctgggtctggatagggttcaacagatggagattatagggtgggccaggagaaaggtagaaggaagaatgctcatataaatgaaaaaactgaggcacagagaaagtaccttgatgtaattaattgctcccatgctcaaaaaccttcagtgacttctcatggccttaaatcttgaagtctttcttttttctctagctactctttaaccgctatgctaraaccaaatggtacaactttccatttcataagtgttttgtaatattcttcccctatttctttgctcaagctttttccttaaaagagttcttctcagttcctaat

SEQ ID NO: 222686 - DNA, 406 bp, Homo sapiens
ttaaaaatgtgctaaaatggtggatttcatgttatgcattctactgtcaaaagcaagggaggggcaacgaggaagcttttggaagtggttgataatgtttattaccttgagtccataataacacaaaataataataaaaggattacaggtgtgtgcatattaaaaaactcatcaaattatgtrcattaaacatatgcacaggtttttatgtgcatcaattatacttctataaactattaaataaaatattaggaagctatcaagcaagatcaaataaccttcccaaatcctgtgtatacctctctgatttctcccacattcaggaaaaatatggccctgaggattgacatgcccagggcccttcatttactgcatttttaatgagcttgccaataaatgacttaat

SEQ ID NO: 222687 - DNA, 421 bp, Homo sapiens
ctggaaactgactcatgggtcaatttcagtccattacctgtttttgcaaataaggcattaaaagaaaaactttagtcacattgaatttaacgagtttatttgagcaaagaatgctttatgaatcaggaagcatcctaaaccagtgggggtcctgagatctgcggccatccatatgagccgggggcttttgtaggctggacacagaggcaaagtagagaaatcacctgattggctacagtcaggcatctgccttatatgggcatggtgtgataaggtggctgtttgtgattggctgaaactcagctgtttgttatgctcctaaattaggcttgtttatacgctaaggtcaaagttcactacctaaggactcaaggtgccckgggagcctcaggccacatttaagttaatttaacaaaagttt

SEQ ID NO: 222688 - DNA, 439 bp, Homo sapiens
gaattcacctagttatgtgggacttgatgaatccagatggactctaaatcattcttttatttgctgattagtgccaggggttttgagccttgtagaggggcacaacactgaagctctgacatyaaacaaactggtttcagtccttggttctcagtcagggcagctgtaaaatcagatatgaggacctgagactgaggagcagatgtagtgtttgcactgggcctttatggtaaacaagctgctcctgggcacagcccttcactcctgccccctcccagcccgagttcatgttccttattgatgctactgaaagaagcttcctggggagcccaaaatgcattcttcgtcgggccatgttaattattgtttataatcaccgaatacagtttatatccagatctgacttggaaagtaagctcaggcaggggagaggatctga

SEQ ID NO: 222689 - DNA, 388 bp, Homo sapiens
tcagtgtgcctggaatgactggtctggttagctgcccccggcataaagaaaagaataattattccattccattccattattttcttaaaaaaaaaaaaaaaacctacatataggtctaaatgttgacatctaaacatctagttataatttaaagcaatacttttagtaggtattactaggaattcttttttttttttttttttggttgcataatcttactctgatttcccctagactttagtaaatctgaaactctccaaatctcaggactaaccaaagttagataatttaraaattgcagttgttgactcaatggaaggacaagctttgaatgggatttttttttgttcttaatgtgctgtcagcagatgtttacttaaagagattt

SEQ ID NO: 222690 - DNA, 336 bp, Homo sapiens
ttctgtctggggaaagtacacaagaacaaaaagatttacacttgtcagatttttgaataaaacatactatcttataatyacaacaattagattctgccctcctttgagcctttaatcatgatagccacattctcagattatataacaatattggaaatgttttttgagaaaattcctagagagttattatgaagaggactgtgttctcactaacaatgcatttttggaagaactaaaaatatcctctgggtattttcttaaaaaaatctttccggtttcctgcctagcatgtaagaagcttagaagtagccactccatcctaacaagtgagaagct

SEQ ID NO: 222691 - DNA, 622 bp, Homo sapiens
ctttttagaatttatttgtcgttttctaaaggcagatggtaaagggacaaatccaagtgcaatgaagctgagtaaaggaagtaacttaatgaagtaaagaaaaacttaatgcaaaagttgtgtttgttttttgtttgtttttgtttttgtttttaaggaaagggtggatgaagactgctcctgaaagtaaaactctcagtatggacacaacagaaattttataaatcccaagtaggctatttaaattttagaacctaagcagaaaggcacagcatgatattctgtggctcttggcaggattttgtcaccactggcaaactggaaacgtacaaaacagttgtaaaagccatattcaaatcccttttcaactatggcaatgcagcttccactgctgacattttaaaaacttcgtcttaatattgactttgtcaatgtatttgaaatgtaaaaaaagataaattttcaaactctgcaattttctccctgaatcagactttgttaaaactaacagcatctgattcaagcagacttaaaaacaagcatcaatgtattctctgttcaaacgcatctacaatggataaaatgtatgraaaatcattttttaaacacacagcagtgaggc

SEQ ID NO: 222692 - DNA, 596 bp, Homo sapiens
tttaatcaacagcctagatatcgaataggaaataaaaaagatttctctaaatggaggccacatgatagaacagatacatctctaattttattcatgctaaggggcctttagtttttccccccaatccctatcaaaagcaagccatgatataaaataggaaaatggcacatttccaataacagttaatagctcatcaatttccraattaaatttacttagctctgccaaataggtttctgaaattatccagtaaatcttcccaaagcacagaagttttaaaggccagtggcctcatcaaaatgctcatgacgcatggttttggtcctcattttcctggcttcaaaaatgtttctcaattgtcattaggtgaagaaaagcaaaggattggtcgcttatttcaatatgaaaaacatgaaaaatagcaaggcataaaatattacacttttgaaagtattttaagattacttttaaaccaaaatattgctgcctggaaccatgggtaaatactcatggttttagaggagagactggagaaattccagttacacctgtttctctttagtagctgcaagcaatagagaatgatttttaaattc

SEQ ID NO: 222693 - DNA, 596 bp, Homo sapiens
tttaatcaacagcctagatatcgaataggaaataaaaaagatttctctaaatggaggccacatgatagaacagatacatctctaattttattcatgctaaggggcctttagtttttccccccaatccctatcaaaagcaagccatgatataaaataggaaaatggcacatttccaataacagttaatagctcatcaatttccgaattaaatttacttagctctgccaaataggtttctgaaattatccagtaaatcttcccaaagcacagaagttttaaaggccagtggcctcatcaaaatgctcatgacgcatggttttggtcctcattttcctggcttcaaaaatgtttctcaattgtcattaggtgaagaaaagcaaaggmttggtcgcttatttcaatatgaaaaacatgaaaaatagcaaggcataaaatattacacttttgaaagtattttaagattacttttaaaccaaaatattgctgcctggaaccatgggtaaatactcatggttttagaggagagactggagaaattccagttacacctgtttctctttagtagctgcaagcaatagagaatgatttttaaattc

SEQ ID NO: 222694 - DNA, 403 bp, Homo sapiens
aagggctcaattaagttggtgaagttcaattacaccatttctttttaaagctgacaagaaattgccatgtcattgctaccttaatttcattacaataagaggtgacactaagaatatcagtggccatgctgaagtctcctcctgatactatcatggtgtgaaagacatctttttccactcactttacaaaagccattttcttcttctcctttggagagaattaggcatagtacmtattaattttttcttttattttcagtgcttgagtgttgaattatttgaacaagcactttatcctttcatgggaaaggtcctccatcagatgttctgcttaggttaacacatccaggttggaagccaaataatgccatttctcctacttgttcagtgaatccaagaattc

SEQ ID NO: 222695 - DNA, 511 bp, Homo sapiens
ttaaaaggttcctgccccctgcaagttatgctcaatagcctrtttctcaaactcttcctcagaaatagaaaataattccaggtgagtgtttgaaagtagcctgctgttggccagctgtggggacacatgcttgtagtcccaactactctgaaggctgagatgggaggataccttgagcccaggagttcaagactagcctgggcaacatagacctcatctcttaaaaaaaaaaaagaaaagaagaagaaagtagcctaatgcaagcagtgaatttgagtctttttgctttattttatgtgacttttgaactatagtcataatatactgttcgttttaatataaattatcaaaaaaccctacaagtaaaatagatgcttcagtagaagctgcatgttttttatgtgagttcatattcctccttgcaagggcccagagaaatctaggatccttatagtttagaatttctttgcccccctagatattttgaatctgaaggaaagaatggtacaac

SEQ ID NO: 222696 - DNA, 555 bp, Homo sapiens
catgctgaatgggcaacagctggaagaatttcccttaagaactggaacaacgcaaggatgcccattctcaccactcctattaaacatagtactggaagttttatcttgagtaatcaggtaagataaataaataaaaggcatccgaataggaaaagaggaagtttaattacctctgttcacttatgacatgatcataaacctggcaaacccttaggattcctctaaaatactcatagtcttgatagacacaccaagtaaagtttcagaatacaaaatgaaggtacaaaaatcagtagtgtttcttcacaccartgatgttcaagctgaaaaccaaatcaaaactgtatcctttttacaatagccacaaaaatatctagaaatatatttaaccaagaaggtaaaagatctctatgaggagaactgcaatatgaaagaaattgtaaatgacataaacaaatggaaaaacattccacgctcatgactggaagaatcaatatcattaaaattaccatactgcacaaatgaatctccatattcaattcaattcctatcaaa

SEQ ID NO: 222697 - DNA, 616 bp, Homo sapiens
aattgcaagtcacaacaataaaagcatatataacattattcattatctcttcattgttgatttgccttcagatacttaggatctataatatacagtaggttgtacaacaatgaatagtggaaaacaaatttatccttattgctattcactaacagaggtatatatggagattagtcaatattataaatttctaggaactataaattatcatttttaatttttaaagactttttatttgggggtatgaaataatgttttagtgatgcttaagttagcaaaggctatagaacttccattattgtttatcatgcacataatttcaatctatttcaatctaatagcaagtattgtctacattgggaatccaagttttacagccattagaaatccatcacagtattcatttgtagtatgaaataaaayttgaaatgactaatatcttccacttgggataataaaacattttacaaattagagataaaaaagaaaagcaagatggaagaagaagacaagaagatcttttagaataccagtactaactgcctcatatattactgataaatatccttatgtgagaatattagccactaattcaattttataaaactgaacacaa

SEQ ID NO: 222698 - DNA, 616 bp, Homo sapiens
aattgcaagtcacaacaataaaagcatatataacattattcattatctcttcattgttgatttgccttcagatacttaggatctataatatacagtaggttgtacaacaatgaatagtggaaaacaaatttatccttattgctattcactaacagaggtatatatggagattagtcaatattataaatttctaggaactataaattatcatttttaatttttaaagactttttatttgggggtatgaaataatgttttagtgatgcttaagttagcaaaggctatagaacttccattattgtttatcatgcacataatttcaatctatttcaatctaatagcaagtattgtctacattgggaatccaagttttacagccattagaaatccatcacagtattcatttgtagtatgaaataaaacytgaaatgactaatatcttccacttgggataataaaacattttacaaattagagataaaaaagaaaagcaagatggaagaagaagacaagaagatcttttagaataccagtactaactgcctcatatattactgataaatatccttatgtgagaatattagccactaattcaattttataaaactgaacacaa

SEQ ID NO: 222699 - DNA, 553 bp, Homo sapiens
ttaacattagaaatcattcttggtgttgtacatttgtgtcaaaacaaatgtgttgttttggtgttgtaaattctataggttttgagaaacatatagtgacatttatctactattgtagtattacacagaatagtttcatcaacctaaaaatcctgttttgccctcttgtcccttgatatggtttggctgtgcccycacccaaatcttgtcttgaattttagttccgataatccccatgtgacatgggagggaactggtgggatgtaactgaatcatgggggcagttcacccacggtattctcatgatagtgagtaagttctcacaagatctgaaagttttataagaggattctcccctgactcaactctcattcttctttctgccaccatgtgaagaactgaagcagaacgtataaaaaagtaaaacaagtttcttctgccttaccattgtcccttgttttgttctcataattatttttgcaagttttttaagttcctgtttttcctttctgtgtggcgcagcaaggtcacaagatatgcttgagttacaaaa

SEQ ID NO: 222700 - DNA, 553 bp, Homo sapiens
ttaacattagaaatcattcttggtgttgtacatttgtgtcaaaacaaatgtgttgttttggtgttgtaaattctataggttttgagaaacatatagtgacatttatctactattgtagtattacacagaatagtttcatcaacctaaaaatcctgttttgccctcttgtcccttgatatggtttggctgtgcccccacccaaatcttgtcttgaattttagttccgataatccccatgtgacatgggagggaactggtgggatgtaactgaatcatgggggcagttcacccacggtattctcatgatagtgagtaagttctcacaagatctgaaagttttataagaggattctcccctgactcaactctcattcttctttctgccaccatgtgaagaactgaagcagaacgtataaaaaagtaaaacaagtttcttctgccttaccattgtcccttgttttgttctcataatyatttttgcaagttttttaagttcctgtttttcctttctgtgtggcgcagcaaggtcacaagatatgcttgagttacaaaa

SEQ ID NO: 222701 - DNA, 559 bp, Homo sapiens
tagcaaagtcatcatactgtatatggtatacttgattggcaacttgtttctcaattcagagaaaaggctgaaagcaatacatttagataaatgttaggcatgtgtatgttgcaaattcctgattcctggtaaataaacaatacatttmttttctgcctaaattttctatattgtccatgtaagtatagtttacaagaaatttagtttttgcccaaaagaaactttgacagaaaaactcacccccccaaaaaaaaaccccacatttgacccacagcaattgattcagctgctctaaactataccttcatagaaatgaaatttgtgtgtgtgtgactagtggatatactctcaggaaaagagtaagataagcaagaggaagtagaagaaaatgaaaaacttagaagtgatgggttattaatatgcagcagacatttttgagatgataagagtgtcttaaataccctggtagactttctatcgttttgagaaaagtgacataccatttagaggaactgatatataaatgcttttttaaaaaccaagaacttaattaaacaca

SEQ ID NO: 222702 - DNA, 559 bp, Homo sapiens
tagcaaagtcatcatactgtatatggtatacttgattggcaacttgtttctcaattcagagaaaaggctgaaagcaatacatttagataaatgttaggcatgtgtatgttgcaaattcctgattcctggtaaataaacaatacatttattttctgcctaaattttctatattgtccatgtaagtatagtttacaagaaatttagtttttgcccaaaagaaactttgacagaaaaactcacccccccmaaaaaaaaccccacatttgacccacagcaattgattcagctgctctaaactataccttcatagaaatgaaatttgtgtgtgtgtgactagtggatatactctcaggaaaagagtaagataagcaagaggaagtagaagaaaatgaaaaacttagaagtgatgggttattaatatgcagcagacatttttgagatgataagagtgtcttaaataccctggtagactttctatcgttttgagaaaagtgacataccatttagaggaactgatatataaatgcttttttaaaaaccaagaacttaattaaacaca

SEQ ID NO: 222703 - DNA, 559 bp, Homo sapiens
tagcaaagtcatcatactgtatatggtatacttgattggcaacttgtttctcaattcagagaaaaggctgaaagcaatacatttagataaatgttaggcatgtgtatgttgcaaattcctgattcctggtaaataaacaatacatttattttctgcctaaattttctatattgtccatgtaagtatagtttacaagaaatttagtttttgcccaaaagaaactttgacagaaaaactcacccccccaaaaaaaaaccccacatttgacccacagcaattgattcagctgctctaaactataccttcatagaaatgaaatttgtgtgtgtgtgactagtggatatactctcaggaaaagagtaagataagcaagaggaagtagaagaaaatgaaaaacttagaagtgatgggttattaatatgcagcagacatttttgagatgataagagtgtcttaaataccctggtagactttcyatcgttttgagaaaagtgacataccatttagaggaactgatatataaatgcttttttaaaaaccaagaacttaattaaacaca

SEQ ID NO: 222704 - DNA, 481 bp, Homo sapiens
acagggcaggacacctggcatatgatagtcttattgggtacttttaagaaatgtaggtcacagggttattttatgtacagctcacacacagaaaggtcagaggaggtcagaaaatgtcttccaatgtgccgtatttgggggtagcatgacctgcacctcattgatatggatccttaactttctgaaggctttacatgtgtcaaacttgtttacattccatgctcactaagttggtgattttccatggcaatgatattaaccctcatgcttgattaagtttatgttcaaatctcaaattagttcaatgtgtattttctttgcctatactaattactaaataaaacttcacaaatttatagaacaaaattacaawaaattcatagttgtcaactcatttgggtcctactcattaactgaaaatcaattattctttccaaattagcacctcttcatttctccagaatttattttctaaaccttc

SEQ ID NO: 222705 - DNA, 481 bp, Homo sapiens
acagggcaggacacctggcatatgatagtcttattgggtacttttaagaaatgtaggtcacagggttattttatgtacagctcacacacagaaaggtcagaggaggtcagaaaatgtcttccaatgtgccgtatttgggggtagcatgacctgcacctcattgatatggatccttaactttctgaaggctttacatgtgtcaaacttgtttacattccatgctcactaagttggtgattttccatggcaatgatattaaccctcatgcttgattaagtttatgttcaaatctcaaattagttcaatgtgtattttctttgcctatactaattactaaataaaacttcacaaatttatagaacaaaattacaaaaaattcatagtygtcaactcatttgggtcctactcattaactgaaaatcaattattctttccaaattagcacctcttcatttctccagaatttattttctaaaccttc

SEQ ID NO: 222706 - DNA, 535 bp, Homo sapiens
ttatttactatgtttctttttttcctgatgacttcagtatatgtattccaagcctatgcatatagcttatttataggcagactgtgcaatttcatttacattcttattgagttcagacagaaaatgccaggtatgcaccaaaatatatttasagctctctattttattgtcagtgcaaagatttacaaacatatctcctcacaaatatgcacatgcataacttcatgccctccattgcagggaaataagttaggtattagtaatgcttacagcagtccttgtgcaatatgattttcccctccagtgtgctatcattttcctacatgaaagatatccaaaaatgaacaaagccattttcccaaagggatactgagtgtaaaaattatatgcttcagctccttgcataagcttacccgtatatggcctcagtccatattttaaaccaacaggtatctatccagcatttacttaatgcaaatctttatgatattaagaatttgtggtagtcggtggttgaaaattaaaagcaaccttg

SEQ ID NO: 222707 - DNA, 618 bp, Homo sapiens
gtacatatgtgaatcaactgactgaggcttggctgcctgcaggggctgcagctgtgcaacccactcctgcagggcaggtaggcatcgctcctgggaatggctggcaggcaggaggtcttgcaaggcagtcatgcccaagtcccatggggaagcttgccctgctctctctgggctcagaggtcagctggggcccacacctcccagaggaggatgggtaaacctgggggacgggcatctatggccactgtccactggagctgccctttgcacaaaagctccgcggctctgtgccatccaaaggcctatytctgcctgctccatgggagatcttcctaacaactcacacatcaacaggtgacacagggtcccctgttgctaaaatctcagaagtctattgtgagaatgagatgtccctcagttaactcactcacccctttcccaggagctgtcaggggctgggagctagccctggcatatgggtaatccatgcagggcttcttcctctttagcctgggcttcagcattgcctcttcatctgctctcagttttctatatgaagatctgcccaaattatggtggtttaaaccataatttggtctctttccatgggagcggcac

SEQ ID NO: 222708 - DNA, 431 bp, Homo sapiens
tctattattttgctcatttttctatgttgtatatatgttaatttatttttgttctctgaaaataaagtaaacaggcataggaatgataaagctccatgaggctcacctatcgtgcacggcagttctctaaccagcatgctatgtacattgatccattgaggatgctaaagaatctggttaaaaacaggtttaatgagcaccacctagaagtttagtttgaaatttctcacttgaaactttctgaaataattagtgccattgaaacattttggaacagacctctagttaccttatgaattagaaatcagttattaagatatttagaaagagaataaaacacctataaattcctagggcawttttatctccaattactcactttagaacatttcttgataatggcatactcaggtacaaacagaactactgcc

SEQ ID NO: 222709 - DNA, 566 bp, Homo sapiens
ataggataaattgcctggtattgtgagtaaagatttcttaaagtagttgggaacctgatgttaaaaactaatagaaattaaacacagaaataaataacaagtaacattcttagcttttctcaggtggactttcaaagatactggtatttatgcttcaaacactcctcctctttgcctgaataattcgtatttctctgtcagtccttagttttggtaagactttctctgggaagtcttcttgacacaycaggaataagtttcccacaaaatagtacttattattctacattttagttgtttttttagattccatacacctttctggactctatatgaaaacaacccattagtctcaaatagcttcagcttgtaccaaaattatgcttccttcaattttctgtctttactcttgcatataattggtttccactctcatgaatcctaggaagggggagtgtggagtgggaagtgtgagttgaagtgtatctttgcttatttgtctaaattcactatagccaattacctcttctttggaagactctaagcctttttatggtgccagaagt

SEQ ID NO: 222710 - DNA, 533 bp, Homo sapiens
aagcttctcttggccagtcckagatatgccagggcagtcagatgccaccatttatggcaggctgcagagcccctctgcgtgcccccgtttcctttcttcttctacagaatggagacattaagaacgctgaccccatagggttcttaagagattgaaataggctagtatataaaaagagtttagaacaatgccttgcatgtaattagtacgtgacaaatctcaagacatttctctctgttgccaaacctggctcatctgggcccctgagcaccctgaccaccttacagggtaggtttagtgaagcagcatggctgtgtgtgcaggggtgcttctgccacctgaaatatcccgaagcataggcagaagccctcaaggccaccattgtcacgggcagtctcagcccagtgtgggggaactgcctttcattcccaattgcagcctgggctttgacactgcatctgacttggttactccagtgagctggcctgctggtgcacctgcaaaaagctaacgatggggtcaatatgcggcat

SEQ ID NO: 222711 - DNA, 533 bp, Homo sapiens
aagcttctcttggccagtccgagatatgccagggcagtcagatgccaccatttatggcaggctgcagagcccctctgcgtgcccccgtttcctttcttcttctacagaatggagacattaagaacgctgaccccatagggttcttaagagattgaaataggctagtatataaaaagagtttagaacaatgccttgcatgtaattagtacgtgacaaatctcaagacatttctctctgttgccaaacctggctcatctgggcccctgagcaccctgaccaccttacagggtaggtttagtgaagcagcatggctgtgtgtgcaggggtgcttctgccacctgaaatatccckaagcataggcagaagccctcaaggccaccattgtcacgggcagtctcagcccagtgtgggggaactgcctttcattcccaattgcagcctgggctttgacactgcatctgacttggttactccagtgagctggcctgctggtgcacctgcaaaaagctaacgatggggtcaatatgcggcat

SEQ ID NO: 222712 - DNA, 561 bp, Homo sapiens
aacagggggaagaccatgtgaaggcagaggcagagactgaagtgatatggccacaagccaaggaatgctggaaaccaccagaagctggaaaaggcaaggaaccgattctccccctaaagccctggtgggagtgtggccctgatgacaccttgacctctaggactgtcagagaacagtttgttgtttttacaccatccagtttgtggtcatttgttacagcagccacagacgctagtacagatggctttcggaccatggaaaaagaggatgcccatgctaggtaatgttaaaatgtcagaagtgccaagtcagacagyggattaagggattgtaagactcagggaggtgtgtatgatcagtgaagtgccatccaagaccagatcacttaccagatatttatgctccacaggaaggctcagagaaaacatcctccaccaagacgtaaagcacccacatcactcggaagctcagtggtggctctactctgccagcctgggcagacagttggaagggttcaacagagctgggcttactgatagcaagtgggatgacaagacccta

SEQ ID NO: 222713 - DNA, 478 bp, Homo sapiens
ggattgcgcacaggctgaaaaagtttgtgttgtagagagaatcttatgaaaaatgggcattaaacaagtatacaaggagccagtctgtcttttgctaccatggttctgtgcaatgggctcatgaattaagaaaccatgattgcagggatgtaggtgttacatgggcccaacaacatggtctctttatcaccaaggctsattcagctattgttattgttgaatgactgaagcttcagctgcagaaactgactgtaagcctctgtgtggtaacatcctttaggagatcagccagccatatggtggcaagttgattaaaatggacgctttttatttaggaagaagcactgatttgttcttgctggaactggcaactacactggaggtgggtttaccttcaccttcttcagtgactgactgtatcactatttgaggagcttactgagtggctaatttatgaatgtgggagcctgcaaaacat

SEQ ID NO: 222714 - DNA, 478 bp, Homo sapiens
ggattgcgcacaggctgaaaaagtttgtgttgtagagagaatcttatgaaaaatgggcattaaacaagtatacaaggagccagtctgtcttttgctaccatggttctgtgcaatgggctcatgaattaagaaaccatgattgcagggatgtaggtgttacatgggcccaacaacatggtctctttatcaccaaggctcattcagctattgttattgttgaatgactgaagcttcagctgcagaaactgactgtaagcctctgtgtggtaacatcctttaggagatcagccagccatatggtggcaagttgattaaaatggacgctttttatttaggaagaagcactgatttgttcttrctggaactggcaactacactggaggtgggtttaccttcaccttcttcagtgactgactgtatcactatttgaggagcttactgagtggctaatttatgaatgtgggagcctgcaaaacat

SEQ ID NO: 222715 - DNA, 631 bp, Homo sapiens
attccctaatcacatcttggattttttaaattcctggtatttttagattgtcaaaattgtaaatgtcacttctttctactatcttttctatttctcctacttttttttaatatattgttttgtacatatatcattttagtagttctaattggattttctaatattgaatgtatttcaaattatgacagtttttctcttcctttaaattattgctatcttttttttctctaattggattacctgggatctttagcataatattgactaataatggtggcatcaaacatcatttatctcattcctgtttcggtaagaatgctttgggttattcatggtttttcttgtaggtttatagtaaatagcccatcatggttaattttatgtgtcaacttgacggtccaaatatgtggtgcttagatatttgaataaacattttttctaggtgtcttygaatgtgtttcaaagaagaggttaacatttgaaccagtagactaagtaaagcagatttcaatgtggctgtagacctcatccaatccattgtaggcccaaatagaataaaaggctgagtaagagacttctctccctgcctgtcttcaagctgggacactagtcttctgcctgcctgcagact

SEQ ID NO: 222716 - DNA, 528 bp, Homo sapiens
gcaaagtaaggttaatgcttcttgtggctagattttatctttctgagcaaagactatggtaattttttaaaaaaaaaaatcttggctgggcacagtggctcacgcctgtaatcccagcattttgggaagctgaggcaggcagatcacgaggtcaggagttcaagaccagcctgtgcaatatggtgaaaccccgtctctactaaaaatacaaaaattagccgggcgtggtggttcatgtctgtagtcctagctgctcaggaggcagaggcaggagaatcgcttgaaactgggaggcggaggttgcagtgagctgagatcgtgccactgcactcyagtctgggcaacacagcaagactccgtctcaaaagaaaaaaatctccatgtacttagtagggtacccctgacggggtagatgttttaatgaacactcaacgattaatgttctgcaagctatttattctttcatcagtttagtttcagcagcctgcctgtcagaattctaaactacacttctgctagtattgctga

SEQ ID NO: 222717 - DNA, 562 bp, Homo sapiens
aatgctgcaccatcaaagactacacaaggaacaattctatacattctgatatagaaatttctcttaagacataccgttatatataaaaaataaattgtagatcaatacatacaatacagtccaattcacataaaayaaacaaaactgtgtgcatatacatatatgtgaactaaaaaaatattgagacatatagaccaaattgttaatgatagttatatttgtggaggtgaataaaactggggtttaagaaaggagttaggattgctccatatacatctgtttgcttgcatttttaagtaaaatatatgtatgtataccttgtgtaattaacaaagtaaaccaacataaaaagaaaaatcatcatgaccagtagaggttgtctttacagtacaataaatttctctttacaaaaaatattacacaagaaacttgtaataattatgcttaaaaaatatattcacccaaaacaaacattacccgtgatctcaacgttcagagataacaactgcagagatactgaattcttttccaaatagcatgacacagtacaaaacatttgaaa

SEQ ID NO: 222718 - DNA, 562 bp, Homo sapiens
aatgctgcaccatcaaagactacacaaggaacaattctatacattctgatatagaaatttctcttaagacataccgttatatataaaaaataaattgtagatcaatacatacaatacagtccaattcacataaaataaacaaaactrtgtgcatatacatatatgtgaactaaaaaaatattgagacatatagaccaaattgttaatgatagttatatttgtggaggtgaataaaactggggtttaagaaaggagttaggattgctccatatacatctgtttgcttgcatttttaagtaaaatatatgtatgtataccttgtgtaattaacaaagtaaaccaacataaaaagaaaaatcatcatgaccagtagaggttgtctttacagtacaataaatttctctttacaaaaaatattacacaagaaacttgtaataattatgcttaaaaaatatattcacccaaaacaaacattacccgtgatctcaacgttcagagataacaactgcagagatactgaattcttttccaaatagcatgacacagtacaaaacatttgaaa

SEQ ID NO: 222719 - DNA, 562 bp, Homo sapiens
aatgctgcaccatcaaagactacacaaggaacaattctatacattctgatatagaaatttctcttaagacataccgttatatataaaaaataaattgtagatcaatacatacaatacagtccaattcacataaaataaacaaaactgtgtgyatatacatatatgtgaactaaaaaaatattgagacatatagaccaaattgttaatgatagttatatttgtggaggtgaataaaactggggtttaagaaaggagttaggattgctccatatacatctgtttgcttgcatttttaagtaaaatatatgtatgtataccttgtgtaattaacaaagtaaaccaacataaaaagaaaaatcatcatgaccagtagaggttgtctttacagtacaataaatttctctttacaaaaaatattacacaagaaacttgtaataattatgcttaaaaaatatattcacccaaaacaaacattacccgtgatctcaacgttcagagataacaactgcagagatactgaattcttttccaaatagcatgacacagtacaaaacatttgaaa

SEQ ID NO: 222720 - DNA, 610 bp, Homo sapiens
tctccctccttctcagaatccccaggaaagcccatcaaccccaaatctccagagtgatgggaagacgctggagattttgagcagtggagtgaagttatctcactcatttccactcttataagtttgctctggaagctgtgtrgaagacagttttcccttgtgaatggaaatcaatgaaacgaagattagagccaataggcattgcaacgtttctcaaagttgtcaaaataacagaattttccatttttaaaagggaccataatgtgcaccagtcctgtaatttgtactgcaaattctatttctatataaataacaaaaataaaccaacatctaatacccctgatcacggaaaccttttcacaatacagagaatgcaaggaagtaccaaccgcattaggcgagctgtttctggctgacctgttgggggcgatcctgcgccttgctccacttgcagcctcttgtcccagcagccaagcatcaaatcagtctgtcttcctctttgctaccctcaaccagcttcaaactgcatcccaagctgctgatagaaaatggagttatgaattcttcccctctcatctgtagatgagcaggaacagataaaagcacagac

SEQ ID NO: 222721 - DNA, 602 bp, Homo sapiens
aaactgaatttggaactaacagcctgaatttgaatcttccagttaccagttgtgttaccaagaaaactaatgtctttccacctcccttttcccatgggtaaaaggggatgacaataattcctcctcatgttgttttgttttgaggtgtgtgtgtgtgtgtgtgtgtgtgtgtgtgtgtgtgtgtttgtgtggaccaaggcaggtcacatttgtaaagcacttacttgagaggctggcatgtggtgaacactcagctaatgatctagacaagtagttgtagtaatagcaacagtgagaagtagcaayagtgatagaagttgtcatttaagtcattcttatcaaatcatgtgaaataatacacataaaaggtctttgataattgtaccaaaaaatgttcaaaagttgaatcagaaactcaagttactggtagaggagaaggtaagcaagccagcctcatcagtagcccttgggcatcaatttattgttttacagtgaaaatggaaactgtactgaaattaatttggcttgtaaaccaacagaaaagaatgccatatgtagtactgactgtaagtatttttttaagtctttctaaattatacttc

SEQ ID NO: 222722 - DNA, 582 bp, Homo sapiens
gattgttctgttagacatacacagtctcatcaaacatcaacattaaacaaagtcactctgcaatcaatcataaaaacaagatcattgtgcaatccacaaatatgcctctcttagctaaaatgagtggcagctatttctttaccaattacagctttatcctcatgcttgtctctcctccctattgataatattttttgagaatccaatcgttaaattttccccttttctgacagcaccaaatctggagctttcttagtaggttttttccaaatcctatagctttttttctaccactctcttacggagacacacatgggttcccaatggtgcgtgttcttcctagctgcaacagtcaacccaatttgttcaactacatgtatgttcctggggatctttggttgaaggatattaacacttttaggacaagagcccatgcccattccatgcatctgcagcctagaattctgggaagcaccaagctaaatcacaaatgcaaggcctggtttgatactgtgcmcctggtagggactagaacaggaggcctccaagaactttggactaagaaattaggaggatggaatt

SEQ ID NO: 222723 - DNA, 449 bp, Homo sapiens
attttaaaacttaacattctagcaatgctagcaatatccctaatactttcaagrcatagcttatgaagtaatacacttacacataagatgttgtttggagctaatgttaagggacccaccaatcagattcctatggtttgagggatatatggtagctatatggtctgtaaggctggttatatttaagaaattacctcttgtgctcagttaaacatggaacgttgggcatatggttatctgtgctccctcctgaaaccccattaaaaccccatgaactgaaaggttgggagggggtagaaatcaagggggcagaagtagcattcaaagacaaaaagtgtgaaaggggaaacagcagaggaggaggaatgccattttgactggtggcaagcaggtgtgctagggctgagttagcaaagcagagaaagctggaagtgcagcagccaagggga

SEQ ID NO: 222724 - DNA, 535 bp, Homo sapiens
acagtatcaacaaaaaagtcccacaaaaaacatatccaaaggtcagcagcctcaaagatcaaagctagataaactcatgaaatgagaaagaatcaacaaaaaagtaaccccactgaaaactcaaaaagccagagtgcctcttctcctccaattgattgcaacacctctccaggaaggacacagaacttggcagaggctgaggatggatgaattgacagaagtaggcttcagaaggtgggtaatracaaacattgctgagctaaaggagcatgttctaatccaatggaaagaagctaagaatcatgataaaacattacagaagctattaaccagaaaaaccagtagagaggaacataaatgacctgatggagcggaaaaacacaacacaagaacctcacaatgaagccacaagtatcaataaccaaatagactggagaaaagaatttcagagcttgaagactatcttgctgaaataagacgggcagacaagattagagaaaaaagaatgaaaaggaattaacaaaacctctgagaa

SEQ ID NO: 222725 - DNA, 554 bp, Homo sapiens
gaacaccacgaagtacattacagacaagattctgaaacataagttattaactggtttctttacatttttatttcagtaactttattgtaaaattattgttatttatatattttaaagtaccaaattcacatctattctcacataaaatttagctttccactcatattaatgccaaatatctcatagccaaattttagtgatgtttttatgtcaatttgtgcagaaaaataagacacaattcaagagtcagatgcagatggttctactaaacatttgttttctatttcagtaatttctgactttatctgtataatttatttccttctacttccttcagatttcatttgttgtcatttatctaactttctaggctggatatttagatcatttattttatgacatttttctttttattagtttatgagcccataaattttccttctaacaagytttagcttcataccaaagtacttgtatgtcacattttattatcattaagtttagaatactttcttattttcatttaatttattctttgatccacagattgtata

SEQ ID NO: 222726 - DNA, 391 bp, Homo sapiens
aatataattttgtggctagaaaatccaaagtcatctacagataaactatttgaattaaaagtaaattcagcaagattgctgatacaaagtcaatatacaaaaaccatctacttagaaataattccatatataaacacaaaacaataagaaaataatatgtgaaaagcaataacatttacaattgcatctaataaaaacaccaaatacctagtaatatattttacaaaagacattgaagacttctattcagaaaactgygaaacttaattgagatgaattgaagaaacctaaacagatagagagatatataatgtttgtgagttgaaagagcctatattgcaaagctatcaattttctccaaattaaagtatgtattcaattcccaaaaaat

SEQ ID NO: 222727 - DNA, 556 bp, Homo sapiens
cgtggaactgtgagttgattaaacttcttttctttattaattacccaacctcgggcagttctttatagcagtgtgaaaaaggactgatagaggaagatgaagtaattactcaatattttcatcagtacaatgagcaagcactgattaagactgtgctgtatgaaggacactatataggtgcctaatattacccctgactaagcttgtttgtacttattttccagcagraataatggattctgaattccctatggatgacagcaaagcagaactctctgtaactactgcttgtctctgtctcctactacttcaatataacatattatagagacttatataagcaagataggtaaaataacatttttgtgattaataatagctatattttattaagcatctgctgtatgacaggtagtagctgaaacatatattagttttatttgaatgtgacctattgtattggttaaggtaatactggatgctgtaagagtaaatcctggctggtgcagtggctcacacctgtaatcctagcactttgggaggccaaggtgtggac

SEQ ID NO: 222728 - DNA, 598 bp, Homo sapiens
aatatgctaatttaagcacttaaaatgtaattatcagctgattgtatttctttccactgcctttgcccactttggttaaaacaattcagcagcctttgatgtagtagcacagtgccggccacatcccaggtactcaaaaatattaacttctctcctccctccctaataaaaatttaaagtgtcaacttgagtttagaataaacagagattaatggttttactagttcccttagtacatcccctggctgcaactgtttttctcctggcaggcaggtggataaatacagtgtttggctttagctaagcagggtagtagctagcacatacagcacctcagtgtaaatatcaagaggtctcattctcccagctcagccctgcactagggtgcttgacaggatttgggcatcactagcacttagatgagtccactttgttcagtgcactaactgcacaaccatagaaggcaaccctgtaaccactcaagaaatgggakattggaagtttctgtcatttagctatcactgtcatatcattcatgctgaaaatattagcccagctatttccaatcataagatttttcacagcctcttctcttcta

SEQ ID NO: 222729 - DNA, 603 bp, Homo sapiens
aaggagacccaggtggcctctgcagagccgtttcaggagatgatggaagctaaaggagaagcaagaaaatcgaaggtgaggaggtgaaaggaccatgtgtagactcrgctcttgaattgttcagaggttcctggaaagagctgaggcctgtctcaaagatattattacagaatcctgagtcacattcatcattctgaaggtttgctatcttcttttctttaacatttttttttctgaaacagagtcttgctctgttgccaggctggaatgcagtggtgcaatctcagctcactgcaacctccacctcctgggttcaagcgattctcctgcctcagcctcccgagtagctgtgactacaggcacgtaccaccacgcccagctaatttttgtatttttagtagagacggtgtttcaccatgttggccaggatggtctctatctcttgacctcgtgatccgcccaccttggcctcccaaagtgctgggattacaggcatgagccaccgcacctggcctttctctaacctttttgaaaagtcttttataatccctttaaatctccctttcttccattctgtgtctgggcaattgccacatttactat

SEQ ID NO: 222730 - DNA, 603 bp, Homo sapiens
aaggagacccaggtggcctctgcagagccgtttcaggagatgatggaagctaaaggagaagcaagaaaatcgaaggtgaggaggtgaaaggaccatgtgtagactcagctcttgaattgttcagaggttcctggaaagagctgaggcctgtctcaaagatattattacagaatcctgagtcacattcatcattctgaaggtttgctatcttcttttctttaacatttttttttctgaaacagagtcttgctctgttgccaggctggaatgcagtggtgcaatctcagctcactgcaacctccacctcctgggttcaagcgattctcctgcctcagcctcccgagtagctgtgactacaggcacgtaccaccacgcccagctaatttttgtatttttagtagagacrgtgtttcaccatgttggccaggatggtctctatctcttgacctcgtgatccgcccaccttggcctcccaaagtgctgggattacaggcatgagccaccgcacctggcctttctctaacctttttgaaaagtcttttataatccctttaaatctccctttcttccattctgtgtctgggcaattgccacatttactat

SEQ ID NO: 222731 - DNA, 591 bp, Homo sapiens
cagtactttttttctctctctttctaaccccaagtgaaattaaagaaaaaaaatttaaagaggtaaagtctcctaatcctcttgtgtgtttattttttaaaattagcataatttaaaattgactgttttccttggtatacagtactatgaattttcataaatgtgtagatttgcataaccatcacttcattcaggataaggaaaagcttcatcacccaaaaatatccttgtgctattcctatttagttacatttttccctaacccccaactgttggcacctctgatctattcattactattgttgtatcttttccagaatgtcatttaaatgaactcattgagtatataactttttgagattgattcttttactgggcatgatgtctttgaaattaatttaagacattgcatgtattgataattctttcattttcattgctgagcaatattccattgtgtggatatagttacagtattcatccactgaaggtcatttggrttgcttccagtttttggtgattatgaatagaatgattataaatattcatgcacaggttgttgtgtgaaaataaacagaaatttttaatttt

SEQ ID NO: 222732 - DNA, 536 bp, Homo sapiens
ttaaatataagtaagaattatttaggtatttttcttctggatttaataagtgccattaagagctcaaaattaattcatgagttgagtatagctcctactgaggaggtacagaagtgggttatgtctcagggtcttttcctggctctgtggatcacatgcttgtaactgtcatggtctgtgtttctgctctaagcaggactgccgacagcttcactgggctatgactaggctgtattaaccacagggcacgcacaaattgctcaaagattcttagaggaaatggatatagaaagaatcacattctgggtgtcatatttcaagtagaagttgggaatcaaaagggaaacttgttctccttcaccttatcaataatgattcctggcactcaagtttggattcttctttacttccttgcaagagatcatcttatggtgctaggactagcaagtttgttctgtttcttaaaaaggtgattgattaaatttactgatgagyaaattcaaaggaatgctattaaaaagtcatgttaaataaaa

SEQ ID NO: 222733 - DNA, 592 bp, Homo sapiens
gtgaggttggataccttggccaaggatgtacagtcggaaagaggtggagtccgtgctcctaaccactgccacgctgccctgtgatcagtaggaagatggaggctgctgatcaggaggacagtgtttgcttacctcaaaaacctgggcggccactggacacagagtactgtgtcacctctaatcataagaaaacaaggaacacgctcaacattgaaatgtaggcactgtctagagtggatgacatgtaagtaatagaacgactcttgacggaatgtgagactggggtgtttgtgccctgatggtgagggctgcagtctcattccttcgtctctcacctggtcatctttttgcccagtggcaggtactcaggtactgtacatgccatctcatggatgaagtcacaagaaacctgggcacstaaaaaacgacaatgtcctgtgacgggactaaatctgcctccaaaatcattgacataatatcaaagcaggggttctggaatttgaatgcatgtgcaaatcgcgctcaaattgtttaaatgcaaattccagacccttccccaacttcccccccattctcatttaaggaatgaatg

SEQ ID NO: 222734 - DNA, 592 bp, Homo sapiens
gtgaggttggataccttggccaaggatgtacagtcggaaagaggtggagtccgtgctcctaaccactgccacgctgccctgtgatcagtaggaagatggaggctgctgatcaggaggacagtgtttgcttacctcaaaaacctgggcggccactggacacagagtactgtgtcacctctaatcataagaaaacaaggaacacgctcaacattgaaatgtaggcactgtctagagtggatgacatgtaagtaatagaacgactcttgacggaatgtgagactggggtgtttgtgccctgatggtgagggctgcagtctcattccttcgtctctcacctggtcatctttttgcccagtggcaggtactcaggtactgtacatgccatctcatggatgaagtcacaagaaacctgggcacgtaaaaaacgacaatgtcctgtgacgggactaaatctgcctccaaaatcattgacataatatcaaagcaggggttctggaatttgaatgcatgtkcaaatcgcgctcaaattgtttaaatgcaaattccagacccttccccaacttcccccccattctcatttaaggaatgaatg

SEQ ID NO: 222735 - DNA, 574 bp, Homo sapiens
tggtatcaaggagtaaatttatatatataatataatatatatattatatatatataatatatatattatatatatattatatatatgcacacatatgtatatatgagatatatgagtaacactaacattaaatttttattaggtttatgtccatgtctatacctaattgatcattkgggcatgcattaataatctctctcacaatggataatgatattaactattagggcatagattagatattagctatcaggaaaccttgcctgaattaacatggttgtgatcaacgttattggattgacagtgaccaagaagtaaaatgcctgaactgtaacgcgtaatggcatctaaaatggagctctaagtcctcctcaatggacaggtaatggctctaaaacttctgcagtagctgtgaaacaaaggcaggatatgcactatttaaaagcctcttaacttcgtccaacagggatttcttacactgcccattttctcttcagttcctctatttctcttcttcattctcagagaattaagatacaccatgaagtcggaagtctttttgttcttactgtca

SEQ ID NO: 222736 - DNA, 626 bp, Homo sapiens
tagaaatttgcagatgtgttacataacaatcacttcctaacgaatgcttagaagatcctatttatacttttgagcccttagattctaccccaaatatgtcttcttaaatccactgtttttcttttctctttaatttcagtttgtttggtttaatgatagctactgaacataaatgccaaattacaatggcacttcccagctgtgtgcagaactttatattttaagtaccaatttgtgataaaagaatgcttccagctcaattctcatcagcattagaggttttagcaattgccaattatttttctaaattacctattttaattaagtaaaatattgtgaatttaagattatgaagtgttcaagcattatttcatctttaactaattagtgagaaaaaggaaattatattttgggacattaartggctatttttagaataaaatgcttctatggtttcaatgccttaaattaacagaaaatgcacaaacttctctcgaaatcctgttacatctggggtctttgaagtacaccttgaactgatcatttgttctaatgtaacataaatttgtatattaattagagccaaaatgcccaagagattaagcttggtatctcccttgactaat

SEQ ID NO: 222737 - DNA, 638 bp, Homo sapiens
attaatgaattagcctcaataaggtgtaaagaattaagtcaatggcttagattttgccagttatctggattttgttgttgttgtcacatggacccagtatattggtcatacacattttagtctgtttcttagaatttactgaactaaacagcattatattcagagtaattttgcccagtacctaaacaaaaataatcaaagtctgttggatctggaaaggatcttagaaagcaaattgtcacctcccttttgtaccaacagataaagaaacagaaaccagctcaggtaatgtgcttagctcaagcctaaacaactcatggctgaaagagctaaagctcattgaagtttcacctcaggaggtcaggagtgctaagcttcaatcacaggagatgccaacatttatcctcaggacatgacatgtatggatgttctgtttagtagattagaagctcctttcacgttacccaattcaaacatttctcaggtcccaggtcagaacttragagccttcacgaagggaaaggaatacatagtcctcttaccatgtgaggtgctgagccgctatctcggatggcgagaataaagttcctggtggcccaggctctcgtagaaagctttccgttgggcttgattaaatc

SEQ ID NO: 222738 - DNA, 517 bp, Homo sapiens
ctgttaggaccatagacaaccatggagtgaggagaaggagtgtgatgtcgggcctgtaaaaacctgcttaaaaaacaacccacacattcacctttcttcgtgtacctgctgagctagccactggcggtgtggaacatgaggccttcctgctctcaccgtaagcctggttgcgctgcctacacaaagactaatgcaccaggctacctccaaaagcattagagagcaatgtggtttttatgaaagtcttttttcggggggaatgccaaagagagaaccacataatacatccttcactgattcatttaaacaaaacaaaacaaaaaaasttgagtgcttactatgtgccagcgcagcaaagcttcctaaaaaatcctttaaaaacagacactatgcggccacacagtcattttcaatttaccaaatccctcaaagacttccccagagcctcgcccggtgaacctgaatcaatgtgtacagccacggaaggcctgaggggtgaaggaggttttcactaccg

SEQ ID NO: 222739 - DNA, 597 bp, Homo sapiens
atatcaatctctttcagagttcattgatcttgaattagaatttacaaaaaaaattctcttccaataatgtaaaccacagttagtctttactttcccaaacaaactcatgaaaagmttttaaaatttcagagctttcattgcatagttttctaatatttgaacatatatattattatatatacagaatattagctataataaatatatatttcaaatatgtatatgaacatatatatcattatatataaagtatattagctataatattgtattagtttgttttcatactgctgtaaagaactgcctgagactgggtaatttataaaagaaagatgtttaattgactcatagttcaacatgctggggttggcctcaggaatcttacaatcatggtggaaggtgaaggggaagcaagacaccttcttcacaaggcagcaggaaggagaagtgccaagggaagggggaagagcgccttataaaaccatcagttctcatgagaactcactcactatcaggagaacagcatgggggaaaccacccccatgattcagttacccccacctgatctctcccttgacatgtggggattatggggac

SEQ ID NO: 222740 - DNA, 392 bp, Homo sapiens
ccactctgctggtaccaattttctgyattagtttgttctcacactgctataaagatactacttgaggctgggtaatttatgaaggaaagaggtttaattgactcacagttctccatcactgggaaggcctcagaaacttacaatcatggtggaagctgaagggggagcaaggcacatcttacttggcagcaggagagagagagtgcaggggaaactgccacttttaaaccataaaatctcaataaaccatcaaatctcgtgagaactccttctctattatgagaatagcacggggtaaactgccctcatgatccaatcatcttccaccaggtccctccctcgacacacagggataacagtttgagttgagatttgagtggggacatagatct

SEQ ID NO: 222741 - DNA, 558 bp, Homo sapiens
agggaggaagtgactcacgacttctctcaaggctggcgtgccctttcccttccctggcttgtgcagtgctgcacagagatctgggaagccagtgctgaaggtggttggtgggggacagtgtgggagagtcctggccccttattaccactggaaaagagmtgctctccaatcagaaacacccattttcatgggcgcatgaatgagaaataggctctgcttattctatgcagatgaaggagctgcaccctgttgggtgccacttcctccccattctgttttatcatctcttgactggccatgaaagctgcaaaagagcctttatagaagtgcttctgtattgctctctgccgaacctgacgtgatgtcttctggggttaaagccaggcaggcccctctgtatctgtggggttgggttattatatcctgtagctctgagtgtaggggagaattaaggggctggtgttctaaaacaccataataagatttttttctattcatgtgaggctaaaagtgtacattgagaatcaccttggaaatgctcccataacctagacaaag

SEQ ID NO: 222742 - DNA, 558 bp, Homo sapiens
agggaggaagtgactcacgacttctctcaaggctggcgtgccctttcccttccctggcttgtgcagtgctgcacagagatctgggaagccagtgctgaaggtggttggtgggggacagtgtgggagagtcctggccccttattaccactggaaaagagatgctctccaatcagaaacacccattttcatgggcgcatgaatgagaaataggctctgcttattctatgcagatgaagragctgcaccctgttgggtgccacttcctccccattctgttttatcatctcttgactggccatgaaagctgcaaaagagcctttatagaagtgcttctgtattgctctctgccgaacctgacgtgatgtcttctggggttaaagccaggcaggcccctctgtatctgtggggttgggttattatatcctgtagctctgagtgtaggggagaattaaggggctggtgttctaaaacaccataataagatttttttctattcatgtgaggctaaaagtgtacattgagaatcaccttggaaatgctcccataacctagacaaag

SEQ ID NO: 222743 - DNA, 558 bp, Homo sapiens
agggaggaagtgactcacgacttctctcaaggctggcgtgccctttcccttccctggcttgtgcagtgctgcacagagatctgggaagccagtgctgaaggtggttggtgggggacagtgtgggagagtcctggccccttattaccactggaaaagagatgctctccaatcagaaacacccattttcatgggcgcatgaatgagaaataggctctgcttattctatgcagatgaaggagctgcaccctgttgggtgccacttcctccccattctgttttatcatctcttgactggccatgaaagctgcaaaagagcctttatrgaagtgcttctgtattgctctctgccgaacctgacgtgatgtcttctggggttaaagccaggcaggcccctctgtatctgtggggttgggttattatatcctgtagctctgagtgtaggggagaattaaggggctggtgttctaaaacaccataataagatttttttctattcatgtgaggctaaaagtgtacattgagaatcaccttggaaatgctcccataacctagacaaag

SEQ ID NO: 222744 - DNA, 577 bp, Homo sapiens
tgcattatataaatatggatatataggccaggcacggtggctcatgcctgtaatcccagcactttgggaggccaaggcgggcagatcacgaggtcaggagttcgagaccagcctgaccaacgtggtgaaaccccatctctactaaaaatacaaaaattagtcgggcatsgtggcacgcacctgtaatcccagctactcaggaggctgaggcaggagaatcacttgaaccgggggtcgggggcagaggctgcagtgagctgagatcacaccactgcactccagcctgggtgacagagcaagacttcgtcccaaaaaataaaaaataaaaatatggatatggatagattatattatttatcaattccactttatgttttttgctaccctcaccagactcggggtgggcaggctggcagggcctggttaagctcatcactgtttctccagcccctaacctgttggctcagcatgaatctgccggatgcatacatcaacccagaaattacttcctcctgtataaggaggtagggtttgatttagccttggagggaggaagaggttacgaggcacacaactg

SEQ ID NO: 222745 - DNA, 562 bp, Homo sapiens
ggcacggtggctcatgcctgtaatcccagcactttgggaggccaaggcgggcagatcacgaggtcaggagttcgagaccagcctgaccaacgtggtgaaaccccatctctactaaaaatacaaaaattagtcgggcatggtggcacgcacctgtaatcccagctactcaggaggctgaggcaggagaatcacttgaaccgggggtcgggggcagaggctgcagtgagctgagatcacaccactgcactccagcctgggtgacagagcaagacttcgtcccaaaaaataaaaaataaaaatatggatatggatagattatattatttatcaattccactttatgttttttgctaccctcaccagactcggggtgggcaggctggcagggcctggttaagctcatcactgtttctccagcccctaacctgttggctcagcatgaatctgccggatgcatacatcaacccagaaattacttcctcctgtataaggaggtagggtttgatttagccttggagggaggaagasgttacgaggcacacaactggaggaaagagcagga

SEQ ID NO: 222746 - DNA, 622 bp, Homo sapiens
aattcacaaaccatgagctcaaatgtgcacatgtaagttcctttaactcaatttaattccttgctgcaagctcccattctgcccaagcagaacccataatttaggcaataccagataaacgctgcccattcagggctgtttccctttggtgtccaccctcctccctaccctaagacagaggctaagctctgagaggcagatgcaaagggcatgaagttgggggagagcggtggggggtcagtttggacttctctctgtcctgattctaagccagtagcctttgaggtgtgacttacctgggtggccttcatatgctcccacctgtacatgggctgggaggcaggggcttcctctgggatctctgtggcgatgggccacccaatctctgccactggctgcccttatctcagctgaaaggcccccaaaggtgcttcagatccctcatattctctcttcttcccctcctccccactgccgccccccacccctcccycaccccccaccatttcctgtggcaggtggaagggctgtctggcttcctgcacacccctacagctcactctggatacctcttgtagcctctctgtgaatgtcacatgagggaccctggtgaggctgccat

SEQ ID NO: 222747 - DNA, 593 bp, Homo sapiens
acactagaaggctatttattgacttgtaaagaaagcatcattatttaatatggaatatctgtggagctgcccctattaaatagttacagtcatgtaaatgcaattttccaaagtatgacctacataaagctagtgcctagaaattatccatgaagacttccagggttaatacatttgaggatagagactcataatgtttgttagcatattacagactccaagcggttcctcagtagagaagccagctcaatgttgtttaaaccagtattgctcaaagataactagtgcgacactttattcccaagatgagttattaatgcacttaaagaattgctaatatagacatatgcaaaatcactgtctaaaagtttgtaccagattatgtacctaaatttgtatcaactccataagcattataaagactcttcgttgcttatattttccttttctcattgtttaatttgggggaataaaaggattcatttcagagaaacaatttctggagacaagtttacagggggaacactgtcactctttggccmgcatgggaaggcgctacaaagtcatcttctatccgatatggaagttgaaag

SEQ ID NO: 222748 - DNA, 533 bp, Homo sapiens
gcactgcgctcaagcggccatggccttcctgtgcctgtggattgcatcaagcaccttcgtggcctttttatcctgggcctgggatgcactctcatggtcctgcccagcctggagctccaggcaaccctaccaccagatcggggccagccttcagggcaatgagtgttggcacatccatttgtaaatcttagctttgtgcatccatttctaaatcttagccagtcgccttcacctgaaagctagctagctctagcctgatggtgtctgtctgcaccctacccttgtcgtggagatgctgctgcttttgttccctgccctcacatggctgagcagcctccccacgggaaactcatggggccagaaggctggcccctggcttggggaggacagcaaagcccgtgcagcctgcctgcagctggttctgcatcattgccttctgtagctcaggaggagttacccttgccctcctgtctcccagactactcyggctgctccccagcatcctggcattattgaagtgacagaaagcttct

SEQ ID NO: 222749 - DNA, 572 bp, Homo sapiens
gaattctggaatgtggtgatgaccaacaggaattttatgagtgtccctctgtggaggagcctgagagaaaggctcatggagggcagagggtggagggcgtgggaccaagttccttagataaggctgtggccccatggtaagggtctggacggggaaggtcagtgttaaccctttgaagggcccccggggagtggatcaggttcagagcccaaggctttcacacataggtgtgttctaaagctggtaaagcctctgatcatcagccagtgtcaggtgtcacagcatagccaagcgaccagacgagcagatgagaccttgttaatctccagtggtgatgagtaaccrttctctctatcacatatcacatactgggtgcgttagggggcccttaggactcgctccattctgccttaccccacagtgacttgaaggcacagctcctgttccccaaatgagtctcagtgtgttgttctcattcctgccctttgagtacatctacccaacctactgatttcccttgtttaatagcatttaaagctgggtgcggtggctcacacctataatctcagcac

SEQ ID NO: 222750 - DNA, 507 bp, Homo sapiens
gaatacgtccaataatactttattctcactttagtatactaaaagtatatgatttcaatttggaatatttataccagcacctggtaaacctgtgtctcaatgtcattccacataccaaacaaatctatttcagctttttaaaaaaatattttcccatgattaaacacttctagtgaacttataaaggccaccacttctctctcgttcctgctcctacaccaccacctccccctcaacttgttttcctcctccttcacctcctgaatcagccagcatagagtttagtttatawaaacttattcaaccagggaaaatttggcagggatgtcatactgattgttctcacctgtggtaaaggatttgtggattgagtcctctacttaggtaccatttaatgattaaccccaaagtgggcaaagaaccagaaacctggaagaatccttaagcgatcatctgctaaaatcttcgcttccaggtaggcgaatccctaagtcatctagaaaagag

SEQ ID NO: 222751 - DNA, 409 bp, Homo sapiens
ggaagtgcttcataaatgtttggtgaatgacattttgaattctgggggatccatgaatgatttatgctgtcactaaatctggtataatgtttggattgagttttaaagtagaatgctttatttatacaatcaccatgtacaattttttttaaaatttatatatttctgactatgatattgttggtttctcagaaagtcagcatcaggattttttttgtttttttgtttgtttcttttcaatttccttttgggtcttarcagtattgatagattattgctcctgctgactgtgttataaaaaggacttgccttagtttgggctgctgtaacaaaatgccataggctgtatggtttaaacataaacatttatttctcacagttctggtggctggaagtttaaaatcaaagt

SEQ ID NO: 222752 - DNA, 541 bp, Homo sapiens
caggcactgaactaaccaggctttacaatctcactacagcagagataaaaagcagagtcccttccaggaaaataatcattttccacttcaaaaatattaaaaatcctactccaaaatactaaatctttccaaagaaccaggtttaaatgtcttsacacatattaatgccattaagtagtatgtaatttataataccatcaaatatttcaaggcatgacctttgtaaggaaaactcacatttaaatcatgcatttttttcctacagaaaaaaaaaatcacaaatatttttcctcatccagtgactcgcccccaaaatgacagctttttagtttgaggcttttaagctaaagaatgtgtaagtataaacctgcactgatcggtgtggtagctactagccacaggtgactactgagcacttaaaatgtgacgattctaaattcagatgtgctgtaggcataaaacagacaccaaatgtcaatgacatcttacgaatgaaatataaaataccttttttttaaataagaatttaaaattgaaatgg

SEQ ID NO: 222753 - DNA, 467 bp, Homo sapiens
aaccccttccttcctcatgccttgctgcctggggagagggagggttttgatcttatttgcctcaatgcactgtccaataagattggcaagtctccattcttgtaaatgtgggttgactgaattaatgaataaacaaatgaaacacaaagagcattgtagtgaaggtgtatggctttgaataaataaaatttcctgttcttgtcactaggaataggtcactatataaagcttttgggaacatctttctttcaccatccaatattttaaaaacaaggaaactacttattaaatrttattgatgtaatatcattatctttttctaaagttgtctctaagggtgcaggaaaacctatagggcagaaaggctattgtctaagcataatttaattaactcaatcacagtcacctaaagtctaattgaaaattaacaacatgatcattgcccataagcttatacctcacttagt

SEQ ID NO: 222754 - DNA, 595 bp, Homo sapiens
gcattgacctttattttaagacaacatggctgttctcaagtgtaaaatctccctccctggctagggctttagagcattgtttttctttaggacttgactgctaccacagtatctttttagcacctgcctattaaagctaattttagtgccaccattgtaaaccacctcctagtctgggaagagttttggcttgtgtgtttgtgttatgaatgtctgtgtatcatattttgcattgagatttgcttttttgtttctggatrtttgggggttcataatttctcaaaacaaaatatttgtgcccatttgggttttagtttgttgcagcaggtaatatatgtgatgccatctagaattcagaaagtaaccttctgcacttactgggtgaacggaatggatacctaggagaagattcatgttatttgagcctaatgttgattaattaaaaatctatgctttttcctatgaggatatacaggaacggtcccctccttctcttactacccagccaatataattcagtattgtttgatcccaagacctagggagattttttaagatatacatatatttaatataaatgtatacatttatgtat

SEQ ID NO: 222755 - DNA, 544 bp, Homo sapiens
ccttctgcacttactgggtgaacggaatggatacctaggagaagattcatgttatttgagcctaatgttgattaattaaaaatctatgctttttcctatgaggatatacaggaacggtcccctccttctcttactacccagccaatataattcagtattgtttgatcccaagacmtagggagattttttaagatatacatatatttaatataaatgtatacatttatgtatatatacttttttataagtataattgtatattttgtcatttaaaatatttggaactatttttaaactatgggttacaagttaggttaagccattttagttggtgaaatcagtttgatttcaacccctgcttctttttgttttgtttctatttagttttttattctttttattgaggtataatttgcaatagcagaatgctcaaacatgaattgtagagctcactggagttcgcatttgtacactgatataagcagccctcaggctagcttgtacctgagaccctctttattttgacctccatcaccgtagatta

SEQ ID NO: 222756 - DNA, 520 bp, Homo sapiens
atggatacctaggagaagattcatgttatttgagcctaatgttgattaattaaaaatctatgctttttcctatgaggatatacaggaacggtcccctccttctcttactacccagccaatataattcagtattgtttgatcccaagacctagggagattttttaagatatacatatatttaatataaatgtatacatttatgtatatatacttttttataagtataattgtatattttgtcatttaaaatatttggaactatttttaaactatgggttacaagttaggttaagccattttagttggtgaaatcagtttgatttcaacccctgcttctttttgttttgtttctatttagttttttattctttttattgaggtataatttgcaatagcagaatgctcaaacatgaattgtagagctcactggagttcgcatttgtacactgatataagcagccctcaggctagcttgtacctgagrccctctttattttgacctccatcaccgtagattagt

SEQ ID NO: 222757 - DNA, 441 bp, Homo sapiens
gccaccaccttgcctctgagtgttgcctgctttgctgaccccagcgcactgccaggcatacatgcactgcctacacacctggaaaggcaccccagagtccaggaccagggaactgactgcaggagcttaccctccccatcaggttgacccaccatggccaccatactattctggaacccacaacggtcaccagmtaggaattgtgcaaactgggtcctgcttctccattttttacccctgcactgaagtgtcagcaaaaacattcagtgcctagggtggaaaaacaatctacctaaatcctaaagcttcctgtacctcagaaggggtcaaaaatagtggagccaactaattacagcctagtgacaataggttccataatcctttatttttacatttatatcttagctcaggcagaaattattgaaacattaaacagaattc

SEQ ID NO: 222758 - DNA, 494 bp, Homo sapiens
gaattgagtgaataaagcactaaataacagtgagtaggtggggaggaagtgaatgctacaaatggagacaattcttttaacaactttcaacttgaggggaagaaggatgaatgtaaggaagttttagatgaggggagttagaggatcaaggaaggtaccaccttcccttgatgaaccttgagaaggagagaaggactggagggagtgagtggtgagtggatactttggggccaaacagacattgaagagagggtgaggaatcaggggaaatgcaagaccttgcctsattcatacatttttaacacataatatacagaaagtagctgaccagggcgtgaggggtgaggagtgggtatggagatcagttgcctcctctgagcacattctcctaaagtggcatattttcaacaattttaaggtagtgtgttcacatgatgatggttatagataatgaaaaggcagtagaaaaagcagtaagggagcaagactgggag

SEQ ID NO: 222759 - DNA, 621 bp, Homo sapiens
gaaacttttgtttgtgcaagaaagaagcagaagaacctgaggcaggtgttgtttccaagcttagggctcaagggttggggagggaacattgtttttaaacagtcgaatgcatgacaaagtaaaatcacaacagtttgacagcacaattttaataagttttgcttttttctggcaccgatattcatcaagttatggcttgaagcaatagagggaatgataaggaaagaaacaagtgttgagacataagtagtcackgtggtgggcgccttgaatgttattttgttgtgagaattgttcacgccgttgatattcccaaatgctttaccagcttaaattaaaaaatgattatttaatatattcagctcttctgcctacccctgagagaacaaacattacggtcttccacgtcgctgaaggtggagcaggagtggattcataactccacaaagccctcctcacccacccctgtctcctgcaagttggggtcatgttccaccaccttgcaggctgcagctgaaagccatggagaactcagcttttctggggtgcttcagaagatgtgcagggatgtgatgcttgtggagggagaggggcggcagctgctggggcctgcatagaatg

SEQ ID NO: 222760 - DNA, 500 bp, Homo sapiens
gaattctccgacacatagaacaatagtttgaaggaaaactgcatttcaaatgctatcctgagagagcactcactatcttatttctccccactaaggctttcttstcccaaagtgaggcaggggccctgcccccaacaggagaagggggcctgggctccagctgctgctgggcctggccctgggagaggaacctaactggctgggggctctcgctggggctgccttagggcagcagagggtggggtgagaagctgccaggcctgcgaaaagcactgccaactgaaagaggtggaactatgaatcagggactctcagaatcaacctttcacatacatacctcgaatgaagacaacctgtctccaaatctgaggccccagttaccagttgtgtaaccttgggcacatccctcaccctcttggtgtcctagctttcttatctttaaacacctgcctcatggggtcctttaaaggataaaatgagttaataactgaaaaaatacc

SEQ ID NO: 222761 - DNA, 569 bp, Homo sapiens
ggggggagtccaggtctctatcttttcaaaattccgtgcttatacaaacaatcctgaaaagatagtcctgcagcacatggcctatgacttcctagatgtataaacatatgagagaaacagatttatggataattgtctctcaacatctaattcctatttgtcaagtttatttggaaatgaaaaattctttatagattcttaggaaggcacaaggggagattttagggaggcttagaattgagtttttaaagttgaaatctacatgccytcaaggtattaaggaagagagacatttagacagaacacaacatatctgccaaagcatcacttttatctgttcaatgtgtgtctactcaagccccaatatgagaatcccaaatcaataatgcatgactatttaatggagctgtaaaagttaagggcctcattcagtcaagattaacacaaagattaaaaacatgttaatctttaatttgtgctcattttaaaagctatcatagctgattctgatgcaccatttgaagttcatcagaatcaactatgatagctttttaaaattataaacacag

SEQ ID NO: 222762 - DNA, 569 bp, Homo sapiens
ggggggagtccaggtctctatcttttcaaaattccgtgcttatacaaacaatcctgaaaagatagtcctgcagcacatggcctatgacttcctagatgtataaacatatgagagaaacagatttatggataattgtctctcaacatctaattcctatttgtcaagtttatttggaaatgaaaaattctttatagattcttaggaaggcacaaggggagattttagggaggcttagaattgagtttttaaagttgaaatctacatgccttcaasgtattaaggaagagagacatttagacagaacacaacatatctgccaaagcatcacttttatctgttcaatgtgtgtctactcaagccccaatatgagaatcccaaatcaataatgcatgactatttaatggagctgtaaaagttaagggcctcattcagtcaagattaacacaaagattaaaaacatgttaatctttaatttgtgctcattttaaaagctatcatagctgattctgatgcaccatttgaagttcatcagaatcaactatgatagctttttaaaattataaacacag

SEQ ID NO: 222763 - DNA, 569 bp, Homo sapiens
ggggggagtccaggtctctatcttttcaaaattccgtgcttatacaaacaatcctgaaaagatagtcctgcagcacatggcctatgacttcctagatgtataaacatatgagagaaacagatttatggataattgtctctcaacatctaattcctatttgtcaagtttatttggaaatgaaaaattctttatagattcttaggaaggcacaaggggagattttagggaggcttagaattgagtttttaaagttgaaatctacatgccttcaaggtattaaggaagagagacatttagacagaacacaacatatctgccaaagcatcacttttatctgttcaatgtgtgtctactcaagccccaatatgagaatcccaaatcaataatgcatgactatttaatggagctgtaaaagttaagggcctcattcagtcaagattaacacaaagattaaaaacatgttaatctttaatttgtgctcattttaaaagctatcatagctgattctgmtgcaccatttgaagttcatcagaatcaactatgatagctttttaaaattataaacacag

SEQ ID NO: 222764 - DNA, 555 bp, Homo sapiens
tcattttaaaaaatttaaagataagattaagaagcttctgagatttctcaagagaatgtgattctgaaaacttagcttctgagaattttaatattttaataattcaacatttcatattatgtgatagacatggatctaaaatctgcaattactgatcataaaagacaaacactttttmtctcatggaacatacattctaatgcaggcaacaggaataagtaaaatttatagtaagttgctaataaaagacactaagtacaaaaacaaagtataaaaagataccaagaaatgctggagattttgaaatagcatgtggccaaagaatccctttcatgaggtgatatgagaacaaatattaggaatgtcatggtaaatttaagagattagtgtccataaatcagagagaaagagacattatcatgtaggtgatggtattgagaagtaaggaggaccagatctttgaaagtccttacaggccattaagaggtttatggtaacaatttaaatcttgaggaaagcctatcagaaaaaaatggactgagaagagtccttctt

SEQ ID NO: 222765 - DNA, 555 bp, Homo sapiens
tcattttaaaaaatttaaagataagattaagaagcttctgagatttctcaagagaatgtgattctgaaaacttagcttctgagaattttaatattttaataattcaacatttcatattatgtgatagacatggatctaaaatctgcaattactgatcataaaagacaaacactttttatctcatggaacatacattctaatgcaggcaacaggaataagtaaaatttatagtaagttgctaataaaagacactaagtacaaaaacaaartataaaaagataccaagaaatgctggagattttgaaatagcatgtggccaaagaatccctttcatgaggtgatatgagaacaaatattaggaatgtcatggtaaatttaagagattagtgtccataaatcagagagaaagagacattatcatgtaggtgatggtattgagaagtaaggaggaccagatctttgaaagtccttacaggccattaagaggtttatggtaacaatttaaatcttgaggaaagcctatcagaaaaaaatggactgagaagagtccttctt

SEQ ID NO: 222766 - DNA, 547 bp, Homo sapiens
agatgtatagtctagtcttctcttttccttctcaggaaaaagccaggagctggaatttttctcctgatcatgtagcaccatgctggtgggaaacactatggcaagaatgtacaacaaattgtcctattggcttttatgaagctggtatcatgctttcctcaggtgtagagtacttttaactggtttctggatttcttaccgaagaatttggtaagtgtgttgttgttggatcagagtctctgtggcaggaagaatggtctgggtcttcctattctgccgtatagatatttgtcaattgtcaatgtgtcaattaaaataaaatacaaaacctaagcatattatttcaaaaataaaaaaaaaatcttgttttgtgatttaacatgtgatctaaccttgagaatattccctgagcacttgrgaagtgtgtgtgttctgtagctgttgagtggaatgttgtgtacctgtctgttaagttcttttggtctataatattgttcaagtcttttatttccttattgactctctgtctagtttgtgtggcagttat

SEQ ID NO: 222767 - DNA, 590 bp, Homo sapiens
gtatatccaaggcagtcttgttttatgctattgccttaatgtttcccttttatttaatatttctcccaaatgttttcatttttaaggacagtattattgttaatagttgcattaaaataatctgggctggatttggtaccatctccatgaagtatttcttggtctctgtcatggtcttgtctagtagtgggtaaggtgcatgcgtagtgaacagaattctcactttaacacgtgttcagtctgagagatgaccagygataacctttttctccccacctccccttacctggtgaaaagtaactcacacatctcttgcatgcagcatgcaggaagaggacatactctccagtgaaacaacttgtacccagactctatagatagctacttttttctagttcaaatgacagtgggagaagtattcgatgttgctaccagctcctactggagacttggtgtagcagctagctgcttatatgaaccattttcatgaagccaccaggctgcttgttggtggggtcagtggagaaattgagaaattataggttatatataacaatagaaatatgtacaagatatgggagcagaacagt

SEQ ID NO: 222768 - DNA, 378 bp, Homo sapiens
ctcatggccttgagctgagggcatcattatttctgcaaccctgcggcccattcccagcagctacagctcaatgatccataaacacatgagtcacaacacttgaggtcaccaccttcaatctcacaatmtctaagctggcagaaggctcaaaagcaatgttttccctcttaagggccaccaccatctcctcctcctcctcttttgtcttcttcttcttcctcttctttatctcccttcctcctcctcctctttcttcttcctcttctgcttcctcttcctcttctccttttcttcttcttcctcttctgcttcctcttcctcttctccttttcttcttcttcctcttcctcctcttctgcttccttcttctgctgcttc

SEQ ID NO: 222769 - DNA, 350 bp, Homo sapiens
tcatgtacaataccctgcatgggtgctgggaagaacacaaaacctccagtgtaatcacatacctgctctcaaggaaagtacgcaagcccakcctgatcaaaatggagctctgaatagaattggcataaaagtcccttttgcaaagacagccctcctggagacaatgctaaagcttaatcccaaatcttttctgtattcccttgcaggaggcaaaggcaggtggcaatttcactgagctctgaaagccatttaatccccttctggaaaacatttgagtttgcctcacttcattgcccaggctcccctcatgggtatatgagcattcaaggatatcttctcctggttctaaa

SEQ ID NO: 222770 - DNA, 350 bp, Homo sapiens
tcatgtacaataccctgcatgggtgctgggaagaacacaaaacctccagtgtaatcacatacctgctctcaaggaaagtacgcaagcccatcctgatcaaaatggagctctgaatagaattggcataaaagtcccttttgcaaagacagccctcctggagacaatgctaaagcttaatcccaaatcttttctgtattcccttgcaggaggcaarggcaggtggcaatttcactgagctctgaaagccatttaatccccttctggaaaacatttgagtttgcctcacttcattgcccaggctcccctcatgggtatatgagcattcaaggatatcttctcctggttctaaa

SEQ ID NO: 222771 - DNA, 608 bp, Homo sapiens
ggtttatgtcctacaggaagccctcagattctacctccctatcccagcatccccctgactccttccccaaataataaggaccccccttttacccgaatggtccaaaggagatagacaaatggataaacgatgaacmaaacagtgccaatattccctgattttgccccctccaagcagtgggaggaggagaatttggcccagccagagagtgcatgtatctttttctctctcagacttaaagcaaattaaaatagacctaggtaaattctcagataaccctgatggctatattgatgttttacaaaggttggggcaatcctttgatctgacatggagagatatcatgttactgctaaatcagacactaaccccaaatgagagaagtgccgccataagtgcagcctgagagtttggcaatctctggtatctcagccaggtcaatgataggatgacaacagaggaaagaacgattcaccacaggccagcaggcagttcccagtgtagaccgtcactgggacacagaatcagaacatggagattggtgccacagacattcgctaacttgcgtgctaggactaaggaaaactaggaagaagcttatgaattat

SEQ ID NO: 222772 - DNA, 603 bp, Homo sapiens
aataaaaaggccataaaaagaaaagatggacttaatctctttgctttctttcaagtgtagactttattcaatattttttttttctacttttggatgctctcagacacctttaaggttttctaaaaatgttttctttaatatttaaagtaatctgtgagacagtccaataggagattgtctccattactggactctagaaatcaaatgcattttaagtgtctacttgcatcattattttaaggctgaattgggcaaagcaactcatatgttcaagcctaaaatcaaaggacaataaaatatattttactaaccagcagattgtggcaagaatcttaatttaaaatacaactataagaagtcaagaattggtcaagattaatattaacttgtcaggtaatggatatttatagtgatgattttttttycttaaaaaatggtcttaaatattaatctaatgacatacatcaacaattaattctacaatgtttatattaaagatattcaataataatgaagtttttaccatagacccaaatctgtgtcaaatactgagaatgtagtgataaagcttatagtctactgagggaaatagacattaagcaa

SEQ ID NO: 222773 - DNA, 603 bp, Homo sapiens
aataaaaaggccataaaaagaaaagatggacttaatctctttgctttctttcaagtgtagactttattcaatattttttttttctacttttggatgctctcagacacctttaaggttttctaaaaatgttttctttaatatttaaagtaatctgtgagacagtccaataggagattgtctccattactggactctagaaatcaaatgcattttaagtgtctacttgcatcattattttaaggctgaattgggcaaagcaactcatatgttcaagcctaaaatcaaaggacaataaaatatattttactaaccagcagattgtggcaagaatcttaatttaaaatacaactataagaagtcaagaattggtcaagattaatattaacttgtcaggtaatggatatttatagtgatgattttttttccttaaaaaakggtcttaaatattaatctaatgacatacatcaacaattaattctacaatgtttatattaaagatattcaataataatgaagtttttaccatagacccaaatctgtgtcaaatactgagaatgtagtgataaagcttatagtctactgagggaaatagacattaagcaa

SEQ ID NO: 222774 - DNA, 568 bp, Homo sapiens
caactggaatcacccttgtaaaagcagctaggaagcttgtgaggttccccatgttccaaagatctcaaggaaccttttctcttccagcttccaacattctctagtacaacatggcctcccaaggacatactcccgttagcaatgagctcagccaaaggacacacatagactcccatggccctctgtcttgaaaggccaatgctgcaaggatctaaggaaggttatgtggagacatccaacaagcttccatttaaaagacccagcaaagtttcagttaggaaatgttctagggaagtgtctgaacacagcctacacaggggaccaaaagatgtcttcatcaatccagccaatgaagggtctgtggtctgtgtgagaaagagacaaagagtgaagacttgctgagcagctcgaggaatttcttaccaaagggctcaaggaaataccaagaccagaagcaactagaaaaaaaatggaaattattcttagaaagtacattggggyagatcaatcaggataggatttgtctgtgtatatgttgttcatggattgctgccatttatacatcgtc

SEQ ID NO: 222775 - DNA, 568 bp, Homo sapiens
caactggaatcacccttgtaaaagcagctaggaagcttgtgaggttccccatgttccaaagatctcaaggaaccttttctcttccagcttccaacattctctagtacaacatggcctcccaaggacatactcccgttagcaatgagctcagccaaaggacacacatagactcccatggccctctgtcttgaaaggccaatgctgcaaggatctaaggaaggttatgtggagacatccaacaagcttccatttaaaagacccagcaaagtttcagttaggaaatgttctagggaagtgtctgaacacagcctacacaggggaccaaaagatgtcttcatcaatccagccaatgaagggtctgtggtctgtgtgagaaagagacaaagagtgaagacttgctgagcagctcgaggaatttcttaccaaagggctcaaggaaataccaagaccagaagcaactagaaaaaaaatggaaattattcttagaaagtacattggggcagatcaatcaggrtaggatttgtctgtgtatatgttgttcatggattgctgccatttatacatcgtc

SEQ ID NO: 222776 - DNA, 568 bp, Homo sapiens
caactggaatcacccttgtaaaagcagctaggaagcttgtgaggttccccatgttccaaagatctcaaggaaccttttctcttccagcttccaacattctctagtacaacatggcctcccaaggacatactcccgttagcaatgagctcagccaaaggacacacatagactcccatggccctctgtcttgaaaggccaatgctgcaaggatctaaggaaggttatgtggagacatccaacaagcttccatttaaaagacccagcaaagtttcagttaggaaatgttctagggaagtgtctgaacacagcctacacaggggaccaaaagatgtcttcatcaatccagccaatgaagggtctgtggtctgtgtgagaaagagacaaagagtgaagacttgctgagcagctcgaggaatttcttaccaaagggctcaaggaaataccaagaccagaagcaactagaaaaaaaatggaaattattcttagaaagtacattggggcagatcaatcaggatargatttgtctgtgtatatgttgttcatggattgctgccatttatacatcgtc

SEQ ID NO: 222777 - DNA, 611 bp, Homo sapiens
ttctctcttaacacttacctataacaagatactaaatacacagtgaacctaaataatctgtcaaaatgtagtctcaaggatcttaaaataatwgaatgtcaatgaatttaccttctttcttgaacctggatcctcaggcatattctggtttcctaagttgctgtgtttttaaaatactttttccacatgaagaaggggaatgctgttagcactaccactatctctttccccaaaatggcctgaatgattactgttgggcagataacgttctattaataagtggtatgaataggtattaacacatcacatcaataacagtcctgggattaggaacttttattacccccattttagagaggggaaagctgagacagagaaaagctaagtcacttggttatgagttatattaagctaataatagtgagaatgggaattataatcaaggcattctgatcacaagggtgtatacttttaaccactatactactctgcctttctggaatctttagaaatgtatgctgtaactgtactcaactatctatccagagttcctcgtttttctgagatggtttttggagactgatgtttgttcatagatcattggaaaattt

SEQ ID NO: 222778 - DNA, 579 bp, Homo sapiens
gcagggtcatgactgctcacagacccttaaaaagcctcatggcttttcagctgagagttggtttcaatggacagtgagaaaggaatatgccttgcgacttttaagcccatagtctgttcccagggttctatctttggagaagaaagaacagatataggaggaggaggctgcatataaaacgattaaaaatttgttcaaaattaatttgaagggctaattaaatttaattggataagttgccagacatgaatcaaaatgagctttttttttttcttctctttctctctgaatctcctcagagattcttcccaatactttggactcatcttggccattgcagctcatatggktgaatataatttaatactatgctcccttaggcagccagtctctgggttaagcaacgctatagccaaagaattataaaattataatgaagggaccttgggaagtcatcctttcacttttacctaaaccattgcaaaactgattatatatgttgcctttaaattcaaccaaatcttatcagatgctgacttcctctgttggcccaattgtaaagcaggggcctggaccatc

SEQ ID NO: 222779 - DNA, 479 bp, Homo sapiens
acccccatctctctatgcatccattagtttgtcttatttttctatatgtcatagtaagtttcagatagcagcatatttcacatgtaacttgtgagaatgcttatcaagtgtttaatatttacattttgggtacaatttatatacagtgacaagcataaatattaagcatactattctatgggttttaataaatgtagatactagtgttagtgtaacatattcctgtcaagttacagagtgtccgtaatgcccacagaaaattcccccatggtacttcacagtatgttctcatctctcaagtctagaggcaaccacttttctgattttgtttatatagtacaawttagctgttttagaacttcatatatatgggttcagacataggaaataaaatgtgttaggcttgttttattgagaatcatttttagcattcttgtatatttgcacaatcagtagtttctttttgcttctgcgtgata

SEQ ID NO: 222780 - DNA, 479 bp, Homo sapiens
acccccatctctctatgcatccattagtttgtcttatttttctatatgtcatagtaagtttcagatagcagcatatttcacatgtaacttgtgagaatgcttatcaagtgtttaatatttacattttgggtacaatttatatacagtgacaagcataaatattaagcatactattctatgggttttaataaatgtagatactagtgttagtgtaacatattcctgtcaagttacagagtgtccgtaatgcccacagaaaattcccccatggtacttcacagtatgttctcatctctcaagtctagaggcaaccacttttctgattttgtttatatagtacaaattagctgttttakaacttcatatatatgggttcagacataggaaataaaatgtgttaggcttgttttattgagaatcatttttagcattcttgtatatttgcacaatcagtagtttctttttgcttctgcgtgata

SEQ ID NO: 222781 - DNA, 564 bp, Homo sapiens
ttgctttcttttgaataaatacacaagaatggaatcgtggtatgtttatgttatgtttaaaatatttccacaaattmtttgacattcttttcttcaaaaggaagagcctaattctactcaagtgcaggcaggacttaggttcctgcttttaacaaataagaaagaagtgatagtgcacagtgttgtattcagttcaggttgctataacagaatcccatagcctgggtagcttagaagcaacagaaatttatttctcacagtctggaggctgaaaattcaagatcagggtgccagcatgctccacttctggtgcagcccctcttccacattgcagactgcccgctgttccttgtatcctcacatggcagaaagagccagagagttctttgggatctccttttttatttatttatttattttaaattttttactttaagttctgggatacttgtgcagaatgtgcaggtttgttacctaggtatacatatgccatggtgatttgctgcacctgtcagcccattatctaggttttaagccccacgtgcattaggcatttgtcctaat

SEQ ID NO: 222782 - DNA, 492 bp, Homo sapiens
gcctgtcccattagattacaaatatcttgagggcaaattctggtggttcaatttcaccatctaaatatctccacaatctgtcacttctttccaatcatactatcactatctagtccaaaccactgtgatctccagtgtagactgttgtaattgtttcctgactggcctccccctatacattcttrctctgatcaatccatcctttcatagtacaagcaaaagagcttcttttaaagatgcaaattttctctctctcatttaaaacctttcagctacttaacgttactcctggaagaacatctcaaatccttcaacttaaccacaaaggattatttaatctggcccctacctacatgcatacggcctcacacagagtttctgtccttctccttccacattttaaatataatggtcttttttccatttcacaaaccataacatcctttgtcacttaaagacacttcaatttgctgtctagaatgctttccagca

SEQ ID NO: 222783 - DNA, 505 bp, Homo sapiens
caatgaaaacacacagacacagggaggagaacaacacacactggggtctgtcagggtggtcgggggagggagaacatcaggataaatagctaatgcatgctgggcttaatacctaggtgatgggttgataggtgcagctaaccaccatggcacacgtttacctatgtaacaaacctgcacatcccagaatttaaaataaaaatatgggctgcctagatatgccattyagctgctctaaattttacacaattatagtctgtatgctttctattttgcttatttttgaaaatgttggtcaagcctcttttatgccttttcttttaaatctagattttatgtaacagcttacttaaccagacgtatactttcttcacgaccttccccttcagtatactgatgaaagtaacatgcattcttgaagatatgtaaaatgctttctatattataaattggaaaatgttgtatacaggctttatcgttatatattctaattttcactcacttc

SEQ ID NO: 222784 - DNA, 505 bp, Homo sapiens
caatgaaaacacacagacacagggaggagaacaacacacactggggtctgtcagggtggtcgggggagggagaacatcaggataaatagctaatgcatgctgggcttaatacctaggtgatgggttgataggtgcagctaaccaccatggcacacgtttacctatgtaacaaacctgcacatcccagaatttaaaataaaaatatgggctgcctagatatgccatttagctgctctaaattttacacaattatagtytgtatgctttctattttgcttatttttgaaaatgttggtcaagcctcttttatgccttttcttttaaatctagattttatgtaacagcttacttaaccagacgtatactttcttcacgaccttccccttcagtatactgatgaaagtaacatgcattcttgaagatatgtaaaatgctttctatattataaattggaaaatgttgtatacaggctttatcgttatatattctaattttcactcacttc

SEQ ID NO: 222785 - DNA, 402 bp, Homo sapiens
catcatgaaacagtagtggtgatcccaaccacatccccatcaactcacccacttggcctgtgcagaagactggctggtcttagagaataagagtggattgttttatacttaggtagtaactccaattacagctgctgtcccagatgtggtttcattactgaatcaaagcaacatatccttctgcatctggtatggagctgctgatacaatgaatgcttttctgtctatatttgttagtaaagactgtaggaagaggggatagttccagggctatcttaactcttcagttctttgccatatctactacttgggacaactgtaacttttctatcccataagatayaagttgggccattatattatatggttgttattttcttataggacacagtaagcagcaag

SEQ ID NO: 222786 - DNA, 486 bp, Homo sapiens
ctgttctgttctattccatttcattttttatgttggttataaattcattttaccacttaataaagagtcataacctgaatcatgttcatgatgtgaaagctgctgcttggaacatactttcttggcccttgcagaattgcttttactgagttgtgctttggtgttagactctcaacaatcctaggaaacatccttctaatttgctacagagacatggttgtttcacttggatgagaacttccttagagatctcrggcccactaggacaagttcctcttttagaagcaggtatattttcatcacatgaataatgacaaccagatttgtcattatttatgtaactgaccagatttccatttcgttctagctacgaagaagtttattagcaaatatgacactggagtgtaggtcttagctatcttcatatctgcctgttgttcctcacctgctctatatattctggcttaatgtttagtttctgattga

SEQ ID NO: 222787 - DNA, 486 bp, Homo sapiens
ctgttctgttctattccatttcattttttatgttggttataaattcattttaccacttaataaagagtcataacctgaatcatgttcatgatgtgaaagctgctgcttggaacatactttcttggcccttgcagaattgcttttactgagttgtgctttggtgttagactctcaacaatcctaggaaacatccttctaatttgctacagagacatggttgtttcacttggatgagaacttccttagagatctcaggcccactaggacaagttcctcttttagaagcaggtatattttcmtcacatgaataatgacaaccagatttgtcattatttatgtaactgaccagatttccatttcgttctagctacgaagaagtttattagcaaatatgacactggagtgtaggtcttagctatcttcatatctgcctgttgttcctcacctgctctatatattctggcttaatgtttagtttctgattga

SEQ ID NO: 222788 - DNA, 574 bp, Homo sapiens
tgcaaactgcatgactgcatttgtaaatacaaaatcagcagtttttaagcgtttacttatgcatgtataaacttggttaagttatagaattgaagattttgcatggtgtcttcagcagtacaataaccaagtttaaatctcttacccaccctaattgcaaaacactttcattttaattggrgttacctcttgaaggattatgttaaagattgtttttaaaacctagagctagataggaggcattcattattagatggtgttcacccatgtgtgtgtgtaacttagtggtaaagttgaaggtaaatactttttaacatgtcttttgaattcaatatacttataataggcaagcttaaaactttctcttttcttccagataaagcttcaccaagaaggttgcccaggaaacgggcacagaagagatcagtgggatctgatgagtaaatgttcctttgtgcaacaattcggtctttacttaacctgccctaatatttttcggcctgatgggaattagtgcagagaagccatgtcaccatagaaggcaactcctacttgtgtgtggactgagcaatca

SEQ ID NO: 222789 - DNA, 470 bp, Homo sapiens
tccttacttatttatttttagagacagagacttgctctgttccccaggctggagtgcagtggcacgagcatagctcactgcagcctcgaactcctgggctcaagtgatcctcttgcctcagcctcctgagtagctaggactaccgtcatgccccaacaagcccggctaatttttgtaatttttttttgtagagacagggtcttgctatgttgcccaggctagtctaaaacttctgggctcaagtgatgatcctcatgcctcrgactctgaaggcactgggattatgggcatgagccaccacacctggcctagagcttatccttatacaaaaatttaaaatcccaacttttagaggtttgttaatgtgatcaaagtgaattgaagttgggagaataggcaccagtcattgagaacagagcataagtattttctggaacagggaaggagacatgaaatagttaacaattcag

SEQ ID NO: 222790 - DNA, 470 bp, Homo sapiens
tccttacttatttatttttagagacagagacttgctctgttccccaggctggagtgcagtggcacgagcatagctcactgcagcctcgaactcctgggctcaagtgatcctcttgcctcagcctcctgagtagctaggactaccgtcatgccccaacaagcccggctaatttttgtaatttttttttgtagagacagggtcttgctatgttgcccaggctagtctaaaacttctgggctcaagtgatgatcctcatgcctcggactctgaaggcactgggattatgggcatgagccaccacacctgrcctagagcttatccttatacaaaaatttaaaatcccaacttttagaggtttgttaatgtgatcaaagtgaattgaagttgggagaataggcaccagtcattgagaacagagcataagtattttctggaacagggaaggagacatgaaatagttaacaattcag

SEQ ID NO: 222791 - DNA, 355 bp, Homo sapiens
gtgactgatcctcacaggaaaattttgttaattagaatggaaatctctgtaggctgttaacaaggtacttgagagcagaggtgggcataatgtggttgcaagccacatctagcgatccccattcatttacgtattgtctgaggctgctttcacacagtagccccagagttgagttgaatagttgcaagagaggctttatggtctgcaaggccrtatctgctatttggccatttacagaaaaagtttaccaagctctgttctagaaccttggagttcacaatatggtctgaataccagcagctttggcattttctgggtgcttgttagaaagagaatgataggctttgccctagac

SEQ ID NO: 222792 - DNA, 540 bp, Homo sapiens
tgaagacaaatagcacagtgagaaatcacggctatccgtggggtcactggtctggatgcctgggtggaggcagccccaatagtaggggaatgyctatcacagggaggtgaacattgcaattttgcccagtaccagtattgtcagagggcacagatcattagaaatgtttgggaaggcctttaccattgttgcctgtttcttgggaactcctccaatcattactatctgtagttcattcagagttgatgaaagactcaaagtaaaacaaacaatactctttaagaacggttaaggcacaatttgtaggccaaagctcccaagtgcctggcacctgaaaacggagcatcaaaaagcaagagattaaattgtgacctcatccaatgtttggcgtgtcagtgacctcactgggcacccacacagacagcttccggtttacctccctgattctgataaatggaactgccagggaaatggcaggtcttgcaaatgtgatagcattctggctggagggatttggttttagtgctcatataaatgtga

SEQ ID NO: 222793 - DNA, 499 bp, Homo sapiens
tgtattatgaagcatatcagttttaagagatctgctagacactgaacaacttcaataggatctgtagctctggacaacatagtctcatctgattgattcacatgtctaatcattgtcaactatcaagggagtgaacacagagcatgtccttagaatacaattggctcatattttcagagttccataaatcactaaaaaatgagagtggaaaaaaagcttttaaaatttaatcagatgatttttttatacagatagatataaatagatagtctgaggtttgcattctcagcttggtcacttaccagctttcagatcttagacaartttttttttttttttaatgtactttaagttctggaatacatgtgcagaatgtgcaggtttgttacataggtatacatgtgccatggtggtttgttgcacccatcaacctgtcatctaggttttaagccccacatgcattaggtatttgtcctaatgctctccctcccctagcccc

SEQ ID NO: 222794 - DNA, 449 bp, Homo sapiens
cactgtcatctcacctccattgagcaagtgttaggcaaaattctgaaccatgtaaaatacatcttgtgatccatccttctctctttttctgcatcccctccccaatcttttcacccaactctattgtagggctgctcagcttgcctttccagctgcccatagctgtgaatcctccccaaaccaggacaatgttttaccccaagaaatgcaattgttctaaaattttttctcccttcttgttttattggagaaaagtaatcagataaattagttcayattagactttccttttgtatcttttgtagacggtctggctagactgaatttctatcataaagattaaaaacacaaaacccaaaggctttgaagtacaattcacctgtatggcacctgctcctctctctatctatagtcctgtcaattccaactccttaatatcctttgaattc

SEQ ID NO: 222795 - DNA, 583 bp, Homo sapiens
cattgtggagaaaagaaaatgcttatacacacctggtaggaatgtaaatttgttcggctactgtggaaagcaatttggagatttctcaaataacttaaaacataatttaaaccatttgacccagcatcccgttactggacatataagggaatataaataatttcagcatacagacccatgcacaaayatgttcatcgcgcattacttttcacaatagcaaggacaaggaatcaacctagatgcccatcaacagtggattggataaagaaaatgtggtacgtatacaccatagaatactatgcagctataaaaaagaattaaatcatgtcctttgcagcaacatgaatgcagctgaaggccattatacaaagcaaattagcacaggaacagaaaaccaaacaccaagtgttctcacttataagtgggagctaaacactgagtacacttggacacaaagaggggaagaatggacactagggcctacatgagggtgaaggatgggaggagggtgagaattaaactacctattgggtactatgctcactacctgggtgacaaaatagtttgtacatcaaaccccagt

SEQ ID NO: 222796 - DNA, 536 bp, Homo sapiens
atgtttttgtatgtccattgctcccttatgatgaatccttagaagtggactttctacattaatgcctttatgtgtaygtgtgtgtgtgtgtgtgtgtgtgtgtgtgtgtgtgtgtgtgttttgtgtgcatatgtttggataaactttgtttctggaaacacagtaaaatttcactctcaagtagaattgtaccttccactgttcctgtttcttttcactctataagggacatcataatttaaaataattttgctcagtactagcttatttgattgtattttcatatctttacttagcaaggttgaatacttttcctatatttattgaacttatgcatttctttagagaattgctagttcatgaggttggctttaaaatttgatactattggtttataaaaagcattatttacaggttaaatatatctttttttgctaaagtatatgttgcaaaaaatttctcctcaattaatacacctttacattatgttatgagttattactttttaaaattatactttaagttctgggatacat

SEQ ID NO: 222797 - DNA, 449 bp, Homo sapiens
ctgtgtgtgatttaaggcaatgaatctatatacttaatttacataagtgattgtaattcatataactatgcacaaaacaatagattaatattcaaatgcatttttcaaatttctttagtttttttttttttttttttttttgagataaggtctactctgttgcccaggtgcagtggtgccatgtttgttcactgcaacctcaacctcccaggctcaagtggtcctcccacttcagcctcccaagtagctggaactacaggcaagcaccaccacacctggccaacttctggttttttttttgtttgttttttttgkgggggtagagacggagttttgccacattacccaggctggtcttgaactcctgggctcaagcaccaggagtctggccttccacactagccttctaaacagctgggattacaggcatgagccactgtgcctggcca

SEQ ID NO: 222798 - DNA, 634 bp, Homo sapiens
gctgggctgatctgttcttccacttgttcctctggcacctgcccatgtggaggggattcttcaatagggcacatctgttgtagcctcacagattcttctgctgttggagagccctgtgtgtggaagagtccctttgtgtgaaaatcatccagcctcaaccacacagttcagcaattttgctgaaaggaacagtcttggctgcacttggtgagtcaggatgacattagcaatcttgccttgtttctgctttgcagaaggaagaatcccagcttctattcttagcttgtgctgtggctatacagrtaaatcatatggttttcatgcttgaactgtatcagaccttatctatttgacaacacctttgtaagacctctaagtagcaagatcctatgagtgttatctacagtaacatacaacccttaaactgtattcctacacattttctattagtcagtagtcaccaattgcagttaaaagcaaaaagagtgtttttgatgaaaagaacaaaagattgcttgtttagtccctcagttttttgagtcacttgttgctgcagcttttaaaattcaagttctttatcttctattgtctgagattgttcattgctatttggcatatttatgggggtctaaca

SEQ ID NO: 222799 - DNA, 504 bp, Homo sapiens
tcatagaattcactggtcttaccatgttcctcatcctgaagcagctggattggtagaactgtggaatggtcatttgaagtcacaattacaatgacagtactttgcagggctggccagaaggccgtgtatgctctgaatcagcatccaatatatgatactgtttctcccatagccaggattcatggtccaggaatcaaggtggggaaagtggaagtrgaactactcaccatcacccctagtgatccactagcaaagtgtttgcttccggttcccacgacattatgttctgctggcctagaggtcttagatccagagggagaaattctgccaccaggagacaacaatgattccattaaactaaaagttaagattgccacctggacactttggattcctcctacttttaagtcaacaggctaagaaggaagttacagtgtttgctggggtgattgacccagactatcaagacaaaatcagtctactgctccacaggagaggtaagga

SEQ ID NO: 222800 - DNA, 507 bp, Homo sapiens
ctttctaccccatgaaaaactgttattgaaatgtggatttcagggcctttcaaagacacttagggaagaaaatattttgtaaattcaggaagcattcctgttttctcaaaagcagtggtaattaaaatgcactgtccaacagggaaaactgtgacatgcatgacagcgctattttttttttttttgagatggagtttcactcttgttgcccaagctgaggtgcaatggcatgatcttagctcactgcaacctctgcctcctgggttcaagcaattcttcggcctcagcctcccgagtagctgggattacaggcacacaccacaacacccggctatttttagtaraaacgaggtttgactatgttggccaggctggtctcgaactcctgacctcagatggtccgcccacctcggcctcccaaaatgctgggattacaagcctgagccctgcacctggcctgagggtgctgttttttttgttttttgtttttaaattgtgtttttaatg

SEQ ID NO: 222801 - DNA, 543 bp, Homo sapiens
ctaaccagggggactttgctctcccaccctgacaacccaagggaagtctggcaacgtctggaaatattttctgctgtcccaactgagggagcggttttggtatctcacgggtaaaggtcaagaatgcttgtgaaatatcctacagtgcacaggtcagccccccaaacaaaaatgcaatcagtcaaaatggcaacatgctaagattgaagaacttggccacagagtattctccccacctcagaacctcagaccttgcctaccattgccaacctaaagctgcttgcctaccattatttggggacttggctttcagctaccacaataagaagttaaatcatcttctctacagtctctcctattagtagaggaattctaaagcccataggagaaacaggtctcgactatacataaagttttcttgcatcataaaattcaaattatatgaacatttacaaaatggggattttttcttcttacttcaytgagttgatataaaaataataaaataagagagtaaaacaggagttacaaagggcagagagc

SEQ ID NO: 222802 - DNA, 501 bp, Homo sapiens
atggacaatttagatctgcaagttttaaccatttaacttcctgagaaaggaaatttaaacaacaaaagcaaatatgtccccaactcacgtatggaagtagttatttcaggttaattattatcaagaactgtgcaagactaagaatgygattaaacattagcctgtgagaaatttaacagtggggttctacaataaaaacagaatattgttctttctaggttttttctaaatggtcccaaactacatatgcgaatgaagctaatgtctaaataattaaatgataatgtcattattattcaatgtaggaatacacttgagaatcaaatcgaatcagttcttttccccttgtggcacaataacaactcatgttcaaccttacttaatatattccttgcttaaaagaaaaaccagtctgtatactcactggtttctacaaaagagaactaggcctatgtaactgagaaagagagcagttaaaaaaaaaacacaaaagcaatagcc

SEQ ID NO: 222803 - DNA, 501 bp, Homo sapiens
atggacaatttagatctgcaagttttaaccatttaacttcctgagaaaggaaatttaaacaacaaaagcaaatatgtccccaactcacgtatggaagtagttatttcaggttaattattatcaagaactgtgcaagactaagaatgtgattaaacattagcctgtgagawatttaacagtggggttctacaataaaaacagaatattgttctttctaggttttttctaaatggtcccaaactacatatgcgaatgaagctaatgtctaaataattaaatgataatgtcattattattcaatgtaggaatacacttgagaatcaaatcgaatcagttcttttccccttgtggcacaataacaactcatgttcaaccttacttaatatattccttgcttaaaagaaaaaccagtctgtatactcactggtttctacaaaagagaactaggcctatgtaactgagaaagagagcagttaaaaaaaaaacacaaaagcaatagcc

SEQ ID NO: 222804 - DNA, 261 bp, Homo sapiens
agatctgccatcactacttctgaattgttcagaatagccggcttcatttgggccaggaaatgattctggtcccaattagaaaggacctcatgttcttatatacaaaaaacagtggcttaattgttttgagtaccaggcacctgaagtaaaacaagtactaacctcagtcaggattttgcaaacaggtaytaactagaacttagggataaccatgccagtgactcagacttctttccactgctgtccttcctcctcaaatgg

SEQ ID NO: 222805 - DNA, 523 bp, Homo sapiens
ccatgtgaggaggttttagaaaatgagaaatatgtgcctctcacgccgagcctctttaaacagcggactatggatagattatcgtagatggaaatcttttacaaatacactttcctgccttcttaagcagactatcactgggcttaactaaacagcttcttggctctttctggatctgcaacaaggctgtggtccttcagagcccatcgaggtgggcgacctctagaccaccaggccctgtcaggttttcccagtgattcctgagagcctcttggcagcagcagctttctgtgagatggaaacgtgcttacgtgaggacttcgtgatatgattttggctgctcagaaktcatatttgcttcctagttctcaagtgtgtccttaaagaagagatagggcaactcggtagaaagcaagcatttaaaaaacccattattatctgtcttgagtcctcactggggaaccacgagctccctggtacagagcctctgtgagctgtgcagtcaccaactccaggctgcgct

SEQ ID NO: 222806 - DNA, 528 bp, Homo sapiens
attcacagggaaaaaataactgaattcaagactcttcatcttctatttggaataaggtccataaggtataaaagctcatatgcctttttttgtaaaacactaatattagatggagctttatattttctgtttttaaaaaattaccatttgcataaagaattttctaaaatttagtcattatggcaagtgggaagattaagtaaatatggactgttttgaagactgattcactaatacattcgtgtatttctttacacagccaagtcctttggattttaccttgtaaatatccctactatgcatacactcctctctaactcactggctccctatagtggcactactgtcatctatctcaggktgactgaagcacctcccaactgtaatacatttcttacactgtatccagatgaactttaaaaaatgaaaatctgatgtttcttgaaagcttggaatggcttccaattgctcttaaagaccaaactccttatgatatctgcaaagcctcatgtgatctgggccagctct

SEQ ID NO: 222807 - DNA, 575 bp, Homo sapiens
caaaatcagtattaaagtagataaggtaagccccgaaggatgcaaaggataggccagctgtagccagggctgtgttgggaaacacaggttagaaaacctgcggcgataatgatcccattcattatctgacaggagagaatcagggccagctagtgttccctagcgtgaacttttttctatccaaagttctcttcaaagtagtctgcatagtggaaagttgtgaagaatattttatggctgatgttaaaagcttactttaaaaaaaagtttaatgaaggaaagaatgaaatgttgtttttaaaaagataggatctagtttagatttaggaaaaatttcttggctataaaagctttcaatctctgtaatagcatagcaacgtaaattatgaactcaccttctcttagcatttttatggctgaaagagaaaatgatattgctggcctgcctggaataggaacatggactaaataatttcaaggattccttcttgctggttgattttgggataacttcagggaagaacagackcagtctactgttaggtttttggcttagtctcaagtgactgcaaagg

SEQ ID NO: 222808 - DNA, 607 bp, Homo sapiens
tcatataactaggtttcaaacccaagcagcctaactctaattctatgctttcaaccactatacgatgctgtctactttttattaagcttcagaaagttaaattattcattcygtaacagaggggaaaggaggaagctgagaaatattggcatagaatttgaactacttagaattttaagggttggttggtatggtgtggaaggtgcaaagtaccttaggaatcgtgccaaagctttgaacttaagcctctaggtacagtatattagacacatgatatttttgtcatctgctaccttcaataataattcatttaatccagtgaagggtggtaaacgctttggaatacatacaagatgctgtggttgccatggggtgaagtaagaagatataaaacaaataattaactgtagcctgcaaatagtttttccactgtgtaccttctatatgttctgctggtaaaataacaacacccattcgaatagcatgctcacatgcattgtttctttggattctttccacaactcagtaaggtgtaatcagtgcattcatgatccatgtcttatagatgcaaagactcaacttgcccaaagtcatgagtggggaaatg

SEQ ID NO: 222809 - DNA, 411 bp, Homo sapiens
aactcaaagttcagtttaaacactaaggactatttattatctcaaataacaaaagstcccacgtggagctgctccaagttgtccaggtttggtaatgcagaactcagtggcatcactaaagtccaggttcttacaatttattctttgcccccctgaactctcctgcagttacagagttcaaggcagcacatgcagctgagacaaaattgagcagatgaggccataccttctttgagtctcttttttatgaatgtaagaccttttcctaggactactacaggtgacttttgaagttggaaagaatagctctgaaatttggacatattttagaagtaattttaattgttactttcgatgatcgatcatagggaataaaaatggtataaaagtttcctatcaaaatcagaattc

SEQ ID NO: 222810 - DNA, 411 bp, Homo sapiens
aactcaaagttcagtttaaacactaaggactatttattatctcaaataacaaaagctcccacgtggagctgctccaagttgtccaggtttggtaatgcagaactcagtggcatcactaaagtccaggttcttacaatttattctttgyccccctgaactctcctgcagttacagagttcaaggcagcacatgcagctgagacaaaattgagcagatgaggccataccttctttgagtctcttttttatgaatgtaagaccttttcctaggactactacaggtgacttttgaagttggaaagaatagctctgaaatttggacatattttagaagtaattttaattgttactttcgatgatcgatcatagggaataaaaatggtataaaagtttcctatcaaaatcagaattc

SEQ ID NO: 222811 - DNA, 557 bp, Homo sapiens
agaacgacagacttaagaatagagccctggcctccctccacagtgctattgctaagtgctgatatttcacttgattggtaatccacttcattgtaaagcatccaggcaagttttatccattttgttcataggataatttctattgtctatgagttacctccctaagtaagaaatgaacctagcaggtatgatttgtttccagtaaacaggctgttgttttaagtcactattcctgcatggaactcaattttctttccccataaaatgaggcagttgggcaagaacattccacctcactaatcacataaactttaaaaatgaagcctgaagaggaccttttggttctagaccttcatttaagaccctgggccacctcagttccagcaacggtccatatgcgtggccttattactrgggctttcagcttctaaaattctgtaatgtttacttctgttatactcagtaggaaaacattttaatcagggagaaaattggaaaaagagagataatttcaatgggctaaatttgaatgcaacgcaaggtggtaatagcaattc

SEQ ID NO: 222812 - DNA, 588 bp, Homo sapiens
gattaatacagctgctttttaaaatcaacatgcttatctaagcctctaagatgcgatgagttaaaagctaaaatggaaaaatgagattctggattgcttttttcccttgtaaacagcacctgggctcctaccagtccccacagttagccttcttaccggtgaggcccccatgattaaggcaggtktaacagctgcagatgccaccagggggtgccaaaggacagtacctgcctgcataataggctacagggcactacaaaagactggaagagaattccctaaagctagaaaattagaatgtagacccaccttgggccatgatggagcatattcttataataatgtatttgttctgagaggctctaatcactgcagatggacaggaccattgcaatcatctcagaaacgtcctcattttataaatgagtctgctgagatctagagagattgaggattcctccaacacccatactagtagactgcggcagaactgggaccaggactgaggtctccagatttttcttagaccatcttctgctccaacctgctatcgccccatgatgaaaatgctgccaagaaaattcacac

SEQ ID NO: 222813 - DNA, 607 bp, Homo sapiens
atggtaaattaaatatcatcaagagcaccaaaaattaagtgtagccattaagattaagggcaaccaggggaaagatatagcaactattgccagagtgtgtattgttagaaagttcaaatgaaagtcgaatcccccctcccataaaagcagcaatcaaactatcatattattttataaaaatataacttaataaactgtgaaattgagaagaattctgtgtagtgtttaggtatatgtttaaaaatatcaatgacaaatatatcctaaatcaagctggtattgttaacatgcagataaatatttttttggccatctccttgcaatatgtgttagaatttcatcagccataattttaagaaaactatttcttagtttcaggaacccaagtaatrgacaatatgctagatgtagctttagttctttattgcagagcaaggcctggtcatgttggagtaggccattgcctttaagtaatgaattgaacctaggaagcctcttttgcctcaaaatttatttcctgttctactatctctctgggtggaactttactattagatatttattcctttgggtcagcatatgtattcttttgaaaggctagttattc

SEQ ID NO: 222814 - DNA, 581 bp, Homo sapiens
agcagaaatactaaggcaggccaatccttgagcaattttggacttcacttatggctgacttcagctacaggactccctgatggttgggcactgcaatctaagaggctcccacccaaccctgcttcctctcttctttccttcacccgaggactgacttgcattacagtcttgatggctctcccaccttcatctggctcccttcctgtttttcctcacaggtgtgtgtgaaggtgcactttaaacagattgatcactcccagatacacagtgtcattggttggctgatgcaatgtatcaccaattcccatgatctgccccatcaattaattaactaacctatgacactagcatctgctggagtcaagtccaagttcactcccctgttttgtacagtgcacatgtaagtacttgttactcactttggggatccagtccgtttagccaagtcagtgtccaagcttycttcccccgccatctttttctagtccccatttaccttgcatcccatcccagctagactctatggttgggcttctgggatgcaacacaaattcaccccagttacaatggcaacacaataa

SEQ ID NO: 222815 - DNA, 412 bp, Homo sapiens
cacagaattagaaaagccctcaacctaaaattcacacggaaccaaaaagagcccatatagccaaagcaatcctaagcaaaaagaacaaatctggaacaaaagagcaatcctaagcaaaaakaacaaatcactacccaagttcaaattatatattacaagactatagttgctaaaacagcatggtactgatacagaaatagacacatagaccaatgcaacagaatagagaacccagaaataaagccaaatacttacatccaactaatcttcaaaaagcacacaaaaacacaaactggggaaaggatattctattcagtaaatgctgctgggaaaattggattgctgcctttagaagaatgaaactggatccccatctctcactgtatacagaaatcaactcaagatagataca

SEQ ID NO: 222816 - DNA, 586 bp, Homo sapiens
aaattttctaaaattttgcttttcaaaagtaacagttttcacatttaatggatacactaacctttgggttttggtggcacaggacctacaaatccaatattgtcataaaagttatgaatagcgctggggttaaaatgtggtcctgaaatatataaaaagtaaatatatcaatgcttatagctcaaaaacaactttactttttaaaacaagtatttctttctaaaaataaacacgctataagaaatgcttttcatttattttgcccctctaacctcgaattatatgtaagatttcaaaacatatttcaaatatattatcttaggtataatgtagtactcataaacacgggtaagtggtaaactgtgaaagaagtcaaattaatgctggtaagacattaatagaagtagaagtagatccctgttctatgtggcaagttaaaataacttaaaatttcacaatttaaaatgtaattttaaacratcaaacatggacttaagtaactaaacagctttacctcaagtaaatataaaaaccttgcactatgtaatagaatggttaaaattttacacaaaaagagtaagttcaa

SEQ ID NO: 222817 - DNA, 539 bp, Homo sapiens
cttacattctggttgtttccacatttgagtgttaagagtagtgttgctatgaacacttttgcacatgacttttggtgcacttatgggtacatttctgtaggtatatactaggcatgaaattattgagtaaagggtatttatgttttcacctttggtagacactgccaacagtttttcgaagtggttgtaccaatttgtaccrtttgtattagcatatgaaggttccagttacgccattactttacaacagttgacattgtcggtcttttaaaagtgtagatattctagcgattgggtaatggtatcttattatggtttaaatttgaatttctctgatcactaaacaaattgaatatatgttcccatattcatgggtcactttaatattctcttttttattttgcatcttttaaaattgtgtttacatttttctcattgatttgaggaatcaatgagattcctcatgagaatcttacatgtcatctttgtagattttatacttgttccaggatttatatttgtattatcctaatgatgtt

SEQ ID NO: 222818 - DNA, 539 bp, Homo sapiens
cttacattctggttgtttccacatttgagtgttaagagtagtgttgctatgaacacttttgcacatgacttttggtgcacttatgggtacatttctgtaggtatatactaggcatgaaattattgagtaaagggtatttatgttttcacctttggtagacactgccaacagtttttcgaagtggttgtaccaatttgtaccatttgtattagcatatgaaggttccagttaygccattactttacaacagttgacattgtcggtcttttaaaagtgtagatattctagcgattgggtaatggtatcttattatggtttaaatttgaatttctctgatcactaaacaaattgaatatatgttcccatattcatgggtcactttaatattctcttttttattttgcatcttttaaaattgtgtttacatttttctcattgatttgaggaatcaatgagattcctcatgagaatcttacatgtcatctttgtagattttatacttgttccaggatttatatttgtattatcctaatgatgtt

SEQ ID NO: 222819 - DNA, 539 bp, Homo sapiens
cttacattctggttgtttccacatttgagtgttaagagtagtgttgctatgaacacttttgcacatgacttttggtgcacttatgggtacatttctgtaggtatatactaggcatgaaattattgagtaaagggtatttatgttttcacctttggtagacactgccaacagtttttcgaagtggttgtaccaatttgtaccatttgtattagcatatgaaggttccagttacgccattactttacaacagttgacattgtcggtcttttaaaagtgtagatattctagygattgggtaatggtatcttattatggtttaaatttgaatttctctgatcactaaacaaattgaatatatgttcccatattcatgggtcactttaatattctcttttttattttgcatcttttaaaattgtgtttacatttttctcattgatttgaggaatcaatgagattcctcatgagaatcttacatgtcatctttgtagattttatacttgttccaggatttatatttgtattatcctaatgatgtt

SEQ ID NO: 222820 - DNA, 424 bp, Homo sapiens
ttattttggaactttaaaatttaatgattgccatgctgggtttcagccttgcatggggcctgtagcccctttgttttggctaatttctctgcatcagatttcttttacttaaagtttkcaatgtatatcttatcccatgctttacttgtaacctatacacatctttatgtttaaggtgttattttttgtttttgtttgtgtgtgtgtatgtttgagatgatatgtagtttggccttgttgctatctaaactgaaaatatctatcttttaattgatgtatttagagcatttacatttaatataattatgggtatattcgattttaaatataccatcttgttagttattgttttgtatttgcttcatccactttttgttttttgtttttcatttttctgttttttaattaatcagatatatttata

SEQ ID NO: 222821 - DNA, 583 bp, Homo sapiens
agtaattctagaatttctggcttgagtcatttgtcagtttgggacaattcttagccaatatcccctcaaatatttattytcccttatattatcattcttccctctgggcatttattttacatgcactgaatctttctattatgttttatgtatctcttgtgtttttatgtttctgtctcctttgctctccatttttgagatatttctaactgaccattttccagctcatgaatgttctttgcagccatgcccaacaaattgtttgacccgagttaagctgtacattttacttatgaatttgtcattgttaagatttttatttgattttttgtacagatgccaaatttctaaagattttcatcaacattataataaattattttaaagtccatgcttgagatctccaatatctaagttacatatgcatccgttctattttcttttttttttaagcatgagtcctgttgagtgtgtctaaaataattgctgaacattgtggaggttctgcatactggtatctttctctttagaacattttctttatctttgtatatagcagtggatcagatctcctcaatccacc

SEQ ID NO: 222822 - DNA, 583 bp, Homo sapiens
agtaattctagaatttctggcttgagtcatttgtcagtttgggacaattcttagccaatatcccctcaaatatttattctcccttatattatcattcttccctctgggcatttattttacatgcactgaatctttctattatgttttatgtatctcttgtgtttttatgtttctgtctcctttgctctccawttttgagatatttctaactgaccattttccagctcatgaatgttctttgcagccatgcccaacaaattgtttgacccgagttaagctgtacattttacttatgaatttgtcattgttaagatttttatttgattttttgtacagatgccaaatttctaaagattttcatcaacattataataaattattttaaagtccatgcttgagatctccaatatctaagttacatatgcatccgttctattttcttttttttttaagcatgagtcctgttgagtgtgtctaaaataattgctgaacattgtggaggttctgcatactggtatctttctctttagaacattttctttatctttgtatatagcagtggatcagatctcctcaatccacc

SEQ ID NO: 222823 - DNA, 583 bp, Homo sapiens
agtaattctagaatttctggcttgagtcatttgtcagtttgggacaattcttagccaatatcccctcaaatatttattctcccttatattatcattcttccctctgggcatttattttacatgcactgaatctttctattatgttttatgtatctcttgtgtttttatgtttctgtctcctttgctctccatttttgagatatttctaactgaccattttccagctcatgaatgttctttgcagccatgcccaacaaattgtttgacccgagttaagctgtacattttacttaygaatttgtcattgttaagatttttatttgattttttgtacagatgccaaatttctaaagattttcatcaacattataataaattattttaaagtccatgcttgagatctccaatatctaagttacatatgcatccgttctattttcttttttttttaagcatgagtcctgttgagtgtgtctaaaataattgctgaacattgtggaggttctgcatactggtatctttctctttagaacattttctttatctttgtatatagcagtggatcagatctcctcaatccacc

SEQ ID NO: 222824 - DNA, 521 bp, Homo sapiens
ggtgggcattacattaacatcatagcttttcctactttttttttttttttgagacagagtctcactcttgtcacgcaggctggagtgcaatggcatgatcttggctcactgcaacctccccgtctcccgggttcaagccaytcttctgcctcagcctcaagagtagctgggattacaagcgcccactaccacacctaactaatttttgtagctttagtagagctaaaaacatgggatttcactatgttggccaggctggtctcaaactcctgagctcaggtgatccgcctgccttggcctcccaaagtgctggtattacaggtgtgagccacagtgcttggcccctacttttatactgatttttatacaagcattttctaggacatatggaaagttacttgtgtagttttatttctactaagaccctgcacttacctgatgtcaataaccacatcttctctttgacctgaaaacttgcctggcatcaacctcatgactcatttttcacaaaaacttccagt

SEQ ID NO: 222825 - DNA, 373 bp, Homo sapiens
ggtaagcaagagaagaaattgaagaatgagttctagaaggagatgtttattagacagattaccaattacccagacagagatttgcacaaaaaacaagagactgtaaagaccctaactggggttgaggtagagtctctgccatagagagttcacttattaaagctggagtacaaattcaggacggggtagccaaggggccctgagactggstcctacaggaactaaatgagagatcttctggtataagttgggtggaatgagcagggtttgggttacaagctggctacttggcctgatgcaaggagcttctgttacttcaataaaaatctaaaaagtctactccaacctctttttgtagaacatatagcgtata

SEQ ID NO: 222826 - DNA, 582 bp, Homo sapiens
caagcttggtgatcaggggctgaacagagggcttatccctggcctaacagccaaggagctacacactgaatcaggctgccctaacctccctgcaccgacaagagctctgttggctcttttcattactctcttgttttctatttactgctgtaacaaattaccacgaacttaatagtttaaaatgaaacaagyatattacctaatagttctttaggtatctcccactctgatataaatctcactgggctaaaatcccggtgtcagcaggactatatgcctttctggaggctttcagggaaaatacattgttttgcttttccagcttctggaagccacctacattccctggttcatgaccttttctccatctttaaagtcagcagcattgcatttctctgaccattatccttagttacatcttcctctgaccacatccaggaaagggtcttagcttttaaagattcatgtgattggattatgccgacctgaagaatccagtatattctctccatctcaaatctcttaacgttaatcacatgtacaaaaccctttttgccttgtaaggtaatattatccacagat

SEQ ID NO: 222827 - DNA, 445 bp, Homo sapiens
tatgcaattatttttctgtagtttctgactccttgatttgggaaagttagtagctgaatgctcagagagagagagaaagagaagggttgtaactatatagagggttaggttaagccttgtggattagctgcagttggacaggagcttggtagaggaataatagactttccatgttctttcattcaggcccactggctatttcattcaccgctttttaacttacatttcatgacttttctagaattaacagggcaaatggttcaaaatactgccagttaatttgtagataattttaaattctctcatcattgtgagatactgtggtacagtgaaaaaagtactatattttgaagcaaaacattgagaccctcttttaccatgtacyaactgtaaatttgtaaggtcacctctattttctaaatttcttttttcttatttatgtatc

SEQ ID NO: 222828 - DNA, 415 bp, Homo sapiens
ttgaatacatatgcatttagagtagtaaatcttcttgttgaatttaactctttatcattatgtaatgtcattctttgtacttttgtactattgttgctttgaagtctattttatctttttatctaatacaaaaatagcaatccctgtcctttttttgttttccacctgtgtgacagatctttctccatccttttattttgagtctatgggtgtcattacatgtgaaatggttcttctgaagatagcagaaagactgatattggttttkttttgttttgttttgtttttttaatccaatgtggggctatgttttaaagcaaaaacaaatagtatgccaggcttatagagcaataaccctaataagttttttaataaaccatgcttattatttacttttttaaacaaaattcaagta

SEQ ID NO: 222829 - DNA, 626 bp, Homo sapiens
agagattatagaaaactggtaaatgcatatttgtaaaaaagaaatacattgttatacctggggcatggagattgccctgtcctattcaccacagcctattcccatgcacccatcaggggacactaagggcaggcccacacccctggcactatcccccaagtacccaagcatgccacccagggacctgagaacagccctgccttgttcaccactgctggtgtccgtgcacttctcctgagggctggtccatccagcctgttgcaggcactgcaaacaccagtatgtgatgcctgrgagtccaagggtggtcccaccatcactactgctatttctcatgccatgcatactgcttaggggcccaggaattcaccacacacatgcccactgctgccactactgaaccgaagcaagcttcctggaggcccaacaattggcccacctgagcccactaacacacgtgcccttgtatgccacacagggagcctaaagacaggcacacttagcccactgataacaccactgggcctcaggactgaactacctggcactcctacacccagtaaaatttcaacacagtctccactaataatcacagtctaagaaacggaaatcacagacaccactga

SEQ ID NO: 222830 - DNA, 530 bp, Homo sapiens
gggggaggcggagggaaatagcaatggcctccagcagtcaatgctatacttttatcattggctgtttcacttaatcactgatatacttacagagcttgtggcagagcaaagatccatgagctgatgagaaaataaactatatccttggtgagaattaaaagaataatctcatattttctagccttagggatgaagtttcattttaaagattgtaccttcaacagttgtgtctgaaatgcaaatgatggccatcaatattttcctttccagcccaattgtcattttaattcctatgctaataattattgaaaagcacactgaagagccaccatatgcaaaactgccacagagttcaacagacagggtwaatcatcacttgaaagaatttcaaacaataggtaagaattttttaaaaagtgaaccaagaaaaggattgaattataaggaagtaaaatttaaaaattgtcaattatgctgtactcataaaaacatatcaattcacctctacaagtaatttaattacaaaattt

SEQ ID NO: 222831 - DNA, 595 bp, Homo sapiens
atctgctgttaatctgataggttttcctttataggttacctggtgcttctgtctcacagcttttaagattctttccttcattttaacttcggataacctgatgacaacgtgcctaggcaaagatcttcttgtgatgaatttccagggtgttctttgtgcttcttgtatttggatgtctaggtctatagcaagactggggaggttttcctcggttattcttccaaatatgttttccaagctttagaatcctcttctgtctgaggaatactgatattcttaggttggattgtttaacataatcccagacttcctggaggctttgttcatattttcttattatttttaccttgtctttgttgaattgggttaatttgaagaccttgtctttgagcgctgcattttttcttctacttgttaaattctattgctgagactttctagagcattttgcattgctaaaagtgtggccaaagtttcytgaatttttgattgtttttctttaagctatctatttccttgactatttctcccttcacttcttgtataattttttggatttccttgcattggaaaggtctctacctaattagcttaa

SEQ ID NO: 222832 - DNA, 256 bp, Homo sapiens
attcattcattttcatggctgtatgayatttcattatatgaatagttatctatctataatctataatactttattgatctattctaatgttgatggctaattgggctgtttccagtttagagcaattgcaaacattgttgttctaaacattcctgggcacatgtgcatgagtttaatatacgcttttacttatttatttatttttaattttgtagagatggagactcgatatgttgcccaggctggtctcgaactc

SEQ ID NO: 222833 - DNA, 615 bp, Homo sapiens
actgttgaaaacaactaacctaaaggtgagaagaggtgaccaataacatttggtccaggcccgtactcccaaaatgtaggcagaaaatgggcttttaaaagggaaggaagactgggactatggtttcgcaggtccatgactctatcttttgtcttgttcactttggtagatttggcatgtaccaaacatagggaaaggccaagttttattaagctgataggtaaaacctttcccttctgcatagaattactcagttcaagagcttctctggtatccagacagcacttatgtcctgcttcagttattggtaaaggaaaaagatgtgtgagatactccaagtatgctcctacttatctccagactatactctcctgcatacaataaggagaaccaaacttaaggcattcttttagaatcagaatttcaaaatgtctgactgtgggttctttaagaccacaaaactttcctggtgcctagggccagaggatggagagaccaaygttatctgctcaattcatttccaggtttcttttacaacctctgaggatctgttgattttcttgctaccagttctgtttctgcacatgagtaattgggggcagaggctgaccctgc

SEQ ID NO: 222834 - DNA, 622 bp, Homo sapiens
tgagcccaggcctagaaatattttcagacctaggacagtcttagggcacaccttgtttgtttcttatttcttttttttttttttttttttttttgagacggagtctcatcattgcccaatgtccaatgtcttgaaaatcattgttttacatatggagtccagttttttgttgctgtttcttatgagaggataaatctggtgcctgtttcttgtcacaaaccagaagtccccctctgttctgttttcttttggaaagcttatattgtcagaagatatctttacttaggattttatgacaactatcagcagttccagacatatgtcttcatagctccactcccagaagaaaagatctcaactcctttcctggttgctgaagtaaaaatttccaagttggtactgattaaacttgactggctggacatcagtcaggtgtatatactgaagcaatcactgtggcttgcgggggtgctgtgttctgctggggtcaccatgcatctctgtcaaccccagaaccagaagataaataaaacttactttattcattcaattaaaaaattttaggtcrttttgttttgttgtctgtttgttttacttttaaatcatttaattaactgttaca

SEQ ID NO: 222835 - DNA, 540 bp, Homo sapiens
aaacaataagctttctcctatcatttatgaaatagagaagattgattgatagggaagttgggtggttatggttttctgttttctatttatcaactccctggtacttcattgaatcttagacactatcaattataagacacatcattattttatataccactacaaaagtttttaaaaacctgataactgaactatgacattaaactatgacataccatcaattatatgccacattctaatttcaaagatgttaaatgtgaaaaatatggtaatctcagaattgctgaaatatggtatcmtgctacacatgaagaaaagggccacatcttggtccaaaaaatgcataattagataattaattaaccattacctaatacacagatataaaactttaattttataagcagttgagatccagaagagcagatgacttaaatcacagagaactgatggggttgttgagatttaaatgcagatttgcactaactgtgatggcagcttccgtaactgcaactcctacttcaaacagtaggtgactat

SEQ ID NO: 222836 - DNA, 631 bp, Homo sapiens
aatgtgggaggttactacaaatgtatattggtggctatgttgtgacttgatctttgtcctcagaagccagtggtatagaaaagctggtactggcacagtccaagacaggataccaagagtttaatctgtgcaatggattcagttacatgaatagttgggattatgggattaacaacttgattcagttggtgataatccattccaagcttctagctctcattacactgtttcactggtcatacagtgctgttgtattaaaacactgcatctcttagcacccatgttcccttcaagtctgtaatcaaggctgtgattttctttccyctttttcttcttattgtttttgttggaccatctgggaggaaatagagaacaagaccagaaagtgatttatgtgtccctttagcacttcactacatttggcctttcccaattgtgataatctccccaggcacttaactgatgatgaagtataagcacttaatatattaattactatacaatcggatatagaaaatacaacagtacatggaattggcccaaagggctccattcatgagatgatgttaacttgcctttctcactgtgaacactgcttaaactccattagctaaatcagacaatcttttct

SEQ ID NO: 222837 - DNA, 286 bp, Homo sapiens
ttaattactatacaatcggatatagaaaatacaacagtacatggaattggcccaaagggctccattcatgagatgatgttaacttgcctttctcactgtgaacactgcttaaactccattagctaaatcagacaatcttttctttctataaatccagttaaaaacatgacttargtgtccacatcccaatatcctaaaagtctgattcccttattttcctgaaattccccaacattcttggataggtgcatatgtcatttgatacccattgggaatagagataccc

SEQ ID NO: 222838 - DNA, 576 bp, Homo sapiens
gtcatggggatagtgtcatatgtggcagagaatagaataggacctggctgtcatacaagcgatgatagaaattattattatctaaattatctaacaagaaattctgtaaaaagctaaaatcattacaaattgccaaagactgactgacagtttagaaactctggtaatccctgacgcaagggtagtttgatgtcacccattggggcttatatgtggacttccactaggtacktatgagaaatattggaagcagggtggggacaggagggagcctcttggtaatacaggtgcagagtaagggattggctgccacttcagataaagcacaaaatcccagtctattcaagctcgcatcccacatcctaagcacaaggctagaggaatgtgaagtctttggcatcctgaagatcaactcttgactagagtaactcaatgccccaaacgaatggcttcagaatagcaaaagtacactctgtttctaggtataaatgattggcatcattcccaattattttgcacttgatatttgacatttaattgacaaattataagatatacaaaaatttaaagaaagaa

SEQ ID NO: 222839 - DNA, 618 bp, Homo sapiens
aaatgaatcaatcagcatgaatccatttgagaagcaacggaacagaatggttctttatcacacacttactacaataagggcaatttaaatatgtgcttagaagaccaccacctacatccttataccctaaattatgcctctccagaccccaaacttatccctgcaagaccccagagggcttgtttaacaggtgcaaagaatgctaccaaagttcttaactggaggtgaaaaaargaaattagccatgatttctcttgtttttcaacttttaactttgtaagaaagatcagttttggaacaatggcctattacaaagcagaagcatgagaatagtggtttgggaactacaaggtatcagttgtttggataagaggagataagcaaatgatttaaataagagaacataggcaaattagctacaattttctaaaagctctgataaaagagggacaaaaagtcatcaattcaattaattcacttaaggtcatgaagttactaaagagaagaaatctttattagaaaaaatgatataattaccttctgtaatagattatgtcctctccataaaaccaaaatgcactattacacatatgaggagagggagggagggaaagagga

SEQ ID NO: 222840 - DNA, 568 bp, Homo sapiens
gcgcatcacatggcaaaagcaggaacaagggagagagtatggggggcacactttacaacaatcagatctcatgtgaactcagagtgaaagctcrgttattaccaagggaatagctcaagccattcaggggcattcgggggcatgatccagacacctcccaccaggacccacctccaacactggggattacatttcaacatgagatttaggcacagacaaatatcctaactctatcatggggtatgaaatgtaaatatttaataacttatgcttcactgttttgtgagatagatgaaggcaatgaagcattgcagggtcatggatggataaagttactggatctagtgagtacataaagtgggaagcaaaaagttttatctttggagacgtaatttggtgaaggatcctgaagatgccacctataccctgcgcaccaggcagatgcaccaaagtatctcagccaatttcattgagattcagactggcaaggagcttatggtaaagtctttataattgaattaaaaacttaagtaattgtttctgttatttaaactcactggaaaagctt

SEQ ID NO: 222841 - DNA, 554 bp, Homo sapiens
gaattattgccctgttacaaagtcttgagcaccattgcaatattttaagcaagggaaatataagcaaacattttctattttagaaagataaatcagagaaaagttagggggatgtgtttgaacagagcaaagctacagttattaatataactgttgatataatagttaccctctagaaaaagaaagatttcaattttatatggagttcatacagagaggaaagatgaagagctttctaaagatagaatcaatagtatttggtgatctactcaatgtagtgggtgaagcacaaagacaaactaagtcatttttcaaatttcttggttagcctgttaggtcgaaaatggggccatgtacaaaaagtgaggaaaattttggagtgggggagrgcgagaatataagcagtaatgtcacttttagtgtggacttttggcaaaatataaggctctaattgaataattgttcttattttgtgtcactctaaaatattctttattcaccttaagtccatagtaaagatgacattactacttatattctcacactaccccatt

SEQ ID NO: 222842 - DNA, 500 bp, Homo sapiens
cagcacattaaaaagatcacatgcaatgatcaagtgggatttatctgtgagatacaagaatgttttaacatacacaaaccaataaagaagatcatctgcattaaaagaatgaaagataaaaatcatattatcatctcagtccatgcagaaaaagcatttgcagaaatttaatgtcctattatagtgaaaattctcaaccaattagktatagaaggatatacctcaacataagaaagcccatatacaacaagcccacagctaatatcatactcgagtaaaaagttgattttttgctaagatgagaaacaagacaagagtgcctattcccacactacaacttctatttagcatagtactggaagttctagccagagcaattaggcaagataaaataaaaggcatccaaatcagtaaggaagaagtaaattatcattgtttgcagaaaacatgatcttatacatagaaaatcccatagactctaccaaaacactgttagaact

SEQ ID NO: 222843 - DNA, 505 bp, Homo sapiens
tgaaccaagaacaaatttaatctgtgaccagactagtaacaagttccaaaattgaaacagtaacaacaagcctaccaaccagaaaaagcccaagaccaggcagattcatagttgaattctactagatgtataaagcagagttgatatcattcctactgaaactgctcccaaaaattgaggaagagggacttcttcataactcattctgtggggccagaatcattcttatacgaaaatctggcaaaaacataacaaagaaagaaaactttmggccaatatcttgatgaacatagatgcaaacatcctcacaaaataatagcaaactgaatcctgaatccagcataatatcaaaaagtgaatccactgctatcaagtaggctttatccttgggatgcaaggttggttcaacatatgcaaatcaaaagatgtgatttatcacataaacaaaacaaaaaacatccacatgatcatctcaatagatgcagaaaagactgtcaataaaatg

SEQ ID NO: 222844 - DNA, 563 bp, Homo sapiens
gggacacactgccaccactgctgcctctgaagctgctcctactgccctgtctgacactttgcagcctggggccgggctcccrgcccttgccaggttctggggaagggatgacatttgcaagttccccagcagccccagttcttagtggtgaacaggggctcccccttccttagctcatgaccatgccataagtatgccttcaggagtggattgtgggccatggacacagccattgggagcaccagactcagctgtcaccccaacatggggtggatccttggtaggcatcctaggatggccccacgctgagcctcccaccaaggcacagtgcccttggcagggtgggcatgatgctggccaggtcccactcacgaagggccactcccacttcccactgcagggccctgaaatgcggccactgctccatgttcgggaccagccctcacactccatgcacaagcacatcacttccttgggtcaagttctgccttggggtccctccatgcttgttggtgccattccccaaccagtgggtggcttagcccagcttggccccaccgcag

SEQ ID NO: 222845 - DNA, 476 bp, Homo sapiens
gtatgccagacagtcataaggtcttcaggatcaggagttcagttttgacaagagcccagtagcaagctwatagctgcttttcaaatgaggtgtacctggtacgtgtatatcctgtatgttaaggaggtgatctgtccaaaatcccaaagggctcctgtgaatggaagctgcttacgttttcctggggctccaattagaaaaatcattagtcacagaaactggtagctcacaggttaattagggatgtgggaccccaaatatagagagaaggccacagcctactaacacagtgtgttggtttctgcttcattcaaaagatgctgatattttggaccagctaatatagaagtccaagtagaatttccaagtgaggaacacaccatctccaatgcccaaatgtcccaataaggtgctgaacattgtttttgtttgttggggatgaagagacagcagtttttctttgactaccagaagga

SEQ ID NO: 222846 - DNA, 615 bp, Homo sapiens
aagagactattattttttgtttgtttgtttgttttgagacggagttttgcttgttgcccaggctggagtgcaatggcacaaccttggctcactacaacctcctcctccctggttcaagtgattcttctgcctcagcctcccaagtagctgggattacaggcatgcaccaccatgcctggctaattttgtatttttagtagaggtagggtttcaccatgttggtcaggctggtctcgaactcctgacctcaggtgatccacccacctcggcctcccaaagtgctgggattacaggtgtaagccaccacacccggcctgaagagactattctttgtcccatataatggtcttgacacccttgttgaaaatcagtcagccatagatgtatgggtttatttcttaactctcagttctattctattggtctatatgtctatctgtatggtagtaccacactgttttattactgtagctttctaataagctttgaaacagagaagtgttggccctccarctttgttatttttcaagattcattttgaactattggggcaccttacaattccatataaatttgagaattgactttttcatttctgtaaaaagaggctggtgg

SEQ ID NO: 222847 - DNA, 595 bp, Homo sapiens
atttagagcagagaagggcaggtttccaggggtgaaaaaggaaatttaaggggaagttgggtttgtaccaaagatgactttgcttatagtgagaagatactcaaacctttcttacttgaggaagctcacagcttctgaatctctctttctggctgtgaaaagaaatttcctcttttgggtctcccttgaagattatcatttttggatgttgctaagagcatccttggagtcagagtctctatatatagcaaatcatcaaatgttagggctagaagtaatcttggtgatttggtttcttaaaactatttattttataacatgagttaaacatttatcacaaaaacaggaagatagagaaaaggctttagtttttgtaggtcattgcaaggaagaatttcgcttatctccagtgctataattttgactttggtataaagtattcatcaagtgtcatcatcgaaagtattagtggttatgacaaacaaggcaaacctcctgagaactttagaacaaagcccagcatggatgttctgccagcataaatgcagttcagctggcagrgcagaggattatctatgtttttatgtattatata

SEQ ID NO: 222848 - DNA, 468 bp, Homo sapiens
tttggggtttttttgttgtttgtttgtttgttcgtttgtttttgagatagagtcttgctctggcacctaggctggagtgcagtggcgtgatctctgctcactgcagccttgacttcctgggctcaggtgacccttccacctcagccttctgagtagctgggactacaggcgcacaccaccatacctagctatttttwaattttttttgtagagacagggtctcactgtgttgcccaggctggtcttgagctcctgggctcaagcgatcctcctgtcttggcctcccaaattgttagaattacagacatgagccatccacctggtgagttttgttttaaatcactaagtttgtggcaatgttttacaacagcaatagaaaactaatatgaggccttagttccttttgtaaatgatggggtaggaggcagtgtggaggaagtcagaataaatgaactttaaggttccttc

SEQ ID NO: 222849 - DNA, 553 bp, Homo sapiens
gagacagtacacaaatctttgaggaataggagtgtgtgcagacatactagaaagagcaaagtagatctccacaactaaaggggccaggatatgaggctgtttttaagagcagatcccctgcatagggagccaaactgggaagcaatgaccagaagaggaatacaagttgactagatacagttttctgagacttaagcaatgctacttacatctcttctaatgtcaagtttggtcctagagcctagtatagcactgactttataattggaaattcaaatggtattaatagtgaggttaggaagaataggagaacagtaaaccaggtgtattttaatggtgcgtactcaatatgtaactgtatcatttatggccagattagtggtgaaaccaaaggatattttgaatatattcaaggtaactttgttggttactgttagtatatttctccatttcatccttgtcttgaatttagcagacattgattggataccctccatatrcaatgaatatcctcttatgcactaggacagacagaaaggtgaaaaaaatacac

SEQ ID NO: 222850 - DNA, 621 bp, Homo sapiens
ccaggcacggtggctcacgcttgtaatagcagcactttgggaggccaacgtgggcagatcacgaggtcaagaggttgagaccatcctggccaacgtggtgaaacctcgtctgtactaaaaatacaaaaattagctgggcatggtggtgtgcgccagtagtcccagctactcaggaggctgaggcaggagaatcacttgaacccgggaggtggaggttgcagtgagccaagatcgcaccactgcactccagcctggcaacagagtgagactccatctcacaaaaaagaaaagaaaagaaaaatgaarctcctttcaatatttggggttttttttaacttttattttaggttcagaagtacatgtgcaggtttgttatacaggaaaacttcctttcaatattttgtaaacaagatcctttttcaactttattgaagtataattgaaaaattgtatacagtcaaggtgaacaatatattttgatatatgcatacattgtgaaatgattaccacaatgaggctaattaacatatccatcacctcacatagttacttctttgtgtggtaagaatacttaagatccactctcttagcaaatttcagtacataatatattattgttaa

SEQ ID NO: 222851 - DNA, 439 bp, Homo sapiens
gcaatggtgcaatctctgctcactgcaatctccttctcctgggttcaagtgattctcctgcctcagcctcccaagtagctgggattacaggcgtgcaccaccatgccyagctaatttttttgtatttagtagatacggggtttcaccatgttattcaggctggtcttgaactcctgacctcaggtaatccacctcggcctcccaaagtgctgggattacaggcgtgtgccactgcaccctgccagaagttggaatttttgtacagtgctggtgggaatgtaaaatggtagaacccctgtggaaaacagtatggcagtttctcaaaaaattaaagatagaactaccatatgatccaggaattctacttttgggtatataccccaaagaactgaaagtaggatctgaaagagatatcttcactcccatgttgattacagca

SEQ ID NO: 222852 - DNA, 537 bp, Homo sapiens
aactgaaagtaggatctgaaagagatatcttcactcccatgttgattacagcattattcatattcactaaaatgtggaaggcaacccaagtgtctattagtggatgaatgggtaagcaaaatgtgatatatatatatatacatatatatatacacacacgcaaacgtatacagatacatatatatgatggaatgttattcaaccttaaaaagaaggaaatcccactatttgtgacagcatggatgaacctygaggacattttgttaagtgaaataagctagtcacaagacaaatactgtgtgattccacttctgtgaggtatctaaaatagtaaaactaatagaaacagaatagaatggtggttactaggggctgggaggtgggggagagggggtattgttgctcaatacgtataaagtttcagttacacgatatgaaaaagttctagagatctgtacaatgtagtgcctgcagctaacaataaagtattgtgcactcaaaattgtgttaagagggtagatatcatgttaagaattc

SEQ ID NO: 222853 - DNA, 594 bp, Homo sapiens
ttcccaggggccaagaggatcttgttcaaatccagcttcccagtatgagctgccacagaagttacagcctgagattggagagacacaaaagacacaggtggctcctttgtagagagctgaggaaagcaggcttcgccaagtagagcagaccctcggtcaggagaggctctgagggaggggctggggcaggcgaggcagagacagaaagggagaaaggtgggaaaataggagagagagaaagaagaatacagtgggacccagagtaaaagtgaaacagatggaggactgagctagagagacaaagaaggggcagggaggacacagagaaagagactcaggatcgagggaaggaagaaaaagacagaaacagaggrggcaaaagggagataaatgtgaggaggtaaaaatacacagagaaagataaagagagaatcaaagtgaaaaataaacagaaagaggagaaagtcagatgaagacaaggatgcagaaggagacagcaagaaagaatgggaaacaagagggtgcttgcaaaaccgatgaattataatagaagggctcacgcaggaaagatgaatatgtaaatcaatggaaacc

SEQ ID NO: 222854 - DNA, 416 bp, Homo sapiens
agttatttacatataatttcgttcagtccttactgtgagtatgcrcagaaatctctccctccctaactgattctcacatagatacattcttctccacttttgatattcttggctgacctctcctagcctagaactcctgttcagaacagctacctcagcttctgccccagatcaccctagcaataacttttccatgtccatcatgctggcctttaatgcctggaagaaccaccttcttacctttatggtccatgaatttagggtatccggatattgtaagaatgcaactcagggattcagggaagagtgtcatcctccccctgggtacacaagaagggtgagtcatcagtgatttcttggggaagagggtgaggctggtaaccagtgctagcttgatttgttacaaaactcagaaa

SEQ ID NO: 222855 - DNA, 581 bp, Homo sapiens
ccctggccagtactacagaaacctgcgtcacagtcttcttggagtcctccccctcagctctgrttccctctctgaagaatgcatttcttttccaggtgatccttaggactcagttgttgattgataccatttattaactgacagttcaagtgagtgccaaccccctacgttgaggggtttggctatgacctttataggccccacagtctgacaacactgtagccctatgagacctttaacatccaaatatcaagagttacccacacatgtacaacaagggtctgatttcatcagagttggcatcttaattctctgtactgtgaagtgtggggacttgcattcagcccaaaacaataacctttattaaaaactctttggatatacctgaaccactgtactttcatccttgctatgagaggcataagaaatagctttcaatttaagcaggaaaaatgaaaattggaaacaagatttccagtgaatcttgaaactgagagagctttgaaaattaaagaccctctacctatggcaatctttaacataggaaaaaatggtcctccaaagtataaactagaagagaa

SEQ ID NO: 222856 - DNA, 598 bp, Homo sapiens
  misc_feature (1)...(598): n = A,T,C or G
gagggaggggaaaatagggagtttaactggtataaagtttsaattatgcaagatgcattctttctaaagttctgctttacagcatagtgcctatagtcaacaatactgtactgtacacttaagaatttgttaagagggtggatttcatgttaagtgttcttaccaccaaaaattgagacacaaggagacttttgtaggtgatggaaatggtgatggtttcacaagtatatgtatagtccaaagtcattgaattgtatacattaaatatgtgcaanttttgaatagcaattatacctcaataatgctgttaaaaataaaagtggttaattgcataataacttaaatataggtaataataaaagtaaatctaaaaaacaaaactgcatagggccttttttacgataaatatgatgattggtagtttgccttccccaaccccaaatcaaacaaaaaggaggtccagaataaacagccaaacccttcaaactctacttggttggtaatccacagttgcctccagggcactcataaagtggcaccagcctagggctcttcttttaagctgtgctctttgttttggctcttggggattttgctt

SEQ ID NO: 222857 - DNA, 558 bp, Homo sapiens
taacataccctttactgactgcatttgcttccctttctgactttcccactgctctactggtattcccaccccacccaataaactagctgcactcagatccttgtctctgtgtctgcatctgagagaaccaaactgagataattgccttctttcatttcttccaagaggtcaagtcctttgcctttgctgtttcctttgcttgtatgctcttcccttagatgttcacacggttcactccctcactttgttactagctcaaaagccacctctgcacataggccatccaggaccacccaaattatagtaattcctccctccctttcattgtctgtcagttttatttttctgtgagccttttcactatctgattttattttgttaatttacttgttcatgtgtctattatctagctccccttagtatcagcttcatgagagcaggaaccttgaccaacttgttcactgctctatccggactgcagggcacaaartgagtgagcaaacgattattttccacaattcttggagtcctgtttattttccctagtattctctcccg

SEQ ID NO: 222858 - DNA, 598 bp, Homo sapiens
ctcaggccagatggtttgggtgatgtacagagcaaccatccttggctaccccagagtagcatttccagggaccattctttttcctcaaagcatttggataatgctgacaaaagcgactgtggttttagaacaggagctcccttagaattttataattacaaggtttcctagcttcatgggctactattaccttcccatttacagaagcctgacttgtctccatctccaatgctactcctgggtcaaaccatcaccatctgtctcctggaccactgcaatagcctaacctatctcttcattgccacccttgagcacctataatccattctacataagtagctagaatgatcttttaaatacaaattatacyataccactcccatatataaatctctccaatatattgtggtaatgtttaaaaataaagagtcctcatttttgtagctatataataaagtatttgcagattaaagggtatgctatctgggttatgcttaataattcagtgcctatgggtggcatggagggtataaaggaaataagattgaccatatgttagttgttggagctgagtgatagttacatgaggattcattgt

SEQ ID NO: 222859 - DNA, 598 bp, Homo sapiens
ctcaggccagatggtttgggtgatgtacagagcaaccatccttggctaccccagagtagcatttccagggaccattctttttcctcaaagcatttggataatgctgacaaaagcgactgtggttttagaacaggagctcccttagaattttataattacaaggtttcctagcttcatgggctactattaccttcccatttacagaagcctgacttgtctccatctccaatgctactcctgggtcaaaccatcaccatctgtctcctggaccactgcaatagcctaacctatctcttcattgccacccttgagcacctataatccattctacataagtagctagaatgatcttttaaatacaaattataccataccactcccatatataaatctytccaatatattgtggtaatgtttaaaaataaagagtcctcatttttgtagctatataataaagtatttgcagattaaagggtatgctatctgggttatgcttaataattcagtgcctatgggtggcatggagggtataaaggaaataagattgaccatatgttagttgttggagctgagtgatagttacatgaggattcattgt

SEQ ID NO: 222860 - DNA, 588 bp, Homo sapiens
tccaccttttgctgtgtgaggatgcagcaagaaggacctcaccaggtgctggtgccttggctgtggatttcccagcctccacacctgtgagaaataaattactgttttttataaattacccagtctcaggtattctgttgtggcagcacaaaatgaactaagacaaaaacaaaccgctgaaatggatccaagaagaagttgataatctgaatagacctttaacaagtaaagagactcaattagcaattaaaaaaaaaaactacccacgaagaaaaacctaggcccagatggcttcattggtgaattctaccaaatgtttaaaggwgaaatagccaatcaattgcaaactcttccaaaaaatagaaaagtgaacacttcctaactcttttatgaggatagtattgccctgataacaaaaccagaaaaatacatcacaacaaaagaaaactacagatcaatatctcttgtgaatatgatttcaaaaatcctcaacaaaatactagcaaatcaaatctagcagcatttaagaagaatcatctacaatgaccaagtgggacttacaccaggggttcaaggttggttcaatat

SEQ ID NO: 222861 - DNA, 588 bp, Homo sapiens
ttaggatttataaccaagttccatgagcaaagaaggaatatagaggagagagagcagaacagggcaagaagagcaggctgagggcaaaggccagctgtccctctccaaatccccagcagccacagaagcagacttgacatcagtagggtgctccagaagcaatggtggccttggcaggctgggctgagctggagtgaatcccagtgtgccccctggcaccagtgtcatcctcatggtagtcaggcaggtgggtggaagtgggcacatgcagctatggggaaaacatgcgtaggtaacaaatatgcctgggcatgataatgatcatgataatcactaggtccgccatcagcagggtcttccttaggtcaaaagctttcggcttccyccaggccttttctaaccctggcatgtcagagtcaggtctgcccagagtgtgcaagtagattgggccaagaacttgggagaggatgggagcgaggatgtggcattcctgcaggttcctgggaagcttgaaatgcatgcatctgcagcagctcaattttcccacctgtaaaatggtggcagggtttagactacaatagccaatgg

SEQ ID NO: 222862 - DNA, 588 bp, Homo sapiens
ttaggatttataaccaagttccatgagcaaagaaggaatatagaggagagagagcagaacagggcaagaagagcaggctgagggcaaaggccagctgtccctctccaaatccccagcagccacagaagcagacttgacatcagtagggtgctccagaagcaatggtggccttggcaggctgggctgagctggagtgaatcccagtgtgccccctggcaccagtgtcatcctcatggtagtcaggcaggtgggtggaagtgggcacatgcagctatggggaaaacatgcgtaggtaacaaatatgcctgggcatgataatgatcatgataatcactaggtccgccatcagcagggtcttccttaggtcaaaagctttcggcttcctccaggccttttctaaccctggcatgtcagagtcaggtctgcccagagtgtgcaagtagattgggccamgaacttgggagaggatgggagcgaggatgtggcattcctgcaggttcctgggaagcttgaaatgcatgcatctgcagcagctcaattttcccacctgtaaaatggtggcagggtttagactacaatagccaatgg

SEQ ID NO: 222863 - DNA, 423 bp, Homo sapiens
gttgacatctcaacaatattgtcttccaattcatgaacatagatgttttcccatttatttaggtcttctttaacgtctttcagtaatgttttgtaattttcagtgtacaagtatttcaccttcttggttaaatttatttctaggtattttgtccttttcacgttgttcattgctagtttatagaaatacgactgatttttgcatgttgaacttgtacactttgtttgccgaatttgtttactggctttagtagtttttttgtggattatttggcattytctatatataggctcatgtcacctatgaataaagatatttttacttctttctttccaacttcaatgcattttattttcttcttgcctaattgctctgactaaaatttctgttacaatgtagaacagcagtggagaaagcaggtat

SEQ ID NO: 222864 - DNA, 593 bp, Homo sapiens
tgcctagcaaaaagggggaaaagccccttatatctcgtgagaactcactcactatcacgagaacagcatgagggtaattgcctccatgattaaattacctcccactgggtctctcccacaacacgtgggggttacggtaactaaaattcaagaaaagatttgggtggagacacagccaaaccatatcatatggtctgtrttttaaatctcaagtaaaaaaaaaaaaaaaaaaaagaaatacaagtcctccaagtttggaatgaagatgtcatatttttctgctcaatattcctcaagtaaacacagggattctttattactctcaggaccctccaggtgtattttataatacaggtgtattatataatcctgccacctctggaaagtttttgatgtcaatgaggtgtgtaatgacacatggtaaatatttggaacaaggtaatttctatagcaactgttacaatgatcccttgctctcctatttcaatcacattttatggctgaattcttttgagaatctaacaattcaaccatctctgctttatagtcagaccttgatttgtatttctcagtagtgtggagttgtgacagca

SEQ ID NO: 222865 - DNA, 379 bp, Homo sapiens
tgatgaacaggagaggagttagaaggactcataaagcactcttatctgagcagaagcagcaggttctgtaggtgagttcaatctcagtctgagttgttgtaccagaaactctcaaatgcaaaaaaaaaaaaaaagtctggagatacgttaacaaaagcacagtcaatacaagcaaaaaatagagaratgaggctacataaaaatgtgccaaacacaacaatgaatagaataaaaaggcagcctatggagcaagagaaaatatttgcaaaccatgtatctgataagaagataatatgaagaatgtataaataactcctaaaactcaacaacaacaacaaaaacagcccaattaaaaaatggacaaaggacaaatcatccc

SEQ ID NO: 222866 - DNA, 531 bp, Homo sapiens
gaattcaaagctccaaataacgtggagttatagagtctcaagaaacaacctgtggtattcaggtgaactagggtgtgctgcaggaacatatgacctccaaatcttagtgacttaaaccaacacagttgcttgcgtttgctctgggctctgctccaacgttatcctccctctaaaacccagcctgctcaaatcgccatcatctagaatgttactgaatgctgtggcacagagaaacactragtgtaaaggctctcaaaacttccattggtgcccataaatgaagtgtttcacttttgttcacattgcacaggccaaagcaagtcacaactaacttcaaatggttagagaagtacaatcaacctatgcccagaacaagttataatattgtgaagaaacctaaagcataccacacagcctgttgaaaggccatctagtttatacctgaaccaaattttatctttgctacggctaaattgtacattcacacacacaccaaagtcatatacttataaagtgacaacatgtctgtat

SEQ ID NO: 222867 - DNA, 549 bp, Homo sapiens
gctattaggggagctttatttgaatgaatcatgtcctctgtactattttgtttctggtttctttctctcagcattgctggtgtgaatcatctataccactgcacgtaacaatggtttattcattctcattgtcttgtaatattccattgcattgatgtagcacaatttatttaatcatatatagttcatggacatttgggttatttctagcttttggttattatgaatactgctgttgtgaacagccttggcaattgtgtgtaggtctcttggatctattcctgggagtggaattcatatttcataaagtatatgtatgtttggctttgtagatacaaccaaaatcattttctaaagtattaacaatttacacgtctwccaggaatgtttatgtcccaattgcaccttataaatacttagtatattaattctttcaaactgtaaaaattcatatatgtatgcctaaagtgctatcttattatggatttcatttccatttttctgattaccgattaggttgagcactttttcatatgtttattggccacc

SEQ ID NO: 222868 - DNA, 347 bp, Homo sapiens
gagcagcctccctggcctctgcccactagattccagtggcatcttcctagctggggcaaacaaacatgtcaccagacatttctttcttttttttttttaattaaaaactttttaattggtttacaaaggaggctacagactacattgaaactaatcgttgtacaaaaggccaaaaaaaaaaaaagtcccaaaacaccaagagacaaaaggtaggaggaaagacaagaaaggaagatacaaaaggagcaggaagaaacttacttagggacaagattagcatcatacatacctaaragtggggggtgagggggaagagcaagatgagagagcatttaaaagcatttacc

SEQ ID NO: 222869 - DNA, 600 bp, Homo sapiens
ccctggcttcaaggaggtatagccaccctctccttagttgtgggctatgcatattccttccaaggagtacagaatgaaaagttcaggaaagagcaactttacagtggagaaaagctaaaaatattatttcaggcaggtgatgaaaggtatcccatcaacagggataagccacactgatagtaaatacttcagatatgacataatgaaaatggcacattacttctctggtctttctctcccaaacctataaccctagactaaycatgagaaaacacataagaaaaatctcaactgggggacattgcacaaaatacctgatcagtaccccccaaaattgtcatcaaaaacaagaaaatttataatcaagagttgcttaatagctaggtatggtggcatacacctatagtcacagctacttgggaggctgaggtgaaaggctcacttgagcccaggaggtcgaggctgcagtgacctgtgatcacaccgctgcacaccagtctgggtgacgggaagacactgtctcaaagacaagagacagagacacagacagaaacagagagagagagagagacagagacagagagagagaggagttgccca

SEQ ID NO: 222870 - DNA, 600 bp, Homo sapiens
ccctggcttcaaggaggtatagccaccctctccttagttgtgggctatgcatattccttccaaggagtacagaatgaaaagttcaggaaagagcaactttacagtggagaaaagctaaaaatattatttcaggcaggtgatgaaaggtatcccatcaacagggataagccacactgatagtaaatacttcagatatgacataatgaaaatggcacattacttctctggtctttctctcccaaacctataaccctagactaatcatgagaaaacacataagaaaaatctcaactgggggacattgcacaaaatacctgatcagtaccccccaaaattgtcatcaaaaacaagaaaatttataatcaagagttgcttaatagctaggtatggtggcatacacctatagtcacagctacttgggaggctgaggtgaaaggctcacttgagcccaggaggtcgaggctgcagtgacctgtgatcacaccgctgcacaccagtctgggtgacgggaagacactgtctcaaagacaagagacagagacacagacagaaacagagagagagasagagacagagacagagagagagaggagttgccca

SEQ ID NO: 222871 - DNA, 500 bp, Homo sapiens
ccatgactctcctccttgccagacctaggctaccttcatcttgtggaaaatgtgtaacacatgaaggcatgggtttaaatgtgattctcgtatagaatagagagtagtaagataggaatmttctgagagaatgagatgattggttttaagagttatctcaaatgacttaaaatgaattgttgtaccacaattacttaagctatggaagtctcatcctctttacattttcctaaggtattgtgttgtttgttttgctcaagcccttattattattgaagtgctgagtaaaaatattaaaagaatcatatgctttctatttgtatttgttgacatgtcaaacgttttggaaaggaatgcctctctgcaaacatccatagatccatgttacatatgcatcatttgttcataaccttgaggtgacaacagaggcatctgaaacattatccaattacacactcatacctgatgataacccttcagtgtgtgcttattatgtagaa

SEQ ID NO: 222872 - DNA, 583 bp, Homo sapiens
catgcacacacacacagagtctcaattttcagcaagaatctaagcctcttgagggaatgaactgtgttttatatatatctttgtattcctcaaactcagcacaattgtgcccatttattttataaacatagtgaaaaatatttttgtgctaattactgcactgagattggagcttaaaaatttattttaacacctccccctgctcataaacagctcatagtctaaaattggaaatgaacataaaacccaataatacaaatcattgtaatcagtacaatgacaggaacatrcataaaatactatggaaaccaatatgacagttgcatctaacatcccggagacgagtaatgggagaagcaggagacctaagcaaatcttaaaggatgcacggaaattaccgttagtatgaatgtgatgagaagaaaaagaggagaaaatctgttttagaagacttcacattacaggtagagtcattgcatgagataaaacatgagggaagagtggtcgtgaagcaaggtatgccaactcctttagcatacatttttgcaaagagtatttggcttagtaataaaatgtgttaaac

SEQ ID NO: 222873 - DNA, 583 bp, Homo sapiens
catgcacacacacacagagtctcaattttcagcaagaatctaagcctcttgagggaatgaactgtgttttatatatatctttgtattcctcaaactcagcacaattgtgcccatttattttataaacatagtgaaaaatatttttgtgctaattactgcactgagattggagcttaaaaatttattttaacacctccccctgctcataaacagctcatagtctaaaattggaaatgaacataaaacccaataatacaaatcattgtaatcagtacaatgacaggaacatacataaaatactatggaaaccaatatgacagttgcatctaacatcccggagacgagtaatgggagaagcaggagacctaagcaaatcttaaaggatgcacggaaattaccgttagtatgaatgtgatgagaagaaaaagaggagaaaatctgttttagaagacttcacattacaggtagagtcrttgcatgagataaaacatgagggaagagtggtcgtgaagcaaggtatgccaactcctttagcatacatttttgcaaagagtatttggcttagtaataaaatgtgttaaac

SEQ ID NO: 222874 - DNA, 544 bp, Homo sapiens
aagtacaggtaagctccaaggaattttcmgctatttctaggtataacaaaacagcttgcagaactgctctacattcaaaattcttcagccaatctcctcttatacctttgatctttcttcttattttctcagttctctctcattggtgacagaaaatatcttcatgaatatgtatggctaaaatgtgttaacatttattgagcattactatatgctaagcactatactaaatgcttcacatgaaatatctctttattaagatgactctgaaaattacctgttatttatagtgaggaaattcaacttcagagggtgacttctccaaggtcacactgtttttaagtaacagaaacaaaatctctctaactccaaaaatcctgctttgaatctctataaattacttcctaaagaaattaaatcacaacatttaatgaaatctacatggctgccctctagacataaatttccctctcacactactgaatagtcagtgaattgaatagaatattcttcattttgctgaaatgaggaagactatggcaat

SEQ ID NO: 222875 - DNA, 369 bp, Homo sapiens
catattgcccaggctggtctgaaactccagagctcaagtgatccacccacctcagcctctgaaagtgctgggattacaggcgtgagccaccgagcccagcctaactttttatttctaatgcattatctggcttataatctaaaattattagtgaatgcctttatattgtttttaaaagtacctacagtgtaccttctacacttagaaatcactgtattagaaagaagtttgcctatttaacatgagtaagtcaactgtggcacaattcatttataatatttagccattacgggtgtctgtaaattmagttcccagaatcgcttttgtatcattttcataagctctagtgttttctacattttgtagcca

SEQ ID NO: 222876 - DNA, 583 bp, Homo sapiens
tgggtgatactcaacaaatgtatttaacacttgcaaatttcaccttataaattttgatctgaaaaaattaatgaagtatcatctctctagctcaataatagacacacagtagccatcagaaaacatcaagttcattttttcccttcaaattaccagtaatatgggcctaagcaagtgagaagcccacactggagagctgctgagtcagatgagcatgtgcacattctaagagtactgtattgtgttgatttttrtcataaattatggttaaatgccccttctagctataagctgtactagaggctctgctctaatactactctagggtttctgcctcctttctggtatctataaatttttgaaaatcccaaattttccagtttatttagctcaacttttagaggacatacacagaaacttattattgatataaaaatgatgtcttctggataaaatacagacttttttttcacagaaccaaaacaatacatatcaatgatacataaacataaatttacatatgccctactcatgtcaacattacaaaaagtggcaatcatgaacaaccatgtgaataatttag

SEQ ID NO: 222877 - DNA, 583 bp, Homo sapiens
tgggtgatactcaacaaatgtatttaacacttgcaaatttcaccttataaattttgatctgaaaaaattaatgaagtatcatctctctagctcaataatagacacacagtagccatcagaaaacatcaagttcattttttcccttcaaattaccagtaatatgggcctaagcaagtgagaagcccacactggagagctgctgagtcagatgagcatgtgcacattctaagagtactgtattgtgttgatttttatcataaattatggttaaatgccccttctagctataagctgtactagaggctctgctctaatactactctaggktttctgcctcctttctggtatctataaatttttgaaaatcccaaattttccagtttatttagctcaacttttagaggacatacacagaaacttattattgatataaaaatgatgtcttctggataaaatacagacttttttttcacagaaccaaaacaatacatatcaatgatacataaacataaatttacatatgccctactcatgtcaacattacaaaaagtggcaatcatgaacaaccatgtgaataatttag

SEQ ID NO: 222878 - DNA, 583 bp, Homo sapiens
tgggtgatactcaacaaatgtatttaacacttgcaaatttcaccttataaattttgatctgaaaaaattaatgaagtatcatctctctagctcaataatagacacacagtagccatcagaaaacatcaagttcattttttcccttcaaattaccagtaatatgggcctaagcaagtgagaagcccacactggagagctgctgagtcagatgagcatgtgcacattctaagagtactgtattgtgttgatttttatcataaattatggttaaatgccccttctagctataagctgtactagaggctctgctctaatactactctagggtttctgcctcctttctgrtatctataaatttttgaaaatcccaaattttccagtttatttagctcaacttttagaggacatacacagaaacttattattgatataaaaatgatgtcttctggataaaatacagacttttttttcacagaaccaaaacaatacatatcaatgatacataaacataaatttacatatgccctactcatgtcaacattacaaaaagtggcaatcatgaacaaccatgtgaataatttag

SEQ ID NO: 222879 - DNA, 548 bp, Homo sapiens
gcagaatggtattgaaattcatgctttcttcctgaagccatgcttcttttctgtgcctcaaggttcttggcactaagttggcaaccaaggaaacgacaagagcattttcaacacatatttatatacagataccaaggcacactttccttttgtctgtgccactcttaaccttccattttatacttttgatgactaagccaaattctcattcaacccagtagtattatctctgtggtttgcaacaatacccttaacagtgtatataaaaaagagataggaatcattacagccacraaagaaaggatgataggaacaactaggtcctagtgatgacatcctaatgggtggtcgagaactaaagttattccaggggtctttggataacaccaagttgtagcctcagccagatacactcccttgccccagaacttccttccaaccccacccaatggctagatctccatgaagggaaactggattggaacaaaggcaacattcccaacacccagggttgatgggggattcacagtgtcctccctagtgacccc

SEQ ID NO: 222880 - DNA, 572 bp, Homo sapiens
tgtcatcctgtcatctcctcaagtctgactgaatctggagcttatatgggcctcagaggggaggaggtgtgcrctgataggtccagggcaggcataagcaggcttggagaaaacaccacaagtttccactctggtctgtgggaccaacaacccagcttccaggtttcaggccctccccagcttaaaggtggggctccaccaggcacccgccctcttctgccaaggagcctgtctgcttcctgatgcccttaatgacacccaggccgtttatgccaaagggtgggtcaggccagcgccaagctgccctcaacacccccgccttggcctccctctcgtgtttgttgccacccaaatctggagggggctgaggcagcaggggctggagtgtcagtgctgccctgagcatacaccagcctgtccaggctgcaacagcgcctggggtcagccccaatcttgctctgagatcagagcaggtgctgggagttgggagaggcccaacagcgggagcaggcacttccaagcctgtaggggcagcctgggccttccagggcccctgatcatgcagaggtccc

SEQ ID NO: 222881 - DNA, 572 bp, Homo sapiens
tgtcatcctgtcatctcctcaagtctgactgaatctggagcttatatgggcctcagaggggaggaggtgtgcgctgataggtccagggcaggcataagcaggcttggagaaaacaccacaagtttccactctggtctgtgggaccaacaacccagcttccaggtttcaggccctccccagcttaaaggtggggctccaccaggcacccgccctcttctgccaaggagcctgtctgcttcctgatgcccttaatgacwcccaggccgtttatgccaaagggtgggtcaggccagcgccaagctgccctcaacacccccgccttggcctccctctcgtgtttgttgccacccaaatctggagggggctgaggcagcaggggctggagtgtcagtgctgccctgagcatacaccagcctgtccaggctgcaacagcgcctggggtcagccccaatcttgctctgagatcagagcaggtgctgggagttgggagaggcccaacagcgggagcaggcacttccaagcctgtaggggcagcctgggccttccagggcccctgatcatgcagaggtccc

SEQ ID NO: 222882 - DNA, 473 bp, Homo sapiens
gctgaggcagcaggggctggagtgtcagtgctgccctgagcatacaccagcctgtccaggctgcaacagcgcctggggtcagccccaatcttgctctgagatcagagcaggtgctgggagttgggagaggcccaacagcgggagcaggcacttccaagcctgtaggggcagcctgggccttccagggcccctgatcatgcagrggtccctgggtccacaaccacagctgggtggctgcagttgtgcccagcagggtggggctcctgactgctccgggcccccaagagtactgggatacctgactctgcagctccagctgggtggctgcatctgtgccgggggagtgtgaagttccctccctgtcagctctgaagggggcagggcttccccctgtccctggctcccgctggctccatggaatgcacaaccccagccatgccttccccactgcagctggtgtcatggcagcttct

SEQ ID NO: 222883 - DNA, 496 bp, Homo sapiens
aaactcaacaaagtgaagagacagcccacagaatggagctccccatctgacaagggattaataaccagaatatgtaaggaactcaaaaaactctacagcaaaaaaaatctaataatctgatttttaaatggcaaaagatttgtataaacatttrtcaaaagaagacatccaaatggcaaaccagcatataaaaaggtgctcaacatcactgatcatcagagaaaggcaaatcaaaactactatgagatatcatctcactcctgttataatatttttttacccaaaagtcaggcgataaatgctggcaaggatatggagaaaagggaatccttttacattactggtgggaccactgctacttgtatacttgtacgttgttagtacaaccactatggagaacagtttggagggtcctcaaaaaactaaaaattgagctaccatatgacccagcaattccactgctaggtatatgccccaaaggaagaaaaacagtata

SEQ ID NO: 222884 - DNA, 496 bp, Homo sapiens
aaactcaacaaagtgaagagacagcccacagaatggagctccccatctgacaagggattaataaccagaatatgtaaggaactcaaaaaactctacagcaaaaaaaatctaataatctgatttttaaatggcaaaagatttgtataaacatttgtcaaaagaagacatccaaatggcaaaccagcatataaaaaggtgctcaacatcactgatcatcagagaaaggcaaatcaaaactactatgagatatcatctcactcctgttataatatttttttacccaaaagtcaggcgataaatgctggcaaggatayggagaaaagggaatccttttacattactggtgggaccactgctacttgtatacttgtacgttgttagtacaaccactatggagaacagtttggagggtcctcaaaaaactaaaaattgagctaccatatgacccagcaattccactgctaggtatatgccccaaaggaagaaaaacagtata

SEQ ID NO: 222885 - DNA, 496 bp, Homo sapiens
aaactcaacaaagtgaagagacagcccacagaatggagctccccatctgacaagggattaataaccagaatatgtaaggaactcaaaaaactctacagcaaaaaaaatctaataatctgatttttaaatggcaaaagatttgtataaacatttgtcaaaagaagacatccaaatggcaaaccagcatataaaaaggtgctcaacatcactgatcatcagagaaaggcaaatcaaaactactatgagatatcatctcactcctgttataatatttttttacccaaaagtcaggcgataaatgctggcaaggatatggagaaaagggaatccttttacwttactggtgggaccactgctacttgtatacttgtacgttgttagtacaaccactatggagaacagtttggagggtcctcaaaaaactaaaaattgagctaccatatgacccagcaattccactgctaggtatatgccccaaaggaagaaaaacagtata

SEQ ID NO: 222886 - DNA, 377 bp, Homo sapiens
aacaccacaaggtacttgcatcatgttacgcgcaattattactttgttattgcctttgtgtagaagaaaattattttcarttgaatctccaaactagataatgacaaatctggaattcgatacaatcaaggcttctaaaagtgaattttaaggtgttaccaataaagttcgactttgccattcagcccaaggcatttggctgaaaattcagacgagtggattggccacatgatacagcaaccacaaaaacttcaccttgccagcattggcaatacttctagctgatgacatttcaggaacttttaatgaattgaagctgcatatgcctgaagcccctgcagccactgaccggttagaaaataattatgcaaatagta

SEQ ID NO: 222887 - DNA, 377 bp, Homo sapiens
aacaccacaaggtacttgcatcatgttacgcgcaattattactttgttattgcctttgtgtagaagaaaattattttcagttgaatctccaaactagataatgacaaatctggaattcgatacaatcaagscttctaaaagtgaattttaaggtgttaccaataaagttcgactttgccattcagcccaaggcatttggctgaaaattcagacgagtggattggccacatgatacagcaaccacaaaaacttcaccttgccagcattggcaatacttctagctgatgacatttcaggaacttttaatgaattgaagctgcatatgcctgaagcccctgcagccactgaccggttagaaaataattatgcaaatagta

SEQ ID NO: 222888 - DNA, 562 bp, Homo sapiens
gaaaggaataaaaccactcatcatagagaagcctatttattaattgtaaactgttgyaaggtcaagttttaagaatcattcaaaatcacacaaaattaaatttgaaagaataaacacacgacatttgaaaaaaggatgagaataaaaaccagtgttaggttatttctaacttgatctaagttgaacataatattgaattcattataagatatttgtaaggtattctggcctaaaaaaatttattatgaaatacagtaatcaaaatcaaaactggttcatccacttaatgaatgaatattgaccatgtgctccgagccagacaatgtgctaagttgttgagagagaaaagtgaacaagagagacatggtcctgtcctcatagcacttacagtatttccttttgaacagtgttgtatttattatatttagctcaatataaatctaaaattttgaacgattatatttatactttcctggcactaaacatgcatgtgtattgcaggaaaatgtataaaatagaaacatggtttaggaaactgtaaaactatcacttcaatacttaa

SEQ ID NO: 222889 - DNA, 562 bp, Homo sapiens
gaaaggaataaaaccactcatcatagagaagcctatttattaattgtaaactgttgcaaggtcaagttttaagaatcattcaaaatcacacaaaattaaatttgaaagaataaacacacgacatttgaaaaaaggatgagaataaaaaccagtgttaggttatttctaacttgatctaagttgaacataatattgaattcattataagatatttgtaaggtattctggcctaaaaaaatttattatgaaatacagtaatcaaaatcaaaactggttcatccacttaatgaatgaataytgaccatgtgctccgagccagacaatgtgctaagttgttgagagagaaaagtgaacaagagagacatggtcctgtcctcatagcacttacagtatttccttttgaacagtgttgtatttattatatttagctcaatataaatctaaaattttgaacgattatatttatactttcctggcactaaacatgcatgtgtattgcaggaaaatgtataaaatagaaacatggtttaggaaactgtaaaactatcacttcaatacttaa

SEQ ID NO: 222890 - DNA, 562 bp, Homo sapiens
gaaaggaataaaaccactcatcatagagaagcctatttattaattgtaaactgttgcaaggtcaagttttaagaatcattcaaaatcacacaaaattaaatttgaaagaataaacacacgacatttgaaaaaaggatgagaataaaaaccagtgttaggttatttctaacttgatctaagttgaacataatattgaattcattataagatatttgtaaggtattctggcctaaaaaaatttattatgaaatacagtaatcaaaatcaaaactggttcatccacttaatgaatgaatattgaccatgtgctccgagccagacaatgtgctaagttgttgagagagaaaagtgaacaagagagacatggtcctgtcctcatagcacttacagtatttccttttgaacagtgttgtatttattatatttagctcaatataaatctaaaattttgaacgattatatttatactttcctgrcactaaacatgcatgtgtattgcaggaaaatgtataaaatagaaacatggtttaggaaactgtaaaactatcacttcaatacttaa

SEQ ID NO: 222891 - DNA, 417 bp, Homo sapiens
tggtcctgtcctcatagcacttacagtatttccttttgaacagtgttgtatttattatatttagctcaatataaatctaaaattttgaacgattatatttatactttcctggcactaaacatgcatgtgtattgcaggaaaatgtataaaatagaarcatggtttaggaaactgtaaaactatcacttcaatacttaatacttttatttttctgtacaccttattacttaaatgtaaataacagatttttaaaacctgagatctcattccatataaaatctgtatcatgttttcatgtagcttgatgttttaactattcttacatcaatcttcacaagcataattattaatattttcatattctcccaattcatttaacaaatagttattcaaggcatactctgtccattctagatt

SEQ ID NO: 222892 - DNA, 548 bp, Homo sapiens
tcccctgagcatgagtgatgactttctagtttcctctatatatgcagttgctcttgagtttccaatattcaatgtcttatttccaaaatggtaaaaaaagataaaaataaaggggaaggaggtgctgatgatttaaatcccctggaagtcacttcaccagggggagaggggcagtagtcaccacatctttgtcttcacctctgtgatcataagcaacaatcagtgatcagaacacagatccccaatatttggaggataaggtcctctttgtccaccctgactcccacaggatgcgtgcaaactgatctaggaacgtgtgcatggcttccgctgtgctaagagctgtaattgaccaaaagtaacttcaattcaccttccaagtcctyctccggaggatacaagccatcaatagactctagagttctgaaatgtttatatcagacaggctctgccagtacagttgttacctaggagaggagacagatttctggtatttcctactccactatctatcttccctgaattgcatttttgagataattgagaca

SEQ ID NO: 222893 - DNA, 563 bp, Homo sapiens
aatagtgcacattctcactcatatgtagaagcttgaaaaagtggattttatgaggatagagaatagacttgttgttaccagaggccaggaagtgtaggagggagcaataaaagaattactgggtacaaaaatacacttagataaaagaaataagacctagtgttcaatatagtaaataacagcctcttgtatatttggaaaaaaggccagaagagaataatttgaatcttcccagtctaaaaaaaaasataaattttatggtgaccagtattttaattaccctaattttatcattataccttatatgaatgtatcaatatatcacatgtacccccaaaatatgtacatctattatgcatcaatttttaaaaattctctcaaaaactgagtcagtacaaagaaataaacatagaatgaatatcagtttataacaatagaagcagattattcaaagactctaaactgtttcttcatatttaaattagacaacaatagaagtaggtctcagagacaaattgattttccttctttcaacttataccttatatcatgtctctaagaat

SEQ ID NO: 222894 - DNA, 501 bp, Homo sapiens
agcaggcctcaccagccattgaataaaatgagttttagaaaaaccgaacaggggtagtaaaatacctcatataattgtcactgcagctataatgccttgtagccaaagacctaaccttgcatagctcataatgcatggtgtaagatatttatatgtgcattttcagggcctagtgcttccttgaaggttgtgatactaaatgaagcaagaacactccctaaagagggaaggatcttaccctttctgtcattcctgaagttgtatcagatggccttgatagcctaaaacaaacctgaaacaagtaatgtcaattatcaaggttcatttaattacagggatttttcaycctcctcaaaggtaaatggtagttaataattctgtcttgatgtgtataccaagttcattctagcatctaatgttctggagcaaatgtgtgtgtaggtgtgtgcatgcacaccggtgtgtttctgagagtttgtgtacatttatacattcaatgtt

SEQ ID NO: 222895 - DNA, 618 bp, Homo sapiens
acagcacatctgtttacagtggtttactgaatatattaaatccattgttgagacctgctcagaaaaataatatttctgcatctcatcaacartatacttggttatccaagagctctgatagagatgtacaaggaggtgaatgctgttttcatgcctgctaacacagcgtcccttctgtagctcacagatcaaggagtaatttttgattttcaagtcttattatttgagaaaaaatttgtaaggctatatagctgccatagatagtgattcctctgatggatctaggcaaagtaagtttaaaacctctggaaagagtttagcattccacatggcattaaaaacatccatgattataagaggaggtcaaaatatcaacattaacatatatttggaagaagtttattccaacccctatggatgaccttgaagggttcaaaagttcagtggaggaagttattgaagatatggtagaaatagcaagagatctagaattagaagtgaagcctgaagctgtgactaaattgctgcaatctcattataaacttgaacagctgaggagttgcctcatgaatgagtaaagaaagtggtttcttgagatggaaactactcctggaaaag

SEQ ID NO: 222896 - DNA, 618 bp, Homo sapiens
acagcacatctgtttacagtggtttactgaatatattaaatccattgttgagacctgctcagaaaaataatatttctgcatctcatcaacaatatacttggttatccaagagctctgatagagatgtacaaggaggtgaatgctgttttcatgcctgctaacacagcgtcccttctgtagctcacagatcaaggagtaatttttgattttcaagtcttattatttgagaaaaaatttgtaaggctatatagctgccatagatagtgattcctctgatggatctaggcaaagtaagtttaaaacctctggaaagagtttagcattccacatggcattaaaaacatccatgattataagaggaggtcaaaatatcaacattaacatatatttggaagaagtttattccaaccccyatggatgaccttgaagggttcaaaagttcagtggaggaagttattgaagatatggtagaaatagcaagagatctagaattagaagtgaagcctgaagctgtgactaaattgctgcaatctcattataaacttgaacagctgaggagttgcctcatgaatgagtaaagaaagtggtttcttgagatggaaactactcctggaaaag

SEQ ID NO: 222897 - DNA, 397 bp, Homo sapiens
taatataagtggcaaagttagagtggcagacaaagagacatgtctccacccagatatgaagatggttaattaaaaaattgtgttaatagggacaaaatgcctggagaggcaatatgagtatcaaaccatagcaactaagacaaatcaaggatggattattagaggccaaaggaagccaccacaataaaagccataatcaaccttcaataaattgtgggtgaagtatgaaatagaggttgaggtcttgtttttcatattaatttccctgcctaactttccattctyattttttcccattttttctttccagcacaaagaattgaaaatactgttatgcctccattaaattatgatgccaccattacaaaaaatccattgaccatatatgtatagatct

SEQ ID NO: 222898 - DNA, 585 bp, Homo sapiens
gcattatatcttcaaataattctctttttcttatggttccagttgcatrtatattagaccatttgctgtgcttccacaggtccctgagcctttaatcacttttcttcagtatttttcactctctattcttcactttgaacaatgtctattgatgttttagagttcactcatctctaatagtgtcaacagcactatttattcctgcagggatttttaaattctgttatttaacccatctgtaatttattttgctttcatagctagagaaaaaaacaatcttttaaatattttatttttctagatggctggttatcttaaggcaatttattgaattagacaatagttttcaaaaagagctccacaaaaatatagatgacactccttttctctagagtctacgcattgcttccatgatttcaggtgtgcatttctgatcatgtcatttccccaaaattaacattattgtaaacaaaacccatttgcataatttggtcattaaatgctttttatctgggagagtaaatagtaattgcagtccccaaggtaaagtcttatatgggtaaccggcaaaaatggtgtcctttg

SEQ ID NO: 222899 - DNA, 585 bp, Homo sapiens
gcattatatcttcaaataattctctttttcttatggttccagttgcatgtatattagaccatttgctgtgcttccacaggtccctgagcctttaatcacttttcttcagtatttttcactctctattcttcactttgaacaatgtctattgatgttttagagttcactcatctctaatagtgtcaacagcactatttattcctgcagggatttttaaattctgttatttaacccatctgtaatttattttgctttcatagctagagaaaaaaacaatcttttaaatattttatttttctagatggctggttatcttaaggcaatttattgaattagacaatagttttcaaawagagctccacaaaaatatagatgacactccttttctctagagtctacgcattgcttccatgatttcaggtgtgcatttctgatcatgtcatttccccaaaattaacattattgtaaacaaaacccatttgcataatttggtcattaaatgctttttatctgggagagtaaatagtaattgcagtccccaaggtaaagtcttatatgggtaaccggcaaaaatggtgtcctttg

SEQ ID NO: 222900 - DNA, 585 bp, Homo sapiens
gcattatatcttcaaataattctctttttcttatggttccagttgcatgtatattagaccatttgctgtgcttccacaggtccctgagcctttaatcacttttcttcagtatttttcactctctattcttcactttgaacaatgtctattgatgttttagagttcactcatctctaatagtgtcaacagcactatttattcctgcagggatttttaaattctgttatttaacccatctgtaatttattttgctttcatagctagagaaaaaaacaatcttttaaatattttatttttctagatggctggttatcttaaggcaatttattgaattagacaatagttttcaaaaagagctccacaaaaatatagatgacactccttttctctagagtctacgcattgcttccatgatttcagrtgtgcatttctgatcatgtcatttccccaaaattaacattattgtaaacaaaacccatttgcataatttggtcattaaatgctttttatctgggagagtaaatagtaattgcagtccccaaggtaaagtcttatatgggtaaccggcaaaaatggtgtcctttg

SEQ ID NO: 222901 - DNA, 515 bp, Homo sapiens
caatagttaaaaacatgaggactgaagagcagtgttgcaaggatttaggcaaggcagtcctttgtaaatttcacagagtggagatacaaagcaaaagtaaaaacaaaaaaatttttttggaattgctccgagataagacctgtgtcctcttacagaaataatcttgtgcagtatactaagattctcttttacaccactttgaatctcctttgccccacttcttgttccagccactgctgcagggaacagctccaaagcttggatcaattttacctaagtgtaaattgtcagtacctttacctcgggctsaaatcatgtaactctcgtgtgtaccctagggctcctcacactgtttctcacagggtttatttttcattggcttagtagaatatctgcctaaactgctcagaactcacatgaaagtttgtgaaatttaatactcatgtggttaccttgaccaatggaagatggaaactgccgcataaatgctttctcttctctcccctgagggagac

SEQ ID NO: 222902 - DNA, 531 bp, Homo sapiens
gctttgaaaggaaaatccagcctaagtaaatagaagaaaaactcagtggcggtaccctttaatttatcgccaccacatactctaggaaatacagcacaaaccatgttgtggaatatgagtccattagattagcatcttgcctctaaaaaaaagagcaagaagaacatggggaaagaagcaaattattcctcttcatccataatgactgtcaaaaaccctaaagtttggaggaagtaaaaatccacttcaaaaaaagtcaaagaaatgaatcattaaggtatgtaatattaactgtaagtactgcaaaaatgttcaggcmaaagggacactgacaggattcttcctggagaaggctttatggcaaaggggttgggtgtgtcttgaaaaatggtttacatgaacagagactacaagttattctagaattggagtttagaatgagcaaatggaagcattttatgcatagttgaagaaatgtgcatgacaggtgaatggtgggattgagtcagagaagtagggtagcagtaaagt

SEQ ID NO: 222903 - DNA, 531 bp, Homo sapiens
gctttgaaaggaaaatccagcctaagtaaatagaagaaaaactcagtggcggtaccctttaatttatcgccaccacatactctaggaaatacagcacaaaccatgttgtggaatatgagtccattagattagcatcttgcctctaaaaaaaagagcaagaagaacatggggaaagaagcaaattattcctcttcatccataatgactgtcaaaaaccctaaagtttggaggaagtaaaaatccacttcaaaaaaagtcaaagaaatgaatcattaaggtatgtaatattaactgtaagtactgcaaaaatgttcaggccaaagggacactgacaggattcttcctggagaaggctttatggcaaaggggttgggtgtgtcttgaaaaatggtttacatgaacagagactasaagttattctagaattggagtttagaatgagcaaatggaagcattttatgcatagttgaagaaatgtgcatgacaggtgaatggtgggattgagtcagagaagtagggtagcagtaaagt

SEQ ID NO: 222904 - DNA, 531 bp, Homo sapiens
gctttgaaaggaaaatccagcctaagtaaatagaagaaaaactcagtggcggtaccctttaatttatcgccaccacatactctaggaaatacagcacaaaccatgttgtggaatatgagtccattagattagcatcttgcctctaaaaaaaagagcaagaagaacatggggaaagaagcaaattattcctcttcatccataatgactgtcaaaaaccctaaagtttggaggaagtaaaaatccacttcaaaaaaagtcaaagaaatgaatcattaaggtatgtaatattaactgtaagtactgcaaaaatgttcaggccaaagggacactgacaggattcttcctggagaaggctttatggcaaaggggttgggtgtgtcttgaaaaatggtttacatgaacagagactacaagttattctagaattggagtttagaatgagcamatggaagcattttatgcatagttgaagaaatgtgcatgacaggtgaatggtgggattgagtcagagaagtagggtagcagtaaagt

SEQ ID NO: 222905 - DNA, 562 bp, Homo sapiens
attttcagcaacgcctcattctactggtgccagtttactgtattagtccattttcacactgctgataaagacatatgcaagactgggcaatttacaaaggaaagttttattgaacttacagtttcctgtggctggggaggcctcacaatcatggcagaagataaaaggcacgtctcacgtggtgacagacaaaataacttgtacagggaaactcctttttttaaaactgtcagatctcatgagacttgttcactatcacragaacagcacaggaaatacctgtccccatgattcaattacttcccacaaggtccctcccataacatgtgggaaatcaagatgagatttgggtggggacacatccaaaccgtttcagcatatcacagagaaagaggtggagtaaggagggaggtgccatgctcttttaaacaaccagatctcatgtgaactttgagcaagaactcctcattattacaatagggactctgtgtgggggctcaaagcattcatgagtgatccacctccatgacccaaacccctctcaccaggccccacctccaac

SEQ ID NO: 222906 - DNA, 562 bp, Homo sapiens
attttcagcaacgcctcattctactggtgccagtttactgtattagtccattttcacactgctgataaagacatatgcaagactgggcaatttacaaaggaaagttttattgaacttacagtttcctgtggctggggaggcctcacaatcatggcagaagataaaaggcacgtctcacgtggtgacagacaaaataacttgtacagggaaactcctttttttaaaactgtcagatctcatgagacttgttcactatcacaagaacagcacaggaaatacctgtccccatgattcaattacttcccacaaggtccctcccataacatgtgggaaatcaagatgagatttgggtggggacacakccaaaccgtttcagcatatcacagagaaagaggtggagtaaggagggaggtgccatgctcttttaaacaaccagatctcatgtgaactttgagcaagaactcctcattattacaatagggactctgtgtgggggctcaaagcattcatgagtgatccacctccatgacccaaacccctctcaccaggccccacctccaac

SEQ ID NO: 222907 - DNA, 562 bp, Homo sapiens
attttcagcaacgcctcattctactggtgccagtttactgtattagtccattttcacactgctgataaagacatatgcaagactgggcaatttacaaaggaaagttttattgaacttacagtttcctgtggctggggaggcctcacaatcatggcagaagataaaaggcacgtctcacgtggtgacagacaaaataacttgtacagggaaactcctttttttaaaactgtcagatctcatgagacttgttcactatcacaagaacagcacaggaaatacctgtccccatgattcaattacttcccacaaggtccctcccataacatgtgggaaatcaagatgagatttgggtggggacacatccaaaccgtttmagcatatcacagagaaagaggtggagtaaggagggaggtgccatgctcttttaaacaaccagatctcatgtgaactttgagcaagaactcctcattattacaatagggactctgtgtgggggctcaaagcattcatgagtgatccacctccatgacccaaacccctctcaccaggccccacctccaac

SEQ ID NO: 222908 - DNA, 554 bp, Homo sapiens
actttttaaatcaaggagctcctacagaacccatgaacatttagatagtgctgtcatcttgcccagtggatcaatagcaagataggagttgggctacagagttaaaatatgggcagctctaasaaggaagggaaaattgtcatagttattacatgaagatacatgatacacaggcgcacacatttcggtataggctaagctaacaacaaaacctttcaacattctgtggctctagcaaaaatataactcattctctctaaggaaataagtggatgggttcatagactccttcaatcttgttactcttagtccccaagggattctcatggctagctcagcaattttctgcattttagtcaaggaaaggggaaagaacatatgttgaaggtaaaaattttccttttaagcaagtgatatggaatttatacacatgacttctgtgcattttctttcttcaagaatgtagtgacaaggccacatctggctgcaaaggacgctgacaggtgtatccaaaaaaattccattactctctggaagaaggttagaatggattt

SEQ ID NO: 222909 - DNA, 581 bp, Homo sapiens
gtaatacaaacagctgaacagcatatacctattagcttttctcatttgtagaaataaatttctggagaatgactgattacgctagtcaagaaatgcccctttaataacttttaaatgttaggtaaagaatggatgtgatgagaatttaaaatggcataatttaagaccccagaggtaaatgcataaactacttctgttcagtccatgctgattgcaagatagaaagaaaatatcttgctatgcaaatcctaagattcaggctaggctctctttattctttagtyacagttgcagacatccagcctctatgcaacagccatgttggttattaaaatattaaaacatttgcctaacaattggtcaagagccactctcccgatcccacatactgagcacaataaatgcaggaccaaattccctcccctggtacccttccccaatctcttcataatccagcaaccgaagctgtcatacctagtgtttcaggagtccgcaggactgtatcagtccacagacagcatttattctaatcacagagtgccctctgggcagtgctcatgctatgcgggaaactgaaaatg

SEQ ID NO: 222910 - DNA, 406 bp, Homo sapiens
taccaaactgctgggattacaggcgtgagcctggccagattctacacatacaagttagttacataaaacataaaggtcactgtggttaagaacagagggagaagagcaaaagcagatatcaaaatgtgatttactaggttgtgttgttaagtaagagttactatttaatatgattttgtaaccaaagtagaattgcctaaactacatataatagttcatttaattctcacaatacagatagatatgatatgatgaggaactgtgcatcagaaacatgctgccatttcttcasgtttacatagccagcgagtggcagagccattcccaaacctatttccatttgactctctaagcctttcattttccactatttcacatcacttccaaacaattatatttgtgaact

SEQ ID NO: 222911 - DNA, 584 bp, Homo sapiens
tagcagtgataggaccgccatcaatattgcttgctctatttttattttaaaagaaatcctaaatttaattcaaggaaaagttagtacattatcagctaactatataaataagttttttaaacacattataataattctttataaagcaataagtatttatattaaagtacacatcacatcttgaccatatactttttataatcttttttctttatgatttccaataatggtagagttatgcctttgctgaatctatgacctggtagttttttaaaaaaagaaaaaataagaatttttggtccagtacagttccatgattggagtgtaatttgtcttacatattccttgaaagacttcccagtataatcaatggctctgatttcttctgctcgtgaccctttctccttgttcactactcttatatttgataaagctggcttctcatcattttgacagcccccaaactgctctctgttcctgcagtgkatatatatttagcgacttggccacattttagtgtacgtctattactcagcactctattgcagactgtggaaatttttaggaggattataggtgaaggt

SEQ ID NO: 222912 - DNA, 420 bp, Homo sapiens
tatttttaaaaaaaatacagattcactgagctagacaaaggcatgcgtaactatttttccttaccctcctcttacatgaaaattgtgtrcttctcaatatcccgccctttaccctttaaatttggatccctcaaaatcatcttcagagaaaggcatagatctgtctcccaggcacatctttaactttggcaaataaatctcctgaaatgataagagacttatctcattggacaatatccaaacacttgtgcccaagtgtttatagaagcattattcacaataaaaagataaaagtatcacaaatgtccaccaaccaacgtgttgcatccatatgttagaaatttactcatccataaaaatgaagtactgatgcatgctgcaatttggagattcaaaatatgaagctaagtgaaagaagcc

SEQ ID NO: 222913 - DNA, 433 bp, Homo sapiens
acacttcataaaaacaaatactgatttatgaaccttgagtgacatctccatttagcatatatatatatatgtttgtatgtgtgtgtgaatgtgggaaactgtattgcattctaggtgttactgcctatatgaggaattagttaactagagattaaatggaagatgaaaccccaggtgaactggctgaggctgtgtgaagaagaagcacccccagactttcacccctttgtgcttctgacactggggagcccctgcagaccaacctcccatgcatggagcctgggtcctccrctggtggataagtgaaactctcatctctgggggaattggctcatgtgctcctgtgtccctggctgcacagacagcgcacagggctcagtgacttctgtattcctttgcagatcctgagctcccagagtgcaggaaaacgccc

SEQ ID NO: 222914 - DNA, 433 bp, Homo sapiens
acacttcataaaaacaaatactgatttatgaaccttgagtgacatctccatttagcatatatatatatatgtttgtatgtgtgtgtgaatgtgggaaactgtattgcattctaggtgttactgcctatatgaggaattagttaactagagattaaatggaagatgaaaccccaggtgaactggctgaggctgtgtgaagaagaagcacccccagactttcacccctttgtgcttctgacactggggagcccctgcagaccaacctcccatgcatggagcctgggtcctccgctggtggataagtgaaactctcatctctgggggaattggctcatgtgctcctgtgtccctggctgcacagacagcgcacagggctcagtgacttctgtattccyttgcagatcctgagctcccagagtgcaggaaaacgccc

SEQ ID NO: 222915 - DNA, 399 bp, Homo sapiens
caaaatgactgaggattttattaattttgagcaatattgaggttttctcataatatctttttattgttaacttcaaactaaataacaatcatgtctgggaataaaatgtataagatagtcatttagaaaaatttggagatttttccttccttgtccagtaaatacttaacattttaygtgcaatgtatgtcataaatatgggcattcccccctttgaggtatgtgttcattaatatacacacatatatatactcacacacacatatatactgtacagtggcatctacacatactatatatccacatataatgtatttgtatgcaatatgtaaatatatacacacataacacctagagtaagtgtatgtatacaatatatcagaatatatatgtgaattc

SEQ ID NO: 222916 - DNA, 467 bp, Homo sapiens
ccaaacgggggtcaaaactgtagcatttgtgggatgcaagacttgtgtatatgaacggcagacttttcctatatgcaggcccagcagagacaatgtcggggctggagtacgagcaggtgttggtgcatgtagsgggtactgaaacgaattgcctgtgtatcccaagaaacaactctactgagagatcatattctctaggggtttatttttgtttttatttttattttaagttaaagcttcgggtagaacacccagtgtctccttgtccatctgaagaagatgctgctatgtggaagcacatccttgagatccacaaggagacactgggcaaggagacgagggtgccccactgtgcagaagtctccctaataaatgatctatgaacaccctggtgtttagtgcttctttctttggaatcccagcagctctgtcactggacggtttggtgcactcccttgagggaattc

SEQ ID NO: 222917 - DNA, 467 bp, Homo sapiens
ccaaacgggggtcaaaactgtagcatttgtgggatgcaagacttgtgtatatgaacggcagacttttcctatatgcaggcccagcagagacaatgtcggggctggagtacgagcaggtgttggtgcatgtagggggtactgaaacgaattgcctgtgtatcccaagaaacaactctactgagagatcatattctctaggggtttatttttgtttttatttttattttaagttaaagcttcgggtagaacacccagtgtctccttgtccatctgaagaagatgctgctatgtggaagcacatccttgagatccacaaggagacactgggcaaggagacgagggtgmcccactgtgcagaagtctccctaataaatgatctatgaacaccctggtgtttagtgcttctttctttggaatcccagcagctctgtcactggacggtttggtgcactcccttgagggaattc

SEQ ID NO: 222918 - DNA, 467 bp, Homo sapiens
ccaaacgggggtcaaaactgtagcatttgtgggatgcaagacttgtgtatatgaacggcagacttttcctatatgcaggcccagcagagacaatgtcggggctggagtacgagcaggtgttggtgcatgtagggggtactgaaacgaattgcctgtgtatcccaagaaacaactctactgagagatcatattctctaggggtttatttttgtttttatttttattttaagttaaagcttcgggtagaacacccagtgtctccttgtccatctgaagaagatgctgctatgtggaagcacatccttgagatccacaaggagacactgggcaaggagacgagggtgccccactgtgcagaagtctccctaataaatgatctatgaacaccctggtgtttagtgcttctttctttggaatcccagcagctctrtcactggacggtttggtgcactcccttgagggaattc

SEQ ID NO: 222919 - DNA, 579 bp, Homo sapiens
taatgaacataagagtaatcagagaatctgactcattttagatgtgtgtgtgtgtgtatatatatgtgtgtgtgtgtgaaaaacattgactataataaaaataatctcgagttcacgaagcttcattggtgatttcttacaaatattgacacactaatgaaacacacaaacacacccagagcatcacaaatgtttcttgagaatagaaaaagtggcaatgtgcccaggtgcggtggctcacgcctgtaatctcaacacatagggtggcagaggcggcagattacttgaggctgggagttcaagaccagcctggccaacacggcaaaaccccatctctactaaaaatacaaaaattagtcrgacatggtggcgcacactgcagtcccagctacttgggaggcagaggcaggagaatcacttgatcccaggagatggaggctgcagtgagctgagatcccgcccctgcgctccagcctggtcaacagagccagactctgtctcaaaaaattaaaaaaaaaaaaaagtcatgacatataaaatagaattttccattctataacaggcatattttaaactcta

SEQ ID NO: 222920 - DNA, 514 bp, Homo sapiens
atggggcccagcagcagaagaactacgtttacagacttcgcaattttcccgcagtcctggttccttccaggaacattccttctaatgctcccagaaaacaaattgggctggtttcaccatgacaactacaaatctaatccaacatgaagagttagaggcaggcaatttgttgtgtacaattcaagagttaccaaaaaattcttcggatytgggggccttccacccctcttaggtaagttatacacgtccttttgattctaaggaaaactgctcgtaaaatatttgggagctcttgggacatcaaacagctcttagaggagtgcattttaatggtttacttgtaaaagaatcagtaaaagaagtagaaacatatggttcaaattcctctgaattctgcaaggtattgttgtagatgtcttttttttcttttttcctgagggtctccacgcttctttgagcgcttatcctaaaaatactccaaataaccactacatgtactggcacagcaagtgag

SEQ ID NO: 222921 - DNA, 352 bp, Homo sapiens
tacccagcagggccgtgtgaaggacgtccaatgagcttgtgcagcaaagaggtgatccctggcctgaccccagctggcatggcaatctctcactctgtcagtgccctgtttcaaggaggcttaggtgaaatggagctcatggtgataaagatctcagcttcagtgactcacgaggatctgaagggttcaactacctctttgtgaacagaaaaaccaatgctcaaaaagtgtggctgcacaagctcccactgacccttagctccaatcaggattcacccccaggtaatctggctcaaaarccactgcaccatccccctaccagaaatcaggtggcaaatgacagctgctaagg

SEQ ID NO: 222922 - DNA, 518 bp, Homo sapiens
tgtgagtcagtatggggtgggggggttggggaacaacacatgtgggcatcattggcaccctcttatctccaaagccacaggtatcttagtccgagggtgggtcatgctagctgaagcactcagtcacagtgacagtccattattgcatttatttgaatgagtggcatccrttcacccacgcttcgtatcaggagaccatgttccctatggatggcctatctgtatgcatgcggtagagacgggctgagcatagaattaggactgagaagagagtttccccttcagagcctctattgtgccctgcagaccagtgggaggaatcaggcagttggatttaatgatagagaaatgcctcagcgcttcctgagtactgcgtagtaaaagaaggattgcattgggctgttttatagagacttgccatccagctctaagtaggagcagacatgtgtttgtttatttatttctgccttcttaaggataataaaaagatcatatttaatgggccaaagcccatagat

SEQ ID NO: 222923 - DNA, 558 bp, Homo sapiens
tggagtccatggattcactgaatagaatgttgtgggaagtctgactagagcagtagggccacaccagctaaattagtgttcactcttctttctgagtatggtgagcccacaaggctggctgcctctgaaggtccctcctggttctcaatagtaaacctcatcatcagcagagagtatggtggggctcctcttcctgtgtkctgcggctcatgagcacacacatacagtttgtctaagacctggatcagatatttagatgtaagtgaaagagaaggggttattactgagttcaggtttggaaactgagttgtttggaaactgtttcttcccacttccctctgggtaatattgtgataaaggttttcaacaaacactgtcaaacaatgtcttgtttccagttacattttcatggaatgtaattagattattttagtgaccaatagtgaaatgattatgtcgtaagccaggctgcttcaggccataagctgatgtagagttttggagatgacacactgattgatccttggcgtaggcagaggtgaaatgtgcagtttattg

SEQ ID NO: 222924 - DNA, 578 bp, Homo sapiens
ttttctaaagaatagcctaaaatcaaatggtttctgccaaatcaggtatacctacaaatttttcggcccccasttaccatcttaagtcctggacagctattaagtggcatgcctatgctggctcctgcctattgaaagcagttgtctggagtcttgcactgagaaggattgtgcagctgagcttgggctaaatgagaaattgctgagattggattctaatgctgtttgtatttatcagagttctccagaaaaacagagccatacggtatatgtatacatacatatatatatatatatatatatatatatatatatatatatatatatatgagaagagattaggaattggctcacacaatcatgggggctggcaattttcaaagtaagctggcaggctggaaaagctggcaggagttgatgttgcagtcttgagttccaggacagtctggaggcagaattccttcctccccatgggacctcggtcatttctcttaatgccttcagctgattagatgaggcctacccaaatgatgaagggtaatctgcttctctcaaagtctactgatttaaatgtttaa

SEQ ID NO: 222925 - DNA, 284 bp, Homo sapiens
tccagaaaaacagagccatacggtatatgtatacatacatayatatatatatatatatatatatatatatatatatatatatatatgagaagagattaggaattggctcacacaatcatgggggctggcaattttcaaagtaagctggcaggctggaaaagctggcaggagttgatgttgcagtcttgagttccaggacagtctggaggcagaattccttcctccccatgggacctcggtcatttctcttaatgccttcagctgattagatgaggcctacccaa

SEQ ID NO: 222926 - DNA, 582 bp, Homo sapiens
ttttctaaagaatagcctaaaatcaaatggtttctgccaaatcaggtatacctacaaatttttcggcccccagttaccatcttaagtcctggacagctattaagtggcatgcctatgctggctcctgcctattgaaagcagttgtctggagtcttgcactgagaaggattgtgcagctgagcttgggctaaatgagaaattgctgagattggattctaatgctgtttgtatttatcagagttctccagaaaaacagagccatacggtatatgtatacatacatatatatatatatatatatatatatatatatatatatatatatatatgagaagagattaggaattggctcacacaatcatgggggctggcaattttcaaagtaagctggcaggctggaaaagctggcaggagttgatgttgcastcttgagttccaggacagtctggaggcagaattccttcctccccatgggacctcggtcatttctcttaatgccttcagctgattagatgaggcctacccaaatgatgaagggtaatctgcttctctcaaagtctactgatttaaatgtttaaaaaa

SEQ ID NO: 222927 - DNA, 561 bp, Homo sapiens
aagggagtttagattcctcacctgatttctagccagtctgattcgttgtcttaccagagaggcctcatttgggccatatgtaaagtggcaccatccctggcgagcacccctaacgttccctgtgcccacgtgtcccttcatctgggtagatcccactcatctcacaaggcccagcttcaatgttaacttctgtctgaagctccccaagccttcaggcagaataactattctttcctctgtgcttcctcactctcctctataacgcatttgtcagtttatrttatggattgttctgtacagacttggctctcctctgaggctaggagatccttgaggacggggagtgtgtttcctttttctttatatctaggattcagcacagttcttggtcctcagtgaacggctgatgaattggaaaataaatgactggacatctgaaatattaaaggaattaatattttgtgggtggagagaaatcaagacatgtaaagttcagtgtaaaattaatcttttctccccaatacagtctgattaaatggtgacagtttcttcctctcatga

SEQ ID NO: 222928 - DNA, 531 bp, Homo sapiens
caggagtcatcctctcccctctgctcctaacacaggttataagtaaactgttttacaaaagaagaaataaccatattcaaaagcaagggcaaactgcaggcccaggagtgagaaggcccatggaggtgagcagaggctgaaacagtgggttcaagggactggggaccagagtgagtgaccagcaagactttccaagcctccagtgcttattggaggagctgctgttaaccatgcaacctgtggggccaggccgaggcaactgcagagtcaggtgagaggagcaatgtccatgtgasacattgcaaacaaaaattgcaaatcacaagacacttacagccccgagaatcaattggtagacagtacacgtgggaaaaggcacacccaaggaaatggaaataatagcacaatctgaaaacaactttaaggagggagggttcagaatctcaaggaagactgaggaggaaactgaatccctgaaatgggaattggggggttattcatccagaacaggcctgattcctgggaagagga

SEQ ID NO: 222929 - DNA, 489 bp, Homo sapiens
gaattcagctggagtctggggcracacagccctgggactgggcaccctgggtggaaacctgtttccctctctcttcttgcctgtgaaagcccctggcagccaccctgtccctgcttctccaaagccccactctctctgcccatctgcccacagtccccatgggtcccagtgttacccttgaccccttttccacatgcccttcccgcccaggtcctggtctcctgcagagctgcctcatctccaggcatccacgtagactgttacatcctcttctccatgtgccagtgatgggatgcttaaaatacattttgagagagttatgggctcacaggcaatggcgagggatggtacagagagaccctgtgtaccctgccctgttccccacagcaggagaatcttgcaaaattggagtgcagtagcacagccgggacatcccaccaatacaccacgagccttgttctggcttcagttttttgtgcactggtctgt

SEQ ID NO: 222930 - DNA, 559 bp, Homo sapiens
ttctgtgccgcctcttgtctgcctccctcccctgaggagtactgctgtatagtaaagaacaactgaaataatatgacatgagaatactcggtcagccttaatgtaggtctttacyggttttaccaggaagaggcagtattgaaggtgggtaggtcagaaaatagagacctacctgaactaaagcagtgatgggagagaaatacaggcttggaaccatcgtgagctttgtgttcccagggtgagagtggagaggtaactgacgatgagatggcaacccgaaaggccaagatgcacaaagagtgtcgaagccggagtggttctgatcctcaagacattaatgaacaagaagaatcaggtaaagcggcatgtttacatctgagatttttgttttttaatttttgtgggaaaaaaagtatacatttggttttaaattgtgatttaagcattgcaaacatttctaacaaaactctttgtcctaaccagacaatgaaacctaaaggtacttctgcaagcatagtgtgcttggaataaaatccccattaattaacttgccattact

SEQ ID NO: 222931 - DNA, 516 bp, Homo sapiens
gccatgtgagacacgcctttcatcttcttccatgattgtaaggcctccccagccaggtggaactgtgagccccttaaacctctttttccttataaattacccagtcttgggtatgtcttcatcagcagcatgaaaatggactaatayagtcgggaaagggtttttggttgtcagaatgactggaaggctttattggttaaataaatacatgggcagaaccacacaatgatgaatttctttgctcaaaatgccagtagcacctgctccctcaacaccagatgacaccttaaaataattctctaagtgttggccaggtgaggtggctcatgcctgtaaactcagcactttgggaggctgaggtggcagatcacgaggtcaggagatcgagaccattctggctaacatggtgaaacccttgtctctattaaaaatacaaaaaattagccaggcatggtggcacatgccagtagtcccagctactcaggaggctgaggcaggagaatcaattgaacccgg

SEQ ID NO: 222932 - DNA, 524 bp, Homo sapiens
tgtacacattcatcatggtgtagaccaggatgggcttggcttgtagatgtgtgtgacagagagagtaggtatgtatgtgtttgtaacttttggtgtaaacagtatttaattttaatatctatcatttacacatcacatcataaaagagtcctgctgtgaatcaaaacccttcatataggtaatggcaaataactctttgtttatgagtaaaaaatgaatagtttttttttccccccagaaatccgtgtttggtgtttgtatttgtttttcactactcacaatatgccacacactctcttttttatttttatttttttgagacagggtctcattctgtcttccagtctggaatgtagtggcgtaattttggctcactgcaacctctgcctcccggggtcaagctatccttctacctcagcctcatgagtagctggaactacaggcacrcaccaccatgcctagctaattttgtattttcgtagagatgggggtcttcctgtgttgcccaggctagtctcgaattc

SEQ ID NO: 222933 - DNA, 553 bp, Homo sapiens
cctttacttcatattgcatcacaaccactaagtggctttgggaagtttgctaaaactttcaggttctaaggatcctcggctgtgaaaccaggaacttggactagatggtgtctaagacatctttcagttctaaaattctataattgaatggtcttatgggtaaaaccactttgctgcagaacagtgccactcagagcatagtttgtcgacctctgtcagtccagagtattcggtacctgtccatgacaagataaggagcttaagccaaaatgttaaccaactacatcagtaagtgcactgttcagtactgctgccatttgattttttgtagcaaggctttcgtggtgaaggaagcagtgtgttgatttacttcctggcataatcttcttatctcattgcagattgttagcaaatagttcctggatragattctgaataatgctgatgtagaaaaaacattaaagttcagaggtgaatatgtgcttaatatctgaaaatttttagagaatgacagctggttgttcttgcctcacagaaaggaatagtatccagt

SEQ ID NO: 222934 - DNA, 377 bp, Homo sapiens
tgaactcccgacctcaggtgatccgcctgccttggcctcctaaagtgctgggattacaagcgtgagccactgcacccagccagaaagatttttcttatttataatttctgttttctagattttctgtaataaaacctagcgtggtgtttaagtcataagaaaaaatatacattttcataaagagaaaataagtacagtaagggcacacacatttaatwaaaatttttttttattattttaattttaatttaattttatttttttttgtagagacaggctggtctggaactcctggcctcagtctctcaaagtgctaggattacagatgtgagccaccacacattttaatttaaaaaaaaaaaagaaagagtgtagaa

SEQ ID NO: 222935 - DNA, 544 bp, Homo sapiens
aaacactcaggcatcaacagactcacccttgaaatgcatcctaagccactgcaaccaatttgacctgcaaacsttgaaaaagaggcagttcatttttttctgcactatggcttggcccaatattctctctctgatggggaaaaatggccacctgagagaagtataaattacaatactatcttgcagcttcaccttttctgtaagggggaaggcaaatggaatgaaataccttaagtccaagctttcttttcattgagggagaatccacaactatgcaaagcttacaatttacatcccacaggaggacctctcagcttacccccatatcctagcctccctatagctctccttcctattaatgataagcctcctctaatctcccctgcccagaaggaaacaagaaaagaaatctccaaaggaccacaaaaacccacaggctatcttttatgtccccttcaagctgtagggggaggggaatttggcccaacccgggtacatgtccccttctccctctctgatttaaagcagatcaaggcagacctgg

SEQ ID NO: 222936 - DNA, 505 bp, Homo sapiens
accaggagatctagtgttggtcaaatctctcccttctacctccccatctatggactctttgtggkaaggaccatactcggtaatcctctctactcccactgcagttaaggtggcaggagtggaatcttggatttaccacatccaatataaattttggacaccccctgaggaacctgtgggactgtcagctcaggagtcccaagatcagccagaccagcctcgatacacctgtgaactgttggaggacttgcatctcctatttcagaaggaaacatcccagactaaaaaggctcctaccactgatcctgaagaaaaactccttcctccttaaaaaagataagtgaaaacctatataatctttatctttaacacctctccttgcccctttaatggaattcttttactatttcatcatattgttaagtagtatactaaccataccctttgcaataggactatatacagtaagtagctcctgctgggatgaaaatccaaatcacatcaa

SEQ ID NO: 222937 - DNA, 516 bp, Homo sapiens
tccagcataatttcctataacataaatatttgttatttctacttcccttttttccccttttctactctaattgagcctctgtttcctttattctattataactacttttgtccaggtcacagattttttccaaccaaaaaaaaaaaaaacgaaaaacaaaaaaaagcccaggaccagagagattcataagtgaattctactagaggtacaaagagaagctggtgccatttytactgaaactattccaaaaaattgaataggagggattcctccttaactcattctatgaggccagcatcatccttgtaatatttttggactgtggttggctgcaggtaactgaaatcacagaaaatgaaaccatgagtaagggagactgctgtcttctaatatttttcagggatgactaaggaacacgtgaaggtttaactaaagcagagctaaaagatcactgacccatccttgggggctaatgactggccaagagaccataatgtcaaacattcaagagagagg

SEQ ID NO: 222938 - DNA, 516 bp, Homo sapiens
tccagcataatttcctataacataaatatttgttatttctacttcccttttttccccttttctactctaattgagcctctgtttcctttattctattataactacttttgtccaggtcacagattttttccaaccaaaaaaaaaaaaaacgaaaaacaaaaaaaagcccaggaccagagagattcataagtgaattctactagaggtacaaagagaagctggtgccatttctastgaaactattccaaaaaattgaataggagggattcctccttaactcattctatgaggccagcatcatccttgtaatatttttggactgtggttggctgcaggtaactgaaatcacagaaaatgaaaccatgagtaagggagactgctgtcttctaatatttttcagggatgactaaggaacacgtgaaggtttaactaaagcagagctaaaagatcactgacccatccttgggggctaatgactggccaagagaccataatgtcaaacattcaagagagagg

SEQ ID NO: 222939 - DNA, 558 bp, Homo sapiens
tttactttcccactcccctttataacttccttgagacagctttttcctttgcttcctgatctaggagaagactctaagcatgactagcttagcataaaattgtagtattttagttcttcatctacttcattaaaattactcctgagtttaaattgctaaatccaatggacacatgtcagtctttatcttatttaatcattgtaacatttaactttgagaattaaaaaaaaaatcccctactgttagaaaatgtctgcctcttctatagtcatggtaacagccactagaataggttttaaacttttaaataaatcaatactttaagcagtaaattcaattttggtttagtttcatatttttttctggcagttttaacttttgacaattttacgtgtaaggctaaggctcagccaggataaactggttcagatgttctggctgcttagacctggtgcttattatttatttgtttttatacctctctcagtatttcttctcagtcttygcttgctccttattctacttttgccttcttaaatcttgacgttctttaggctt

SEQ ID NO: 222940 - DNA, 425 bp, Homo sapiens
cacatccagagactaggttagtgtgtaagcaaatattttttgagtaccttctctggtccagggcttagggaaaaggaaagtgtcttgctttcatggagcttataatctactaaaggatctaagaatgacaaaagaaaatgaagatattattttattctttcctttgccacctcttatatttttgcaaattgatgctataaaaccgtatttttaataggcccacccaagtgcactgaaaactattaaggcaaactacttatctcgttatatggaaccaagaaggcaaaattgtttgctgtaacaagttttagtcttttgatatcagatagtggcaatgtcactgtgaagttcttttatttagtttctcagttytaaataaatgactgaatccattgcatcttggctaaaatacttcaaaagaattc

SEQ ID NO: 222941 - DNA, 621 bp, Homo sapiens
tctggctctccatttcttggagggagtcaaacctatgatagaagagtctgtaggtgggaatttctggcttttgagccggaaatgggtaactaccttcaagaatctgtgcctaaaaaacaaaaggagagccaactccggaaaggtgctgccacccacatggtcacttacatgagctcatacctgaaacaagagcttctttctgttttctccaaagggcacacttcagaaagagcactgggaatggcaaactaaaagrggaggaagacatgaaaagacctgtatttacttgacatgggagaaagagtcccgaatattttaaatatgattaaaattttaagtccataatttttcagaatgaaagccaattttccaaactcacgttttgtttctgggttctgggaggggatggaatgcagagtgggaagaaggtgccctcggaaactcattcctgtgtttgttgaggcagtagtaataagccctcatcatcttgtggctctcaaacacataagctttatgcaacttttgtaatttgggagaaaaggagtgaggtagcaacagactcaggccttagaaaatggtctaaatgctgctgtgccctcccacgatattttctttctcagc

SEQ ID NO: 222942 - DNA, 621 bp, Homo sapiens
tctggctctccatttcttggagggagtcaaacctatgatagaagagtctgtaggtgggaatttctggcttttgagccggaaatgggtaactaccttcaagaatctgtgcctaaaaaacaaaaggagagccaactccggaaaggtgctgccacccacatggtcacttacatgagctcatacctgaaacaagagcttctttctgttttctccaaagggcacacttcagaaagagcactgggaatggcaaactaaaaggggaggaagacatgaaaagacctgtatttacttgacatgggagaaagagtccygaatattttaaatatgattaaaattttaagtccataatttttcagaatgaaagccaattttccaaactcacgttttgtttctgggttctgggaggggatggaatgcagagtgggaagaaggtgccctcggaaactcattcctgtgtttgttgaggcagtagtaataagccctcatcatcttgtggctctcaaacacataagctttatgcaacttttgtaatttgggagaaaaggagtgaggtagcaacagactcaggccttagaaaatggtctaaatgctgctgtgccctcccacgatattttctttctcagc

SEQ ID NO: 222943 - DNA, 482 bp, Homo sapiens
atatcttttgttatatgcctaaggccatcttagatgcctaacgctatgttccttttttcagtctattttttctctgtagttcgaattgagtaattctgttgttctaatttctaattcattaatattcttctctgaactcttcaaagggcatctgccatttagcccatctgctgcattcactgcattataaattttagttattactttaaatgctaagatttccatttgactcttcttggtgtcgtctttctttactaagactttctgtatccttgtgtaagctatttttaaaaacattgtttcaattgtgtttataattgctccttgaagcacttttatcatggctactgtaaagtctttgtcagataattgtaacatctctttatcacaatgttggcatctattggttgtctttttaaatttaatttgaartcttctttgttctgatatgacggctgagttttttttattgaaacctgtac

SEQ ID NO: 222944 - DNA, 536 bp, Homo sapiens
cgatgttgtctttgcagctgttgatcaagaacaaatcttacataagattgctctgagcatctgcttccttttctctctgtgacctaaactctccccttcctggcaaccagaatggagatcatcagttagaaaatattgaataattgtgaaatatttaaatagagattagtttaatttgaaatgtacaagtattcagcatatgctatttatatatgtgcgttcatggatgtttgtgtatgtggtcttgtgtgtgtgtgtgtgtgtgtgtgtgtgtttctcttgatccaccaccaccccattcaccagcctgacagrggacagtgtttccagaaggaatgtaattcatgcgcatttttttcatgttaagttttataagaagaccaaacagctgccagtcctaggaaaatgctgtgaagagatccagccacatcagtggaagccacctatagagagagaagaacaccggctcccattctggttaaaggtacagccctcttcctcgaagtctgtaggaggcagaaggtcactgaaagttc

SEQ ID NO: 222945 - DNA, 395 bp, Homo sapiens
gaattcctgacctcaggtgacctacctgctcagcctcccaaagtgttgggattacacgtgtgagccactggatccatactcagctaatttttttcattttttgtagagatgggggtggggggactccctatgttgcccaggcaagtttcaaactcctggactgggctcaagtaatcctcctgccttggccttcctaactgctgggattaaaggcatggtggtatgtgcctgtggtaccagctactcaagaggctgagtcaggagaattgcttgggtttaggagttcaaggtgacagtgagacacgtaccactgcactccagtcaccatgcctggccccgaattycttttttcacccaataatatcccattgtatagatataccacttttgtttat

SEQ ID NO: 222946 - DNA, 582 bp, Homo sapiens
taaaattcatgtgtacctatcaataatgtcatcacgttgcagttattgctgggaagggcaagtcaatagtcatttccaaattactaaataatatagaaaatcacccttttcttcaagatgttagctgctatttcaagaactttcacctttcatgacttctacttctgaaactcaaatttttctctcaaaatgtatcaacccctctcaaaatgaaccaactcacttcttattgctactcataagatacatctctgctttttccagaaagtatttcatctgttggggatttaagaagttaagcattcttccatttcctgacagtgagagatactttagacactgctaatggctttacatgtagtatctcattaaggcctcataacatcctttaaactacccgtatatattattatgcctgttttacagatgagatcattgagacctatgaaaarttttcctgaaatgacacagtcaacaagtagatgattcagggttataatgcgggtctgtctagctcctgtatgcaccgtcctgtatgcacctaatgcagcaccgtgtttcacgtacctctcatcctggttg

SEQ ID NO: 222947 - DNA, 541 bp, Homo sapiens
aattctaacttgactctgaagctagcctgatgaatgaaaatgaaaacactatgttactttaaattttgttctctttgataatattcttacggtaaatgaatgagttgtaattccgactttatacaaacttctcatgagcttgtatattttcattcagaaattcaagaattatctatcctgctacatagttacatgacctagggatatttcagcacattataaaagaccagtccctatccacatggatgctgcattctgagcagggaaacaggagtaaacaaatgcttaaaaggaacacaatgatcagatgacaataasaactaagcagaaaattaaaacacggtgatatgatagagagtgagtaggtggctagtttagatgaggttgctaggacagacttctctgggaagatgatctcagaactcatccctagatgtcaagaaaaaggcagtcatgacaagataaggagaaacatgtaaagcagagagaatggctaagtataaaagccctgaagtgagaatgagctagagattccaaagat

SEQ ID NO: 222948 - DNA, 506 bp, Homo sapiens
gaattcgagaccaacttaggcaacatggcaaaaccccatctctactaaaaatacaaagattagccgggtttggaagtgcacgcctgtaatcccagctacttgggtggctgaggcagaatagcatgagcccaggaggtggaggttgcagtgagccaagatctcaccactgcactccagcctgggtgtgacagcgtctcaaaaaaacaaaaaaaaactgaagaacagtgtttgggtaccactgtgtattatttatatgtaatttctrtatatttgtattcttaagtataggatatctttagaaggatacataagaaactggtagtgggccaggagcggtggctcatgcgtgtaatcccagcactttgggaggccgaggtgggcggattacctgaggtcaggagttcgagaccagcctggccaacatggtgaaaccccatctctactataaaatacaaaaattagccagatgtggtggcacatgcctataatcccagctacttgggagg

SEQ ID NO: 222949 - DNA, 571 bp, Homo sapiens
aggccagctggctgtatctgggcccatgcagaacagagctgggaactgaggcccygtaggtagaatggggggtggggcctcagctctcccaaacttcctcccttcctcttagcaagggctgacagtgatcaggaacctttgtgtgatcccagcagtcatccttctgcctccactcaagggtctcctcccaatacacctaccacagccaacaatgggcatggggggctgtggaggaaggaggggaactgaagagactgggccacatgagctgggatggctccacggaagccttgtccctcaacctccttctcctcacctcagggcttggcctctccaaccagcccaggtcagtccctccagctacggtgagcatggagcctgatggggtcaccttttgtcctcattccagggctaggtcccaggaatctttccacttcctccttgggttcctaagtctgattggtcttggttttaggggagagatagctgtagtcagaagcctaggggaagggcaggagaaggcggagggggtcccagtccttcagtgttggaaagggggctccagtctact

SEQ ID NO: 222950 - DNA, 175 bp, Homo sapiens
tgaattcatgtcaggcttataggatcccatgccccttcctctagaaaatccaaggttactcacctccaaggcccccrcccacagaggcaaacatcagtgtgacaaacagcccgaagagctggtgcatggcctgtgacgtggcactgcgctggccctcggctatgagtggaaacac

SEQ ID NO: 222951 - DNA, 621 bp, Homo sapiens
ataggatcccatgccccttcctctagaaaatccaaggttactcacctccaaggcccccgcccacagaggcaaacatcagtgtgacaaacagcccgaagagctggtgcatggcctgtgacgtggcactgcgctggccctcggctatgagtggaaacacactctccaggctgcagggagaccagatagaggaaaggcaggggtagggagagagagggatgcagcccggggccagggctgctcatggcactggaactcacactggggaacaggaagtggccaagagggtctcgagggtgcatgccaggctgagtctcacctccaggccactgctcaagccaggcccacagcctggaayaccttcccacccttgtaggccagcagacacctaggcaccttttaagactccatttgcgggttgcttttgcccacccttgatgtgcaaaaatagatcctaaaggtcattatctcttactgacccttcagtaacaagtaacactacttgaagtcatttgttccatgaccttctgctgcacttgatagaggaccaggaaggcagtttctgggttggttttgttaactccaatttcctttgctcccagaatatggatgaatgaatgaatt

SEQ ID NO: 222952 - DNA, 471 bp, Homo sapiens
ggccaaaggtgaggcaaccagaagggttgagggaacatgacataccagagagcctggtccctccttcaaaggcatttacatttaagtgtgtgtgtgtgtgtgtgtgtgtgtgtgtgtgtgtgtgtgtatacacacacatacacagagcaggccaaatcatagacatctatgggttgaaatctagtcttcagtcctacagtttgtgatcctttcctggaaggtagatgtttgtggcacagggaggtgacccgaacagaggaagacaaggtactcaacacagtgggactataagcccagggagaaagaaccagtacctcactgatggctgctgtacccctctggggcccatgggygaaataaggaggcatggcatgtaggcagggagatccctcaggcaagggagtacaggggaccactgaagggagtgtgctaggattttcagagatgttagcaacgctttgaaagaaatgg

SEQ ID NO: 222953 - DNA, 603 bp, Homo sapiens
gtttgtccttcaatatgcattgtaattactttttataagctagacatgatgcactggagaaaaaggtactatggtaaataggccgttaatgatgtggtggtaaagtgtggagaaaggggtagcattccatagtctatgagtaggtctcagtcttagtgagcttgtacctgtaaactgtaaacttcacaagtgcttctcagtttcccaaccccsccttaggtaagacaagaaagctgaaggggactggagttggctattttctttccctacatggaaggctagagcagagtggagttgggtatttcctttcccctgggttggttaggctctaataaaaccccaagaggttaggctttgcaggggtaaaatattgtctcttgaaagcaggccttgttaagaagaacagaatgctctgggcatatttcaaaatgactacctttcttttcttcttgaaacacaaggggatttttcttcaatccttacctagcagagctcctagaggtaaaactcacaagtctggggcctccctatgactaggtcgccatggtgtttttaactcttagacttgtccacactgagcctctagcaatttatcaatcacag

SEQ ID NO: 222954 - DNA, 545 bp, Homo sapiens
gattgagagcaagatgaaaaggacgttaaagggagagggaaggaggaagagtggagagagtagtagacacacaagaactgttctccacttgggaaaataagccacttgtccacagcctcaaaaccaaaagaaaggctaatcagagataacaggggaatagaacccagagggccaactgacaccaagaaaatagctttaacttacatcaaagagggctttaaaatggagaagcaatccttctccttccaggcccaacaagagctgaaagagaggtttcagcctttaagatgtgggtggaacagaaaaataaatgatgtctggggcttggagaaggagggtcctgcagatggcagaggtgragtgtagcaaatgcttcaaagaaagcactgaattatttagccatgtgccacattcctgcagtaagcactaccaagaaaataggtaagaagagggaaaatgttattggttactttaagcaaggaggatcagctgaaagggagactgccttaccttctggcatttaacagagctttatataagctgta

SEQ ID NO: 222955 - DNA, 581 bp, Homo sapiens
tcagcttttaagtttgtgtgtacaatctaccttaaaaaatgtttgtgtatggtgttaggtaatggctgacagtcattcctctccacccatatatttatccaattgttccagtaccatttattgctaaggcatttgtttcttaattgaattgcattgatgtctttgtcgaaaatagtatagccccatttaagcaatctccattattttcattcatctatctatctttacatcgttagtacattgtgtggattattgcaacttgatagtaagtcttgaaatcaggtagtgtgagtcctctctctttgttcctccgtaataactgtttcaatgctaaattgcaccgtatcttttttgaagatattttgcactacatttaaattcaacatatatagtaccatctatgcacatatctcacagaactgatgaaacyaggaattgccatcactattttgtgcatgtgccagtaataaaaactatgtcaggactgccacctagccacagcaactctaagataccatcaattatatgacatattacaatttcagagatattaaatcatgaaaaataactgtatatattgg

SEQ ID NO: 222956 - DNA, 521 bp, Homo sapiens
tttttcccacattttcctgtcttcttctgagcttccaaacttttgcaacctctgcctgttacccagttccaaagttgcttacacattttctggtgtccttatagcagcaccccactctctgtggtaccaatttactgtattgattcattctcacactgctataaattacygcccgagactgggtacttcctaatagagttttaattgactcatggttctgcatggctggagagctctcaggaaacttacaatcatggcagaaggagaagcaaacatatccttcttcacatgatggcaaggaggagaagtgcaaagcaaagaggaaaaaaccccttataaaaccatcagatcctgtgacaactgtctcactatcataagaacagcagcatgggggtaaccgccctcatgattcaattacctcccatcaggtccctctcatgacacatggggattatgggaactacaattcaagataagatttggatggggaaatagccaaaccatatcagagcctttatgtt

SEQ ID NO: 222957 - DNA, 439 bp, Homo sapiens
cttggcattctattatgctgccatgacacattgcactacttaccagtaactgattatgacactttcaggctgattctcatcctggcaatgatgcagaaaggttttcagtactgtgtgctcagacagcactatacttggaaaggaagcttttgctgctgctgcgaaattggaccaagagtacmaagttctccatgaaccaaaactacctcagctttcttactcttttagcactggtcataaaggcagtgcaggatagtcataggaacatgggctgggatcagggggctttaggttaaaaatagcaggcttgaagcatctgctcctcttccccatcgtaatagactaatgtactgaatgtatggaaaactcccttacctaatctgattggctggtcaagaaaggctcaatacagagacatgttaagacccaagaaagaact

SEQ ID NO: 222958 - DNA, 538 bp, Homo sapiens
cacctcacatgggtaaacacaggccaagtgtgcagcagtgattttaatgggctcagccaggctaaaagcctaatgaaatggttgcatgatgaaaaaccaatagaattttaactctgggccaatgcattgagggaactaaaaaaatcatctgggaaagatcgggagaacaattaaatggacagataaatgctactaattgctaatgatcagctaaaatataggcagatgcctgggatgttactgtacaggtgtgggatcccatttgacatttgtcttacgtttaatgtctgacatttgtgtaactttcaattaaaacagagtaatgataattagataagaaagaatctgttgagtaagctctcaaattttactacattccttacatgcgataaatttgactactttgacatttaaattttttcttctggctctataaaacatgtaccaatagaaactaayaaactttataatattcctgcaaatgttttggaatgatagcttaggcaaaatatgaatatacatgttgataccgttgtgt

SEQ ID NO: 222959 - DNA, 250 bp, Homo sapiens
aagtaaaatatattaaatttgcatttggtgtgtaaatatagtgaaatgaattgataacctgaggagatgaaatgttagataaaacgagttagagacaaaagtggttagtgcacagtccacctgataaaaagaaaaattgtgaaaaataytaaggttgtagtcaccatatctcttaaagtaattattttgctatcatactatatttatttttaccctgctatgagagatgagaaaattagcacttagatct

SEQ ID NO: 222960 - DNA, 515 bp, Homo sapiens
tgctgtcatatctaaaaagatatcactaaacctgggtcaacttgattttcttctgttatttttaggagctttatagctttgcattttacattttggtttgtgatccgttatgactgattttcttgaaggatttaagaatagaatctagatttattgcttattttagatatggatctccagttgttctagcactatttgttgaatatactgacttttctccattgtattkcctttgttgctttctcaaagatcgattgaccctatgtgtatgcatgtattcctgggatgtttattctagtacactgatttattagtttcctcttttaccaataccacactgtcttaattattgtagctttatagtaagtcttaaagttaggtagtgttcatccttcaactttgttcttcaacaatagagtgttggctattcaaggtcttttgtctcttcctataaaattaagaatcagtttgttgatatgcacaaaataattgtcatggattttcattgggattgc

SEQ ID NO: 222961 - DNA, 560 bp, Homo sapiens
ccctactgtactgattttttttatcattaatggatgttggattttgtcaaaagcattttctgtatctattgatatgattttgtgatttttcttctttggcctgttgatgtgatggattacattgattatttttaaatgttgaaacagccatgtgtatttggaataaatcagatctggtattggtatatgatttttaaaaatatattgttggatttaatttgctaatatttcaytgaggatttttgcatctatgttcatgacagatcttggtgtcttgttttctttttgcgtaatatcttagcttttctggtatctgtctaatggtagtacacagaataaattaggaagtattttctctgcttttattttctgaaagcaattgtatgaacagaattttttccttaaaagtttggtagtataagccagtgaagccagttactttctattttggaaggttatcaattaccaactcgatttctttcataaatataggcctatttagatttgttgatttcttcttgtgtgaattctagcagatcgtatcaaaccagatgaaactg

SEQ ID NO: 222962 - DNA, 616 bp, Homo sapiens
tactgggtactgagctattgtacattggtctttagtaatgtggtggtaaggtgtggggtgagaagaggcatcctatgattaagtctcaggcttttagtaagactttgcctctggattgtgatcgttatatgtttctaatgtttttcttccccctcagttggtacagagtggctaaatctgtctataatttggtatttcacttcctccaggcctggtaggctttaataagactccagcaggttaggctttggtaaactactttctcctagacagaccttgataagaacagagtgctttggcatatttcaaaataagctctttttsccctgtctgtgttggaagcgcaagaacatttttctccaaaatttactttgagaacctagttaatttctgggaggtaaaactcagaaaagagtgatagtcaaccagtgatgaggtcctcctggagtttttaattctcagacttgtttactctgagcctctagaagttcataaattatagttcaggtttttctatgccaccactggttcccacagaggtttctgctcccacatgtgcttctctatattcgcctgtctcttcagttttgggaatagcagtttgccccgtgaactt

SEQ ID NO: 222963 - DNA, 609 bp, Homo sapiens
atccataatggtcatcttaaagaatttcagtgaatgctaagaaaatacagatcaaaagttaattccaatttaaagaaaagggaagagcaaaaggttggaagggcacagccaagtgataaaaatgagtatcagtaaaactcctacaggtacggtcaggggttctgttcctctgctttgttgagttgtaactcttttgagttctttttaagaaaaattgagatcatacattctattgaacatttgtatcagaatactgtkattaagagtaaagtttcagttatcatggtataactggattggatttagagaaaccaagaaaatgaagtgagaaatagccaagtaatgtttcccacttgccaagaaattgaatgataaagagagaggcactggatttcctcacatgctcaggatgaagttttgagccaattttatgggactattaaatacatggtaaatgatgggttatatttagcattaataactaacaacctccatcattaccatatgttttcttctgtggtcaattgagatcgttgtaaaaaatacagtacccatttctggcattttttccaaatgaccttaaatatgtacttacaaatattttagttt

SEQ ID NO: 222964 - DNA, 609 bp, Homo sapiens
atccataatggtcatcttaaagaatttcagtgaatgctaagaaaatacagatcaaaagttaattccaatttaaagaaaagggaagagcaaaaggttggaagggcacagccaagtgataaaaatgagtatcagtaaaactcctacaggtacggtcaggggttctgttcctctgctttgttgagttgtaactcttttgagttctttttaagaaaaattgagatcatacattctattgaacatttgtatcagaatactgtgattaagagtaaagtttcagttatcatggtataactggattggatttagagaaaccaagaaaatgaagtgagaaatagccaagtaatgtttcccrcttgccaagaaattgaatgataaagagagaggcactggatttcctcacatgctcaggatgaagttttgagccaattttatgggactattaaatacatggtaaatgatgggttatatttagcattaataactaacaacctccatcattaccatatgttttcttctgtggtcaattgagatcgttgtaaaaaatacagtacccatttctggcattttttccaaatgaccttaaatatgtacttacaaatattttagttt

SEQ ID NO: 222965 - DNA, 609 bp, Homo sapiens
atccataatggtcatcttaaagaatttcagtgaatgctaagaaaatacagatcaaaagttaattccaatttaaagaaaagggaagagcaaaaggttggaagggcacagccaagtgataaaaatgagtatcagtaaaactcctacaggtacggtcaggggttctgttcctctgctttgttgagttgtaactcttttgagttctttttaagaaaaattgagatcatacattctattgaacatttgtatcagaatactgtgattaagagtaaagtttcagttatcatggtataactggattggatttagagaaaccaagaaaatgaagtgagaaatagccaagtaatgtttcccacttgccaagaaattgaatgataaagagagaggcactggatttcctcacatgctcaggatgaagttttgagccaattttatgggactattaaatacatggtaaatgatgggttatatttagcattaataactaacaacctccatcattaccatatgttttcttctgtggtyaattgagatcgttgtaaaaaatacagtacccatttctggcattttttccaaatgaccttaaatatgtacttacaaatattttagttt

SEQ ID NO: 222966 - DNA, 420 bp, Homo sapiens
ttctttcctccaaatgcctgtgctacctctccagaaatggttctgaacttggctgagatggcagaaatgaaagaaatataattcacaatatagacaggctgaagatcattgagatgcaggagtgcattgaaaaataaaatgacacaggagctgacagacaaaatagaccgtatagaaaagcatgtagccaacctgatagagctgaaaaatacatgacaatacactacaagaatttcataatacaatcacaagtattaaaagcagaacagagcaaccagaggaaagaatttcgaagcttgaagactggctttctcamataagacagatgagaatggagaaaaaagaataaaaaggaacaaacaaaacctccaagaaatatgtgattatgtaaagagaccaaatttatggccctctggtgtc

SEQ ID NO: 222967 - DNA, 582 bp, Homo sapiens
catataacactttcaattagttatgtatcatttttcatatattatgaatgaagacactaaagctcaaaatttcttgccaaaatttcaacattcagcaaagcctagatgcagaattttaactcaggtcttctaattccaagtccaagtacctattgcatccatttccctactttgcaaaataaagtttcaccttgtgcaaaacagttaaaaaagaaagaaattaaaaagctgacatttttactctcttgtactttcttcatgtttgttatcaaakagccatacacttgtgtgtagcactaatgtgaaaaactataatgttgttattgtgtgatgatatgaatttgattaaaattattatacatttattttctttttcattttttacagatactcaaatatcatcttgtagaactacaactgtattcaagaggtaccttcaacatctctgttcctatttcagtgagcctcaggattcactatggacttctcacctcctccatttcaatgaatttctgtgattcgtaggatgcccacagcaacagataagaaagcagatgcagaaaccaaaatacttttgctctg

SEQ ID NO: 222968 - DNA, 582 bp, Homo sapiens
catataacactttcaattagttatgtatcatttttcatatattatgaatgaagacactaaagctcaaaatttcttgccaaaatttcaacattcagcaaagcctagatgcagaattttaactcaggtcttctaattccaagtccaagtacctattgcatccatttccctactttgcaaaataaagtttcaccttgtgcaaaacagttaaaaaagaaagaaattaaaaagctgacatttttactctcttgtactttcttcatgtttgttatcaaatagccatacacttgtgtgtagcrctaatgtgaaaaactataatgttgttattgtgtgatgatatgaatttgattaaaattattatacatttattttctttttcattttttacagatactcaaatatcatcttgtagaactacaactgtattcaagaggtaccttcaacatctctgttcctatttcagtgagcctcaggattcactatggacttctcacctcctccatttcaatgaatttctgtgattcgtaggatgcccacagcaacagataagaaagcagatgcagaaaccaaaatacttttgctctg

SEQ ID NO: 222969 - DNA, 588 bp, Homo sapiens
tttctatgctgagagcccagtgattttgctgagcaaatttaggtttttgttgtaattagtttctatttttatttattttgatatttagagttctttttatctacattaagaagaactcattgaaatcaaattgttaatcatratgttaaaaaatatgtgaaaaacaattttgtattcaaatatggttctgcaccaaactcatgaggcaactagcttctaagaagcagggtttatgccaggctattgctttagagaccatgaattcaattgtgaaagtatcattcaaatttaagtatttaatattcttagtaatcttcatttagttcagtattaattctattgaggaaaagtccaaaaatgtatttttattgtcaaattaacagagctaaattgacatatctaaataataatctcttaataaagcctgaggtaatacctattatgcctcaaaggaaagcaatcaaattgaaaaaggcaatatcctcaatatcctcctgggaacaacttttcttttctttttaaccctattccccagagtctcattcttcttattataatgcaaacataaattgcataaacaataaagga

SEQ ID NO: 222970 - DNA, 559 bp, Homo sapiens
ggacattttaccacagtagaatttttaggggtccagtggtgtgaggcctgtcgagcatttcttccaaggtgaaggataagttgctgtgtgtggcccctcctacaaccaagaaagaaacacagagcctagtgggactatttagattttgaaggcaacacattccttatttgggtctgttactatggcccatttattgagtgacccaaaaggctttcagttttgactgggttccagacagcagaaggctccrcaacaggtccaggttgctgtgcaaagtgctctgccacttgggccatatgatccagcagatctaatggtgcttgatgtgtcagtggcagataaggtgttgtttggagcctctagcaggacctcataggtgaatcacagtggaggcctctaggattttggagcaaggccctgccatcttctgcagataactattctccttctgagagacagctcttggcctgttaatggggtttggtggaaaatgaacgtttgactatgggtcatcaaatcaccatgtgacctgaactgcttatcatgaactgggcacttt

SEQ ID NO: 222971 - DNA, 593 bp, Homo sapiens
atttatgatggtctatccaaaacagatcattttttcccctcaaaataaattttaccacaagaggaaatatccttgactttaaaaattttcagattttttttctcttatgaacattttctctcatgaaawcgaaactgaatttttgatgtttgcagttctcggaaaataagatgcttctgctaccactagcaatcttctaacgggtccaatattcacaatgagtgcccacattatgcattcaaatcacttatttgcatactcaaagagatacttatacatgaaaacggataattgcaaatctaaatatccactggcatgtgaaaatatgccatttgcatatgcagcttaaatgtctgtttctgaacatgatgttaatgtgcagttatctgttcctttgttgatgtgttgctcttcactctgaatcttcctttgttctttgttctaacagaagtttttatttttggaatatagtattctgctctagcatttttgctgacacttattatttttctattatctgaaccatactttttaatcccatgaatgtattttgtgctattgcagaataaatgcctctacgtgaatcactgccc

SEQ ID NO: 222972 - DNA, 346 bp, Homo sapiens
tatgtgcctgatgaaatgtttcaacttccagttagtgaaattttgttcaatcaatacaaagtgctgaggtgacacatcctgctttatattgtgcagggtatttttaagtagtcaactatgatattcaatgtcgaggtactatagtgatgtatttamgtttaaaaatgccttaccgactttaagtgctataaatttaccttttgtgagtgataaatttgacttcacagaagtttggcagagtctcaccgttcttccagcaaatattaagagttagttctttttaacagtctatttcagttaaatcttttcaaagacctttttaagcatgataacagtataattcagg

SEQ ID NO: 222973 - DNA, 515 bp, Homo sapiens
taaaactgcccgtctctcatatttttattctgttcaatatcagcaagagaggatctcactcaagtgtatagtggggatggtaacaccacaaacagatgaaacttgacctttcaaaactgttccaaagtctataacacatattttatatatttataacaacaaaatttagcacaaagtacaatattttgagtggcagtagaaaaccaattgtctctgaagttggttggaggttggtgatacaaaaaatggtatacatgtttaaaaaagraaagagaaaagaaaaatcttggtttaagtttccttagtgtcctagtgaacctgattctctgaaaaaagtgaaaaacatcttccataagaaaaataatgtgatattgtattttctacatgtattgggaagatccagttgtatatactgtctcatattttggagtaatatttaagtatatgtcataatttgtaacgtagaaatttgcaacatacatagtaagccacagtcatacttctctgacttactt

SEQ ID NO: 222974 - DNA, 603 bp, Homo sapiens
ttccattgtgttcacataataaattctgtataatttcaattattttcaatttgttcactggttttatagtctaggatartccatcttggtgaatgccagacatgcttgaaaagaaaaagggtgtttgctattgtttagtgaggtggtttatatacattgattgtatcttattcgattgtgttgtttagctcttctctattaaagtaggagactttgcatcttttgttttgctggcagtcgccctgtttggtttagcttacaggttcctgttctactttttgggctgtgacttcaaataaaatttagttctctgcagctttgcattgttagttttatctgctaggtttattggtgcagctggaatgaccaatgctcgttgatcctgattcctgagaggtcacaaggattttctccaggagaagcaacctggtggtacaaaatgagcgaagaggttctcagtcgtttagaactcctgggagtgtccctcttgaaagtgctacctggctatttggtgacactaggtgaaggaggggagtcttgggctcctggggataaatatattttctgcctcttgtggcagaatctccctgtccagtaccacta

SEQ ID NO: 222975 - DNA, 603 bp, Homo sapiens
ttccattgtgttcacataataaattctgtataatttcaattattttcaatttgttcactggttttatagtctaggataatccatcttggtgaatgccagacatgcttgaaaagaaaaakggtgtttgctattgtttagtgaggtggtttatatacattgattgtatcttattcgattgtgttgtttagctcttctctattaaagtaggagactttgcatcttttgttttgctggcagtcgccctgtttggtttagcttacaggttcctgttctactttttgggctgtgacttcaaataaaatttagttctctgcagctttgcattgttagttttatctgctaggtttattggtgcagctggaatgaccaatgctcgttgatcctgattcctgagaggtcacaaggattttctccaggagaagcaacctggtggtacaaaatgagcgaagaggttctcagtcgtttagaactcctgggagtgtccctcttgaaagtgctacctggctatttggtgacactaggtgaaggaggggagtcttgggctcctggggataaatatattttctgcctcttgtggcagaatctccctgtccagtaccacta

SEQ ID NO: 222976 - DNA, 439 bp, Homo sapiens
ttcataaaaaaagttggacttaaaaaatagagatgctatagtatatgcagacagctacagaatataaaggtaacttttgtggaagaaaatgaacaagggacttgcaacacaatagggaaagacataagttctgttttctggttcctagttttgataaagtgtgtgtgcttgggcaaattatatacttctcttggaataactccagatttattgtagggtccattagacttagagctgtttagtgtcaaagrcttgacttaatttaacttcgtagtatctgtgtgtatgtgagagtgttttgcaaagtactctacaaatataaacactgttgagtatgtattatctaatcttcctgtattagttcttaagtagcagtgattttaattgatagcaatataaagtctcagcttcctcatagactttgtttcagtttgtttca

SEQ ID NO: 222977 - DNA, 460 bp, Homo sapiens
ggaaaccctgtgcccagaggcattccatcagcttgcattttgtagttcctgccatcctcctccatcagctttctatctcctgaacacacttccagtttttttctattggtaacattttccttccattctctcagtggtgggttttgtatccctttgtgatcctttattactattaggaaggcagagcagatgattgtatgcaattagcccaccatctttatctgatttctcacattgctttaccacacaaggatttcaatcagtggacttgaccagaaatragaaaagtgaaacttcgttttaaagtagtattttatttctctgggctgtgcacacttaaggcattagatccacagatgggctcatccgctgggatgctacttgtggtgatcatctcctaagccccacgttttagccttgtacagagtgatgtcactgcagaccctgaagtgattcagcc

SEQ ID NO: 222978 - DNA, 589 bp, Homo sapiens
cctgggtggctgatgacaagattgtcgttggcactgacacaggcaaactcttcctctttgaatctggagatcagcgttgggagaccagcataatggtcaaggaacctaccratggctcaaagagcctggatgtcattcaggaatcagagaggtaatggtgcttcctgggctggtgctcccacattcattgtactgacagcattatgcagaagacagcactctttagaaaccactcataacccctctaccgtaaaagtcaactatgcccattttccctcttcctctctagttttcgtctatatttaagcacagatttaacagttataaccatagactaaatacaattctttttattttttatacctaacctcattttataaacattatagtattactggtcttcaaaactatagtttttagaaaatatattttccagtggctaatttaatgaattgattcatgtccaccaagcccttgtagtatgcaaaaggcatctcttgctagatgctggggacacaagtcctcaaggaacttataattcagcaggaggcgacagaccaacaagtgcaaggaaatgttttaggtaaat

SEQ ID NO: 222979 - DNA, 608 bp, Homo sapiens
aagtgattaagaggaggctgataactccaggatgtaagcaaaatgatatagaggagtggaattttgatagaacaagggaaagggacagagaagaagagtccttcagggataacagacaactctagaggctggaaggtcttgtgtatgtgttagactgtactgattcaggtgcagtcagagtgggatatgaggaaaacttgaaagcatctcctaagctacacaaagacccgttaacatagggcagagtctcactggcacaacgggcctaccaaacacaacagtctaccaaatgckgaacattaagctctcccgacccaggggcatctcctaggaagccaggcttaaaaatgaaatcatattcatccctcgcagcctggaagactctgtgcatgcccaaggctgtaccctcttatgaacaatcagaaaggggtcatccaaactaccagtctctggctgaacatgatgcaaaagccatcactctctgaactgtgatagcattttccaagccacacataaatctggtagtaaaaggtaaaaacctaattgtctaagggggtttatgcaccatctgtaactaataagcagcttaggcaactcatgggcaaccc

SEQ ID NO: 222980 - DNA, 350 bp, Homo sapiens
tactgcaccgcccctccccgcctccaccccctaggattggatcagacttgggtagaatctgacaaagagctgaggaagttgcactgggctttgaagttgaccaaacactctaccctacatttcaccaagaggaatcagagcgcaaagcctcccccttggggactgtgaccaataacacgaatacagagaccagatctaggccaggccaacttcccagcctggcccttttccttatggcactgacattyggctgcaactagccaccaccgacctcaataggcccgtcccttacaactctttcatccaagcttcagtgggaagggtggaatagattttatacagtgaatgaa

SEQ ID NO: 222981 - DNA, 530 bp, Homo sapiens
ctgtcattcttagcagccctcccytcccaggatttgagatggcctgtcacgatccacctgtactttcgacctggaaatgggtatgttcattattcacccagcctttgatttgagagagtgatgtgtagagggggctgttgggtggcttcctcctgccagattctctggctatatttaaagccatgtttgtgcattaatattttatacttagctaaattgcgtgcattgcatttaaggccaggtttgccttgtttaaaaacatccaaattgggattaagtattcaagctgtaatctctttagtgggcgtctgtctactggatttgtatgatataaagagggttattgaaatactgtaactttaatattttttatcctgtagatagaaatgagttctaaatgaatttagaaactaggaaagacaaagaacagagcagcctgcattatttttcagactagttatagtagagaccacatctgtgtaagcttctccatccagattcttcctttcaagcagtcttatgctatgctc

SEQ ID NO: 222982 - DNA, 574 bp, Homo sapiens
gccatactgacatcatttatttgcttcacacttttttcttcgtcataaagagaaggtaaacctcagttcagcatcttttgattcattgtaaattttaaatcggccacagctatgttaatgaaactttaacatattgccttagttaaatgctgatgagatgaaagaaaaatacgtatgccagatatattacatgtctagcctttagtatgcttttagtttgagcttagaaagagattctgtgtgttttgaggactttaacaatagtagaggccaggcacagtggctcaggcctgtgagcactttgggattctgggaggctgaggtgggaggatcacttgagcccaggagtttaagaacagccctggtaacaactctacaaaaaaaaaaaaaaattttttttttctttaaatcttggcttggcatggtggtgtactcctgcagtgctggctacttgggaggctgaggtgggaggaccacttgagcccaggagttagaggttacagtgagttatgatcatgccactgtgctgtccggcakgagtgacagaatgagattctgtctcaagaaagaaaaa

SEQ ID NO: 222983 - DNA, 304 bp, Homo sapiens
ggaacaagcaagaaaatgagcctaatggtggcccatgtgatcaaawttgcataaggacagaagacaagaccgaaggagctgatgggtagagaggagatattgctgtcaacagagtggaggtctcagtggggaaagatgaactctactggaggttcagaaaacaactgtgaaagaaatacttgagggtgggagcaagatcttgactacagagggctgcataggaggcagtggcataggaggggaagatgggcttcagtcaggacagtagtgggagtaggaggttccgaaagatgttgcagctaca

SEQ ID NO: 222984 - DNA, 594 bp, Homo sapiens
ggggtctctcacctcctggtgcccttcgcataatcagaagtagaaaagcagagtggggtgtggttctgaggcaatccaggtggtctgggcatgcccacagggtgttcctaatgcaccgaagatgtcctggtcactcactaggagtttgtgctgattcaacaacaggtctgagcacttagtatgcataaggcactgggcttggttctggagatacaaagagtggaagggatgcgacccctggctctgagggagctgacaacccacaggatggagcttaaatgacttattactcatcgaaccaagcccttcagggtctccctccaaccatctctccggcctcttctctcttcatcacttgagcttcccactacactgagcttctagctcttctctagactctacgctgttgtcctccatttctcctttcctgctgctttccttccatcctctcctccatcctcccccatcatgcctcaaaagtttattgratcccctctctgtgccttgcacttcactagaaaagctgggatatagacatttcaaaaaacattggctcggtcctcaaggaacttaccaattaacagtgggaaacac

SEQ ID NO: 222985 - DNA, 588 bp, Homo sapiens
cttcctgctagatatttccacttggaggtcccactagtaccttaaaactcagcatcccctactgatgaccctccattcagacctatacctctttctgcattcttgtctcagtgagggtacacccaagtgctcaggccaggcacttagttatgtaactaaagttagctgtgacaataactattgggttattggaggaccacatcctccaagaagcctttcctgacccaggtctgggactagggtcaggtgagcagggcactcatgggcacgaaatttaagtgatggggaaaaaaaaactcagcaattaagataaataacacttaatgcaaattttttttaaaaattaatattagtgcaaaatatccrtgttaaaacacatcaacatttgaatcaaagacaggctctgacagtgctgggactatggtgaagaccagtgaggtgagtgatctgagcatagggttggatccaggctttattttaaatgttggtatttttcttcattgtgaattggatttatggcattaattgtaattttctagaaaaaaatatcgcactaagatattatttgtcatgataactgagattatg

SEQ ID NO: 222986 - DNA, 474 bp, Homo sapiens
gaaccgccatatgttcttcacgtgctgcaagggggctgtgtggttcccatgaaatggtcagcagagactttgggatgggtatgactcrtgggtcacagggttgactagacagaatctaaagaaggtgggtgcttagctgggaagtctgcagtagggacggatcactgtgaagctctagggggacctgcttaccacagataaggcagcaaatacagctcaggcttcctcctccttcccaccttctgggtgccttagaggaccccctagttatctccgttccattacttgcaaaaaactgaggcttccaggaagcaggagcttcctctgcttcgggaatggcacttccatcttactttcccagcctgaggtgtctggactggtgggaacggctcaggatgtgaaagctttggaggtaaaggcttggcaatgaaggggatgggcgtaagagacaagtaggggtaggggtcactggct

SEQ ID NO: 222987 - DNA, 474 bp, Homo sapiens
gaaccgccatatgttcttcacgtgctgcaagggggctgtgtggttcccatgaaatggtcagcagagactttgggatgggtatgactcgtgggtcacagggttgactagacagaatctaaagaaggtgggtgcttagctgggaagtctgcagtaggracggatcactgtgaagctctagggggacctgcttaccacagataaggcagcaaatacagctcaggcttcctcctccttcccaccttctgggtgccttagaggaccccctagttatctccgttccattacttgcaaaaaactgaggcttccaggaagcaggagcttcctctgcttcgggaatggcacttccatcttactttcccagcctgaggtgtctggactggtgggaacggctcaggatgtgaaagctttggaggtaaaggcttggcaatgaaggggatgggcgtaagagacaagtaggggtaggggtcactggct

SEQ ID NO: 222988 - DNA, 589 bp, Homo sapiens
catccccaggcccttccatcactcaagtgtgtctggacattggagagtaagaggacacagcttgaatctcagggatgctggcttccatggaggaagccagagggagccaaccggccccatgcctttgcagcatatagccaggtcacccttgcatttcaacaaagtgagggacttccatctgcccactccctactgagtacccagcaggtaagctgatgcttttataggtcctgggcattgccctcagggagctcatagtccaattggtgataagaaagtatggtgataagaaaggcctggtacactgagatgactttggtttcaaaatctgaagaccaggttcttagttctagctcagctttgtggctaaagccaagcatcttctctctggattttcatgtactgacctatccaatagggtagcactccattgtggctccaaatattctaagcctctatgatcatatttrtagaaaaagatgactatgacatgaatagtcctcacatttcccacaataaatacctggaagctactttgaaagtggatcattacagagcaggtcatacttcgattgagacaatgttaaac

SEQ ID NO: 222989 - DNA, 391 bp, Homo sapiens
aaggaagccttaggataaaaatactaggccagagtatagaagcaaactgctggccgagttacctgtatgaagcaacaaaggttgwcaggagttagacaaatccaagaaaggtagatttgtgacccttactggaaatctatcaatattgtatacccccaacatacaatatactggggttgaaacctcttcctaatctttacattttctctgttccttctacccgttcatttatttatccatcttgatttattgagtacctgctatgtacaaagttagctgcataagagggtatggctgttcctggtcaaattctaaactgaagggcctttggggatgatcctgctaaggttaaagggacaatctcatggtgtcatgccctatataatgtgct

SEQ ID NO: 222990 - DNA, 391 bp, Homo sapiens
aaggaagccttaggataaaaatactaggccagagtatagaagcaaactgctggccgagttacctgtatgaagcaacaaaggttgacaggagttagacaaatccaagaaaggtagatttgtgacccttactggaaatctatcaatattgtatacccccamcatacaatatactggggttgaaacctcttcctaatctttacattttctctgttccttctacccgttcatttatttatccatcttgatttattgagtacctgctatgtacaaagttagctgcataagagggtatggctgttcctggtcaaattctaaactgaagggcctttggggatgatcctgctaaggttaaagggacaatctcatggtgtcatgccctatataatgtgct

SEQ ID NO: 222991 - DNA, 419 bp, Homo sapiens
cgtggtggggggaggtcaccaggggctgtggatggtccacttctggctgctggtgtgggacgagggaagcaggtggtggttggcatggagggcctgtctctgagcccacacactcgtgatgactttgctcacaaaggaatttgtcaaaagcagcctcctatcttgcacatccaagaaaccccaggccagtagactccggccaccccacacagccccaacaaagcagggcctcattctgtctctgcctccacctcccaccctgagacattgccccagctggtgcctccctgtgactgtccatctctgtgtgtgctgkttttttttttttttttttttttgccttgtagtaactcaggttggtgtgtcccaaggacataatatgtgtccagaccctggcatacccgaaaggggcaaaagac

SEQ ID NO: 222992 - DNA, 505 bp, Homo sapiens
gcgtgcgtgccgggtgagtccccagccgctactgcccgcggcgcccgccgcgtgcgccgcgggaaactgactgctccttgtgagggaatctgctcgcgcattccagctagcctaggaatgcaggggagggagaagcgaccgcaagttgtgaattccgggttcagcctttgcgcacgcgagggcaggtgctcagggtggctcgggtttggaggggtagagacgsgggtgtgtgggagctttgctagcctgcccgcccgctttcttcccgcgcccgaaattagcgagacagccggagctcgcggcgtgtttatccccaagtctctctctgtgtgtatgggtgtgcgcgcgcagagattttcccgaagggaatccgtctctgtgcttcactcctgagcgagagtccccgagagggaatctgtgcagaggccagaacaggtgcccagtcgtcgcgcgcgcgcgcgcgcgcgcgcgacaagcgccgggagagtcctgcccctgtggcttg

SEQ ID NO: 222993 - DNA, 609 bp, Homo sapiens
ttctctgacaagcttccccccagtgtgaagagctggaactaagggtagaacagagacactgtctcctattaactctttagtctgaggtcagaggatgctgattcagctaattctacttccaggtcttggttgtacagctatgcaaacttgccttaaaaaataagtagtctttcagcttagaagccaaacaatatggtacatttttttcactggtctctggtgacatccctcacycccacctccatcccaggcaaacagcaaccccacatctctttctctaaaaaggagtgaccgtgtgaatacaataggacttgctgtttgaagtctcaaggttcacagagatgcataaaacacagcatctctcctcaagaagtttatattctagttggagggataaaataaatatataaataactataacataaggaaagataagcttcatatgggaggcttaagaaatgtggtatggggccgggcacggtggctcacacatgtaatcccagcactttgggaggccaaggcaggtggatcatgtgaggtcaagagttcaagacaagcctggccaacatggtgaaaccctgtttctactaaaatacaaagattagctgg

SEQ ID NO: 222994 - DNA, 282 bp, Homo sapiens
ggtatgtcacatttatttctctctcttatcttgaaaatataagggtacattattttcttttgattatatttttcttgcatgaattgtgcacccagaagaataagamtctgtgctttttttttcaccttgagaggtagagcactgattgactttaaggagacagtgcaaataagacagccaccaaggagatgagataagtagtgccaattataatctccaaggaagtttttcattttttttcaaagaaaaagtaaccttctagaaggtgataaaaattggcat

SEQ ID NO: 222995 - DNA, 479 bp, Homo sapiens
gcaatatattccacaagagtaaaacaaagtaagtaaagttatattctaaataaactaaattagaaggcttttcatgaattgggcaacygttggagctaagctggtatggggtcagttggttgtaatgtgcccagaattagaatactgatccagattttcacattacccgtcctcttgtttttttctgagcaacagtcagagattactggttggttcataggaataagcagggttagcctaaattgcagaaacagagacaactaatgagactagaatttaagtgtaccatagttcttgaaacataatatttctctctccagtattccatttttactaaagacaaatcatgatgagactgatttactttattatacatggcctgattatttgtataaagtgcagcaagaataattatttttcacataggtttttttaattggctttgatagaactctgttttataaggaatctcagataag

SEQ ID NO: 222996 - DNA, 339 bp, Homo sapiens
ttagagtcatgtatttattttctgtctcctgggttagagtacaaacagacttttcttcactgctatatccccagtgcctggaacagtatcagggacataatacacggtattatttaaataaatgaatagatcccttttagaagacattcagtagatccacagatcctccctctcccaagtgtacacacacacacacacacacacacacaagtgcataaatktcccaagtccaccgattagggaatctcacacaaagtctggccatccacccagattccttctgtaataagattcctgacagccaaaacctggtttattccaagcagagatgatgctaca

SEQ ID NO: 222997 - DNA, 405 bp, Homo sapiens
gcccgtgagagatacccctggggtctcttgggcacacttctgttgggagagaggagaaagtgcagggacccagtattgcagaggcagtgggtgatgtgagtgctccgaagctcttctgctccccagatgcagcctctgctctggttgttttgcagtccttactcccggttgtttgcagttcaacattccagctatttgcactcactycccacttatttgcaggccttatcctcaggagtgtgcagtcacagccccagctgttcataagcactttctcagctgtttgcagcttccaccctcagctctgtatagtcccttccagctgtgtgcagttgccatcctcgttatttgcaattttcatccccctttgggcatcaggtaaggcttgctcaagattggttctaa

SEQ ID NO: 222998 - DNA, 619 bp, Homo sapiens
tcctcgttatttgcaattttcatccccctttgggcatcaggtaaggcttgctcaagattggttctaacaacaagactcattactagtagcttataattgagtatctgacttgtgctaggggctgttttgagtacttttacctatactttctcatttgatcgtcataacaaccccttcatttgttcatcacgtatttccgtcctactctatatctggccctgggccacgcactgagtatacagtagagaccagaactagatatgttgccactctcctggagctttcagtctcatgaaggagacaggtgctcatacagcaatgacactgccaagtatgtaatcatagagccagactggcccatgagggaagcaaaggcatttgggctggacaggccatcagaggagaacccctgggacaatgagtctggagctgagagctgaggaatgggcacagtgaggttctgctgggatggggctgcaggrtaagaagcacccccaggtggaaggggtcccctgtgcagatgcttcagagggagggctgagaaagggcagagagggcagtatgggaggcctgtggaagtcacactgggtgccctgatcagagtggctgtaagtctgct

SEQ ID NO: 222999 - DNA, 600 bp, Homo sapiens
aaatcattctgtaatcagaacagtatgtgtcccttagcttgctgaagaaccactcactgaaatatgagaattctcccacttacaatcttatatagctccgagtggcaaatgttgaaagtctacagaaatactgagttatacattttacttcttttgtttacatatccagtaactttggtggtttcttctctaaatttatcaaagagaatagtggtactaaacacttgaagcattctatttttatattttttaattgtctgtgtctataaataactttcaaataattcaaaatattaattccctagatagaatgaatctttcctctctaagtctcaatttgaccctttctactgtgctccttgcttgtttatactattatcaatattggaaaactttcccaacatcacttgaccaatcattgtctcatttttatgttttatttcatagccaaatttcttaaagcactggcatataatacctcaatttcctctccagacrcagcttgaatggagtggaaagagcgctggtcttgaagaaacaccagctatgtaatccacgaggtctatcaccttgaatgactagatgaacctccataaacct

SEQ ID NO: 223000 - DNA, 452 bp, Homo sapiens
gtttgtgccagatgtgggtcactgaatattagagagtgcaacctgagagtttttgacattgtcactacgggatccagaactccatactcattgttagtttcagatgctatgatgaatatggttttagtcctggtcaaagttattaaaagggaaatggttgacaacttacatgtaatwgttaccctatgattactcttattatcaatattttatagatggtgaaaccatgtaagccaaagactaatcagcaaatgcccttagcctactgaatagattgctcagacaattgaaaaagtaaaacaaacaaacaaacaaaaaaaacctgaaaaagtcctatatttcatattagcaaaaagattccatattgactctcctatttgagtctcaaaacaaatagaagatgggaaaattaaggcacagaataggtatgtgacttgccaaatgtcatacta

SEQ ID NO: 223001 - DNA, 469 bp, Homo sapiens
ctccacacatagacttggaacatcagggtcatagcctttgctgtgagaaggtcattttttatcaccctgaacaggtgtgcaggaaagggcacagatttggagctatcagctgtgygtgctgtatgtatttgtgacccacaggaaggctttgatccaggctaaactgaacttttcctacttaggttagaaatacaaacatttttattcagtctcttcttgtgtgtccttgtgcctgttctctacgtgtaaattaaatgctggctgtatgagaaatagatccacatggtccctagtgcctgggacatatcttcctcctcctcccttcttctcttggcctaaccaagctggcctgctgaatagagcctcattatgggccccaaagtccactctttgcttaaggaaccctgccaagattggtaggccgtatgatttggcctagagatggtttcttctatggtatgtttgctga

SEQ ID NO: 223002 - DNA, 469 bp, Homo sapiens
ctccacacatagacttggaacatcagggtcatagcctttgctgtgagaaggtcattttttatcaccctgaacaggtgtgcaggaaagggcacagatttggagctatcagctgtgtgtgctgtatgtatttgtgacccacaggaaggctttgatccaggctaaactgaacttttcctacttaggttagaaatacaaacatttttattcagtctcttcttgtgtgtccttgtgcctgttctctacgtgtaaattaaatgctggctgtatgagaaatagatccacatggtccctagtgcctgggacatatcttcctcctcctcccttcttctcttggcctaaccaagctggcctgctgaatagagcctcattatgggccccaaagtccactctttgcttaaggaaccctgccaagattggtaggcmgtatgatttggcctagagatggtttcttctatggtatgtttgctga

SEQ ID NO: 223003 - DNA, 620 bp, Homo sapiens
tgctgtcaagaacagaagtttagtttgaaaatctctattattttaggatttgaaactttacttccagaaatatctaatagctaagaagctcattcttcaaaacaagtcagtaaaaattactgcaagtctacacaaatcccggtcatggagtaaacactctgggaaccagaccatcatcatttgaggtgtcaacagaatcacaaatggagacagaccttcatacatccgtcattgtcgctgtcgttggggtgtggcctccctgaccatctttgctctttcccacctcataatgaaggcatcaattggattgctcacaacagtcattgtttgctggctcaagacccaggaatgaccttgaatcatttagaaacttagaaataaggccaggtgtggtggttcactccctcaatcccagcactttgggatgctgagataggattgcttgagcccaggagttcgagaccagcctggacaacatayggagacccccatctctacaaaaaaatttttaaaattagccgggcatggtggtgcatgcctgtaggcccagctgctcgggaggctgaggtgggaggttcacttaagcccaggaagtcaaggctgcagtgagctgtgatcac

SEQ ID NO: 223004 - DNA, 508 bp, Homo sapiens
ggcttgctcagaaacagtgagaatgacaaacagaagctccaaatgccttcaggtctaagcgtttagagaactcgtacaaacaaccctgacaggtggcatctgaaagacagtcactgcggtatgagtgtacatttcaaccctcctcaaatttctaccatctttcaagccaaggtctaaaatgacaggaatggtacgcttggacccttacctctgctacagtgggttagatacaaatgacgatagtaacattcatagaaagagaggtgtttcacagtatttgtctgatattagaaaactccaagagagggcaaatcctggtttctgatcccagaatacagatgacatattgaytgtaggcacatgatgtgaatatacagtgaaggagtggtggcttgaggaatttgttgcagaagtttcttgccttgtgttttaaggctgaggagtggaaaacattctgtgtgaacaattaagagagacttgtggcagaagtagatttctttggcatttg

SEQ ID NO: 223005 - DNA, 464 bp, Homo sapiens
tggtcaccttgcagttactggattctgaagacaagcagagaccacagcaacatgaaagtatttacttataaccttagtcctcattctgatacactttttcccaaattaacactagtgtccatccccacccattacatgaatgcagaacccaataaattttcccataaacatctgrtcatataaacaatggatataccatgcaaatacagtgcatatttattgcaagtgaaattgccagtcttaggaaggatataggattccatgaagtcagtgaaactgatgatgtaaagcttttcatcacacctaaagtcattgtcagtttagaatttaacagaaattaaaattattaattactaaagaagagggaaaaacataagcttacatcagagccacttcaaaagaaagacaagaaactaagagaccctcggaataatgtataaaactctcaattaattctgcaataa

SEQ ID NO: 223006 - DNA, 571 bp, Homo sapiens
ttttcactctttgctgcttcatacatcttctggagcrtcgtctgtcttctatgcactctgagactttctgatgtctccatctgttggttatatccctgcattgtcatccctgggcataagggtcatttgcctcctgcctgcagcagatctggtagggtgggcagttgtttggcctgatagcctgcaaaatggggacagtctttaaacaaatcagaccactctctcctgctgcccatgcttcagattgtgttttcagggtgactgtttccaacctcagatgaagagaaggtaaaatatgcagttcttatggcatctggcattagtggtgcagatccttccttggataagattgagagcactggtattattgtcctaatttagcagaggtgaagctagaatcattgaccagctcaggtcaaatattgaagaagcacagtcaagactgaagcctacaccctctgacaccctcctagactccttattgcagatttttgttatctgaatttaagcaggttacttaagcactctagctttccccatctgtaagaaagagacgtttaaaatagcactt

SEQ ID NO: 223007 - DNA, 603 bp, Homo sapiens
ggacagtctttaaacaaatcagaccactctctcctgctgcccatgcttcagattgtgttttcrgggtgactgtttccaacctcagatgaagagaaggtaaaatatgcagttcttatggcatctggcattagtggtgcagatccttccttggataagattgagagcactggtattattgtcctaatttagcagaggtgaagctagaatcattgaccagctcaggtcaaatattgaagaagcacagtcaagactgaagcctacaccctctgacaccctcctagactccttattgcagatttttgttatctgaatttaagcaggttacttaagcactctagctttccccatctgtaagaaagagacgtttaaaatagcacttacttggtgagatggtggtgcaaattaagggagataacacatgtgaatcattgcacagaatttgaacacattacataatagatactaccatttattgttaattttgtgacaaatgccacaacacccctgagggagccactagtttgacataaattcacattaaatgtaaaaaccactgaaaatacgttgtcttcatgagctggctttgatgacagaaagtgctaa

SEQ ID NO: 223008 - DNA, 533 bp, Homo sapiens
gatattctgctatatgtcagatgctgaagaagcaaagattcataagatgtggctctaatctttgagatgttcactttctagcaggggagggagaaacatataaagctaattgtaaaatagaatatgaccagttttacagacaaatgaaggggtgatttattacatctggagcaggaggctgaaattatgagaggcttcatggagaaagtcacatttgartagtccatggggttaataataatgggagactttaagcacccaatacgtttaaaggagggaaaagattttcaggactcaggactcccttggaatctgttgaatcatatcagttagatggactcttactctgtttgtcctgaagcagcaccaagagcagcaaaaccagaaactgaagcaaagccagaaacggcaaagcgcaggaggtgttacacttagctttctttaagggaaacagcaatgtctataacattaaaaaaaatgctgggaaagctactctgcaccctcctaagtccaaatttattaagtgcactaaa

SEQ ID NO: 223009 - DNA, 533 bp, Homo sapiens
gatattctgctatatgtcagatgctgaagaagcaaagattcataagatgtggctctaatctttgagatgttcactttctagcaggggagggagaaacatataaagctaattgtaaaatagaatatgaccagttttacagacaaatgaaggggtgatttattacatctggagcaggaggctgaaattatgagaggcttcatggagaaagtcacatttgaatagtccatgrggttaataataatgggagactttaagcacccaatacgtttaaaggagggaaaagattttcaggactcaggactcccttggaatctgttgaatcatatcagttagatggactcttactctgtttgtcctgaagcagcaccaagagcagcaaaaccagaaactgaagcaaagccagaaacggcaaagcgcaggaggtgttacacttagctttctttaagggaaacagcaatgtctataacattaaaaaaaatgctgggaaagctactctgcaccctcctaagtccaaatttattaagtgcactaaa

SEQ ID NO: 223010 - DNA, 553 bp, Homo sapiens
agatcttttcttctggctttatcaagacataattgacaaatgaaaattatatatagttgcagtgtacaatataatattttgaaatatgtatatattatgaaatgattaatcaacctaattaatatattcatcacttcamatacttactttttgtagtgagaacatttaatatctattgccttagcaatattcaaatatacggtattttgttttgttttgttttgttttgttttgttttgtttttgagatggagtcttgctctgtctcccaggttggagtgcagtggcatgatctcagctcactgcaacctccaactcctgggttcaagccattcacctgcctcagcctccccagtagctgggattacaggcacgcaccaccatgcccagctaatttttgtatttttagtagagatgggatttcaccatcttggccaggcttgtcttgaactcctgacctcatgatccacctcccttggcctccgaaagtgctgggattccaggcttgagccactgtgcctggccacaatattttgtttataactacagtcatc

SEQ ID NO: 223011 - DNA, 446 bp, Homo sapiens
ataaaggtgttcatagtagccatgaatgatcttttgtatttttgtggtatcagttgtaatatctctcatttcatttctaatcgagcttattggatcttctcttttcttttcttggttattctcactgatgatctatcaattttacttattttttcaaagaaccagcttttggttcatttatctcttgkattggtttttggtggtggttcaattttatttagttctgttctgatctttggtatttcttttcttctactgggtttgggtttagattgttcttgtttctctagttccttgaggtgtgaccttacattgtctatatttgctctttcagactttttgatgtaggtatttaaggctatgaacattcctctcagcaccgcttttgctttattccagaggttttgataggttgtgtcactattattgttcagttcaaagaattt

SEQ ID NO: 223012 - DNA, 558 bp, Homo sapiens
gaattcaacagaaagtgatccatttgggctccattcaaaaaaaggcaaaactgctgacctactctgagttctttcacataaaagcagagacatcaagttcaccattaataagagaacaaacaaattaaaacaccaccactcagaatccccacttctgcttctcaacctcactgtgcactttcccaggacatagkgccaatcttataagccttctctgtatgtagagaaaattacttcttggaacagaagcaaggaggggagtggtaatcagatttttggtttggagcacacagcagcaagaagaatgtatgggaaggagatgaatctaaccttagtttctctcagacttcacggtagtgtctccaatcccagcccagctctcttctgcctgacccccaccttcttcaccctacagccacactgatcttccttctttcctgctctcacctcagggactttgcacatgctgatctgtctgcctggaacagcacttctcccacatgcatggctcagcttatttattttcagcctcaagttccaaatgaaaaatctcccatc

SEQ ID NO: 223013 - DNA, 548 bp, Homo sapiens
tgggctccattcaaaaaaaggcaaaactgctgacctactctgagttctttcacataaaagcagagacatcaagttcaccattaataagagaacaaacaaattaaaacaccaccactcagaatccccacttctgcttctcaacctcactgtgcactttcccaggacatagtgccaatcttataagccttctctgtatgtagagaaaattacttcttggaacagaagcaaggaggggagtggtaatcagatttttggtttggagcacacagcagcaagaagaatgtatgggaaggagatgaatctaaccttagyttctctcagacttcacggtagtgtctccaatcccagcccagctctcttctgcctgacccccaccttcttcaccctacagccacactgatcttccttctttcctgctctcacctcagggactttgcacatgctgatctgtctgcctggaacagcacttctcccacatgcatggctcagcttatttattttcagcctcaagttccaaatgaaaaatctcccatctcagaaaagaattc

SEQ ID NO: 223014 - DNA, 548 bp, Homo sapiens
tgggctccattcaaaaaaaggcaaaactgctgacctactctgagttctttcacataaaagcagagacatcaagttcaccattaataagagaacaaacaaattaaaacaccaccactcagaatccccacttctgcttctcaacctcactgtgcactttcccaggacatagtgccaatcttataagccttctctgtatgtagagaaaattacttcttggaacagaagcaaggaggggagtggtaatcagatttttggtttggagcacacagcagcaagaagaatgtatgggaaggagatgaatctaaccttagtttctctcagacttcacggtagtgtctccaatcccagcccrgctctcttctgcctgacccccaccttcttcaccctacagccacactgatcttccttctttcctgctctcacctcagggactttgcacatgctgatctgtctgcctggaacagcacttctcccacatgcatggctcagcttatttattttcagcctcaagttccaaatgaaaaatctcccatctcagaaaagaattc

SEQ ID NO: 223015 - DNA, 441 bp, Homo sapiens
ccaggcctcctgcttggctccagtaacagtctatgggagctagcggactgttcacaccatcctgttggtggtgacagacagatgtttttctggatagtgaagcaggggctccttttcctcccctggcctggagctcctggtgagagctcagaggcggcctggacacaacacagggggagcagcagggagcttcgagatgccctgggtgccaggaggtaggagatgtcatgcctgtccttatggtcayggtgatatcaccccaggatataggtgggtactcccagggcctctgctcctttgagacccttcggagaagggccacctgtgaacaggcacgtatgggttggtgagaacaccccagatgcaggcgggcagtctctgacacacagactgaaggcagaatctaggttggaactcatgttgggaacattctggcctgga

SEQ ID NO: 223016 - DNA, 608 bp, Homo sapiens
tttccacccacaaatgcctgggttggaaaagagaccaggaccccaggctgcctgcaagcagaaaggagacatcggggtgtgttaaaacacccmcacctcgacaaccacctcctgcctgggctccaggttcccctcccacctcccacctccttcttccactaggcaaccagggcaaaatcttaaaaataagttagatcatgtccttccctagcttaaaaccctccagtggcttcccaatgcccttggaacaaaatccaaacttctgtccacgtccctgtatgactagcttcctgtagggctctcctccacgccctatctttgaccccctcccccagccaccccgccctgcgcactctctggttcccctctctggaatgcagttcccccactctctgcccagtggacttcctcaaatcgaaattctcagctgaaacatggggtcagcccccatgtgctctgcatccttccgccagttctgcacctccccggctggagcagcaccctgggaggacagggacactgcctgaatattcagctctgaatatccagtgcccgcaacacagcctagtaggtgttggataaatatttagcctgtgagtgaaggaatg

SEQ ID NO: 223017 - DNA, 597 bp, Homo sapiens
tgttggttactttttacctcactctggataggaccagtctttgtgggaggatagcgtgggaaggtgtgggcaggatggcctcaggcggtctgcagctcccatttgggctcatggtctgaactgtctctcactacatcagttgtttcttctgccgtgggagcagaattccgtgtttgacatcccagcagtcagggtggccccagccaagccgctagggttctgtgtctgggtctcagtgctttaagccaaggactctyggatgaagtttttgggtctgggatgtggctttcctatctacaacatactagggggtccacatggattgtcagtttcctctgtgttctggtctagatttcgcagtatttggaagaaaggctccagggtttgtggtttggagctgtggtgatttctggtttcaataaaaattaaggaaacatatttcccctataatcagatttttgttttattgtctttggttgatttcgagagacgagtggagtttaaatgttcgacgccatcattttcacctggaaattaaatgctttctcatccacgtctcttttaatcctaacaccaaccctggtaagcgagcaagac

SEQ ID NO: 223018 - DNA, 597 bp, Homo sapiens
tgttggttactttttacctcactctggataggaccagtctttgtgggaggatagcgtgggaaggtgtgggcaggatggcctcaggcggtctgcagctcccatttgggctcatggtctgaactgtctctcactacatcagttgtttcttctgccgtgggagcagaattccgtgtttgacatcccagcagtcagggtggccccagccaagccgctagggttctgtgtctgggtctcagtgctttaagccaaggactcttggatgaagtttttgggtctgggatgtggctttcctatctacaacatactagggggtccacatggattgtcagtttcctctgtgttctggtctagatttcgcagtatttggaagaaaggctccagggtttgtggtttggagctgtggtgatttctggtttcaataaaaattaaggaaacatatttcccctataaycagatttttgttttattgtctttggttgatttcgagagacgagtggagtttaaatgttcgacgccatcattttcacctggaaattaaatgctttctcatccacgtctcttttaatcctaacaccaaccctggtaagcgagcaagac

SEQ ID NO: 223019 - DNA, 554 bp, Homo sapiens
cttcttggggtttcttttcctacctcagctctaggaattattattattattattttttagatggggtcttgccctatcacccaggctggagtgcagtggcatgatcatggttcactgcaacctcgacctcccgggctcaagcaatcttaccacctcagcttcctgagtaactggggccacaggtgcacgacactacacctggctcgttttttttttttttttttttaacatttttgtagagacggggtctcactrtgttgtccagtctggtctcaaattcctggactcaagcaatcctcccaccttggcctcccaatgtactggaattacaggcataagccactgcacctggcccagatctaggattattgactcatgtcactgccaattcacactctgtgacttgatttataataatggtggtattctcccccatcactgctctttgtccctgctctccttcattggtggcctttgggagctccagctctctgctccgactcctcgagtgtgtgtccaagtggccggaagaatgaagggcctcatttatgagc

SEQ ID NO: 223020 - DNA, 581 bp, Homo sapiens
gaagtgccagttacggctccaactgagaccttaagaagtaagggggcccttgggagtcaagartgttggagaaaagcacagggaagggggagcttgagaaaaccatccaataaagttgtgcatgaagactggatccacccgcaagttatgcacgtatggaactgacccaaaacagctcactaaataaaggctctgagaactgaactagaatgtagtgtgtcctgggagacacaaacagggaatatcccaatagtattgaaaagtctttaaaaactaaactgaagttgaaaccacagcccactaaagtagatcagtccttgtgccctgggccttataaggttgacagtatgctttaaaaaaatgccaaagtgccctatccaaccaacaacatatacaacatatatacagcttcaggaaaaagtcctcccctacaaaagtaaattcaaaaaattggaaaaagcaactgttccaccagatgaacagatatgtgtattaatgtaaggatatgggaaacatgaaaaagcactctgattcataaagcaaatattcctagatctaaagcgagagatacactccaatac

SEQ ID NO: 223021 - DNA, 581 bp, Homo sapiens
gaagtgccagttacggctccaactgagaccttaagaagtaagggggcccttgggagtcaagaatgttggagaaaagcacagggaagggggagcttgagaaaaccatccaataaagttgtgcatgaagactggatccacccgcaagttatgcacgtatggaactgacccaaaacagctcactaaataaaggctctgagaactgaactagaatgtagtgtgtcctgggagacacaaacagggaatatcccaatagtaytgaaaagtctttaaaaactaaactgaagttgaaaccacagcccactaaagtagatcagtccttgtgccctgggccttataaggttgacagtatgctttaaaaaaatgccaaagtgccctatccaaccaacaacatatacaacatatatacagcttcaggaaaaagtcctcccctacaaaagtaaattcaaaaaattggaaaaagcaactgttccaccagatgaacagatatgtgtattaatgtaaggatatgggaaacatgaaaaagcactctgattcataaagcaaatattcctagatctaaagcgagagatacactccaatac

SEQ ID NO: 223022 - DNA, 554 bp, Homo sapiens
cttcttggggtttcttttcctacctcagctctaggaattattattattattattttttagatggggtcttgccctatcacccaggctggagtgcagtggcatgatcatggttcactgcaacctcgacctcccgggctcaagcaatcttaccacctcagcttcctgagtaactggggccacaggtgcacgacactacacctggctcgttttttttttttttttttttaacatttttgtagagacggggtctcactgtgttgtccagtctggtctcaaattcctggactcaagcaatcctcccaccttggcctcccaatgtactggaattacaggcataagccactgcacctggcccagatctaggattattgactcatgtcactgccaattcacactctgtgacytgatttataataatggtggtattctcccccatcactgctctttgtccctgctctccttcattggtggcctttgggagctccagctctctgctccgactcctcgagtgtgtgtccaagtggccggaagaatgaagggcctcatttatgagc

SEQ ID NO: 223023 - DNA, 514 bp, Homo sapiens
ttctcttcttcttgtctcttgtctattttctaaggtgcctctttgttgcttggggcaaaaaaagtccrtttttaatccacacccaacaaacatctacccttacgtatcctggtttttagggttttgagtttgttgtttgttttctcagcttctcatatttggaatactggaaattcctaaagtggagaatgacagaacgtgaatcacagctatggtgaagccacaggctctggatgaaaaacctaatctgccagggtttgaagttaaacacattaatcttctgtgcctccatttctatctgtccaatgggctaaatcagaacacttaggttgtccagtgtttaaatgagcagtgcaggaaaagcatggagccaatgcctgtcacgtagtaattggacaacacgcatgagctcctatcagcgccatggtctccagcatttccatcaggttttgatctttgaaatgtccttcttgatatgaaaggatcattcctcaaacattctctaaccgatggc

SEQ ID NO: 223024 - DNA, 608 bp, Homo sapiens
ctacttgacagttaactctgagtggctccacaaggtcctgacttagctcctagtcacttgcaaaacctatatacccccatctcatcccccaaatgatgaaaagaaactttgcaggactcatgccagacaaatagggtgggaccattctgtagagccaagttctcaggacatcaataagagatggaaaccacctgctggaaggtgccacagtgggaaccttggggtcagggagcagtcactgaactgtcagggtgaatcctggctcctggccctcacacaccctttctccccctccctccttctctcctccctcctgtctgctctttcccctctctctcctgaatccctcaggtaccttccatgggccctgacccctccttttcagaggctccaaagtgagccctcaaaacacttggtaaccttggacatttccaaaactggagagacttraccacagcatttttatgagctaggaaggtcctccagagctcttgcctaaatttttctgctgatgagaagagaacaagagtttccatctgatctggtcctaaggcaacttctccttggagcagagtctgggcaggaagaagggggttgcccagggccct

SEQ ID NO: 223025 - DNA, 416 bp, Homo sapiens
tgagtacgtttctatgaaggtgataaggatccactgagtcttccatataaagatcatattcctgctccaagtggccattactgagctgagagatgtcattgccgcagtgaggacctataggcacatgtaggttgaatgaaactctagttctamctggaagcccagacatgggatgggtcagtgagcatggctctcttcctagtctcaggccatgcctgtggcactctgattctactctcatgacattggacctgggcagatgtgacaaattcagagaactatgattttgactcaagggtttgtagatttcctttttcactctaatttcagtgtctggagtcctcacaaccatgaacaatctgagtatttgatgagacagggctaaatattgcagtttttctcctagaaatcatttg

SEQ ID NO: 223026 - DNA, 416 bp, Homo sapiens
tgagtacgtttctatgaaggtgataaggatccactgagtcttccatataaagatcatattcctgctccaagtggccattactgagctgagagatgtcattgccgcagtgaggacctataggcacatgtaggttgaatgaaactctagttctacctggaagcccwgacatgggatgggtcagtgagcatggctctcttcctagtctcaggccatgcctgtggcactctgattctactctcatgacattggacctgggcagatgtgacaaattcagagaactatgattttgactcaagggtttgtagatttcctttttcactctaatttcagtgtctggagtcctcacaaccatgaacaatctgagtatttgatgagacagggctaaatattgcagtttttctcctagaaatcatttg

SEQ ID NO: 223027 - DNA, 411 bp, Homo sapiens
  misc_feature (1)...(411): n = A,T,C or G
ttaaagaaatatcaaaatcaaattgctgttcttaacccaggagtgtgcagtgaaatcagtttattaggttgcaaattgcttttactttttcatgaagagtagaacacataactggcctcaagatccctctaccaaaagctcattcagaggcagactcccaaatgtctaatgacttcmagagtgagctgaattgcatttctccagtctcctgacttggtatcaaagaagaaaaattggagtaaaaaggagagatgctaacaatgtgagagtgaaccaagatacaggggcaggagctgacgggtgggaggnnnnnnnnnnnnnnnnnnnnnnnnnnnnnnnnnnnnnnnnnnnnnnnnnnnnnnnnnnnnnnnnnnnnnnnnnnnnnnnnnnnnnnnnnnnnnnnnnnnnagg

SEQ ID NO: 223028 - DNA, 414 bp, Homo sapiens
  misc_feature (1)...(414): n = A,T,C or G
ttaaagaaatatcaaaatcaaattgctgttcttaacccaggagtgtgcagtgaaatcagtttattaggttgcaaattgcttttactttttcatgaagagtagaacacataactggcctcaagatccctctaccaaaagctcattcagaggcagactcccaaatgtctaatgacttcaagagtgagctgaattgcatttctccagtctcctgacytggtatcaaagaagaaaaattggagtaaaaaggagagatgctaacaatgtgagagtgaaccaagatacaggggcaggagctgacgggtgggaggnnnnnnnnnnnnnnnnnnnnnnnnnnnnnnnnnnnnnnnnnnnnnnnnnnnnnnnnnnnnnnnnnnnnnnnnnnnnnnnnnnnnnnnnnnnnnnnnnnnnaggcga

SEQ ID NO: 223029 - DNA, 421 bp, Homo sapiens
  misc_feature (1)...(421): n = A,T,C or G
ttaaagaaatatcaaaatcaaattgctgttcttaacccaggagtgtgcagtgaaatcagtttattaggttgcaaattgcttttactttttcatgaagagtagaacacataactggcctcaagatccctctaccaaaagctcattcagaggcagactcccaaatgtctaatgacttcaagagtgagctgaattgcatttctccagtctcctgacttggyatcaaagaagaaaaattggagtaaaaaggagagatgctaacaatgtgagagtgaaccaagatacaggggcaggagctgacgggtgggaggnnnnnnnnnnnnnnnnnnnnnnnnnnnnnnnnnnnnnnnnnnnnnnnnnnnnnnnnnnnnnnnnnnnnnnnnnnnnnnnnnnnnnnnnnnnnnnnnnnnnaggcgaaagcagg

SEQ ID NO: 223030 - DNA, 421 bp, Homo sapiens
  misc_feature (1)...(421): n = A,T,C or G
ttaaagaaatatcaaaatcaaattgctgttcttaacccaggagtgtgcagtgaaatcagtttattaggttgcaaattgcttttactttttcatgaagagtagaacacataactggcctcaagatccctctaccaaaagctcattcagaggcagactcccaaatgtctaatgacttcaagagtgagctgaattgcatttctccagtctcctgacttggtatcaamgaagaaaaattggagtaaaaaggagagatgctaacaatgtgagagtgaaccaagatacaggggcaggagctgacgggtgggaggnnnnnnnnnnnnnnnnnnnnnnnnnnnnnnnnnnnnnnnnnnnnnnnnnnnnnnnnnnnnnnnnnnnnnnnnnnnnnnnnnnnnnnnnnnnnnnnnnnnnaggcgaaagcagg

SEQ ID NO: 223031 - DNA, 621 bp, Homo sapiens
cagcttgacaatgaatgggagagaaaatgtctagaattgaatactaatataaataaataragctatatagcaaatagataatgaaactacccagaagataataaaaaaattaatccaaataatttttgaactcactactctaactgaacactgtcagtgcaaaatatcctaaggataaaaagaattacaaaaaaatcttaaatattacttaatactttattgttgatggtggtatttatgtagcaattctgaaactacctttgcatactatagtattctgcaaatgtgtaaatattttgaaacatattgatgctataagtaaccagggctctcaaggagatacaaatatgaaatgagggaaaaaagaacctatattgttaaattggaattacagaaatcagtatcaaatcttcattatgtatacaaatacgcacaaacatacttaaaaatattcattgctagctctgttctcttaaaagggcctagaagcaaaaggcattcatgtagcaatgaacacatcttgtgtccagatcatagtttctgaatgccattacccaccaaaaggaaccagggagctctttaagataatggctgattctgggactgaggcaggtaaagcaa

SEQ ID NO: 223032 - DNA, 621 bp, Homo sapiens
cagcttgacaatgaatgggagagaaaatgtctagaattgaatactaatataaataaatagagctatatagcaaatagataatgaaactacccagaagataataaaaaaattaatccaaataatttttgaactcactactctaactgaacactgtcagtgcaaaatatcctaaggataaaaagaattacaaaaaaatcttaaatattacttaatactttattgttgatggtggtatttatgtagcaattctgaaactacctttgcatactatagtattctgcaaatgtgtaaatattttgaaacatattgatgctataagtaaccagggctctcaaggagatacaaatatgaaatgagggaaaraagaacctatattgttaaattggaattacagaaatcagtatcaaatcttcattatgtatacaaatacgcacaaacatacttaaaaatattcattgctagctctgttctcttaaaagggcctagaagcaaaaggcattcatgtagcaatgaacacatcttgtgtccagatcatagtttctgaatgccattacccaccaaaaggaaccagggagctctttaagataatggctgattctgggactgaggcaggtaaagcaa

SEQ ID NO: 223033 - DNA, 632 bp, Homo sapiens
gctatcatctctggaaggtatctgcattgaaccctaaaaaattggaaaagtcgggggacttaggaagatgcaggaactatgaccacaatgacagtactgagaatattctcagaatttggtattaaaattatcaaacttacacctcaaatgtaaaaagaaaatggaatcagcatgaattatctaagtccatagttcttacttgatcagtctgttctccaagagtgggggccaatggaggtaacttcagcttgctggttagagatgggtgcttgggacattagggagtctctccctcctaaatattggtgcagggcctgtaattctgaatttctttccattaaggcttgcaccatattctctcttctcraaaaaaaaaaagaatttacttcttaaatattgtgaaattaatataccccatactattatgagattgtttactctcaccatgacctctgaaaaatgcaatcttttttccctcttaagataactcagattttacaaaaactaagagtaaacatgttgagtgtaagttttcccataccttgactggaaatgcaaaatatcactcaagtcttaataatttagaatcaaaaccaaaacactcacaacccctactcctttctctcaaaatg

SEQ ID NO: 223034 - DNA, 462 bp, Homo sapiens
aacacagaagtctctaaatacatgtcccaggaatgaatacaaacaatacagaaaactgtctttagtggccacttacatacatattgttttctgaaataagtctttttcctatttgttcagggcatgtaacaattaatgttagatgaggataaatggacactcagttcatttatttgttttctccccagtgtaactttataggggtaagcataaaatgataagctgaaaggaatactaaacactatgtttgctatcatagtgatggtttctatttctgtactaaccgacggcacacggtggaggaaacggaggagctatactgcctaggttgatactggatctgctacttattagctatgttagcttgggcaagttacttagctttagayatctgtttcctcctctataaaacagggataatagaatgtgcccatgaacttgtggggattcaatgagttaata

SEQ ID NO: 223035 - DNA, 492 bp, Homo sapiens
ctccaaatgatcaaactactctgaactacaggaggaaattcaaaccaatggcaaacaagtttaaaactgtgaaaaaaaattagacgaatggataactagaataaccaatgcagataagtccttaaaggagctgatggagctgaaagccaaggctccagaactacatgaagaatgcagaagccccaggagctaatgtgatcaactggaagaaagggtatcagcgayggaagatgaaatgaatgaaatgaagtgagaagggaagtttagagaaaaaagaataaaaagaaatgaacaaagcctcccagaaatatgggactatgtgaaaagaccaaatctatgtctgattggtgtacctaaaagtgacggggagaatggaaacattttggaaaacactctgcaggatattatccaggagaacttccccaatctagcaaggcaggccaacattcagattcaggaaatacagagaatgccacaaagatactcctcgag

SEQ ID NO: 223036 - DNA, 492 bp, Homo sapiens
ctccaaatgatcaaactactctgaactacaggaggaaattcaaaccaatggcaaacaagtttaaaactgtgaaaaaaaattagacgaatggataactagaataaccaatgcagataagtccttaaaggagctgatggagctgaaagccaaggctccagaactacatgaagaatgcagaagccccaggagctaatgtgatcaactggaagaaagggtatcagcgatgsaagatgaaatgaatgaaatgaagtgagaagggaagtttagagaaaaaagaataaaaagaaatgaacaaagcctcccagaaatatgggactatgtgaaaagaccaaatctatgtctgattggtgtacctaaaagtgacggggagaatggaaacattttggaaaacactctgcaggatattatccaggagaacttccccaatctagcaaggcaggccaacattcagattcaggaaatacagagaatgccacaaagatactcctcgag

SEQ ID NO: 223037 - DNA, 529 bp, Homo sapiens
ttagcaatgaacaatctgagaagaaaattgacacaatgatttcatttataatagcactggtaagaataatatgcctgggaataaatttgttcaagaaggtgcagtacttgtacacagacaactacagaacattgctcgaggagattcaggaagacctaaatcaatggacagacatcttgtgtccatgggttggaagttgtaacatggttaagataaaaatacaactcaaagcaacccacagattcaatacaatcctatcaaraagtggccttttttacaggaatgcctaacaagaacttcatattcctaaaaaatagtgtgtccccccaaaacaaaagcaatcttgaaatgcaagaagaaacattttctattccaaaggtctttaactgctctaagcagtacttggtagtcttcaatatataggctttcacatctctttttttcttcttttgtttctgcacaggatctcactctttcacccaggctggagtacagtggcacaatcacagctcactgcagcatggaattc

SEQ ID NO: 223038 - DNA, 614 bp, Homo sapiens
ctgcgtgctcctcttttggagaaaggagggagggaacggccttgtgagacgactccaggagcgaccagcgaccyccacaagtcccaagtcttcccagcgcacagggaaactgtcacttacagggaaactgtcgcttcagtggcaagaaggttgaaaaagcccctcctgtgcctccctggtggtctggtggctagaatttagcgctttcaccgccgcagctcgggttggattaccagtcagggaattgttttgcactgactgccttcccgcagaaatcttcctttacgccgctgtaagcgggccttctccaagggccagaggcagaacagtctccgcagcgaggtgcaaaccctggcgaaggagggcaactcctggtgggccacctctcatgacacagcgctcttatttatctccgtgtctgtcattcgcacaagcggctttagagagcgactgagcgtctcgctcaggtgtacaccgctgtgcagagatgccagccctcctggaactgcacccaagaagcccaccgtctttgccgcctctgccgtcccggaggcgccgatcgggctgagctgcgaataactaagagagaggccaaggcaagtcgtggcgtttgt

SEQ ID NO: 223039 - DNA, 593 bp, Homo sapiens
tcagtagccataaataaaataaaatatgtaggaataaacttaaccccaaaagagaaacatctctacaatgacaattgtagaacattgatgcaagaaattgaagaggagataagaaatggaaagatatttcatgttcctggatttggaagaatcatgtggtacaaaatgtccatactaccccaagcaatttatagattaaatgcaatccctatcaaaataccaaagacatattcacagaaatagaaaaaaaatgctaaaatttatgtgtaagcacgaaagactgagaatagccaaagctatcctgagcaaaaataacaaaactggaggaatcacattatctgatttcaaattatactacagagctatagtaaccaaaacagcatgatactggcatgctgacacatagaccaatggaatacaatatcgaacccagaaacatatccgtacatctacagtgagttcctttttgacaaagacaccaagaacatacaytggggaaagaacagtcacttcaataaattgtgctgggaaaactggatatctatatgcagaagaatgaaactagacccctatcagtcaccatatacaaaaat

SEQ ID NO: 223040 - DNA, 519 bp, Homo sapiens
gaattcagggtttggtggcaatgtcatccaattcatgaaggatatttttcttgattgacctaatgttgcagtaaaaaaycagagcaagggtcaactggccaaaaataaaagtcaaaactcagcttgggaagttataggctacactgcatttaacttgcaactggataattgcaagaacacattcaaagcgtcactgcaaagcccttgttgtttagccctagctgcttcaatttctagataatggcccattattaatgtggaagtattagaaagttttccagggaaaaatatcaacctggaaccattcccctttgcatgcattatacacttcactgccatctggttatccataatatccccaaacccctaccaattttccaaaaagaactacaaataacgctttgtatttttagaacagtcttcctaacacccagagaggaaatctattgtgaagttaattttctttttcaaatgttttaaagtaaactattctttatttctaagaaacaaaacccaatg

SEQ ID NO: 223041 - DNA, 519 bp, Homo sapiens
gaattcagggtttggtggcaatgtcatccaattcatgaaggatatttttcttgattgacctaatgttgcagtaaaaaaccagagcaagggtcaactggccaaaaataaaagtcaaaactcagcttgggaagttataggctacactgcatttaacttgcaactggataattgcaagaacacattcaaagcgtcactgcaaagcccttgttgtttagccctagctgcttcaatttctagataatggcccattattaatgtggaagtattagaaagttttccagggaaaaatatcaacctggaaccattcccctttgcatgcattatacacttcactgccatctggttatccataatatccmcaaacccctaccaattttccaaaaagaactacaaataacgctttgtatttttagaacagtcttcctaacacccagagaggaaatctattgtgaagttaattttctttttcaaatgttttaaagtaaactattctttatttctaagaaacaaaacccaatg

SEQ ID NO: 223042 - DNA, 464 bp, Homo sapiens
agcaccaaaagggcaaatctaagagttactgactttaaagaggaggttgaaagataggcttagaaagttgatgcaacaggatagtaacagagaaattctcaagcctagagaaatacatcaatatataaatacaagatgataatagaacatcaagcagattaatcaaaataagactactttaagacatttaataatcagactgcaaaagatcgagaataaagaaaggatctgaaaagtagcaagagaaaagaaacaacatacaatggtgctctaatatatctgggagcagacttctcagtggaaacyttacaggccaggagacagtggcattatgtatttaaagtgctgaaggaaaaatacttgtatcctagaataggaataatacttgtatccttttatccttgtgttttcaacccattgaaaatattctttaaacaaaaaagggaaataaggactttcccagt

SEQ ID NO: 223043 - DNA, 516 bp, Homo sapiens
tttctcccaaatatataaacatcataaaaccataactgacattttgatggaaaatttcttccactcgagtcatattcacttgtagtaaatcttgatagtgagcttgcactagctttcattccagtgaagctgaaaccaggatttttgtctacactgtgtcttctccccatggtagagaggatagtgtggattcttaggtatgcttcatgactgacaatrgcaaagtgaggcattccttctgtttaatgtatgttaatttagttataatgttgattatatattagatagatgtagaactagcttgtgttactttcatgtgtaccattgcttcttccaaggaatgtttgaacagtttctatctttggaagttgctgaaagagctatatcagcttcagcggtggaaagcacaggctctaggcattgaagaaataacatagtacatctaagcacttcattgtatcccatctttatggataaaaggaataaaaacaactttgggaagagattctaatattt

SEQ ID NO: 223044 - DNA, 527 bp, Homo sapiens
agatctcacccctaactgggtcccagacttctggggcgtagggcctgaaagctcctggagcctagacagaattttccttctaaagtcatcgagttgtacaggcctaggcgaactttcaaggaacccaagaggccatgtcctgactttgttcctcttggggtgaaacccagagacatggctacagcctagrtgctgctgccgctcagctgaatgcctgccccccagccccatgtttccccacatccctttcctctgtgcactgagaggggcagtagattatccctcgtcgtccaggactagggcccccagtctctgtaaagacaagctccttgggttctgtccagccccaatgccctgttcatcctccctgcagttcagcggtcactctcccaaccaccctgagtgggcactgaaaatccccctctgccaggaagccttccttcccagactaacacaacgagaagggtaactttccgaccccttgtctagtaaagaggggcctcccaaggcacctgacttttcagctg

SEQ ID NO: 223045 - DNA, 523 bp, Homo sapiens
aaataacatcttagtatttctaggaaaatagttagaacttgtttccctaaaagagccttggagacccacagagtcctcagaccatacttcaaaaatggctggtttagaaggccctaagtttcctaccagatctgatactctgaagtgtttctgataatactctatggtagcatttttcaaaatacacttcagggaatatgctcccaggaacagtatcataggatgttattgtatgtgggatgcaaactgtatgtggggaaaatgtggtttctatgaataaattagttcggggaaccttaaagtaaatgaaataggcatattttacttcaggacttttcagatgctttgatgtgataaaacatattgtgaatcccttacaatacattattktgtgtagtgtttccccacagttttgaccacaaactctttttcgaagagcagccttcaaggctagagtaccaaggaacacactttgggaagtgctgctccagtgacttctagatcctttccctgagtattaaca

SEQ ID NO: 223046 - DNA, 542 bp, Homo sapiens
ggtttcactgtgtcacccaggctggagtacagaggtgctatcatggctcactggcagccttgactcttgggctcaagtgatcctcccaccttagtctccaagtagctgggactccaagctgtgccataatgccagctaattatattacttttttttttttttttttagagatggggtctcactacgttgcccgagctggtctgaactcctgggctaaagcgatagagggagggttttagaatgcacacatttgtgtaaagaacttagatgaggagagagcacatgcttagaaaattgcrgaaactgcaaagctgtgtgtaggtatagaggtgggttggggaggagggtacaggagcagggaatatcaggatccaaaaagatactgtaaggttgaaatgaaggctgaatctaagtttcccacttacacaaatatgagagggacaggtaaaagtaactgaggatagcttagtgaatagtacgagtgtaacgtgactgacaagaacaaacaagctaatttgacctcaggctgaattagaggaact

SEQ ID NO: 223047 - DNA, 556 bp, Homo sapiens
tcaccatctccactgtgacaccattgtccaaagtgtcatcctctctcacttagattattgcaggggctgtgtatctgggtytctgactttccacccttttttcccttcagtctattttcaacccagcagccaggccaatctcttaaaaacatgaattacatcttgtgatccctctgctcaaaacattgcaacagattcccatcttattcagagtaaaagccaaggtcattactatggccttatagcccaatgtgatcactggccccttcactctctgataattctcctcccacttcccctctgctccatccactccaggctcatggcctccaggtagtaaaagtgggatttaaacctgggtctctcctaaattaaacctgggtcatgcttaaattaaaaacccaatttaagcatgggttcaaaagtccatgctccttccactaataatattgtcatcccttcttacaaatgaggaaacagacattcagtgagtttaagactaggctatagtcacatgactaggaaatgtcagcatacttgtaaatcctgagatagt

SEQ ID NO: 223048 - DNA, 556 bp, Homo sapiens
tcaccatctccactgtgacaccattgtccaaagtgtcatcctctctcacttagattattgcaggggctgtgtatctgggtttctgactttccacccttttttcccttcagtctattttcaacccagcagccaggccaatctcttaaaaacatgaattacatcttgtgatccctctgctcaaaacattgcaacagattcccatcttattcagagtaaaagccaaggtcattactatggccttatagcccaatgtgatcactggccccttcactctctgataattctcctcccacttcccctctgctccatccactccaggctcatggcctccaggtagtaaaagtgggatttaaacctgggtctctcytaaattaaacctgggtcatgcttaaattaaaaacccaatttaagcatgggttcaaaagtccatgctccttccactaataatattgtcatcccttcttacaaatgaggaaacagacattcagtgagtttaagactaggctatagtcacatgactaggaaatgtcagcatacttgtaaatcctgagatagt

SEQ ID NO: 223049 - DNA, 424 bp, Homo sapiens
gttctattcccctatagtggtgtacagtattaccaggtgcctaatatggcctttaatatagaggaaaagaaccatcagctctgcaacaggaggggaattctggggcatctgaatatttaactcaaggaattcaggccctgccaaatctcagtcacaatgcaaacctttataccccatttccttctgtgccaataatgacatttggaacaggagggagaagtctactgaaaagcaagatcctcctcagcaagcacattggtcaatccctgctgggctgtctgtttcagctattaatttgcatgggctgcttctggactgattcygtgatggatctgttgccaagatcagccattaaaagcttacttgcatttctgctttctagacatgtcatatcatgaggccaagaaagagtggacaggtacat

SEQ ID NO: 223050 - DNA, 510 bp, Homo sapiens
tgacctgtgacttctaatgtgatcacatgattgtcaggctgaaagttttatcagttggttttcacttttaagkagtttctgtatttcacattatatttcttcagttacttaaaatgaaaaatgctggtattctcatcagaggctgaattttgagtgactattgggtagaaactttaactgaaagcatgaactttttattttataaaatgtacgtaccgccccctagaagacacaagtttgatttatagttaaggttatttcagatcaggataacctggtgtgaacatagcacccattgccttatagggagggtgggtcctctggaggaaaaatcgtctttccaaatggaaagatgaatgaatgaataaatgatcctcttaattgtaaatgagaggcagcatggtttaacacacagaatctaagactgtgctaatacaggcttgcatcacaatttcaactctgatacttactactaatgtgtgaccttgagagtctgaccttcagactcct

SEQ ID NO: 223051 - DNA, 510 bp, Homo sapiens
tgacctgtgacttctaatgtgatcacatgattgtcaggctgaaagttttatcagttggttttcacttttaaggagtttctgtatttcacattatatttcttcagttacttaaaatgaaaaatgctggtattctcatcagaggctgaattttgagtgactattgggtagaaactttaactgaaagcatgaactttttattttataaaatgtacgtaccgccccctagaagacacaagtttgatttatagttaaggttatttcagatcaggataacctggtgtgaacatagcacccattgccttatagggagggtgggtcctctggaggaaaaatcrtctttccaaatggaaagatgaatgaatgaataaatgatcctcttaattgtaaatgagaggcagcatggtttaacacacagaatctaagactgtgctaatacaggcttgcatcacaatttcaactctgatacttactactaatgtgtgaccttgagagtctgaccttcagactcct

SEQ ID NO: 223052 - DNA, 424 bp, Homo sapiens
agatctaggggcctttatctgggttttaaagaagctactaggaattttcttggctacagtcagggacattgttcaaagactgtgtatgtgcaggggcagtgggtgcagagtcattaggcactcattggcttttctgagaaaaatgagctcaggaaaaccaaaatcttggccacttttccattctaacacctcatctttctctaaggttaagctaacctggtgascagttcctagcctggaataggcccctctgccacagtcagctttagggaaatgagaaaaacagtcaaaataatgcagcccacgtgacactcatgccagcttcacccagggaaggagtggaacttaagctctccagcccctccaggtatcagcccgaaagttaacattaaatacaggactgtgagtctgaatgagtccactg

SEQ ID NO: 223053 - DNA, 387 bp, Homo sapiens
tggctacagtcagggacattgttcaaagactgtgtatgtgcaggggcagtgggtgcagagtcattaggcactcattggcttttctgagaaaaatgagctcaggaaaaccaaaatcttggccacttttccattctaacacctcatctttctctaaggttaagctaacctggtgagcagttcctagcctggaataggcccctctgccacagtcagctttagggaaatgagaaaaacagtcaaaataatgcagcccacgtgacactcatgccagcttcacccagggaaggagtggaacttaagctctccagcccctccaggtatcagcccgaaagttaacrttaaatacaggactgtgagtctgaatgagtccactgtggaaggttctct

SEQ ID NO: 223054 - DNA, 455 bp, Homo sapiens
gcaccaacatttgcaggaccctttggcaatgaagaagttgatgtaccgactgatctccctttggtgggccctacaacttatgcacaagctgaccctgcaattcgcttcatgcttgaatatgaataataggcaagactgccagacatttgtaggtagctttcaaaatgaaagagcactagaaaaaaaaagtacagaaaaaaatggaacatgaagaaaaaataccaggctgaaaacagaaaaaaaaattaattttaatattctgtggtggggggagtgagggtgtgtctattaagggatagcatgagggagatctttgtggtgatgacacagccaggtgggaaggggtccccaaagcaatcccaactgatcagtgcactggagttccgccrtttgcatcagggaggagcttggcccctcctcttcctgggtggaacctggaattcaatctgtgacgc

SEQ ID NO: 223055 - DNA, 557 bp, Homo sapiens
agacctaaataacaaaacaaaacaaaacataaaatttaaatgtgttatcacttagaatgaaagttaagaggtatttatcttatgataatattgagttaccctaaggacttaagtgtacacatcctctggcagggattccccatagccttcatctacccaaactcagttagttctgtttgccaaagtgggtgttgttttgttttgtaattttaaatgcaccattatcttccccaaagtaaaccatatgctcatagatttctgtctagataatttagattccatcaatatcagtctttgtatactatgtgtaaaaatgttctcttaaaatttactaygaattacataaagaacttcttggctcataaaattaataagcaacatcatgtaagaatacctcatgaagacatcagcctcactttttccttagcatcactttgatgtataattcaaatgccctgtgtaattaaactcttcctttagtttgtagatcccccataggaaacaaacaaacatctcaggagtaagccaaagaaagaccatctaaatttaaatttact

SEQ ID NO: 223056 - DNA, 488 bp, Homo sapiens
ttgttgttttgattcgcatttctctaattagtagtgcattcttctttctattagtaagtacaacaaagtttttacctcaatagcctcatggcccagtcaggactgctttatctcaaaaagcgaagcagaaactacagctattatgaagtcaatgacagtagcattgtttacccccaggcaaatagatttcttattgctgagagcatacccacctcctccaacacacacacacacacayatacaggatatggattaagttgaatggttcaagtgttttatgttttcatagccacactccacttccaataacttacaaagtcctgtcagttctacctccacctcttacatgtctctccaatgtctctggttccactgccactattccattccaggccatcattatctctcatctggacaattgtgataatttactaagtggtatggccatatacatcaactcttcccccactctagctagcttgctatat

SEQ ID NO: 223057 - DNA, 545 bp, Homo sapiens
tctactaaacaagtggaggacttgaccctggctagctgcagagacagcttatccacaagggcaggagagaaagcacagtaaagggtcgcaggtgctgggaggtgcacctggggaaattcttctaattgcccctattttcacaatgartgaggctggggaaggagctacacaagggctgtagtgaaaggagagtgtctgaaatattgtttaggagtttggaagaatgaatgctttggggaagatggtataatggctgagtaatattcaaggctagtgatgatcagtttaaaaatatttttcttttaattaacttttaattttgaaataatttcagaattataaaaaaggtggaaaaatagttaaaagaattcccatatacccttcacccaactttcccaaatattagcatcttaacattaatacagtaccatagtataattatcaatattgggaaattatcattgatccaccattattaactaaactacagacctttttcaactttgatagattatcctattagtaagtatcctttttctggacta

SEQ ID NO: 223058 - DNA, 614 bp, Homo sapiens
atcatctttgtcatatctgggtcattttgattaatttttctcctcatgagtgatatttccctgcttgtttttatgcctagtactttttattggatgccagacattgtgaattattggatgctagagactttattaaatattcttgagctttgttttgagagaaaattaagttacttggaaacagtttgacctttcagggcttccttttaaactgctttatgtaggaccaaaacactcttcagtctaggactcatttttcccttaaattagtcctagactgaagggaattagaattcttctaagcattcagaaggagacttaggcagtatacttctgaatatctgatatccctttttacagagtttttttttcatttaggctggtgggtggtaataccaactggtgcctaccctatgtgatttctgaaaattgttctgcttgyttcttttgggtggttctttccccagcctcgggtagtttcctcacatgcaggtgtgctaagggctctgctgaagcctggaagcaggaagaactgctgcagatccctataaacctttcttttattttgaagtgtttaaaatttattttatttaattttttaatcaaaatacatg

SEQ ID NO: 223059 - DNA, 528 bp, Homo sapiens
gtgatacattacatagtgttaaataacattcaaaatatgatgctagcaatatcacaaaattgggagatcctttttatcttggamgcttaagataaattccatttatcgatgacctttttccctctctttttcagctcctctggtgcaagtgtggtagctattgacaacaaaatcgagcaagctatggtatgtactgatgaaaaatcatttatactaaatgtgggcacagcacaaaaataagatgttttgtggaaccagtgcatccctaagttcagatgatgatgattgctcttgatgcgcgtagaaatgccggcgctgtctccattcggccagcgtggagccacctaccacggcagccgtggagggagaaaggggccctgcgggtattaaatggtcttcttccccgcactggtttcacacgacgggattttctcacggtgaccctttttgctggggatttattagggaagcgctggccaactatctccttcggctggtcgtgagcacacctttagcgatgtggcttta

SEQ ID NO: 223060 - DNA, 620 bp, Homo sapiens
cactgtgttagccaggatggtctcgatctcctgacttcatgatctgcctgccttgacatcccaaagtgctgggattacaggcatgagaaactgtgtccagccaaaaatatttttataaatttattatagccaaagtgtatagtgtttctgaaatttatagtagtgaatacttcacatcactcaccactcactgattctcccagagcaacttacggtcctgcaatctccattcatggtaactgccctatacagatgtactatttttttattttttatactgtatttgtagtgtaccttttctatgctcagttatatttagatacacaagtacttaccattatattagaattgcatcagcattcagtatrctaacatactgtgtatgcttgtagcctggaagcaatagctatatcatatagcctagatgtgtaataggctgtatcatctaatttgtataagtacactctataatgctactatgataataaaattgcataaagatgcatttcacaaaatgtttccctatcattgtgacacctgactgtacttaggtataaatctaataaaatatacacaaaatctatatgaagaaaacaaaactctggggaaaaatatcaaag

SEQ ID NO: 223061 - DNA, 593 bp, Homo sapiens
gttcaagatggcgttcatctttctgagattaagttattgcctgtgtaaaatgaggaaaattaaaaatggtctcatagaaaaaaaagagttagcaaagttttcctataaagggacattctgtaaaccatatagtcttagtcacaattggttctgttgttgtagtataaaaatagccataaatggcctggcacgacggctcatgcctgtaatcatgagcacttgggaggctgaggcaggtggatcacaaggtcaggagtttgagaccagccaggccaacatagtgaaaccccgtctctactaaaaatacaaaaattagccaggcgtggtgatgggcacctgtaatcccaggtactcaggaggctgaggcaggagaaagaattgcttgaacctgggaaggtggaggttgcagtgagccgggatggtgccattgcactccagcccagccgrcagtgtgagactccgtcaaaaaaaaaaaaaaaatatatatatatatatatatagccataaacaatatgtcatgaatgggtcagactgtgttttaataaatatgtacagaaacaactgagggcctgcctcactcataaagtcatcac

SEQ ID NO: 223062 - DNA, 628 bp, Homo sapiens
cagacatttctatttataaaaaaattgcaaaccaatttttgcaattttataattgcaattttttgcaatttttataaaaaaattgcaaaccaggtcatatacctgaccaacagrtatatgaaaagatgttcaatgttattaattaccaagacagagctaggaccttctgtgaggggcctgacaagtcccctcatgcatggaaataaaggaaaatcttctgtgtttcttcaagagaaattacaggtgcctacctatccctgagaagtagataagcaacttgataagcaagaagggcagtagtagcctaaaataatagccaaggaagctggaatcatgggatgttttgttccccttgaaactgaagatagaatctctgagttgtttttcagaaacagaccttcaccaaacagatctgctggtaggcaaacctcacataaggagaaactgagactgaattatgaccaccatactttttttctaattttcctgaggtgcttgaagaaagtcacacccatgagccggggctaacattcttttctgctgaacccaaaattttaaacaaagctattcttccttaaccaattgcaaatcagaaaatccttgaaactacctatgacctacttgttaa

SEQ ID NO: 223063 - DNA, 628 bp, Homo sapiens
cagacatttctatttataaaaaaattgcaaaccaatttttgcaattttataattgcaattttttgcaatttttataaaaaaattgcaaaccaggtcatatacctgaccaacaggtatatgaaaagatgttcaatgttattaattaccaagacagagctaggaccttctgtgaggggcctgacaagtcccctcatgcatggaaataaaggaaaatcttctgtgtttcttcaagagaaattacaggygcctacctatccctgagaagtagataagcaacttgataagcaagaagggcagtagtagcctaaaataatagccaaggaagctggaatcatgggatgttttgttccccttgaaactgaagatagaatctctgagttgtttttcagaaacagaccttcaccaaacagatctgctggtaggcaaacctcacataaggagaaactgagactgaattatgaccaccatactttttttctaattttcctgaggtgcttgaagaaagtcacacccatgagccggggctaacattcttttctgctgaacccaaaattttaaacaaagctattcttccttaaccaattgcaaatcagaaaatccttgaaactacctatgacctacttgttaa

SEQ ID NO: 223064 - DNA, 619 bp, Homo sapiens
atttttataggcacggcttgtcttgtccatacgttagtgtgtttttagtacaaactcaccatttgtgtgattgttcctaacacataaaaaaaactgtcatatagaattgttgaaagaaaacttattatttgaaatgttctattgctagtactgttgtcttaggtcatttattgatggaaaagtaaagttgaaagakaacatgatctttgttcagttatagattatttgatatttctctgactgtgttgggcgaagtggctgagcaccagggatgcattctttttctttgtgtttgacctcagttttattctatgaaaaaagtgcagctgtgtctggtacattccctggtactataactttccattcattgaaaagcttctagaaaagtccattaacctggttttctgttggttttcccacctttctccttaggtcttccaacacactgttgggtgactgtaatgaatctgtagtaccaaaggcagtttcaaatgacctatttcctgattgactttttgtctaccatggactttttgcagcaggagaatatttagatttctggcaaacacctttttatcctttgtcacaacccctcatgtcactaaaatttcagcacagc

SEQ ID NO: 223065 - DNA, 383 bp, Homo sapiens
cacattttaaaaaatcattcttactttcaatgtggtcatattcaatataaaaatataaatggtggaaaattctgcttccacccaagatggagtaacagatacatatttacccaccttccttaaataaccaaaaagctgaaaaaagataaagagcaatgttttcagatatttgatagcaggcagtgtcgagtaatgrtccttgaggcaaagaagtatgaaagtcctatgattgtccctagcttaatgcctggagagagggttgactgggcagaaccagtagaatttgagctggggagatggagttggaggttaaaggaggccaaaataactgcaattcataaggcagagtaaaaaaaggagagacttgcacagagagagggacc

SEQ ID NO: 223066 - DNA, 522 bp, Homo sapiens
gttactcatcagggaattttgggctgaatgttcagatgtaaactggaattaaaatgcttatttttaaagaatcttttatattttataagatgatgtatgaaaaatgtctgatattttaaaggtacttattaaaggtagaatgattgtgctccaagagttcgaaaattggtgaagaagaaacagatatataaacatatttaaaacctttgttgatatgctcattgtttttagatgaattttagaaaaattatattcctttacagcaaatctattaaggttggtcccatctaggattaagtgtcatcagtctagtcgtatcaaagctggaataaaaccatgtagacattaaaagaaacactcaggaattgcctatttttgcagttttttcatgcaatccaggagtggtcctgggaactttaaatctggatcctgtagttgttttccaaaggtcagatgggktcacaaacattttgtttctccaactttccagttgttatctgttatatctgtctgtctctgttt

SEQ ID NO: 223067 - DNA, 408 bp, Homo sapiens
cacattgcacaaaatgctttataaatgatttgttttttgcttttgcttttttagatacctgctactctttaggaaactgtaattactatagtaagaagtgagacatttcttaagagctttaaatccatcttttctggcttaataactactaagcacttaaggtgagttgcttgtggggaatagcatccagtcctcatgttaccgcagtggggctggcagtcagggtaaatcaacaaagggaagggagagaatgagataaaagaaaagttgtattatttcagaattcagtccaaccaggaattgtactraagtcagacttgacctcaagccattcaaataagaaatacaacaagaatagaaacttcagtaggctgtgaaaaatttctggatgacacttacaacttatag

SEQ ID NO: 223068 - DNA, 408 bp, Homo sapiens
cacattgcacaaaatgctttataaatgatttgttttttgcttttgcttttttagatacctgctactctttaggaaactgtaattactatagtaagaagtgagacatttcttaagagctttaaatccatcttttctggcttaataactactaagcacttaaggtgagttgcttgtggggaatagcatccagtcctcatgttaccgcagtggggctggcagtcagggtaaatcaacaaagggaagggagagaatgagataaaagaaaagttgtattatttcagaattcagtccaaccaggaattgtactaaagtcagacttgacctcaagccattcaaataagaaatacaacaagaatagaaacttcagtasgctgtgaaaaatttctggatgacacttacaacttatag

SEQ ID NO: 223069 - DNA, 458 bp, Homo sapiens
agaattcaggttatagaagggtaaatggataagatgaccattaagattttgttgttggaccgggcacggtggctcacacctgtaatcccagcactttgggaggcctaggcgggcggatcacgaggtcagatcaagaccatcctggccaacatggtgaaacctcgtctctactaaaaatacaaaaagtatctggatgtggtggcacgtgcctgtagtcccagctactcgggaggctgaggcaggagaatcgcttgaacccgggaggtgaaggtcgcagtgagccaagattgagccactgcactccattctggagatagatactcaaaactttttttaaaaaaggttttgttgttgatttactgacaggctgtaagtccagcaggtgcctctgttggtaaagccgcaaaagggctgatggggctacwtgaggaagaacggaaagaaactgcaaaagattg

SEQ ID NO: 223070 - DNA, 557 bp, Homo sapiens
agacttgtaaatagataccatatttactctaattaataattattattaaataataattaataatattattgttattattgttattattattaaatagaataatgtagagacagaattgaaatatagatatcatggaatgataggcaaaaatataaagtatgttagaatactataaaacacaaaggatcaatacagaagattaatttacatttaaaatgcatttcaaatagaggtggcgcacatcaacacattaattcacaccctttcgttttcattttttcagggaaggggtctcattatgttgcccaggctggactcagtgactcaaatgtctgtgctcaagggatcctcctgcctcagcatctcaagwagctatgactacaggtgcatgtcacccatccagctcaatcacacatcagaccgctaaaaataaggatactagtctcaaagctaaattttattgttgtcaaaattttcaacatcagtactaaaaacctagaggaatatagatgagcatttaaaaaattctgtccagctaattctctccagtgttcatt

SEQ ID NO: 223071 - DNA, 569 bp, Homo sapiens
ttttaagtttatatttgatatggttaggctttgtgaccccacccaaatcttatcttgaattataatccccgaaatcttcaggagttgaggaaggagcctgttgggagataactggatcatggggatggtttccctcatgctgttctcatgacagtgagttatcacaagatctgatggttttataagtgtttggcaagttcttccttcactacttttctctctcctgccaccatgtgagaaggtgtaagcttgcttcccctttgccttgtgccgtgattgtgagtttcctgaggcctcctcaccsaagtggaactatgagtcaattaaaactctttattttataaattacccagtcttgggcagtatttttatagcagtgtgagaatggaccaatacagtattcctattatacagcatcacttccatcattccccacttcccctcaaaggaaactatggtatgacttatgctagcaggactgtccatgtagtgaagtcttgagaaccagattggaagcaaacacttacttcttgatgtggagtgaaacatcatagtgcaggagtgaactg

SEQ ID NO: 223072 - DNA, 629 bp, Homo sapiens
aagcttcctttggccatgtttcctgctggatgaacaaaattctcacagaggaagaataaatggcatcagtggccacggggaagcatgaataaatgatcatagcgagtatgaaggccgatggtgtctgkgttgctgttcaaactccacgtttcaccacagagaaaatgtgagtttccctgaatcataagttctcatgaaagctaccctgatatatatccattaaattcaaattgggcctctgttacttgaaaccaaaagtgctctcactcatacaactcaaactaaatattatataaattgtttattaatgaccatgaaaacctacacagcaagcagtctcagtgtttacctttttaaaaatttcttacatttatttatttgccagatgttcaaaaccttcttcttcagtaagaatttaattcttcaatctcctcctcttttatacctaagttgttttcttccctgaaaaatcttcctgtatcattaaactgtcttttacctgccctttttttcttctgtttctagggaagattccagtgttctagtgaagactgttttcagactaatcacatcgccgttatccattagaataaatgacttctattgcctctggggccgccagtctcatt

SEQ ID NO: 223073 - DNA, 542 bp, Homo sapiens
agtcatattttagagtggcaatattttaatcttgataattacaaaggaattaaggaggatattatgtatatcttattgatgtaatttcaaatattatttttctttttgaattattgaactgtaactctaaaaaatgattactattgatacatcctccaaaatttttccagacagttaatatttctaatattgtgmatcaaaggtacaaaatcaaagatgaaataaatgagaatataagtcattgcactgaaaatcatgatgtgtgaatgttagacctaactcttctacacaaaaactcacaaggccttcagcatatcacttaagctttttacccctcttctaatttttgaggagagagtgagtatgcaacaatgtaagaagtgagaaactattttcttcagggacatttttattccagagcctttattctataaatttgtctttttatatcatattaaattatgtagaaaaacattaagtagaaaagaccgattattataaaattgtggaaagaaattggtagttgcctatataacattaaa

SEQ ID NO: 223074 - DNA, 468 bp, Homo sapiens
agctcaaaaatccagagtttgttctgtttttggctagatgtttataggtaaatttcatggtaaaatgtttctatttcatgcacaatttcactagagtttcaaaaaaaaaataaaggtgggttatgataatttggatgacaagggtatgtaagaagatgaaatttagtttggtgtctaaaggcttcctattttgagtatcatgtacaattctgtgcagtaataaggattactctacttttagaggattgcctacaaaataaaacttcccctctcctttcatgcattttatagcaagagttttkaacgtgtctttatttccagttcatgtggtgtgtaacatcaatcattattggaaagagagctagaaagtgcctctgaaagacaaaaaaggtcatagaaacttcatatcatcaccattacaaaagtcagattaggttgccttttctgaaatagattacttttaagacc

SEQ ID NO: 223075 - DNA, 592 bp, Homo sapiens
agtccactgcctttggcatatcaatcctgattccaaattttgcatcttaaaaactggaaattaaaaatgtgtattcaaatatccatttgactgcttcccattaaaagttamattttacagcaacaaaattgtgttgcatatagtatatacatatcaaaataaaacatatttgccaactttatcatttcttttcctaatcctgattctgtatgacatattgctattttgataagcactgaattttaggtttctttttaatgattctaaattaaatcagttcaacaataaacaaataaaagaaacttcctttgatctaagtctttcctacttttcaagaattttctcccagtactctacctcaaaatggttgcagttttccaggctacacaaaaccatttcttatgagcaaggctgtgatcatgatttctcacgtggccagctggtaccttctccctttggtcctcctctagatggcattcctaggaacatctataacctgtctcttctcccattcccctacttgtccatgccatcccactgaggtttgttttgccaccactacctctgctgccataagggcatgtagttgtgt

SEQ ID NO: 223076 - DNA, 592 bp, Homo sapiens
agtccactgcctttggcatatcaatcctgattccaaattttgcatcttaaaaactggaaattaaaaatgtgtattcaaatatccatttgactgcttcccattaaaagttacattttacagcaacaaaattgtgttgcatatagtatatacatatcaaaataaaacatatttgccaactttatcatttcttttcctaatcctgattctgtatgacatattgctattttgataagcactgaattttaggtttctttttaatgattctaaattaaatcagttcaacaataaacaaataaaagaaacttcctttgatctaagtctttcctacttttcaagaattttctcccagtactctacctcaaaatggttgcagttttccaggctacacaaaaccatttcttatgagcaaggctgtgmtcatgatttctcacgtggccagctggtaccttctccctttggtcctcctctagatggcattcctaggaacatctataacctgtctcttctcccattcccctacttgtccatgccatcccactgaggtttgttttgccaccactacctctgctgccataagggcatgtagttgtgt

SEQ ID NO: 223077 - DNA, 509 bp, Homo sapiens
taaaacgccttcaatttgtgttatctatccaaaacacaaattcaatcatatcattcccctaattraaaatcttccaatggaaaaaaaatttcccagtgatttattgttatctacaatataaagttcaaattccttaattatatcacagagggcccttcttgagctggccggttcctatatttcaagagcaatctcacaaccccgattaatagatatatcctaatctccagccaggccaatttacaatccatgaaaaataacattttttttcacattctcattctaggcctttgcatatttatgtctgcttattttgctttcatttcagaagctttaaattcattaatgtagatgtatcctttgccattgctacaaagttaagataaagaataacgaaaattgcaaaatgaataagagaagtgataaaataaaaatagagcaaggcagtaaagtatgtaaaaagaacttctaatgaccacatcaatatctgagcagataaatttgatttc

SEQ ID NO: 223078 - DNA, 563 bp, Homo sapiens
taattctccagagttctggatttcccctggatgattgactttaattattatgtatcttctgtgtatatcatccatatgtggaccattcccaagtgggtctgaatgtgacagggcccctaaaatttaacatatccaaacatgagcatgatcatgatctcccccatatcttagctccctgtcracttccctatttccctgtttcctctgtgtttaacggcatgttcagcaaagtctgaaatctgggagtcatcctctgtttctgcctctctgcagcttccacatcaaccaatggccgagtctctgtcttcacgcagacatcccactctcactccccttttgcatctctctgccatctctcccctggactattagaaccatgttataattgtttctctttagttccttctctatcctgctgccagttacatttctaaaatgcaaatctatgttacgctcctgtctaaatccttcagtagctcctcattgtaccagattgctcctaacatcttcatttgaatcctttgtgatctagcccctgcctgcttgtccaggcttatccctca

SEQ ID NO: 223079 - DNA, 563 bp, Homo sapiens
taattctccagagttctggatttcccctggatgattgactttaattattatgtatcttctgtgtatatcatccatatgtggaccattcccaagtgggtctgaatgtgacagggcccctaaaatttaacatatccaaacatgagcatgatcatgatctcccccatatcttagctccctgtcaacttccctatttccctgtttcctctgtgtttaacggcatgttcagcaaagtctgaaatctgggagtcatcctctgtttctgcctctctgcagcttccacatcaaccaatggccgagtctctgtcttcacgcagacatcccactctcactccccttttgcatctctctgccatctstcccctggactattagaaccatgttataattgtttctctttagttccttctctatcctgctgccagttacatttctaaaatgcaaatctatgttacgctcctgtctaaatccttcagtagctcctcattgtaccagattgctcctaacatcttcatttgaatcctttgtgatctagcccctgcctgcttgtccaggcttatccctca

SEQ ID NO: 223080 - DNA, 595 bp, Homo sapiens
tggatttcccctggatgattgactttaattattatgtatcttctgtgtatatcatccatatgtggaccattcccaagtgggtctgaatgtgacagggcccctaaaatttaacatatccaaacatgagcatgatcatgatctcccccatatcttagctccctgtcaacttccctatttccctgtttcctctgtgtttaacggcatgttcagcaaagtctgaaatctgggagtcatcctctgtttctgcctctctgcagcttccacatcaaccaatggccgagtctctgtcttcacgcagacatcccactctcactccccttttgcatctctctgccatctctcccctggactattagaaccatgttataattgtttctctttagttccttctcyatcctgctgccagttacatttctaaaatgcaaatctatgttacgctcctgtctaaatccttcagtagctcctcattgtaccagattgctcctaacatcttcatttgaatcctttgtgatctagcccctgcctgcttgtccaggcttatccctcaatatggtttgaatgtctgtcccctccaaatctcacattggaattcaat

SEQ ID NO: 223081 - DNA, 595 bp, Homo sapiens
tggatttcccctggatgattgactttaattattatgtatcttctgtgtatatcatccatatgtggaccattcccaagtgggtctgaatgtgacagggcccctaaaatttaacatatccaaacatgagcatgatcatgatctcccccatatcttagctccctgtcaacttccctatttccctgtttcctctgtgtttaacggcatgttcagcaaagtctgaaatctgggagtcatcctctgtttctgcctctctgcagcttccacatcaaccaatggccgagtctctgtcttcacgcagacatcccactctcactccccttttgcatctctctgccatctctcccctggactattagaaccatgttataattgtttctctttagttccttctctatcctgctgccagttacatttctaaaatgcaaatctatgttacgctcctgtctaaatccttcagtagctcctcattgtaccagattgctcctaacatcttcatttgaatcctttgtgatctagcccctgcctgcttgtccrggcttatccctcaatatggtttgaatgtctgtcccctccaaatctcacattggaattcaat

SEQ ID NO: 223082 - DNA, 585 bp, Homo sapiens
cttcactgatgatctcctggacataaggcatgagctctgccgtagcctcgatgcaatggaccctacaggaaacattgctctatttgtagttctcagttggtttccagggaaggcagtcaggctccaagaaaggaaaaagagacaagtaaagggtgattaattgtgaacagaggaaataaaaataaacttgccataaaataatcctggcagtttgcacagaaacagctgtcacttgtaccttctggcctgatgcaaagcttaccacttagagcattgattcattcaaagagcatttaattcttcaaatacatttctgcttttatttcattggcaaataraaacaagaatatgcagtaaaccttgtaataaggaattgacagaagcatgttagaacttgaatgtggacctattgtagatgatttggtgggtttgaaaaaatacaaaatgtgtcagtaattgttctatgttttatattatacatatttaaaaaatcaatggtgcttttatgaaatattttagaaggttataaattcatggtcaaatcaatatatgcttctgtattaaaatgtcctttgaaaactacaa

SEQ ID NO: 223083 - DNA, 585 bp, Homo sapiens
cttcactgatgatctcctggacataaggcatgagctctgccgtagcctcgatgcaatggaccctacaggaaacattgctctatttgtagttctcagttggtttccagggaaggcagtcaggctccaagaaaggaaaaagagacaagtaaagggtgattaattgtgaacagaggaaataaaaataaacttgccataaaataatcctggcagtttgcacagaaacagctgtcacttgtaccttctggcctgatgcaaagcttaccacttagagcattgattcattcaaagagcatttaattcttcaaatacatttctgcttttatttcattggcaaatagaaacaagaatatgcagtaaaccttgtaataaggaattgacagaagcatgttagaacttgaatgtggacctattgtagatgatttggtgggtttgaaaaaatacaaaatgtgtcagtaattgttctatgttttatattatacatatttaaaaaatcaatggtgcttttatgaaatattttagaaggttataaattcatggtcaaatcaatatatgcttstgtattaaaatgtcctttgaaaactacaa

SEQ ID NO: 223084 - DNA, 596 bp, Homo sapiens
taaaaatctttaaaaacagttaagaagtactgttttaagagaaagatagatgttttatagtatgagtcaagttaatagactttttacctaaacatcgcttggactagcctgaatattacattttcatttattgtccaattgtctgtttatgaaatgttcttatctgaataatagaagtaaatttgaggccgggtgtggtggcccatgcctgtaatcccagcactttgggaggtcgaggtgggcagatcacctgagatcaggagttcaagaccagcctggccaacatggtgaaaccctgtctctactaaaaataaaaaaattagcgaggtgtggtgatgcatgactataatcccagctactcaggaggccaaggcagcagaatcacttgaactcaggaggtggaggttgcagtgaaccatgatcgtgccactgaactccagcctgggcgacaaaacaatattcatctaaaaaaaaaaaaaaaaaaagaactaaatttgaaagctattgttcaagtatcctaacacttayggcaatagctggcagtagacttttactaaagacttcctgtacttttatgagccaaaaatgaaggaatg

SEQ ID NO: 223085 - DNA, 422 bp, Homo sapiens
aggaaaaactttagacaaattaaatttaacacagcttaattgagcaagggacaactcaagaatcaggcaactcttacaaccaggagaggtttaatgagactgtagaactgccaagtggctggataacatttatagacaggaaaaaggaaatgatgtacagaaaatagaagtgaggtacagagagagctggactggtttcagcttggcatttgccttattggaacccagtttgaacatttggccacaaggaattgactgaagcttggcttctgtgattggctgagacttttagctctttgttaccrgaatatactcctaaattaggttttcagtttgtgtatggactaggctaggttgcagttctttacataggatttccacagaggcctctaaagcccacatttagtttgatttaacactat

SEQ ID NO: 223086 - DNA, 473 bp, Homo sapiens
tctgcctcatcttctcagtgctgtgtttgcrtgatgggatttttgtttctaagcagactcagaggccctatctttacaggactgaacctctctgctctgtgacctggagcaggttccaggacctggctggtcttcggtcaggctccgggagagcagtgaagtccctgtctctatttcgtctttgcatatgcctcccctccacaaagaaggcacccagggactaatttacactgggaccaggacaaacttgggagtgaagcagtgacagcacgatgtcactaaagatggggagagaatggagggcagggaagacaggagagcagggcagcaggtcacatgcagagcagcaaagaggcaggaggaacagaagggtgtgagccatatggaacagggtgtgggatcattaccaactaagaaaccacaatggtgctgggggcattgttgaaaccacctttgcaaaattatgactgaga

SEQ ID NO: 223087 - DNA, 546 bp, Homo sapiens
actttccacagcctatttctttgcactgaatgattccactcttaggatgaaatgtgcagtcttcttgatccaatattgtattgatttgaagtgtccattccaagtggcttccagaaggaagtaaaacractcaaattaaaaaatatctccattctttcttgcttatgttctttgatcaagttgtctttgtgctcttatgaaatggctacagcccagtcctcacagcccaacataagtttgccaaaagatactctgggaatcctaaatggttatcaatgatgtcacctgataggcagcattagatgtccacacgatgcacttagaacaaacacttcctacatacaatgacactcattttctttcgttttcctcttctcttcttttttcctccctacatcatctttagctgagaaggtagtaatgctgcagacgagctctccttatcaaatgtatcaggcctggacacagctgtgtgggaagcaaggctgcttgcgatgtcagccgcctccaggatctcctgggtcaaaaggacttattttgcagttg

SEQ ID NO: 223088 - DNA, 563 bp, Homo sapiens
taaaaacagacacacagaccagtggaacagaacagagagcccagaaatagatctttgcatttgtggtccattgattttcaatgaaagtgccaagaacacacaatgaaggaagggcagtctcttcaataaatagtactgagacaaytgtatatccacttgcagaagaacaaaattggacccttatctcacacaacatgcaaaaatctaaccaaaatggattaaagacttaaatgtaggacctggaattgtaaaactactagaagaaaacataggggacaagctccatgacattggtctgggcaatgattttttttggatatgataccaaaagcacaggcaacaaaaacaaaattagacaaatggaattgcatcaaactaaaaagcttctgcacagcaaagaaaacaatggagtgaggggacaacctatggaatagaagaaaatatttgcaaaccacacatccaataaggggttaatattcaaaatatataaggaacgcaaagaactcaacagtaagaaagcaaataaccagactaaaaataggcaatggatatgaatagatatt

SEQ ID NO: 223089 - DNA, 565 bp, Homo sapiens
atttggaaacagtattccaaggatcaatactacctcctctgagtccatctctagtcttctcaatatgccttccagttttcctctcctctgacctccagatataacccagatgcaatttggggcgccctaactccttggagtgaaaggtaaatgctcaatttcccagcttttgtgacttcagcatcttcccccaatgttttctctgagtgcttggtcttggtctccacttctgcatctgtgtacaatgatttaattcagctttgtgctgattgttatgcagatctgggctctgatactattttactatgttaaaaacccaatcacactcatgttttcatgaatttaataacttccatgaagattcagaaagattcagggaaagcttgactcacagatcacaraaacatctgcagttttgctgtctccttgccttggggagcccacatttcccaatgtgagcaacgcacagaggcagcccatctcccccaacacccctcttgtgggtagaagctctgccaaacacactggccttcccaagccctcatgattttctgaaagatgatag

SEQ ID NO: 223090 - DNA, 592 bp, Homo sapiens
gtcaattgccctggtcacccaccccccatctcccaccccacctaatgtaccaaaacaagacattttgaaagtataacctaagatatttatttcaaacttcgatgaagtcaagattaatctctgaggcccctgtgagctgtaacatcttgtagttttataaaagagatgtgtagggtggtcagtgatggcttcacagrtgtgtaacctgagaaaccacataaggctctgcacttagaaggcaccatgcttagtataatgctctggtgttgttgtttcaaaatttctaataattttcaaacaaccctcctccccacacacatattttcattttgcactggatcttacaaattttgtaaccaatcctgggtatagtatttttgttgcaagttttagaacaaattctgtgactgtgtacttggagaagcaactaacttttcttgcatataagattagatgagggtgaaccagttacaatcaaagggtcttcatgaaacttgatctttaatattgaacttcctttaatatttgtaacatgaaaattatggtctgtttttaattgatttcaatgagacattctgcgtcttacagcaga

SEQ ID NO: 223091 - DNA, 534 bp, Homo sapiens
tatggtgaaatatttaacaccctctgtgcatagtcaggaacaaggtaaagtccaccatcaccattttattcrcaccatattaaagtcctagtcaggtgttactaagaggttcataagagcctacattgcctgagaatatgtaacatacttaaaaacaatgtatttaaaaattataaaatgtttctaggataatataattaaacaaaattgactctagactcattagaaatttaaataggtcaattttcataggaagagttgttaatggcatctttatcaagagtatcagatctagattgttttaaggtaatgtctataaaatttgtttaaaaaatattttatttattattttgatttttagaacttttattttaggttcagaggtacatgtgcagctttgttatataggtaaacttgtgtcatgggaattcgttgtatagattatttcagcacccaggtactaagcctagtacccagtagtaattttttctgctcctatcccttcttccagcctccaccctccaattgtccaca

SEQ ID NO: 223092 - DNA, 534 bp, Homo sapiens
tatggtgaaatatttaacaccctctgtgcatagtcaggaacaaggtaaagtccaccatcaccattttattcgcaccatattaaagtcctagtcaggtgttactaagaggttcataagagcctacattgcctgagaatatgtaacatacttaaaaacaatgtatttaaaaattataaaatgtttctaggataatataattaaacaaaattgactctagactcattagaaatttaaataggtcaattttcataggaagagttgttaatggcatctttatcaagagtatcagatctagattgttttaaggtaatgtctataaaatttgtttaaaaaatattttatttattattttgatttttaraacttttattttaggttcagaggtacatgtgcagctttgttatataggtaaacttgtgtcatgggaattcgttgtatagattatttcagcacccaggtactaagcctagtacccagtagtaattttttctgctcctatcccttcttccagcctccaccctccaattgtccaca

SEQ ID NO: 223093 - DNA, 571 bp, Homo sapiens
gctgcatagttaattgttcattttctgtggattgaaaagtggcaagagttataactccatattgattcgtggtcaatggctattggctgaatagttaggaatttaggaagaacgaaatttcatgactgccatgaggaaatatgggaaaggtgtatgtcaatggacctgccagatgaagtacagagtgggaagactgttcatcaaagggcatttgtctactcaggtgtaaaaaaaaaaaaaaaaatgcccaggagctctcacccagcttctgtccccagccacccagtatgtaaccaatgggccaaagtacaaaatgtmtatgatggcagaaatgggtactatttatagactccatacattgactcaccttcactgaggctgctctgaagaccgccactgttctgttcaatagttaatgggcccacagcagagacaaatttttttggtccccagtataacctcatgtctagaagggctagccactcattttttagcaagttgattatattggactttccagcaattagaaggtagcattttgtcctcattggaataaacttgtattgtggag

SEQ ID NO: 223094 - DNA, 571 bp, Homo sapiens
gctgcatagttaattgttcattttctgtggattgaaaagtggcaagagttataactccatattgattcgtggtcaatggctattggctgaatagttaggaatttaggaagaacgaaatttcatgactgccatgaggaaatatgggaaaggtgtatgtcaatggacctgccagatgaagtacagagtgggaagactgttcatcaaagggcatttgtctactcaggtgtaaaaaaaaaaaaaaaaatgcccaggagctctcacccagcttctgtccccagccacccagtatgtaaccaatgggccaaagtacaaaatgtctatgatggcagaaatgggtactatttatagactccatacattgactcaccttcactgaggctgctctgaagaccgccactgttctgttcaatagttaatgggccmacagcagagacaaatttttttggtccccagtataacctcatgtctagaagggctagccactcattttttagcaagttgattatattggactttccagcaattagaaggtagcattttgtcctcattggaataaacttgtattgtggag

SEQ ID NO: 223095 - DNA, 538 bp, Homo sapiens
gttctctggtggtatgatttaatttctaactgtattttttgtgtgtaagtgtttctgggtttgaccttaccatgaaacttgcaaatactgtctcataacccattatcttaagctgataacaacactgtttgtataaagatacaaacaagcaaaaagaaaagaaataaaaaactatgcaccttgacttcttctccttsttgttaaccttttgttgtttctatttataccttactgtatatgtcttgaacagttgttgtagttgttatttttgattggatcatcttttaatttttctatgtaagataagttataacaatctgtgattttctgcgtacttactattatcagtgagttttgtaccttcagatgatttctcattgctcattaacgttcttttctttcttattaaaatactccctttagcatttcttataggacaggtacagtgttgacaaaatcactcagcttttgtttgtctgggaaagtatttcctcatgtttgaaatatatttttattaaatatactattctaggtaaaa

SEQ ID NO: 223096 - DNA, 618 bp, Homo sapiens
taaatttgattgtaaaaatggtgtgactcagtctagccttttgataataaccactcaaaggatagtttattgctggttgctaatatctagtgtgactcagttttggttaacacttcaaagtggttgtgtcatttttgtttgtgtatgataagaatgaaayaaaagttaaacatataattctcttttatcaattacacatttccagatatggaagggtgcttaaagctaaattctctctgccaaccaatgtattttgaaattttgtggttcgtgatttttgactcaatcacctactattaagtttctttttgtttactaagttaacctgacgcatttttacttatagctttccaaaaataatcaataaaacacttatgcttgagtcaagaataaggatctttgttaaaatagcaactaccagaatatatatttcgggcatgggaatgaatatactttattcaaattttcatgatataagcaagagaagagatgtctacggaggaaaatcaggagtttccatttacataatttattaaattctctacgaatatctcataaaataggaaaataattagtgaattactcttgatttttttgtttgaacattaaatatctatg

SEQ ID NO: 223097 - DNA, 584 bp, Homo sapiens
tttgctaattatgagtagggagatgtttttgtgcagctgtatgtttgtctatacccatgtagtgttatcaatgaccagctttgtgaatgcatgttagagtttacagtttcagtggcttgccttatgaaaacatgctaataaaatatgagtagcaacaaaaagggctattttcccctcctttccatacaacaaatagwggatcctcctgaaaatctgtagatccttcatacgaagcgactgtacctgccatatttctaatggagtctgattaggaggatgaaggatattatctgcattgtagtcaaaaaagtggatcttcctgagtctttcccaatttaggtttagggaaaaacctatgtttttagctgagtaaaataacaagccagttttttctactttatttttccattttctaaaagctgaggaggattaggaactggtgctaggtgaaaagcatattgattttatatagtgtcttaaggcaactaaacatgaaccctctttccagagcttgagttcatcttttgtacttacttcttttgaaatggaaatatacaaccataaattctggccttactatacca

SEQ ID NO: 223098 - DNA, 545 bp, Homo sapiens
atgaagtcaatcaaggctcaaactagacaataaaaaataaaagataatccatrcaaacagatctaaaaacagtcctgagagaacatctttgtggccccgtgataggcaaagatttctcaggattcaagtagcactataaagcgaaggaaaaaaataaataaataaattggacttcatcaaaatggaaaattcttcaggaaagacaattaatgaaataaaaaggcaagccaaaacaaagagaaaatatttataatacgtgtgtctaacaaagcaaggtgtccagatcatattttttaaggtcttacaactcaataataaaaagacaaacaaccaaattgaagactgggcgtgaaggaacttaactggaatgacaatcatataggtgtatattttggtcaaaactcaccaaactatacagttaaaagctttgtcttttattgtatgtaaattatatatgcataaaatataaaatatataaatctcactaatattcttcagtttactaacctctattcctactgtgaaattgaagttctaggagcgaa

SEQ ID NO: 223099 - DNA, 545 bp, Homo sapiens
atgaagtcaatcaaggctcaaactagacaataaaaaataaaagataatccatacaaacagatctaaaaacagtcctgagagaacatctttgtggccccrtgataggcaaagatttctcaggattcaagtagcactataaagcgaaggaaaaaaataaataaataaattggacttcatcaaaatggaaaattcttcaggaaagacaattaatgaaataaaaaggcaagccaaaacaaagagaaaatatttataatacgtgtgtctaacaaagcaaggtgtccagatcatattttttaaggtcttacaactcaataataaaaagacaaacaaccaaattgaagactgggcgtgaaggaacttaactggaatgacaatcatataggtgtatattttggtcaaaactcaccaaactatacagttaaaagctttgtcttttattgtatgtaaattatatatgcataaaatataaaatatataaatctcactaatattcttcagtttactaacctctattcctactgtgaaattgaagttctaggagcgaa

SEQ ID NO: 223100 - DNA, 576 bp, Homo sapiens
taaggtcttacccaaaactactgaggcagtaccttcacaagtctgcaagagtcacagtgttactggacttggagcagataaggccacagtgaccaaataattagacgacgacactcaatttactttgaatacttggaaagccttcctaaataggataggtacaaacaagcccagactgcaaagactacaataaatgcctaactcttcaatgcccaaacagcaatgagcatttgcaagcatcaagaccatggaaaacatgacctcaccaaacaaagtaaagcacccatgaccaatcctgaaatgacaaaggtatgtgacagttcagacagagaattcaaaatacctgttttgaggaagctcagtgaaatccaagataacacagagaaggaattcagaatcctatcagataaatttaacaaatagattgaaataattcttaaaaaccaagcagaaatyttggaactgaaaactttaattgacatgctgaagaatacatcacagtctctcaacagcagaactgatcaagcagaagaaagaattagtgagcttgaagataggctgcttgaaaatacacag

SEQ ID NO: 223101 - DNA, 491 bp, Homo sapiens
ctacaagaaacacacatagaccaatggaacagcaaagagaacccaaacacatatccatacatttacagtgaactcatttttgacaaagatgccaagaacatatgctggggaaaggagagtctcttcaataaatagtgttgggaaagctaaatatccatatgtagaagaatgaaactagaccyctgactctcatcacatacaaaaatcaaatccaagtggaacatataattaaatctaagatctcaaactgtgaagacactggagaaaccctccaggacactggactgggcaaaaagattttgagtaataccccacaagcacaagcaaccaaggcaaaaattgacaaatgggatcatatcaagttaaaaaacttctgcacaacaagggaaaccatcaacaaagtgaagtgaccacacacagaatgggagaaaatatttgcaaattatccatctgacaaaggattaataatcagaatatatgaggagctcaaa

SEQ ID NO: 223102 - DNA, 544 bp, Homo sapiens
gaattaaaaagaaaattttatattcaagtgctatttcttttgtggcaccaagactttatttataacaagaggttctatatgcttttgtcccatgatcttgaattggagaaactcatttgaacctcttaaatgattgtcataagctctacartcttgtcatagaaacacaacgcagcctggagcatgccctctggggactacaagactgccagtgagaggccttgcatctggaacattcaggattttgaaaggagttagccagcttgcttcaggcacactgcaaagggagggcccctggagagcctccgccccacctctcaggtgcttgcaccggatgttttcttcacataaggcaacttgcaaagggggcttgcctaaatatgcccacagtggactaagggcccacatgtacactgggggaatggggtggagctaccaagaattcacaccttacacaaatagggaacccagccccatcagcttatatataaaaaagccctggcattctactgtaaagggggcaaccgggaacctgctttcagga

SEQ ID NO: 223103 - DNA, 550 bp, Homo sapiens
aggtaaaaaataaacttgcattcttcaagtctgtttgtatagcattcttgcaactcattgtgcttttatgaaatggtgtttgggtgttcccttgattttccttgttgtttatgttattaatgagacacttataaattcttgtacaagggagctaagaagtataaatgttatgtgggtggtatgcaatcagkatatatatgaatgaccacttttaagagtgggaatgatcagactgatttctccatgttattatgttaattaattcacatcataaagttttagtccatttccttttattaagaaaacttaagacacttggcatagagatttagatttaaatataggacagggtcaatggtcacatcatagccagacgataggagcaaagcagaaatccttcctcaaaactagtagcaaactagttaaagaagaggaagttgcatgaaacacagaaggtaaagtgaatatcaaggttatgtagctgttgtgaataaagctgttttaattttctgagttagggctcctttagtttcagatgacatattcacaa

SEQ ID NO: 223104 - DNA, 550 bp, Homo sapiens
aggtaaaaaataaacttgcattcttcaagtctgtttgtatagcattcttgcaactcattgtgcttttatgaaatggtgtttgggtgttcccttgattttccttgttgtttatgttattaatgagacacttataaattcttgtacaagggagctaagaagtataaatgttatgtgggtggtatgcaatcaggatatatatgaatgaccacttttaagagtgggaatgatcagactgatttctccatgttattatgttaattaattcacatcataaagttttagtccatttccttttattaagaaaacttaagacacttggcatasagatttagatttaaatataggacagggtcaatggtcacatcatagccagacgataggagcaaagcagaaatccttcctcaaaactagtagcaaactagttaaagaagaggaagttgcatgaaacacagaaggtaaagtgaatatcaaggttatgtagctgttgtgaataaagctgttttaattttctgagttagggctcctttagtttcagatgacatattcacaa

SEQ ID NO: 223105 - DNA, 550 bp, Homo sapiens
aggtaaaaaataaacttgcattcttcaagtctgtttgtatagcattcttgcaactcattgtgcttttatgaaatggtgtttgggtgttcccttgattttccttgttgtttatgttattaatgagacacttataaattcttgtacaagggagctaagaagtataaatgttatgtgggtggtatgcaatcaggatatatatgaatgaccacttttaagagtgggaatgatcagactgatttctccatgttattatgttaattaattcacatcataaagttttagtccatttccttttattaagaaaacttaagacacttggcatagagatttagatttaaatataggacagggtcaatggtcacatcatagccagacgataggagcaaagcagaaatccttcctcaaaactagtagcaaactagttaaagaagaggaagttgcatgaaacayagaaggtaaagtgaatatcaaggttatgtagctgttgtgaataaagctgttttaattttctgagttagggctcctttagtttcagatgacatattcacaa

SEQ ID NO: 223106 - DNA, 590 bp, Homo sapiens
taatgaagcagacaatcctaatcaaacaatataataataaaagtgaaagtactttaatttttatatatttagtagaacagtttacataatagaatcagaggctttaaatactattagggattagagaaataatccaatcaaaatcttttaacatctctgtaacttcaagttctttttagtttagtaatttagccaaaagcctacaactaatttyggtagaaaaaagattgaaatccagatcttatgagctattcaatacatcttcaaccactatagaaagtgccctaaacattgagtgacccattaattgtgtgggctcaaaaactaggtaaatcaaagtgtcacttttacaatataaactttatgagaaaaccatctgtatgctagtgatggcatacttgagataattctgtaaagaaaatatatcaccagagactctcaatatatgaagacaatgtatgtttttgaaaaacgaatataattttgataaagtatagtttttaaaaggaagtgaaactttgttaaatagatctaaagttaatttactcgtaattactcaattatgcatttgtagtttaatatatttattt

SEQ ID NO: 223107 - DNA, 567 bp, Homo sapiens
agaacaaagctcaaatacgtggcatatagaaatagacttgctgcaccgagttaatagaaacttgaaacatagagaaaaaaatcaaggaaggaataatagtaatagcttttcccagaactaaaaatgaaatttcagatcttgagatttcttgaattttaagcaggataaggaaggttcacaccaagatatcagagtgaaacttaagaataaggattttaaagatctgaagtcattcagagaaaaattagatggatggatagatagatacatagataggatagagatagatgatagatagatagatagatagatagatagatagatagatagatagatrgatagatatagatagatagatatagatgataggtagatatagattatagacagatagatagatagatagatagatagatagatagatgatagatagagatgatagatagatataaagacagacagcagatacacagatagatatatatacatatacagacagcccctgatttatcatggttcagcttaagatttttcaacttttcatggtgcaaaagccacaggcattaa

SEQ ID NO: 223108 - DNA, 540 bp, Homo sapiens
agaaatggaaggaggtggtcatcaaatgaaagccacgagatttccaagcctgaaagctaccctgcttctgtttctacaccagtggactctgaatattggatgaaatgggtaggtttgggggcccaaggatcaatgtcaataacatcttactcaacatagacattgtgctcagcagtcaggaatattgaggtagtttctcattttcgtaactcgagaagatatgtgattgttgartaattatacagtgaccatatatcacttggctacatgttcctgtatctttcttaaacagtctgctaggctggaattcccactgcaatgatgagtgatgattgttactatgactggactgaggccatgctgcaccctggaatgatcccttatgatttcagaggcttgccgaatatcaggtgccggtgagcaggtaaatctcacagacatatggcccatttgtcacctgaggcagagggactagatctcctttttagctctcataaagcatgttttgggacctagacatttttgatgcataaatcttgg

SEQ ID NO: 223109 - DNA, 419 bp, Homo sapiens
atctgaatgaaagaggctcctactcctgctgtcagaaccttaagttccccgaggtttcagaggttgaagagccagacatttaaggataaactgcctttatcctaactgcagagtatgattacatgggcgtgaggttcgggaactcagaaattgcagctttctgtgcagaggcaccaggagactcagccataggtggcayccagtctaacgaccattctgttcccgatgttcaggcccaaggacgtgggctgagatattttctccaactattcccacaggtgctgaaccagagccattttccaaaaccctcctggcctcccggacctgtgacgcttccggcagttgatgtgcaaagtctcgctacaaaaccagccccaggaacacagagccccatgtttcctccctgaaggacccagggc

SEQ ID NO: 223110 - DNA, 419 bp, Homo sapiens
atctgaatgaaagaggctcctactcctgctgtcagaaccttaagttccccgaggtttcagaggttgaagagccagacatttaaggataaactgcctttatcctaactgcagagtatgattacatgggcgtgaggttcgggaactcagaaattgcagctttctgtgcagaggcaccaggagactcagccataggtggcatccagtctaacgaccattctgttcccgatgttcaggcccaaggacgtgggctgagatattttctccaactattcccacaggtgctgaaccagagccattttccaaaaccctcctggcctcccggacctgtgaygcttccggcagttgatgtgcaaagtctcgctacaaaaccagccccaggaacacagagccccatgtttcctccctgaaggacccagggc

SEQ ID NO: 223111 - DNA, 419 bp, Homo sapiens
atctgaatgaaagaggctcctactcctgctgtcagaaccttaagttccccgaggtttcagaggttgaagagccagacatttaaggataaactgcctttatcctaactgcagagtatgattacatgggcgtgaggttcgggaactcagaaattgcagctttctgtgcagaggcaccaggagactcagccataggtggcatccagtctaacgaccattctgttcccgatgttcaggcccaaggacgtgggctgagatattttctccaactattcccacaggtgctgaaccagagccattttccaaaaccctcctggcctcccggacctgtgacgcttcckgcagttgatgtgcaaagtctcgctacaaaaccagccccaggaacacagagccccatgtttcctccctgaaggacccagggc

SEQ ID NO: 223112 - DNA, 592 bp, Homo sapiens
acattttggtatgctaaataaagcaatgcagggtacccttaacatctgatgaagaaatctaaaatgtgaaagtggatcatatctgtcagtgacaaagacaaatgaaacactttgttataaaagtttaatggagtaaaaatgaaaaacgtacactcattattgcatagmtcaatgggcttgttggaaaattgggtttgcttcctgagagcctctgcactccaactgggaccacagcaagttgagagaatgaattacagggaaggatggcctggggaaggcacatccgctccaccccttcctgcaggctcctactgtcagaaacacttacacattgctgttaaaacaagtaattcaaagttactgaagtccggcaacctgtacactgcctaaaattttcagcagcttccaggttgatggagccgcacctcagtatcacgtcatccatacccttcgtatatgttccttggaccccagcctcatggcacagccagggtcttcattctgtagcctgggcccacctgccaccaggcatgtatgtgtccctgccgatgtctggggctcaaactgatactctcccatgacaggggctaaa

SEQ ID NO: 223113 - DNA, 232 bp, Homo sapiens
gtctttccttctccaggattggcccctggggacctatttagtttatttggtgaggtcatattttcctggatgatcttgatgytggtaggtgtttgtcaatgtttgggcattgaagagttaggtatttattgtagtcttcacagtctgggcttgtttgtgccatccttctttaggaagctttccaggtattcaaagggacttgggtcccaagcccaatatcacagtggtttct

SEQ ID NO: 223114 - DNA, 488 bp, Homo sapiens
tttcttctactttctgtttgaggagttttaattttaggtcttacatttaagtctctaattgaytttctgttaatttttgtatatggtatgagatgaggatctaattatttcattcttctgtaggtggctatccagttgtcccaccatcatctattgaagaaactgtcctttccccattgtgtcaaaaatcagctcaccatatataacataatttatttctgggctatctatacttttccattagtctatgtgtctgtttctattgccaataccttgctgttttgattactgcagctactttgaagtcaggtaatgtgatgttcttttctgtctcttgtgaggatacctcctagtggatttaggactcattctaatcaggagtcattcaatttaatgatcccagtcttgattacaactgcaaataccttaacttcataaaggtcacattatgtgattccaattggacatatgttttatggagatacaat

SEQ ID NO: 223115 - DNA, 488 bp, Homo sapiens
tttcttctactttctgtttgaggagttttaattttaggtcttacatttaagtctctaattgattttctgttaatttttgtatatggtatgagatgaggatctaattatttcattcttctgtaggtggctatccagttgtcccaccatcatctattgaagaaactgtcctttccccattgtgtcaaaaatcagctcaccatatataacataatttatttctgggctatctatacttttccattagtctatgtgtctgtttctattgccaataccttgctgttttgattactrcagctactttgaagtcaggtaatgtgatgttcttttctgtctcttgtgaggatacctcctagtggatttaggactcattctaatcaggagtcattcaatttaatgatcccagtcttgattacaactgcaaataccttaacttcataaaggtcacattatgtgattccaattggacatatgttttatggagatacaat

SEQ ID NO: 223116 - DNA, 375 bp, Homo sapiens
ataatgatggcagtggctgttgccatcatgccagctgcagcaggtagtcatggctggggattgccactccatggagcaggtgggaaccccgccccttctgagttggggtgggagctccctgggtgctgatgcagccacccagttgcccaatctgtggctgcagacccaaaccctttgctctagggagcaggcaggagtcccaccctcctgggctrgcccacagtttgtggatctgagcctgcctatgctcttggcaggtgactgggaacaggcaggatctaccctcccaggtacagctgctgctgccctcccaggtacaggacacggtgtctttgtagcctgcacccttggggcctgggaagccctcctccccta

SEQ ID NO: 223117 - DNA, 539 bp, Homo sapiens
tgactcaatctctcttacttcagaaatgattgttattaaaatgtgtataatagactagtttaaagcagcatgaaattactgcagatattacagagattttagagtgaatagtccagttcatttgtttgttaattttggtggaagagtatgctcctagaatggaaatgtatttctgtgatttcctgaagtagtaggagaaattcagcatcattaaacacaaatgataggtaagcaaatcactgtagaaatctgagatcacaggtaaggtcgatgttcagatttctcaagtttttcatacaatgacatttatttgactgtatcttttattttcttaacaaattacaatggataaaaatacatgatcttgctttatgtgtggttttacatgatatggtggcacatgttggaattaaattttatgaacgagctggaagaggcacattcttccatgagkagaaaagtcatgttagtgtaaacattacatattgaagtggtgtatactgtcatctactatacttattcagagcttgctgatgtga

SEQ ID NO: 223118 - DNA, 603 bp, Homo sapiens
ccagactggtcttgatctcttgacctcatgatctgcctgccttggcctcccaaagtgctgggattacaggcgtgagccactgcgcccagcctcatatcttcttttgagaattgtccattgatgtccttagctyactctttgatgggattgtttgtttttttcttgttgatatgtttgagttcattgtagattctggatattagtcctttatcaggtgtatagattgtaaagatttttcccactctttgggttgtctgtttactccacttactgttccttttgctgtgcaaaagctcttacgtgtatttaagtcccagcaatttatctttgtttttattacatttgcttttgggtttttgtcatgaaatccttacctaagccaatgtctagaagggttttttccaatattacctttagaatatttatagcttcaggtcttaggtttaagtctttaatccatcttgagttgatatttttataaggtgagagagataaggattgagtttcattctcctacatgtggctagccaattatcccagcatcatatgttgaaatgggtttcatttacccgctttatatttttgtttacgttgtcaaagatc

SEQ ID NO: 223119 - DNA, 632 bp, Homo sapiens
tttgttactatcagctgataaaaacgtggacaatctttggtgagcaaactttcagttttggcagyttcactgttgtgtttgtgtgtgtgcatttatttcagcaagtaacttctactattacattttagaaaaataaagaaaacatggaaaaacccattgtaactaataataggtgtccttcttataaaattatggcaaaattgcattttcttccatgcttaatatggcataatttgaaccttaataggacatcactacatttcaacatgtaggctacaattcaatttaaaaaaatgatataattgaaaagcatatagacttacaggcataaaataatgcttaaaattatgaataattagtttttttgatttgatttttagttgttctttacaacagtgccatgaccatgaccaacatctacacataaccacaactttaaatctgttgaaatttaacagttggtttttttcagtcgctttcaggaataaattatatgtaaaagcagtgggctgctcagcaaacatgaatacataatcataaatgtaattatgcatgtccacatatatgcatgtgtacatagtcttaataatgtaggaaaaattcaaatttgaacttaattgtatcttgtttga

SEQ ID NO: 223120 - DNA, 459 bp, Homo sapiens
aactttggaaacatttttatttcaatcagaattttaaaatgatgccactgtgactactacattgaacatggttctgaagggcctagctattatttaaaaaaaagtcaataggacatatattaagtaaaaggaaaaataagtaaaaattatttgaaaatgataaatttctatgtagtaaatataaacaagtcacacaacaaaatacctgttagaatgaataatatttaattactgggtatgttgcatttttatttgaaaatgatgtaatccagcatataaacagaaccaaagacaaaaaccacatgattatctcaatagatgcagaaaaggcctttsacaaaattcaacaacacttcatgctaaaaactctcaataaattaggtattgatgggatgtatttcaaaataataagagctatctatgacaaacccacagccaatatcatactgaacgggcaaa

SEQ ID NO: 223121 - DNA, 559 bp, Homo sapiens
gcgtgtgccaccttgcctggctgatttttgtgtttttagtaaagacagcatttcaccactttggccaggctggtcttgaactcctgacttcaagtgatccacctgcctccacctcccaaactgctgggattacaagcatgagccaccgcacctggccctaaatacattcttgaaacacacatagcctcaaacttttctcaagcggttttgctattagagygttatggccataggaaaaaaacactgaacatcttaatcagtagacttcatcttgggggacagtcagagttacagaataattaaaaattaagtggaaaattaagagagttaccgtatgccccttcaacaccttctgcctttctcctgtaattgacatcctgcagtagcttaatacataagttacaattgatgagccaacattgacacattattattaactgaagtccatagtttacattagggttcattctttgtgttgtacattctatatgttttgtacaagtgtataatgacatgtatccaccattacagtagaatacaaaatggttgcactgcctaa

SEQ ID NO: 223122 - DNA, 592 bp, Homo sapiens
atgtaaatagttgttatactgtattgtttaggtgatgatgacaagaaaagagtcggtacatgttcagtatagaggaaaccatccttttttctcctaattattttggacccacaattgtttgaatccatgaatgtgggtcgcactgatacagagatccgaccatatttcaaaatttcctgaatgcgtgtaaaaaatgtatattctgggatttcacttttcaaaaggattcaaaatccttggatctcaagagggattctacatttttgacagagatcctcagttcttatgcagatgactagtggattacgttttgaaatatgctaatctcagtttgctactgataatacccataaggatttttttctttttttttttttggaggaaagggagagttggaaaggttgattgtctgcytgctttttgttgttgcttaaatatagtttgcccctgaaagtctggtaataaggataagcagtatatcatttagatcagatagccaggactgcactttagagggcccagctgtggctttcttctagccaaacccctttccacaggatgaggactcccagaagacatgtctacctgaagt

SEQ ID NO: 223123 - DNA, 448 bp, Homo sapiens
ggaatgatagcaatatcaggagtggctgctattgtgtaataaaggttgtgtattctttacccttgctaggtggaagtataacatcttctgaatcagcagggtgattgatcattgtgtccaagagctaggagaaaactgatctcaactacctccagcatctccgtcatattgtcatcaggaacaagaataacttaggaaggttaagcatttttaatgtttaaattgcattattataaatcaaaactcaaaatagatttctcttttatcccaaattttaagaatattgctatgttcattcattctaatagtgrctgttaacatgctatatgcaaatgtcacaataatgccaatttaaacagagctcactgtcattagaaatagttaaacaaagataccagaagtttcataatctaccgacattattttattagaaacccatattaaactt

SEQ ID NO: 223124 - DNA, 448 bp, Homo sapiens
ggaatgatagcaatatcaggagtggctgctattgtgtaataaaggttgtgtattctttacccttgctaggtggaagtataacatcttctgaatcagcagggtgattgatcattgtgtccaagagctaggagaaaactgatctcaactacctccagcatctccgtcatattgtcatcaggaacaagaataacttaggaaggttaagcatttttaatgtttaaattgcattattataaatcaaaactcaaaatagatttctcttttatcccaaattttaagaatattgctatgttcattcattctaatagtgactgttaacatgctatatgcaaatgtcacaataatgccaatttaaacagagctcactgtcattagaaatagttaaacaaagataccagaagtttcataatctaccracattattttattagaaacccatattaaactt

SEQ ID NO: 223125 - DNA, 548 bp, Homo sapiens
actcttggactcaagcgatcctcctgcctcagactctcaagtggctaggacttcaggtgcatgccaccatgcctggctaatttttttgttttgttttgtttttgtttttttagtagagacagggtctcatctcactatgttgcccaggctggtctcttttagggttagggttagggttagggttagggttagggcctcaagccaaatatgtatgcctgtaagcaatactatatcatatctctttcactgtatgtgagcataaatacatctatgcgtatgtgtgtatgtatatgtaaaaattcatgtacacatatatacatttgcttccctcctrtatggaaaaataccactaaagaatggcccacagtctagactgttgtacgaataaacatttctattctaactttgatttatgtacacgttgatgcctctatttatatgttacatatttccttatatgtctaaaagtattcatgtttatgtgtatgtctgtctttattcctagttagatcttttcctaggccctgtgtctgtgattcactccagac

SEQ ID NO: 223126 - DNA, 548 bp, Homo sapiens
actcttggactcaagcgatcctcctgcctcagactctcaagtggctaggacttcaggtgcatgccaccatgcctggctaatttttttgttttgttttgtttttgtttttttagtagagacagggtctcatctcactatgttgcccaggctggtctcttttagggttagggttagggttagggttagggttagggcctcaagccaaatatgtatgcctgtaagcaatactatatcatatctctttcactgtatgtgagcataaatacatctatgcgtatgtgtgtatgtatatgtaaaaattcatgtacacatatatacatttgcttccctcctatatggaaaaataccactaaagaatggcccacagtctagactgttgtacgaataaacatttctattctaamtttgatttatgtacacgttgatgcctctatttatatgttacatatttccttatatgtctaaaagtattcatgtttatgtgtatgtctgtctttattcctagttagatcttttcctaggccctgtgtctgtgattcactccagac

SEQ ID NO: 223127 - DNA, 536 bp, Homo sapiens
tcccatatgactttcccagtcacagattttccatttggtcactcactcaaccttcagcacagtcatatcttttgcagagctaaaaatagccattctatcaagtgggtagcgaaagtcccatttacagttaagaagataacttccctgagattatttaatggtgacaatgcatcagcaaatcaagatttggacaaaataaaggcacaaaatattccctgttgcatgaaatctatcattaattcttaatcgagtgaatagaagtgccagctctgaagtcagacctcatagatccaaatcctgaatgtgtccagctgtataactttgggcaagctacttaaccttcctgagcctgtttccacatctgtaaaatarggttggaaatagtacctatccatggatctcataggcatctttttgagcaaaagaagccgaaaatagtggagtatataatatatgattatatgaagttcatggcaatagatgccagaataatggctactttgcggggaaagattattgactgggacggggcacaa

SEQ ID NO: 223128 - DNA, 513 bp, Homo sapiens
tctgaataagcagtgtcaaggaacacgtttggttatatcaggtgatgggggtttacaccaagaagacacagggaaacaaaggcagcacaggaaaccctttcaggaaacaggtagacttcttagaaattattaaaatttgtctaatcaccattaaagacacagtggcagctctccttgcacaaggactccctggtggccctatgagacactgcaaggatacagtgactgccattcccaggcctcagcatttctttcttagggctacwcctgttcttctcccactaccaaccatacagaacagaatacaatatgctcttaattgagttaaaaaaaaaaaaagaagataaagtggggggatataccccccacacagatatgaatgtttatctatctacctatctatctatctatctatatacacacacacacatttatagagtatttttctggaaggacagtaaagaaagtggttacaatagatggttctgggtggcccacatcttttggatgttt

SEQ ID NO: 223129 - DNA, 549 bp, Homo sapiens
cttccttgtaactttgtctttcccatctgtacatttcacatattcccttttcttggagttagaactctctcataaagactctcttataagaataatggatgacaagtacatttattttgcttcgggaaattctataagaaggcctacgttttatcaaatttctataacaattgtatatagttttgtgatagaaactacattagccttcacagtaatctgttgggatgctttctgtgtatatgtatgtttccctgttcattgtattgtagaaatagagcygaggtcaaaggctggaaagtcatcaggagaaaaaattggttgtggaagggcaacacttcgcctgagatcaaaaggtcctgccaccgtggaagaaatggtatgttatgttcatttacttcctgttctgcttggaaatgttgagttagataaaattccattcattctaaccaaaacttggacttttaattcactgtctatttaaacaatctggaaattactgaaggtatttaaaaaggaaatatagaaattaaggacatgagaagagattgt

SEQ ID NO: 223130 - DNA, 567 bp, Homo sapiens
ggcccattgcattctggcctatctctccttctgcagacttgcctcttgttgctacccagccatgatgagctgtttgagttcccaggattgattacgtcttctctctgtttcatgctatcatccacagcttttcttcttaaggtgactaacatttacttgtcttcctgaactcagttcaaggatctcctcttcttggaagtcttccgtctgcatcccccctgttaactctgccttgctccaccctgtagcatctccmggttgaggcagtgcctatcctctgcattcctgagaatcctatgatttctctcataccaactgttagcatgccatgcaatcactgtctctttttccctccctaataatttgagctccttgcagttggaattatatcatctttatttctttctgagcatctagaacagtggtctatcaaagaataggtgtttaataactacttgttcaatgaatcagtgaatttgtttccttatttaaatatttgttgccagccaatacaacatggaaggctctgtgcagggggctggtgtggatgcaaaggtgtatagggca

SEQ ID NO: 223131 - DNA, 612 bp, Homo sapiens
aagctttattaacccttccaagcaaagatgaatacttgcatctttccgccccagtgtgcgtggtatttatacctgttttagttttgctcacatgtgtgtgttgccgtcccttacatgactgatacctctgttagactgagcttcttggaggacaggaaacaacccttgactatgtactcttggccagcatggttacatggtaaatgtctgttaacatgaatgagctagtatttgtatctggcccatagcagattcttactaaatatttgctgcaatgaaatggtaaatattattaataaattttattatgtttatacatgaccaaattttgtgactctgccatctcccattgaacgttgtcttrgagacgagggtctggaaagggtgtgggtgctggtgacaaggtatagatagatggtataaaagtgacaggataaattctcattttctgtgtatggtttcatggaccctgttttacaaagataactttctgtttttcttagttgtagccttagattcaccagatcaagtactttcatttgggccatttcctttttaaaaaataggtagcttatatataaataaaacaaaacagatacctttggattaagg

SEQ ID NO: 223132 - DNA, 611 bp, Homo sapiens
gatgaatacttgcatctttccgccccagtgtgcgtggtatttatacctgttttagttttgctcacatgtgtgtgttgccgtcccttacatgactgatacctctgttagactgagcttcttggaggacaggaaacaacccttgactatgtactcttggccagcatggttacatggtaaatgtctgttaacatgaatgagctagtatttgtatctggcccatagcagattcttactaaatatttgctgcaatgaaatggtaaatattattaataaattttattatgtttatacatgaccaaattttgtgactctgccatctcccattgaacgttgtcttagagacgagggtctggaaagggtgtgggtgctggtgacaaggtatagatagatggtataaaagtgacaggataaattctcattttctgtgtatggtttcatggaccctgttttacaaagataactttctgtttttcttagttgtagccttagattcaccagatcaagtactttcatttgggccatttcctttttaaaaaataggtagcttatatataaataaaacaaaacagatayctttggattaaggtgggaatttcctcatattgaagctt

SEQ ID NO: 223133 - DNA, 454 bp, Homo sapiens
ttttgagttacctagtttgagaagcagttttgccgcwaagcctctcattccctttgctgtataaaccctatcaatgccttcatgaaaccatgggagcagtttttgcataaagaccaagattttgtttgtatatgtttgccaattcactttttataaatttctgtttaacttcataacagtgatgattctgaatgttctcttgccttgatttgcagcactcaaaaagagtgaatgaaatgtgcagctcagagtgtcatttctgaagggaggagtctttctcttggagaagagtcctcaatgagcctggccgaggcccgggatctgtgtgaagtggactaaggattaagtaggatgtcaactgagacagaacttcaagtagctgtgaaaaccagcgccaagaaagactccagaaagaaaggtagggctgaatttgacctttttttaatggctactt

SEQ ID NO: 223134 - DNA, 454 bp, Homo sapiens
ttttgagttacctagtttgagaagcagttttgccgctaagcctctcattccctttgctgtataaaccctatcamtgccttcatgaaaccatgggagcagtttttgcataaagaccaagattttgtttgtatatgtttgccaattcactttttataaatttctgtttaacttcataacagtgatgattctgaatgttctcttgccttgatttgcagcactcaaaaagagtgaatgaaatgtgcagctcagagtgtcatttctgaagggaggagtctttctcttggagaagagtcctcaatgagcctggccgaggcccgggatctgtgtgaagtggactaaggattaagtaggatgtcaactgagacagaacttcaagtagctgtgaaaaccagcgccaagaaagactccagaaagaaaggtagggctgaatttgacctttttttaatggctactt

SEQ ID NO: 223135 - DNA, 414 bp, Homo sapiens
ggtgtgtgacctgagggaagtctcgtatggatgaagggctgcttttggggtgctgggtaaattctaatttttgaagtgggtggtggtggaatrttttaaaaacattaaaactttttaaaatgaatggtgcttataagggattaaaaaaaaaaaacatgaagcataacctgaagttttcatgatgccagtctcctggtgtcttttcctgaatttggcagacaggatggccagaggaaatgcatcaatgcagagggacagaaacagcagtgtggcctgggaaaggtgagtggccactgcttcagccatggcattcactacagcagtgcttctttttcattatttcttttcctttatcatcttattttaaaaacattttgcatgtatatattttcaagtttccacacaatgcattga

SEQ ID NO: 223136 - DNA, 417 bp, Homo sapiens
ctgagggaagtctcgtatggatgaagggctgcttttggggtgctgggtaaattctaatttttgaagtgggtggtggtggaatgttttaaaaacattaaaactttttaaaatgaatgrtgcttataagggattaaaaaaaaaaaacatgaagcataacctgaagttttcatgatgccagtctcctggtgtcttttcctgaatttggcagacaggatggccagaggaaatgcatcaatgcagagggacagaaacagcagtgtggcctgggaaaggtgagtggccactgcttcagccatggcattcactacagcagtgcttctttttcattatttcttttcctttatcatcttattttaaaaacattttgcatgtatatattttcaagtttccacacaatgcattgatttacttatattt

SEQ ID NO: 223137 - DNA, 415 bp, Homo sapiens
ggggtgtgtgacctgagggaagtctcgtatggatgaagggctgcttttggggtgctgggtaaattctaatttttgaagtgggtggtggtggaatgttttaaaaacattaaaactttttaaaatgaatggtgcttataagggattaaaaaaaaaaaacatgaagcataacctgaagttttcatgatgccagtctcctggtgtcttttcctgaatttggcagacaggrtggccagaggaaatgcatcaatgcagagggacagaaacagcagtgtggcctgggaaaggtgagtggccactgcttcagccatggcattcactacagcagtgcttctttttcattatttcttttcctttatcatcttattttaaaaacattttgcatgtatatattttcaagtttccacacaatgcattg

SEQ ID NO: 223138 - DNA, 417 bp, Homo sapiens
ctgagggaagtctcgtatggatgaagggctgcttttggggtgctgggtaaattctaatttttgaagtgggtggtggtggaatgttttaaaaacattaaaactttttaaaatgaatggtgcttataagggattaaaaaaaaaaaacatgaagcataacctgaagttttcatgatgccagtctcctggtgtcttttcctgaatttggcagacaggatggccagaggaaatgcatcaatgcagagggacagaaacagcagtgtggccygggaaaggtgagtggccactgcttcagccatggcattcactacagcagtgcttctttttcattatttcttttcctttatcatcttattttaaaaacattttgcatgtatatattttcaagtttccacacaatgcattgatttacttatattt

SEQ ID NO: 223139 - DNA, 417 bp, Homo sapiens
ctgagggaagtctcgtatggatgaagggctgcttttggggtgctgggtaaattctaatttttgaagtgggtggtggtggaatgttttaaaaacattaaaactttttaaaatgaatggtgcttataagggattaaaaaaaaaaaacatgaagcataacctgaagttttcatgatgccagtctcctggtgtcttttcctgaatttggcagacaggatggccagaggaaatgcatcaatgcagagggacagaaacagcagtgtggcctgggaaaggtgagtggccactgcttcagccatggcattcrctacagcagtgcttctttttcattatttcttttcctttatcatcttattttaaaaacattttgcatgtatatattttcaagtttccacacaatgcattgatttacttatattt

SEQ ID NO: 223140 - DNA, 577 bp, Homo sapiens
tggggtgctgggtaaattctaatttttgaagtgggtggtggtggaatgttttaaaaacattaaaactttttaaaatgaatggtgcttataagggattaaaaaaaaaaaacatgaagcataacctgaagttttcatgatgccagtctcctggtgtcttttcctgaatttggcagacaggatggccagaggaaatgcatcaatgcagagggacagaaacagcagtgtggcctgggaaaggtgagtggccactgcttcagccatggcattcactacagcagtgcttctttttcattatttcttttcctttatcatcttattttaaaaacattttgcatgtatatattttcaagtttccacacaatgcattgatttacttatattttccatttttttctttttaatttttttctagaacaatgcttcttaaactttagtgtgcacactgggactcttactaaatgcagattctggtttagtaggtcccrgggaaggaccagggattctgcatttctaacaagctccctggtgaggtccttgctgctggttcacggaaccccactttggccagaagctagag

SEQ ID NO: 223141 - DNA, 536 bp, Homo sapiens
ttatccctttgtccagcatttccactctgtctatgctacccttcattggtcgcttggtaaaggtctcggttatcagatcaactgttgcggtatcacagtgcttatgttcaagtaacccttattttacttaataatggcccctaagtgctagagtagtgatgctggtatattgttataattgttttattttattattactgttaaactcttactgtgtrtaatttatacattaaactttatcataggtatgtacgtataggaaaaaaacacagcatatatagggtctgatattattcaaagcttcaggcatccgttggagcatcttggaaagtatccccttggataagagaggactagtgtatattgaatgactagaagacgaatgagcccatccaagatactgttaaggcacagagaagggaaatgtgacaacactgagttgaaggcagtgactggaggaaaataaaacagtttcatgtttgtgcccccactgagtttcagattattcaactaaccagtcacctgccgtgtagagc

SEQ ID NO: 223142 - DNA, 657 bp, Homo sapiens
ttcatggtttgaccactggtgatctctgctgggtggctggtgggatctagtctctgataggtgagagatgacagagaatctcgtttgttagctcttttttttttttttttttttttttgacaaagtttccctcgtgttgcccaagctggagtgcaatagcgtgatctcagctcactgcaacctctgcctcctgggttcaagtgattctcctgcctcagcctcccaagtagctgggattacaggtgcataccaccataccctgctaattttttgtatttttagtagaaatggggtttcacaatgttagccaggctggtctygaactcctgacctcaggtgatctgcccgccttggcctcccaaagtgctgggattacaggcatgagccaccgcacccagcctgttagttcattttgtatgacagattgtttatttgtgagatcaagtcacttaaactcttttgtgcccaaaagaaggagaagagccctttgagatctgtctgaactggtgagtttttgtggttctgtggctactgaccgatgaggagttataaaaatgaagctgcaaactctggggtctctaggcctgtaaatgagaaaagccttaaatctcattgtgtgaatggggaaaatttttctacctcctgagggtattaaca

SEQ ID NO: 223143 - DNA, 452 bp, Homo sapiens
agaattcgagaccagcctggccaacatggtgaaaacctgtccctactaaaaatgcaaaaagttagccgggcgtactcggggagctgatgygggaggatcccttgagcctgggagatcaaggctgcagtgagctctgaccatgccactgcctgggtgataaagtgagactctgtctcaaaaaaaaaaaaaaaagagagagagacagtatggcctggaagcctcaattatttactatatggcccttttaagaaaaaatctgctggccaggtgctgccacacctgtaatcccaggcaggaggatctcttgaggagttctagaccagcctggtgcaacacagtgagatcttgtctctacaaaaaaaaaaaaaaaaaaaaaaaaaaaaaaagaaaagatttgttgactcctggttcttgatacagaaaaaaataataacaaaaactaaattctcagc

SEQ ID NO: 223144 - DNA, 542 bp, Homo sapiens
tgtttaaatcgtgcctgaagtacagtgaacaacccaaacacacgcacgtgccctgttttctcatgatcattgcatgrcgtgtttgtgaggaggaaagtggcagccaatgcctaccacagagaggcactcaacacaggactcttcaaaaaagccacatgcatttcagaactaaagccagcttcctgaagagtggaaaacaaacacattcacactgactccacttttctttttctctaatacagttacacttcttcacatctataataaaatttatattaaaacctctcagctactagtaagccttttgctacaaggaattgaccctgttttccagataagaaaacagagtcttaaaaaatgaaactagagtgagcttgggtgtccctctttttattgataacttcactgtagtgaagtttacatatcataaaattcacccatttcaattgtataattcaatgatttttagcaaattttcccaggtgtgtaaccatcaccataaatcattttcacacattttcatccctccaataaaatctctc

SEQ ID NO: 223145 - DNA, 542 bp, Homo sapiens
tgtttaaatcgtgcctgaagtacagtgaacaacccaaacacacgcacgtgccctgttttctcatgatcattgcatggcgtgtttgtgaggaggaaagtggcagccaatgcctaccacagagaggcactcaacacaggactcttcaaaaaagccacatgyatttcagaactaaagccagcttcctgaagagtggaaaacaaacacattcacactgactccacttttctttttctctaatacagttacacttcttcacatctataataaaatttatattaaaacctctcagctactagtaagccttttgctacaaggaattgaccctgttttccagataagaaaacagagtcttaaaaaatgaaactagagtgagcttgggtgtccctctttttattgataacttcactgtagtgaagtttacatatcataaaattcacccatttcaattgtataattcaatgatttttagcaaattttcccaggtgtgtaaccatcaccataaatcattttcacacattttcatccctccaataaaatctctc

SEQ ID NO: 223146 - DNA, 542 bp, Homo sapiens
tgtttaaatcgtgcctgaagtacagtgaacaacccaaacacacgcacgtgccctgttttctcatgatcattgcatggcgtgtttgtgaggaggaaagtggcagccaatgcctaccacagagaggcactcaacacaggactcttcaaaaaagccacatgcatttcagamctaaagccagcttcctgaagagtggaaaacaaacacattcacactgactccacttttctttttctctaatacagttacacttcttcacatctataataaaatttatattaaaacctctcagctactagtaagccttttgctacaaggaattgaccctgttttccagataagaaaacagagtcttaaaaaatgaaactagagtgagcttgggtgtccctctttttattgataacttcactgtagtgaagtttacatatcataaaattcacccatttcaattgtataattcaatgatttttagcaaattttcccaggtgtgtaaccatcaccataaatcattttcacacattttcatccctccaataaaatctctc

SEQ ID NO: 223147 - DNA, 494 bp, Homo sapiens
  misc_feature (1)...(494): n = A,T,C or G
ttgccagtcactcaatctctaagtaataaaggcaggatattctagtgtctttttatctcacatgatagagtctcaacaatgttaaattgataaatattcattgactacctctggatgccaggcactgaactagatgcctaagattcaacagtgaacagaaatggacatggccccaagccttcgtgggactcccagagaagttgagtgaaaaaatagatggggtcacacatcaatcaatagtagtsctattttgccactgctgtgttaattggggaaagcacaggccaaccaaacagccttggtttcaaattctgcttaaaatctgcttattgtatgtccttgggcgggtctcttaacctctctgagccttagtttccttttggaaaaaggaggaacaataattgtacctgccttaaagagttgttgtaagaattaaatatcataatgaatgggacatatatttcttagcacaaagccttgcctcaaattaattn

SEQ ID NO: 223148 - DNA, 643 bp, Homo sapiens
ggtacaactccacccataacattctctaaggctgttctcttctcagtagagtgagggtaataaaggctgataaagctttagtatccccatagggtttattgcaccccatagggttgtgtgacagttaaatgaggtagggaatgtaactacctgacaaagagcaggtatcaggaaatgtgatttcctttccccaagatggagagagactccttttccatgtagttaatctgctatccgcaaattaactgagcttagtatctaccctaacatgcccctagtaggaatttaaaggtcatttaacctaacctccatttcaaatagtaaggaaactgaggccccaaaaaatcattttgctgatttaatgactagccttgggctagaactaatttttctccttggaataagaagccatttaatccagggaacattctctgtattaaaatatcctatatatagctcctcactgccctmcaataacactcgcagtttgtcttatgtagcataagtggtctttctcaaaccttccccatagccatcaccttgttcaggcagggataacttatggcactagacagttgaggaaacagaggctcagaaagctacagggcttggtagaggtcacagacctcataagtagtaagac

SEQ ID NO: 223149 - DNA, 378 bp, Homo sapiens
atagtgcttcctcactagatatttgtaaatttcaaatgatgtcactgggtaatcacttaacctctgagtcctcatcttttttttctctctttttttttttttttttgagacagattcttgcaatggtgcgatctcagctcaacctctgcttcctgggttcaagtgattctcctgccccagcctcttgagtagctgggactacaggcgcacaccaccacacccagctaatttttgtatctttagtagagacggggtttcaccatgttggccaggctggtctcaaacttccgamctcaggtgatccacctgccttggtctcccaaagtgctggggattacaggcatgagcctcactcccagttttaatgtgacaaacaga

SEQ ID NO: 223150 - DNA, 593 bp, Homo sapiens
atgtttcctgttagtagcattaagtacaaacatagctcttgattttcacttgttaatttgtccctctcctacatttagatatagsaatagatatagtcataagatcagaaaattgctgatggtcaggagagggcaacataaaggcctgtgtatctttgccagtaattaatatgcaatgaactaatgccatacagtggaaagatcacaaaagaagctcggggtttgagttggcctgagtcatctacactgtgtctttggacaattagcttacctctttgcagcttgaacaacccatctcaaaaatgaaagataatgaaatctatttcaaatgcttagcagagttattgtgtgcataaaataagacaacagataagaaaaatacttagtaaaatacaaacaactatgctaacatgcttctctcattcagttgcaaacattctatacacccactgtgtcatgggctacagtaatatagataatgatgattcttatcaccattgttatcataaggattatgctgttataatgaagtcctggttatcttgtgatggttaattttatgtgtcaacttggccacaaggtgcccaaacatt

SEQ ID NO: 223151 - DNA, 579 bp, Homo sapiens
gctaggaatattttttttccagggaagctttgacccttctctttatctttctttttagactatgtgctgaaagaggtagaaatccatactcactcacccctttcttcccttgcatctttgttktcatctccatccttctcttgcctcctttctctccctttttgcctcttttccctttttcccctttgtaccttctctttttttccatttattctcctatcctttcacacagcatagagatgcaagctttggaacaaaatacattatgggtccaaattgcagctctgctccctggtaattagggatttgggcaagattatcaattttttttttttttttttggagcctctgttatttatctgaaaatggagactaaaattttcagggttttaaggttattaaatgaccttatttatagaaagaggcctgttaaggtatatgggcacataactggcatagaataaatgcaggtaccttcctgtattcagcaaggctttattgagttaagtccatgatatatgtaaagtcctgtggtagataccagagacagaataagttttggtttcttctgttaagtaa

SEQ ID NO: 223152 - DNA, 579 bp, Homo sapiens
gctaggaatattttttttccagggaagctttgacccttctctttatctttctttttagactatgtgctgaaagaggtagaaatccatactcactcacccctttcttcccttgcatctttgttttcatctccatccttctcttgcctcctttctctccctttttgcctcttttccctttttcccctttgtaccttctctttttttccatttattctcctatcctttcacacagcatagagatgcaagctttggaacaaaatacattatgggtccaaattgcagctctgctccctggtaattagggatttgggcaagattatcaattttttttttttttttttggagcctctgttatttatctgaaaatggagactaaaattttcagggttttaaggttattaaaygaccttatttatagaaagaggcctgttaaggtatatgggcacataactggcatagaataaatgcaggtaccttcctgtattcagcaaggctttattgagttaagtccatgatatatgtaaagtcctgtggtagataccagagacagaataagttttggtttcttctgttaagtaa

SEQ ID NO: 223153 - DNA, 579 bp, Homo sapiens
gctaggaatattttttttccagggaagctttgacccttctctttatctttctttttagactatgtgctgaaagaggtagaaatccatactcactcacccctttcttcccttgcatctttgttttcatctccatccttctcttgcctcctttctctccctttttgcctcttttccctttttcccctttgtaccttctctttttttccatttattctcctatcctttcacacagcatagagatgcaagctttggaacaaaatacattatgggtccaaattgcagctctgctccctggtaattagggatttgggcaagattatcaattttttttttttttttttggagcctctgttatttatctgaaaatggagactaaaattttcagggttttaaggttattaaatgaccttatttatagaaagaggcctgttaaggtatatgggcacataactggcatagaataaatgcaggtaccttcctgtattcagcaaggctttattgagttaagtccatgatatatgtaaagtcctgtggtasataccagagacagaataagttttggtttcttctgttaagtaa

SEQ ID NO: 223154 - DNA, 403 bp, Homo sapiens
atataaacttatatccacagaaaatacattgttgctatagttatttggatagtgcaacatttataaattaagcagaactaaaatctttatgatgcttttgattctatctaaaaacaagaaaaaattatttacatttgtacaattttaattttgtatmtttcaaaagtttaaattttgtctatgttcatagagtttttgaacatttgttaattatatttctaaatattttatctttgttattgttattgtaaattgggttctctgccattatatcctttgactggttattaattttgtatatgaaagatatggatttctgtatgttaattttatactctattttactatattcttacatttcttgagatagttttatcatttatttgtttttcaggtttactgt

SEQ ID NO: 223155 - DNA, 426 bp, Homo sapiens
atttgggacactccagctctgcaacctattgcagtaaccacgatggcagctggccctgacactctgggatcccatcagcctgattgccttcaaggtgcccacttaaaaggcagcatttctaactgtcattgcagcgaatatctrcactgaattcttcacagattctgggcatctcctccccaaatttattttcttacagctttggagatgggaattttctggggtccttttggggacacataattagaggtaaactgtctgtcatatgtgataaatccaccctactcttccaatcttcctaagccatttgatgcatttctccgtaccaagaaaattcaagcatcctaacttcatttagtgagagtaatcctttaatgaaacaagcaagcaagcaagcaatcagagtcactcttagatacttaacat

SEQ ID NO: 223156 - DNA, 623 bp, Homo sapiens
atgacaaacccacagctaacattctactgaatggagaaaagctgaaaatctttaagaatttgaaaaaaaagatcaagcccacttttaccactgctatgcaacatagtactggaagtcttagccaggcagttgagcatgagaaagaaaaaaaaaaggcatccgaattaaaagagaggaaatcaaaatgtccctcttttcagatgacatgatgttatcgttaattcatgacatttcaggataaaaaatcaacagacaaagattagtagtattgctttacacaaataatgaactatctagaaaataattctagaaggcaatcttttttacaatagttacaaaaataaggaaagaaaatacataggaatatattcaactgagatgttgaattatcaaagcaatctacaaattcagcrcaatcttaatctaaatatcaatgtcatttttcacagaaactgtttaaaaattctaaactttgtatggagccaaaaaagagccccaatggccaaagacaaagaaatcctgaggggggaaaataaaggctggagatatcacaccacctgactttaaaatatattacaaagttatagtgagcaaaacagcatggtattagtataaaaatacac

SEQ ID NO: 223157 - DNA, 540 bp, Homo sapiens
atgaattccctaaaggccccctcgwtgacaacactgtgatgtgtgctccatccttctcgatcctcttatcctcaccaacacttagcgtcagaggtttcatttgcttggtgctctgttttgcaacatgtccttggagaaaaggttgctgaggttgaaatgaaggacaaaaccatgcaatgtgccgtctgttgaagacagcatattcttttgtgttttaacaaaggcctgcaatgctttaattagaagaagttgaattgggtggcaatttaagtaccttggacatttttcaaatctgggtgatgcccagtgatcttggttttaagtaaagtacgtaaataatagaattataaggaatccagtgtttactttctgagtagcagtgaagaggctaagtgttttccttctgggttggcttctcagatgtgtttctcaataaattctctagagatatgtgtgtcaagtcagcttgttaaaaaacaaagaaacatgaaggcatgtagccctcacagttggatgcttttaaacactgcagctgtttga

SEQ ID NO: 223158 - DNA, 540 bp, Homo sapiens
atgaattccctaaaggccccctcgatgacaacactgtgatgtgtgctccatccttctcgatcctcttatcctcaccaacacttagcgtcagaggtttcatttgcttggtgctctgttttgcaacatgtccttggagaaaaggttgctgaggttgaaatgaaggacaaaaccatgcaatgtgccgtctgttgaagacagcatattcttttgtgttttaacaaaggcctgcaatgctttaattagaagaagttgaattgggtggcaatttaagtaccttggacatttttcaaatctgsgtgatgcccagtgatcttggttttaagtaaagtacgtaaataatagaattataaggaatccagtgtttactttctgagtagcagtgaagaggctaagtgttttccttctgggttggcttctcagatgtgtttctcaataaattctctagagatatgtgtgtcaagtcagcttgttaaaaaacaaagaaacatgaaggcatgtagccctcacagttggatgcttttaaacactgcagctgtttga

SEQ ID NO: 223159 - DNA, 561 bp, Homo sapiens
tgggagaactcaaaggggcagggtggggagtgtgcatggtkggggcggtgcagttccagatcgtaggtggattcaaagatttcctgattggcaattggttcctagagtttatctcctactaaattcccttctactcagctccagccacaatggcctccttgctatttctccaacatacaaggcacattcctcccacaaggtctctgagttcagagatgttaacagtttattgccacatccatttaatattttcggaccacagatgaccacaggtgactgaaactgtggataaggaggggctgttgtaattatttgggatatactgctagaacattcatagtttacaaataacaagaatttccgcttgctagaccaagtatttcctatgaaaggataaaatccacatgctatagcttcagtgactcaccctgaacacttgccatgtctcagggacaaagtcaggtatctgtgctaacatgtgactagcaacctcaacccttcatcattttcttactgccttagtatgtgatttaccttacctggcaagggccaaagctatgg

SEQ ID NO: 223160 - DNA, 349 bp, Homo sapiens
tgacacctttgcatatactggtctttctgcctacaaaactttcttttcgagctctttaaaattgtgttattcaatatggtagcttttagccatgggtggagatgaatttaatatgactaggaaaaagatgttwtaatttgaattaactttaatatacattaaaattttaaaacagatgccctattcagttattggaaaactttaaagtatgactggaacaaactgtatgtgaattttgtttttcaactgttaaattttataaactctatatttagatcacatatttccagtgaaaagttagcttctgaattgagatgtgctatgtgcttgacatgtaaaatgcagagtc

SEQ ID NO: 223161 - DNA, 585 bp, Homo sapiens
ttgttctctcagcacctatttctgaatggaatggcaaacagggacatatttcaccagctcttctttctgaatttttgaaaagaaatttggacaaatccaaagttctcgtctgcatttgtggaccagtgccatttacagaacaaggagtaaggtgagtaacagtgtagtaggaaacagactgcccaacactgaagtgaagatctttcataacaagcatctctcagttcttcctgtttatatgaaactgcactttaataatcttacagttttagaaaataacaaagtctttaaatcttcgtatagtttgagttggaggccaggattatgcatattgttagataaaacataaaagtaagttacagccagcagtcagtgttctctgctcgtgatggctgccaatattgttacactcacaagattggtgccacaattcttatttgggacattaggcccaacctcttcttccatcaaagcttcataatatatagtaattaataaggaawgttcatctcattgtagcttttgatcttcattctctgtaactgagtgaaagtaaataatatatgtgatcaaaagccaagcagc

SEQ ID NO: 223162 - DNA, 536 bp, Homo sapiens
ttcatgatatttaggagttactaatcactaattttttaagaggtgatagtgtttttttatttaaaaaaaactacatagtgaatggggaaaatgaaaaagtatcatgattatggtggtaaactgctcttatttcttcattttaaagcattttccctaagaaacatgtgctttttatttgtttttcargttgctgcatgatctcaacttttccaaaaatgagatccatagttttacagcataatgaagagctgtcattgtcctttattcaactagtttatctaaatttgtgattgcttagggttttttaagagaacatttttgtacataacaaaaggttaactagaatccagccttcagtttcttaaatgaaatcaaatgttccttcagtacaggtaacttcttggctttcttttgtaccacaacttattttactactgatatttgacctggaaagttaatcatggcaacaaatacatacaggattctttgttatgaatcacaaatttccttgccatttaaattatatcactgttcta

SEQ ID NO: 223163 - DNA, 639 bp, Homo sapiens
ggctaatttttgtatttttagtagagatggggtttcaccatgttggtcaggctggtcttgaactcctgacctcgtgatctgcccacctcggcctcccagagtgccgggattacgggcgtgagccactgtgcccggcctagattttttttttttttttttaatatgaaagatagctttactggcccaaacttaagagtcttttgtagggttttataggctccttattccagccattactcttatcgtcgtgccttctgtgacatccctgaatacatgttatcttccctcagcttgaatacttgtagcagttaggagtttcttcctcagaaacaagacaaaataagtcagttttcttagatgtgagctcacctccattgtttgcatacacatgccaaatagtttattaatctacaattttttaagctgagtggtgcatccagccattctggatgacttgcaaataatgactgacacttcctctcccccgcaaaaaagtttggcatggtggtcactactgacataaaatgcatggtgctaactctgactgaactatattgatgtacatttagaaacatttttttctttcatttgcaaaagcaagttayagaaatgcaactaacaagctagattgccagatga

SEQ ID NO: 223164 - DNA, 522 bp, Homo sapiens
cacatccagtcagaatatatgttttacatatataaaacatatgtatatgtctataaaattttggctttattaaatgtaatcaaacaaatacagcaagagcaataatgggaaaacatagcaaaattaccctgcaaattggaaagaattatatacatatagctaaagagaaattatggaaaaattatttcaagkgacaaaaataatgtaaattgttaagacaacatatggaatactatgcagccatgaaaaaagaatgagttcatgtccttggcagggacatggatgaagctggaaaccatcattctcagcaaactaacacgagaacagaaaaccaaacgccgcatgttctcactcataagtgggagctgaacaatgagaacacatggaaacagggaggggactatgacacactggggcctgtcggggggtggagagagatagcattaggagaaatacctaaggtagatgatggggtgataggtgcagcaaaccaccatggcatgtgtatacctatgtaacaaa

SEQ ID NO: 223165 - DNA, 522 bp, Homo sapiens
cacatccagtcagaatatatgttttacatatataaaacatatgtatatgtctataaaattttggctttattaaatgtaatcaaacaaatacagcaagagcaataatgggaaaacatagcaaaattaccctgcaaattggaaagaattatatacatatagctaaagagaaattatggaaaaattatttcaagggacaaaaataatgtaaattgttaagacaacatatggaatactatgcagccatgaaaaaagaatgagttcatgtccttggcagggacatggatgaagctggaaaccatcattctcagcaaactaacacgagaacagaaaaccaaacgccgcatgttctcactcataagtgggagctgaacaatgagaacacatggaaacagggaggggactatgacacactggggcctgtcrgggggtggagagagatagcattaggagaaatacctaaggtagatgatggggtgataggtgcagcaaaccaccatggcatgtgtatacctatgtaacaaa

SEQ ID NO: 223166 - DNA, 559 bp, Homo sapiens
agcccttgcaattttcatggcatagtagggttcactgtttggccaagtaggattccattgactgcagaagtcctccgcaagactctctcctctgacacagttccttactcccttgggtagtgtttgatcctatttctactcttgcacttatcactgcttagttgttttttttttattctctatatgtagtccattttagttggcaaacattaatagcacaagtgcgatttattgatatatgcatattcctaatacctagaagtatatctgccacattctggggagcaaaatacgtttatttgaaaaataagttttaaaaacatttacactttcctctacaaacctacttgcagtgaaygtactagttatgggaatttccttatgattgggattctgaggacgagcctattaacttctttagatagtatgtgcattatgttgcatgtattctatttgtgataagtaataacaaattcttctcccaaaacagcaacaaacacaaaatccacgtcaacagtaaaagtcctgttgaaaatagaaatgttgagaaaaaggtttt

SEQ ID NO: 223167 - DNA, 559 bp, Homo sapiens
agcccttgcaattttcatggcatagtagggttcactgtttggccaagtaggattccattgactgcagaagtcctccgcaagactctctcctctgacacagttccttactcccttgggtagtgtttgatcctatttctactcttgcacttatcactgcttagttgttttttttttattctctatatgtagtccattttagttggcaaacattaatagcacaagtgcgatttattgatatatgcatattcctaatacctagaagtatatctgccacattctggggagcaaaatacgtttatttgaaaaataagttttaaaaacatttacactttcctctacaaacctacttgcagtgaacgtactagttaygggaatttccttatgattgggattctgaggacgagcctattaacttctttagatagtatgtgcattatgttgcatgtattctatttgtgataagtaataacaaattcttctcccaaaacagcaacaaacacaaaatccacgtcaacagtaaaagtcctgttgaaaatagaaatgttgagaaaaaggtttt

SEQ ID NO: 223168 - DNA, 565 bp, Homo sapiens
ctttactcaactacaagtatgcaaacaaaaccaggattaagagagctgtaaagagctgtaagaaatggacgacacctcataaaaaygatgaaaagcagtatcctactagctagttgttagacaactgggtaattttgtgtaaatttataaagaggctgaaaagcacagctgtcagccacctacagagagtctgaatactctgtatactccacgaaatctacgcacttgtccaaagtgtttgttcttctgatcttaaattggctttcccttactctttcttcattaaccctgaactgagaaaatattgatattatgtatttttagcttctccaccaataattgctttctctaaacttgtctggatataataaagaaacaaaaactcagttttaatgatatgttttctcacagttcagcagttaacttcagtatttaccactaaatactattttaagaaaataaatacttgagaacaaaaaccttaatttcaactcatcaataacatattaataaatatttaacaccctaacctgcccttaaaatacagtagttaggtagtaagctt

SEQ ID NO: 223169 - DNA, 609 bp, Homo sapiens
actcaactacaagtatgcaaacaaaaccaggattaagagagctgtaaagagctgtaagaaatggacgacacctcataaaaatgatgaaaagcagtatcctactagctagttgttagacaactgggtaattttgtgtaaatttataaagaggctgaaaagcacagctgtcagccacctacagagagtctgaatactctgtatactccacgaaatctaygcacttgtccaaagtgtttgttcttctgatcttaaattggctttcccttactctttcttcattaaccctgaactgagaaaatattgatattatgtatttttagcttctccaccaataattgctttctctaaacttgtctggatataataaagaaacaaaaactcagttttaatgatatgttttctcacagttcagcagttaacttcagtatttaccactaaatactattttaagaaaataaatacttgagaacaaaaaccttaatttcaactcatcaataacatattaataaatatttaacaccctaacctgcccttaaaatacagtagttaggtagtaagcttgggtttgaaagctagtttaaataaatacaaaataaataagcaaataca

SEQ ID NO: 223170 - DNA, 580 bp, Homo sapiens
tcacaattaatgtttttttttccagttacataaatcactcattaagtcatatcgcttgaatcttcatcattggagtgatataatttatttaaaactaatttgattatattctgaatgtacaataattgtttgaaaacacttggataatatctttatttataccccaaaccttaaaatttaattaaacttgattatgttaatttacctttaaaattataaaatcatcagtaaaatttcataaaccatcaacattcatagtaaatattaatctacattttgggctttctgtgrcactgttgagttaaaaaatgtcctacaacccaagccaaaatattaatttttttcaaattatttaaagaatcatttttaaaatgggacagatattttacatttcaaaatgaagctttttaaaaaattctagaatacaagaaaatagtatgaccaaatacattcacatatagacagtgaatactataagggtaaggagatcagaactttcagcacatttgttttacattctctctttttttaataatttattttcagagaagttttaggtccacaagcaatatgaaaagat

SEQ ID NO: 223171 - DNA, 600 bp, Homo sapiens
gtttgtcataatcacctgcaattgagcttatggtttatttacatatatggatttccttgctataattatcatcagatgacaggcatattcattagtatccatacaaagttcattggaaatgtccttaatagcaattagtgcaagaatggagatcagtaaaatatattttttgatgtattcatttattagtaccattgtacacatattaagatgggctgtagtagattaaagatgaccacacattatttgctacttctcccaagaggtgaagtctaattcccttctccttgaatctgggctggattcagtaacttatttgggtaatagaaaattccaagaatgttttgggacttcttargctaagtcctaagccttggtactttctttcaggcctcttagaacacttgcatattgaaataaactgccaatttgtgaggaagcacacaaaagctcataaagaggaactgaggcacccagctgacacactaacagagctcccagatgacaatcaacaccaacctgccaactatgtgagtgagccatcttgaaagtgaagctttcatacttcatcaatcagctgatgctacataaagataaaaa

SEQ ID NO: 223172 - DNA, 600 bp, Homo sapiens
gtttgtcataatcacctgcaattgagcttatggtttatttacatatatggatttccttgctataattatcatcagatgacaggcatattcattagtatccatacaaagttcattggaaatgtccttaatagcaattagtgcaagaatggagatcagtaaaatatattttttgatgtattcatttattagtaccattgtacacatattaagatgggctgtagtagattaaagatgaccacacattatttgctacttctcccaagaggtgaagtctaattcccttctccttgaatctgggctggattcagtaacttatttgggtaatagaaaattccaagaatgttttgggacttcttaggctaagtcctaagccttggtactttctttcargcctcttagaacacttgcatattgaaataaactgccaatttgtgaggaagcacacaaaagctcataaagaggaactgaggcacccagctgacacactaacagagctcccagatgacaatcaacaccaacctgccaactatgtgagtgagccatcttgaaagtgaagctttcatacttcatcaatcagctgatgctacataaagataaaaa

SEQ ID NO: 223173 - DNA, 490 bp, Homo sapiens
tctcctcttttgccttcagaatccaacctggaactgtagtgaaaagagattatgagatttaaacttttggcttcctcccagagatgatggaaggggcagagatgaagctgaattgacaaaggacataaaaatggtcaatgcctttttaatagcttcatactatattgtactgtaaatttttaaaacttcatattttttctttctttttttcttgcttcctcaacatccccacagacaagctgtgagcaccctgcccaagtgatcaagttcaccagtgaatagagtggtctgtgacacaagttcctcttcttgccctcccctgacagtgacctrgtaacatccaaaaggaccagtgaaatcccttcaagccttttctgatgtactctattctgacgtataagaaaaaccctcgcctgacggtttcttggggcttttcactggcttggttgaacctgctcctgtggtgctcctcctctggggcccctctcag

SEQ ID NO: 223174 - DNA, 551 bp, Homo sapiens
agcactaataggttagactacccaaaaatgtgtttgctttttctttttaaaaaaattgtataggttaaaatgatcagcctgcacacacattacttgcaagttgtcctgtaactctcatctctgaatatataacaggttcaaatttattggtcagattagtcagttgacccgttacagctaaatcaaaagaaataaaataaaggaaatgagatttcctttgaaaaaattaaggaagaaattatagaattaggaaactgtataagtgcagtggaaygcaggtctggaattaggcatcagggaactgaagtttgcttataatcaatgatgttattatgaactaaatgcttgtcccaccaccccccactactccaaattcatatattgaggctctcactcccaatgtgatggggttaggagatggggccgtttggggggtaattaggtttagatgaggttgtgagagtagagcttccatgattggactagtggctttagaagaggaagagacagcagagctctctgtttctctgccatgtgaggacacagcaaga

SEQ ID NO: 223175 - DNA, 453 bp, Homo sapiens
tagccctcatcctctattctagtcctctcattccacagtcaatattcctctctttgggcagtttccacttgtagaacattcacatgtttattgttagcataaaaatcaacaacaataataaaacttgggccaatgcactgtatagtaagactaactacatgagcacaatgattccctcaatattatataacagcagtcgtttgaaacatataacgtttcaattgtatatttttatcttcttgcctarcaaatattttccccatttggttagattcattttgtagtcttagccaaggtgtatgtccctaattgtaagagcaaatgagataaattcctaattaaaacaaacataagatcataaagtcatcttagatttctattgcatagctcagagcatattttatgagtgtgtcataagcagtggttcttaaattttaataggtacatgattct

SEQ ID NO: 223176 - DNA, 514 bp, Homo sapiens
ttttatgtctccatttaatcacagaaaataagtaatagatatcaagctacaaatattaaattattggatcaaaatcatagatgttttatgtaatgatgctctcatcatataattgattttattcaaccacttatttatttctttatgcctactacaagaaatgcataatttcataggtttgtaatatctgattcatttcacatgattttggagataataaacctctagtcaaggtcaccacaaccacctatagaataacttatctcttggctccattgccttctcagttctatgtcagaggaaaacttttataatttgaggaaaaagaataaatggctgtgaacagaatcagctacaatttttttaaagataacaagtgataaccctcagaggcctatcacctctgtatcacaggggcaggttacttcatatgcacctgaggacctattgttctatctgcgtgcttctctctaactttccctyttttgtatttctatctctcatcaggtgtgtg

SEQ ID NO: 223177 - DNA, 704 bp, Homo sapiens
aaaaagatttatagtatgtgattcctcttatatgaggtacctatagtcgtcaagatcagagagacataagcagggtggtgtgtccaggaacttagggtaaaagggagaagtggagagttgtttgatgtgtacagtttcatttttgcatatgaaaagcgttctgggaatggatggtggtgatggctacagaaaaatgcaaatgtacttggtgccactaaactgcaaattttacgtgtattttaccacaataaaaaggattagaaaaaaataaaaacacccttgyttcagatacatctgtctgggtcaggtcagttccctggcttccttctctatactggagctggagtgcattccaggcaccctattggccacacagaagggtgagtgttgcttgttctccctcctgtgctgccattcaaggcagccatgtctgtccctagggccctagtgattatccaggggaaaactgagcccctctgagaaacatatcccccatacaggaaattctgatgactggggccacaacagctattctcagcccctgaggaaggaactgattgcccagattgtattcaaggatgagtccgttttgcctggaaatgtctaaaattgctaagtgtatattcattccctcaacaaatatttattgggtgactactatgtgtgaggcgtgcttctaactgtgagtgcagtgatcctgacta

SEQ ID NO: 223178 - DNA, 704 bp, Homo sapiens
aaaaagatttatagtatgtgattcctcttatatgaggtacctatagtcgtcaagatcagagagacataagcagggtggtgtgtccaggaacttagggtaaaagggagaagtggagagttgtttgatgtgtacagtttcatttttgcatatgaaaagcgttctgggaatggatggtggtgatggctacagaaaaatgcaaatgtacttggtgccactaaactgcaaattttacgtgtattttaccacaataaaaaggattagaaaaaaataaaaacacccttgcttcagatacatctgtctgggtcaggtcagttccctggcttccttctctatactggagctggagtgcattccaggcaccctattggccacacagragggtgagtgttgcttgttctccctcctgtgctgccattcaaggcagccatgtctgtccctagggccctagtgattatccaggggaaaactgagcccctctgagaaacatatcccccatacaggaaattctgatgactggggccacaacagctattctcagcccctgaggaaggaactgattgcccagattgtattcaaggatgagtccgttttgcctggaaatgtctaaaattgctaagtgtatattcattccctcaacaaatatttattgggtgactactatgtgtgaggcgtgcttctaactgtgagtgcagtgatcctgacta

SEQ ID NO: 223179 - DNA, 464 bp, Homo sapiens
taactggagataagagaagaaacagtagttaaaaacaacaggaccagactccccactgtgctttcagccatcacaggggtgtgtgctttaatttagctggagcagctctctagggaggcactgtacctgagcagggcatggaggaggagggcatggcagagaaggagctgtcagagctcggggactgaggggacagtgkacagagtgctgccccacagcacggggagtttcagtgggctgctcacactgtcagacagagcagggagctcctgcacgcaatggacagaaagttctatttgcttgcaggtggttgtgtgtttgctagggctgcgtaacaatgtcccacaatctgggtggcttaaacaacagaaatgtattctatcacagttctggaggcctgaaatccaaaaccaagatgttgacaggggcacgctgtctccaaagcctccagggaaaaatcattc

SEQ ID NO: 223180 - DNA, 545 bp, Homo sapiens
ttgtttaactttggctatagttacactataactcattatctggtatatcaggggaggtcacaagttagagaaagactgtcacactacagagactaaacaagatcatgagtttcttatatttgcctgttcacatcacaaagaaaaatgctaccctacagatataacctacacaggtgaaggcagcttacaccagctaacaagagtctcttgtgtgtatctcttcctaattccattatcagtgttcagtgataccaccttggtagcttgaaatcggtcatagtgggagaatttacaccacagacactggcaaatgttacaaatcaggacttccccactcctcaaccccactccacaaaggcaaytgattaaacactgaccagtatactactactgcctgtgctcaaaactgtgtacaagttttcaacaaataataatgaattcaagacaaatattcaacccgtcatcagctctggaaaagcctgtgggcatgcattcccagctgtgaaatagttgcggcaactttctttacagaaagcatgagattg

SEQ ID NO: 223181 - DNA, 585 bp, Homo sapiens
gctggtaataaagacatacctgagactgggtaatttataaaggaaagaggtttgatggactcacagttccacatcgctggggaggcctcacaataatggctgaaggcaaataaggagtaaagtcatgtcttacatggcagcaggcaagagtgcatgtgcagggcaactcccctttataaaaccatcagatccgtgaaacgtattcactgtcacaagaacagcacaggaaagacccgcccccattattcaattacctcccaccaggtccctcccatgacatgtgggaattctgggagctacaattcaagatgagatttgggtagagacccagccaagccgtatcacactgtaaaccagcacgagcttatttactttttcttttctctccttatcctatgcaggaagtcacsacattctggtaattcttcctcttcctctctcttgcatcagctccttgttctccatggctgtttctctcatcccaattaggcccttatttccagaccatcaaaacttgagtttctgacgtggtcccccaaattttcatatattcaaatccagtgtcagacctgattcgtcctgatt

SEQ ID NO: 223182 - DNA, 557 bp, Homo sapiens
taggtgtgaattgcagctctgcccaatactaactgcatttgaatattggcgttctttaacctctcaagcccgtttccatagttgtaaaatgggatagtaatccctattttctcagctctgttctgaggattaaatgagataatatgtgaaagcgtatagcttagaaaccaataatgtttgttattatggagtggtaaaaaatgacttcggatctgaatccaggaaaataccaagacaccaagagccttctccacctctatgttttttcaatgtgctacttcagtgttatcttgaaattccatgggtaaaatcggcctcaaataatagaatatgtggggagggagagcatcaggataaatagctaatgcatgtgaggcttaatatctaggtgatgggttgacaggtgcagcacgccaccatggcacacatttgcctatgtaacaaacctgcaygtcctgcacatgtatcctggaacttaaaataaaattaaattaaattaagtgaaaaacaaaagaatatggagaattccacctttaaatggaattttaaatttgaat

SEQ ID NO: 223183 - DNA, 574 bp, Homo sapiens
tgaagtcctagacagagcaacaggaaagagaaataaagagctgccaaattggaaaagaggaagtcaaactgtatctctttgaagatgaaatgatcttatagaaaaatctaatgactccaccaaaaaactctcagaactgataaagaaattcagtaaattaccagatacaaagtcagccaatataactcagcatttctgtacaccaatagcacactagttgaaaaaaaaaatcaagaaagaaatcccatttataataaaaacaaaaaatgaaataaaatacctaggagtaaatctgactaaggaggcgaaagctctctaccaggaaaactataaaacactgatgaaagaaaactggagagaacacaaacaaatcggaagacatctcatgcttatgaactggaaaaattaatactgttaaaatgaccatactgcytaaagcaatctaaagattcaatgcaatccctatcaaaataccaacgacaattcttcatacaaatagaaaaaacaatactaaaatttgaatggaaccacaaaagacaaagaatagtcaaagcaatactgagcaaaaagaata

SEQ ID NO: 223184 - DNA, 606 bp, Homo sapiens
taaggaatttaaatgttggatacagagtaaacatttaaattaagaaaacaaaaagactgaactgagtaatttctaagatgcctcaaatctaacatttatttatgaattctaattggccagcatatcattattcacttacatcttctatttatgctaaatgggtaattcattcttcaatttaacccagtataaactccttaaaaaacaatgatactttcttgtattttacccttcttttctctacttccttccctctacagtgtctaacactccaacatccactagaaaataaaatataaataacaatagtaataaattattctccttcccttaaataggcccatgtaaaagataccttgtcaacatagaaaaacctttttgaagaagttttcctttgyatttccttgacagatagttaaaatccattaaattcatctttattccataaaatctctcagggcttggctattatagatacagctcaattctgtatattttattttttaaagatctatcagatattctcttcttaatctacaagcctattagtttattgcaggaactcttaaatatcagtgaatgtgcatcactgtctatcaaaattac

SEQ ID NO: 223185 - DNA, 412 bp, Homo sapiens
tcagcttgtctaccgtgcctttccttgttccttccatcttatcatcctgagctctcagacagcaacttggacttgtataatygaatgttgtgtcaaagttatttccactggtgtggctggaagaaatggattctgactccagcttcatgacataggttcccagaacctacatgctctcttttgctaagcttacttatccccaaatgacttcttctcataatgtttcactattaactatacccgaaatcagcttggcctggctcctcctagtcttggcccctcttgattgaaccactgctatcctgagcctatattcacagagaattagtttgtatttgtttatggggccaaaaaaatgccacggtggagcagtaactgtctttctatttgatgtcatgatagtttacttctt

SEQ ID NO: 223186 - DNA, 552 bp, Homo sapiens
atggcattagagctgggcctggaagcagcagaagtgagaggcaggaaaaagggctccttgggcttcctttttccttcctctctgaaacatgccccccattttttcacagtcctggcctcccacacacaggggttgaaccagaccttgctaaatcttctgcgcacagtgaagctgcccatcagatcataagctcttgggaggcagacagggagctggtaaatcactagtgcctcaggctctgacccagggagcagggattcaacactggagccctgggagggtgggagaccaactctgcaagcccagagactacccgctggcacccatccactccagtcccagccccagggaaatgcacacattgatttaaagcctcctgggcctggctagaatcccccgagggactagggagagactccacaaacaggactgcctctcttttccaggagagcagaggacygttgtggggaggtctggacaagctccatccagttcccggagctcctcagaaggcagagctggctgccctcgccccccaccatgggcaaccac

SEQ ID NO: 223187 - DNA, 489 bp, Homo sapiens
aaatgtttgttttcttccacataaacatcatcaggagagtataaacgttaatttttctttttaggtagacatcctactcttctgggagtccattaaatagacaagagacactgaaaacacctagagatgcataaaccacatcagatgagagcccacatttctggtttaagttatttcmtagtgaacaagttatttcttcaggaacaatcagtaaatggatacatttcctggacataacatcttgttaaaaaggagcttgctgatataattcaggatatagtggcagaggttttatttttaacagttttgttttctttcctcattgatgctacaaggaaacatccaaaatggccgtagcatgtgttcaccatccgcatcttgtgcagacctcagtggcaaagatgccagcccatggggctgaactgttcttcctctttgcaaggagggagcaattggtgtattaattaagcagtgaatttttaatgcttg

SEQ ID NO: 223188 - DNA, 415 bp, Homo sapiens
ctctacttgcttcagctggaaggaagctccatttgtctctcttcctacctgcagagacactgctaccttcagaactcagacagaggatgactctgtgctgatggcagccaggtgccttcgtaaattctcagagaggacttattccacgtcctgtgtatctccagcatgcagaggtgggtgtgtgtgcacgcacgtgtgcatgtatsatctgtttacatgtgggcaggctgacctgaagatgcatctcagccctgagggtccttgcctgagccaggacagggaggtaatggtaaatggcagaaaccctgtggatagaagttatgagcctttgctcttaggctgtgggaggcactacttagagatgagtgcaagatgatgatgcgttttggtgagggtgttgtcagcagttcttctg

SEQ ID NO: 223189 - DNA, 397 bp, Homo sapiens
tcagctggaaggaagctccatttgtctctcttcctacctgcagagacactgctaccttcagaactcagacagaggatgactctgtgctgatggcagccaggtgccttcgtaaattctcagagaggacttattccacgtcctgtgtatctccagcatgcagaggtgggtgtgtgtgcacgcacgtgtgcatgtatcatctgtttacatgtgggcaggctgacctgaagatgcatctcagccctgagrgtccttgcctgagccaggacagggaggtaatggtaaatggcagaaaccctgtggatagaagttatgagcctttgctcttaggctgtgggaggcactacttagagatgagtgcaagatgatgatgcgttttggtgagggtgttgtcagcagt

SEQ ID NO: 223190 - DNA, 415 bp, Homo sapiens
ctctacttgcttcagctggaaggaagctccatttgtctctcttcctacctgcagagacactgctaccttcagaactcagacagaggatgactctgtgctgatggcagccaggtgccttcgtaaattctcagagaggacttattccacgtcctgtgtatctccagcatgcagaggtgggtgtgtgtgcacgcacgtgtgcatgtatcatctgtttacatgtgggcaggctgacctgaagatgcatctcagccctgagggtccttgcctragccaggacagggaggtaatggtaaatggcagaaaccctgtggatagaagttatgagcctttgctcttaggctgtgggaggcactacttagagatgagtgcaagatgatgatgcgttttggtgagggtgttgtcagcagttcttctg

SEQ ID NO: 223191 - DNA, 415 bp, Homo sapiens
ctctacttgcttcagctggaaggaagctccatttgtctctcttcctacctgcagagacactgctaccttcagaactcagacagaggatgactctgtgctgatggcagccaggtgccttcgtaaattctcagagaggacttattccacgtcctgtgtatctccagcatgcagaggtgggtgtgtgtgcacgcacgtgtgcatgtatcatctgtttacatgtgggcaggctgacctgaagatgcatctcagccctgagggtccttgcctgagccaggacrgggaggtaatggtaaatggcagaaaccctgtggatagaagttatgagcctttgctcttaggctgtgggaggcactacttagagatgagtgcaagatgatgatgcgttttggtgagggtgttgtcagcagttcttctg

SEQ ID NO: 223192 - DNA, 547 bp, Homo sapiens
cattaaacattgaggaagttgatcaccctcttatctgtgatagagaatgggaggaaattcatgaagtgagaagcaagagatgatgaagattttgattttgaatatgttgacttaggggttaaattgataaaataaatttaactctctgttgcaaaatccaaattggatatagaagacagatgagctagagagaatgtatcttcagggaagatagccctgaaggagagctgctgctttatggaagggcaagtgaaatgcagttgaaagctgccttcagaaycttccagtccagtttctgccacctccattgtcagggaatgtctagttgttcacgtaatttatttctaactacatgttttggttacttactatttaaatatattgtatgcacactgatatggtttggctgtgtccccacccaaatctcatcttgaattgtactccccacaatccccacatgttgtgggagggaccaagtgggaggtaattgaatcatgggggcagtttcccccatgcttttctcatggtagtgagtgagttctcatga

SEQ ID NO: 223193 - DNA, 547 bp, Homo sapiens
cattaaacattgaggaagttgatcaccctcttatctgtgatagagaatgggaggaaattcatgaagtgagaagcaagagatgatgaagattttgattttgaatatgttgacttaggggttaaattgataaaataaatttaactctctgttgcaaaatccaaattggatatagaagacagatgagctagagagaatgtatcttcagggaagatagccctgaaggagagctgctgctttatggaagggcaagtgaaatgcagttgaaagctgccttcagaatcttccagtccagtttctgccacctccattgtcagggaatgtctagttgttcacgtaatttatttctaactacatgttttggttacttactatttaaatatattgtatgcacactgatatggtttggctgtgtccccacccaaatctcatcttgaattgtactccccacaatccccacatgttgtgggagggacmaagtgggaggtaattgaatcatgggggcagtttcccccatgcttttctcatggtagtgagtgagttctcatga

SEQ ID NO: 223194 - DNA, 435 bp, Homo sapiens
tatatacatgcaaatattcttgaaaatctgaaattcaaacattttcactttaaagagggtgcataagaaaaatgcctggcacagtgttgggcacctagtgggcatttggggtttttggttaactaattgaatgttagcaatctgtagatttctgatatgacaaataacttaatgactcactcatcatttaggaatattctgaagtacctatattttttaaaattcagctcaattgtatayttcattagaagtagaaatatgaggcagagaatgtcagggtatcagaaaaatatgattgaatatttagtgacttctgagataaatgctgttaagaataaaacaaagtattttacattaatgtgaggtatcttttaggtatcattcaaaaatcattttgtaattaatattgctaaatgaaaatactaatagcctaag

SEQ ID NO: 223195 - DNA, 435 bp, Homo sapiens
tatatacatgcaaatattcttgaaaatctgaaattcaaacattttcactttaaagagggtgcataagaaaaatgcctggcacagtgttgggcacctagtgggcatttggggtttttggttaactaattgaatgttagcaatctgtagatttctgatatgacaaataacttaatgactcactcatcatttaggaatattctgaagtacctatattttttaaaattcagctcaattgtatatttcattagaagtagaaatatgaggcagagaatgtcagggtatcagaaaaatatgattgaatatttagtgacttctgagataaatgctgttaagaataaaacaaagtattttacattaatgtgasgtatcttttaggtatcattcaaaaatcattttgtaattaatattgctaaatgaaaatactaatagcctaag

SEQ ID NO: 223196 - DNA, 716 bp, Homo sapiens
gaattcatattctgctggggagtattagagattctgactggaaataattaygagggaaaggctccagtgtctctgtcaagcccccagtgaggtcaaggccccactttatagtccaagcatcaggaaaccagctcatcaggtgaggactttacctcgatacttctccttccccctccctggcaaaaaatattacctaccttttagattgtagtctaccaccttctagggggtcggagaaagaaggatgaggatgtgaaactcaaactaatttaattcccaaccattttcctgagttcttcacaggagcagggtttctctatgtttccctggctttactcaagaggggacttaatcctccatggtagctccctgaccaccataccctgggatctgaaaatagttgaaaggaaaacttggcaagaactctcatccttaaggatgagaaatatttttaaatagaggagtcccaattccagaataggcaaacaaacaaacagcaacaacaacaaatacccagaaaacccaccctggcaagactaatctaggttaaaaaaagagaagttatcatcaaatattataaattaaaaagttatgtatcttcataacaataataaagcagagaacaaaatataaaaatgaaagactgtcaataactatacactgccaacgttgaaagcttagacaaaatggaaaacatacattaaaaagtataatct

SEQ ID NO: 223197 - DNA, 469 bp, Homo sapiens
tggcaagcccttctcaggccacttgttagagtttagggataagctccttaaaagtagcaaccgtaagtgaccatctttcaaccccccataaggcctagatgctgtcaatttgttttagcatgcattattgagcatcttctacgtacaaaacacatgctacatattttcatttcttaatgttcaaatcaatgagtattagggtactcattgatcatttwaaaaagaacacagatgcctaggaaacatgagtgatatttcaaaggtcacgagttacagctagaattgacaccaggtttcctgactatagttacagagacatgacctctatagcctgccttcctcttgccaaattaagaaagagttaattgttttgactaaatcagctcagtcatcactatcctcacaagtaaaataaatcagaatagcacagctgctcctcagaggacagctgagggagaagcagagaccc

SEQ ID NO: 223198 - DNA, 526 bp, Homo sapiens
ggtcacatttcatattatctctacaggcgagggacccaagactgcagagaggtgagacacctgcccaaagtgacagagctcatagcacagggctctgggaagtgctccccatctccccctcccctcgccctctgcctggcatctgcccttcccagcagggactgcctccctcactggcctcatgtgacctgttaatcraatcctgcaccagccccatggagttttcccatcactcattggggaggaagcagatgcccaggaaactgcttaaataacccgtgcagctctgggaaagccccagccctggctcccagcagcagcccagctcctcctgcccagaagcaccaactgttctctgagactgcaaaaaggcaatgtttaaagccacacggggactgtggacggtgaccttcaactcaagcctccagtgagccgctccctggggttactcaccatccgcttccacccctgggactgtggttgttttagttagaagaccagtcccagcctggatgacctggcacgc

SEQ ID NO: 223199 - DNA, 532 bp, Homo sapiens
gaatagaatataagttttaggacttaagatgaagcagctaaatgccaccaggacacaaaacaaaacataaaattggaaaaccaagctgtgtgttacctactaataaaccaaccaggctaaacaatcactttaaggaatgaatttgtttgttcgtttgtttttgatagagaccaagtctcactttgtcacccaggctatagtgcagtggcatgattagagctcactgtagccttgacctcccaggctaaagcaatccttctgccccagccttccaagtagctgggactacaagaatgcactaccatgtacasctaaattttttattattttttttttgcagagatggggtctcactatgttgcctaggctggtctcaaactcctgggctcaggggatcctcctaccttggcttcccaaagtgctgggattataggtatgagccaccatgcccagcctttttttttttttttccgaaagaaccaatacaagaatgaaaacatggctgagttctcctaataggcactgagtgatc

SEQ ID NO: 223200 - DNA, 449 bp, Homo sapiens
gaggtagctacccggatgcagtcctttgggatgaaggtaagatgttgctggaaccctgtgatgtgggactttctgcagcaattttgggaaaggcagcatgtctgggcagaagccagaagctttgttctaggagggtctgaccctctcttggagcccccatctaaataagtgttaaagtcaaggagggagagaacactggcctgctgatctggactcaaaagctggaaatacttggtgggggtcctttagctctctggtgagtgaatagccctgagtcccagtgaaccaggtgttgatggctsttttgagactttggttcctgtcttcttagtttaaaagaatttaaacaagagacacggtgcagcattgaggagtttattgcaaaggaaaaagaatattttgaaagttaagtgcagagtagacagtacacctcgggagagagagaattc

SEQ ID NO: 223201 - DNA, 408 bp, Homo sapiens
tgacatcagacaacccattctctccaactggaaatatacctgtgcctcacatggcatccactgaggtcacttgagtgcactgatggatagaaaaacaggctgaaatttatgaagttaaaaattcagttaaaaattgagctcaatgtttagcctctcagcctccttcctcataagcccctaaacaaatcatgttctgtgcactaaggtcttcggaacagtactagaaaygcagattacttgagcatctcaaaatatcttcctagactgggtcatgaaagagggcatgggacgatcttatcgtatcacgtctcccatggctgtccacatgacctctcccaaacttaaagggcaggattcgttgtaaaattcagctggtttctttaggaaactctgtaatatttttcataa

SEQ ID NO: 223202 - DNA, 426 bp, Homo sapiens
tcagacaacccattctctccaactggaaatatacctgtgcctcacatggcatccactgaggtcacttgagtgcactgatggatagaaaaacaggctgaaatttatgaagttaaaaattcagttaaaaattgagctcaatgtttagcctctcagcctccttcctcataagcccctaaacaaatcatgttctgtgcactaaggtcttcggaacagtactagaaacgcagattacttgagcatctcaaaatatcttcctagactgggtcatgaaagagggcatgggacgatcttatcgtatcacgtctcccatggctgtccacatgacctctcccaaacttaaagggcaggattcrttgtaaaattcagctggtttctttaggaaactctgtaatatttttcataatagctgcatcaatttacattccc

SEQ ID NO: 223203 - DNA, 647 bp, Homo sapiens
gtgttcaactaactaaatgcatatttactaagtgtccttctgctagattccagggattcaaggacaagaataccagagtctctgccctcactaagcttagggtggccaggygcagtggctcatgcctgtaatcccaacactttgggagtctgaggcgggaggatcactaggtcaggagatcgagaccatcctggctaacagggtgaaaccccgtctctactaaaaatacaaaaaattatccgggtgtggtggcgggtggctgtagtcccagctactcaggaggctgaggcaggagaatggcatgaaccaaggaggcggagcttgcagtgagcggagatggagccactgcactccagcctggataacagagcgagactccgtctcaaaaaaaaaaaaaaaaaaaaaaaaaaaaaaagcttagggtgaaggaagcagatgattaaacagatagaccttttgcagtatgatgagcactgtgatgatgaagcagaaatttggaatgcttctgggaaaatgtgacaggagcttctaccttagcccaggaagctcagggaagccttccctgaagaggtgccctggaagctgagatcagatcaagcaacatcaattttttttcaaagccatcatgggacttgagttctaaccta

SEQ ID NO: 223204 - DNA, 500 bp, Homo sapiens
  misc_feature (1)...(500): n = A,T,C or G
ctgtctcaaaaaaaaaaaaaaaaaaaaagacttgtaatataaggaaggggccaggtatggtgtctcacacctgtaatcccagcactttgggaggccaaggtgagcagctcagttgaggccaggagttcaagatcagcttggccaacctggtgaaaccctgtctctactaaaaatacaaaacttagctaggtgtggtggtgcacacctgtaatcccagctacttgggargctgaggcatgagaattgcttgaacccggaggcagaggttgcagtgagccaagatgtcaccaccacactccagcctgggtgacagagcgagacaagtcttccaggcaatcccaacccctctgtttcacctggtccccttcttctggaatcacaatgtatcagtgaccttcatatggtgttggtccagaaccatacatggttatgcaagcatggagaacagagcaatcatctctgcttgnnnnnnnnnnnnnnnnnnnnnnnnnnnnnnnnnn

SEQ ID NO: 223205 - DNA, 507 bp, Homo sapiens
ggaaacaaaccaggcacaaaacaaggggaagaggagaatggagaaggaggcctatggggacatgctgggctcctgcaaccttaatggtggtaaatataaaagggactgaccttctagtttttcagtgtaacaccagagctgtagagggagaagggccactaggagattccatttcagtgatgtagccagcaggaaagcccccataagtgagagccyggagaagtatctcctaccctggactgtggcaggagggaaaaagagcagtcactgtagggtgaatagagtggtccttagatttagtgttttacttcccctcccagccttgagccagctgctgtgactcatggctctttggctgcaggaaacccgttacaacctaactttctgcctaggtcaattggttttggtttcattttctagtctggagtatgatcatgttgtctattaaactcagaaattttcttgacattttcagtttcatgcagaatgaaaaagaagtggtcttgt

SEQ ID NO: 223206 - DNA, 400 bp, Homo sapiens
aggacatgggcagaatatgcctattttaaggtagaatagtgagatgatttgtatcatatacaatcttaccgctctatccacattcctcacccygtctacattccttatttttctttacaagttagagaattttacaaagatgtaaggcaatttcacatataaactatccatgagtacctaacaaagtgctggtcttctaataacaatacttttaaatgctggtatattagtctgttttcatgctgctgataaagacatacacaagactgggaaagaaaagaggtttaattggacttacagttccacttggctgaggagtcctcagaatcatggcgggaggtgaaaggtacttcttacgtagcggtggcaagagaaaatgaggaagatgcaaaagcggaaa

SEQ ID NO: 223207 - DNA, 450 bp, Homo sapiens
catttgtgattggtaatcagtgcagagacttattgaattgctttgatcccagtgggaatggatttgtgcagayccaggtacactcttccttaataattattgtgtccagtggtatacacttacaatttggtgagacaaatgaaactgggcaagtaagagagggaacagagttgagagaaatgcctctcaaatccaatgaggtggtaccattaagcttgtctataaaagctgagtatacctgagagtgatttcctgagtctagaactctcagcaatggatccaataagtgtgtggtggggaaaagcaactaatcctgagaaactgccatgtgaagacactgaatccactgacattgatgtatctcccaattatagttgaagaaatggaggtcgataaatgttaagtaaacttttcaagatcacagagctaggattcagaataaagacaact

SEQ ID NO: 223208 - DNA, 450 bp, Homo sapiens
catttgtgattggtaatcagtgcagagacttattgaattgctttgatcccagtgggaatggatttgtgcagacccaggtacactcttccttaataattattgtgtccagtggtatacacttacaatttggtgagacaaatgaaactgggcaagtaagagagggaacagagttgagagaaatgcctctcaaatccaatgaggtggtaccattaagcttgtctataaaagctgagtatayctgagagtgatttcctgagtctagaactctcagcaatggatccaataagtgtgtggtggggaaaagcaactaatcctgagaaactgccatgtgaagacactgaatccactgacattgatgtatctcccaattatagttgaagaaatggaggtcgataaatgttaagtaaacttttcaagatcacagagctaggattcagaataaagacaact

SEQ ID NO: 223209 - DNA, 530 bp, Homo sapiens
gggaaggctcagaagaaatattttagcaaagacctaaatgaagtgatggggaagccatgtgaatacctggggaagagcacgccagcccatgggaagagaagcacaaagtctctgagacaagtatgggctggygtgtcagagccacagaaggaatccagtgatggggagaaaaagtcagcagcccatgagagcagcgcacagagctaactctcctagggttcattgtttttgtttgtttgtttgtttgttttgctgaaatgtattgaaatcttactatgtatcaggttttaaggactttagatttattagctcatttatttcttcaaaaaacattatgagataggtattattatcatccctattttattttatttttttaaattaattaatttattttttgagacggagtctagctctgtcggccaggctggagtgcagtggcatgatctcagctcaccccaactccacctcccgggttcaagcaattctcctgcctcagcctcctgagtagctgggattacaggcgtgca

SEQ ID NO: 223210 - DNA, 530 bp, Homo sapiens
gggaaggctcagaagaaatattttagcaaagacctaaatgaagtgatggggaagccatgtgaatacctggggaagagcacgccagcccatgggaagagaagcacaaagtctctgagacaagtatgggctggtgtgtcagagccacagaaggaatccagtgatggggagaaaaagtcagcagcccatgagagcagcgcacagagctaactctcctagggttcattgtttttgtttgtttgtttgtttgttttgctgaaatgtattgaaatcttactatgtatcaggttttaaggactttagatttattagctcatttatttcttcaaaaaacattatgagataggtattattatcatccctattttattttatttttttaaattaattaatttattttttgagacggartctagctctgtcggccaggctggagtgcagtggcatgatctcagctcaccccaactccacctcccgggttcaagcaattctcctgcctcagcctcctgagtagctgggattacaggcgtgca

SEQ ID NO: 223211 - DNA, 530 bp, Homo sapiens
gggaaggctcagaagaaatattttagcaaagacctaaatgaagtgatggggaagccatgtgaatacctggggaagagcacgccagcccatgggaagagaagcacaaagtctctgagacaagtatgggctggtgtgtcagagccacagaaggaatccagtgatggggagaaaaagtcagcagcccatgagagcagcgcacagagctaactctcctagggttcattgtttttgtttgtttgtttgtttgttttgctgaaatgtattgaaatcttactatgtatcaggttttaaggactttagatttattagctcatttatttcttcaaaaaacattatgagataggtattattatcatccctattttattttatttttttaaattaattaatttattttttgagacggagtctagctctgtcggccaggctggagtgcagtggcatgatctcarctcaccccaactccacctcccgggttcaagcaattctcctgcctcagcctcctgagtagctgggattacaggcgtgca

SEQ ID NO: 223212 - DNA, 584 bp, Homo sapiens
ttctgtactgagtacaaagccagagacggccttagactcgtgctcaaatatccagttgcttcctgaacttcagcatttggatgctttgcaggctcctcctacggagtgtgtctgaaactcagctgcacatcttccccactccacccagacccattcctcctccytcgtttcctgttcccatgagtggcacagtcacccttccagggtaatggccagaaacataggcctgattctcaatgcccatttctctctctaacttcaggctgaattggtcgattccacctcctgtcatctgaatccatccaattctgtccttttgtctccatcctcctactcttaccattgtccaggccccttttatttcttgcttaggttacctacacagcttccttactagtaaccttgcctgcattctttctaatttccaatctattctccatactacaaataacatttaattaaaaattgaatcacagcatcttttcttcagtggttccccaaggcccctgagtgaaagtcaaaactcctcaacatggtttatgaggccttaacattgcttacttcatccatctcacttcttgcaa

SEQ ID NO: 223213 - DNA, 502 bp, Homo sapiens
atacattcatttaggattaaagcattttttgttaaatgagttaatacttttaaaaagccactgctgtgattcattttcctttaagaagacaactttgtatagtttaccattctgataagtccaattgcccttatttccaaatttttgggaaagatcttttattttactctcaggtaccacttatagctctaaacacacaaaaagatgtggctgccagtatctgtttttctttatttctggtgtgaccatctatggtaactttatgaatacctatggaaggtatttgatttaattctatgtagtacttgacacacaaagacacaaatgagttaaagctaagaagtgaaagacacatagtgaaaacaccacctacctatwatacatagaaaatttaaagggaaaaaagatatgatcaggtaataacaatgaccaaaaaattcttacatgtcaggctctctgtgaagcagtcagttgatcctaaaaaaatcttatgtacaaatag

SEQ ID NO: 223214 - DNA, 568 bp, Homo sapiens
atgcattattttctttaacactgacaactccaaaaaataagaattgttgttgtcattgccgtaaagaggagggaatggattcttagaggggctaacccattttacagggccatacaaatataaatttagttgtggaaactggccatcttaccccactctggtcactactcttgttatatgtttctggtctaatttcctcttctaaaatttttaggaatttcacttgaattaagaactggtgaacatgctctggttctaaaagcaatcaagataagcctaataaaaagattaatataaatatattgaaagtcaatcaagtgcaaagtactatacttggtattttgggaagtaagaacagaataagaataatatctacctttatggaagtaagaaaagagttaaacatagrtataattaaataacaattcaagggttaaacaaggatcataagcaccacaacaactttatgccaaacaaatgacataattaaatagtagacagtaggtacaggaccctctagcagggaataatcactctggctaaagaagtgctacaggctttttagagc

SEQ ID NO: 223215 - DNA, 568 bp, Homo sapiens
atgcattattttctttaacactgacaactccaaaaaataagaattgttgttgtcattgccgtaaagaggagggaatggattcttagaggggctaacccattttacagggccatacaaatataaatttagttgtggaaactggccatcttaccccactctggtcactactcttgttatatgtttctggtctaatttcctcttctaaaatttttaggaatttcacttgaattaagaactggtgaacatgctctggttctaaaagcaatcaagataagcctaataaaaagattaatataaatatattgaaagtcaatcaagtgcaaagtactatacttggtattttgggaagtaagaacagaataagaataatatctacctttatggaagtaagaaaagagttaaacatagatataattaaataacaattcaagggttaaacaaggatcataagcaccacaacaactttatgccaaacaaatgacataattaaatagtagacagyaggtacaggaccctctagcagggaataatcactctggctaaagaagtgctacaggctttttagagc

SEQ ID NO: 223216 - DNA, 614 bp, Homo sapiens
ttagtggattctcgaggaatcacatagaggtctccatccaaattgtcattgcaaaaaaaaaaaaaatactctgagaaatgtataaataattaaaaggaatagcaattagaacatacattccttcataaacttaatgaaagctaatttataaatctaaattataatctgacagtcaatattttctctataatagtaaaataaccctattgtttattataacttgttcttctttaaatccacaacgaaaaggagaacatgctcattgtattcttagcagttttatctgatcacttaggaaccaaggcagtgttgttaggtgctgaaaattgtgaaggtagattgatgcttaaaatgaaggaggtcgccgccctcttgttaaaccctgcctgactcacttcggcagcttcagatgataacagcacgttcgccagattttytaagtgatgaaaatgtcaggaaacccaaagttatagttcccccaacaaccataacttgctcactttgcaaggaattattaaggaagaaaagttagaaactgacaagcagtataaacctgtagttatacggaattcgtgtctacacaggcagagcaaaattcgataatgaggcaacta

SEQ ID NO: 223217 - DNA, 474 bp, Homo sapiens
aaggagcaattggccgtctatgagggtctagttttcccatctaaggtaggactctaaggccctggggaatggtggattcactagatggaaaaagcctgtctttaattgacacataggagtttaaaaagggcaacataataatagcaggggacttcaatactccactgacagtactagacaggtcatcaagacagaaagtcaacaaagaaacaatggacttagagtataccctagaacaaatagacttaacagatatttgtaaaacwttctaccccaaaactgcagaatatacattctattcatcagcacatggaacattctccaagatagtccatatgataagccacaaaatgagtctcaacaaatttaagaaaattaaaatcatatcaagtactctttcagatcacagtggaataaaattggaaatcaactccaataagaacactcaaaatgatgccaatacatggaaattaa

SEQ ID NO: 223218 - DNA, 585 bp, Homo sapiens
tttcttccattgatttaaaatgaaaatgaacctggattttaaatgtgcattctaattgtccctttagcacatcagaacagcactgcctaatagaaatataatgtgagctacatatataattttgaattttctaaaatgcacattttaaaaaagtaaaatgaaacagttaaaactaatttagtagggcttggtgcgrtggcttacacctgtgatcccagcattttgggaggctgagggtggcagaccacctgaagtcaggagtttgagaccagtctgggtgacatggcgaaaccctgtctctactaaaaatacaaaaattagccaggagtggtggtgcatgcctgtagtctctcagctactcaggaggctggggtgggagaatcacttgaacgtgagaggcggagtttgcagtgagccaagatcacaccactgcactccagtctgggcgacagagtgacttagtctcagttaaaaaaaaaaaaaaagtaatataccttatttaatacaatctatctaaaatatcattattttaacatgtaattaaaacgtaaaagttaatgagataatacattattttttctacca

SEQ ID NO: 223219 - DNA, 585 bp, Homo sapiens
tttcttccattgatttaaaatgaaaatgaacctggattttaaatgtgcattctaattgtccctttagcacatcagaacagcactgcctaatagaaatataatgtgagctacatatataattttgaattttctaaaatgcacattttaaaaaagtaaaatgaaacagttaaaactaatttagtagggcttggtgcgatggcttacacctgtgatcccagcattttgggaggctgagggtggcagaccacctgaagtcaggagtttgagaccagtctgggtgacatggcgaaaccctgtctctactaaaaatacaaaaattagccaggagtggtggtgcatgcctgtagtctctcagctactcaggaggctggggtgggagaatcacttgaacgtgagaggcggagtttgcagtgagccaagatcacaccactgcactccagtctgggcgacagagtgacttagtctcagttaaaaaaaaaaaaaaagtaatataccttatttaatacaatctatctaaaatatcattattttaacatgtaattaaaacstaaaagttaatgagataatacattattttttctacca

SEQ ID NO: 223220 - DNA, 346 bp, Homo sapiens
tatgctctgatgctcatccagtaggcctggcgtagaattcagatatatgaatgtttatgaggtaaccccamgtgattttgatgtaggttgtgcctggaatattggtattggcaacctcattttgcaaagagctaagtgagacccccagttaaagcccaatggctcagaccaagccacagagggtggaggagggcaactcaacttcaaatcacagtgcttgggtgggggcgaagcaggcagtggggagttgcggttccagaactcagaagcttaaaaggtcttgcaccatccacttatactcacaaatagggtcagattggagggccaaccagacaggaatggtcgc

SEQ ID NO: 223221 - DNA, 346 bp, Homo sapiens
tatgctctgatgctcatccagtaggcctggcgtagaattcagatatatgaatgtttatgaggtaaccccacgtgattttgatgtaggttgtgcctggaatattggtattggcaacctcattttgcaaagagctaagtgagacccccagttaaagcccaatggctcagaccaagccacagagggtggaggagggcaactcaacttcaaatcacagtgcttgggtgggggcgaagcaggcagtggggagttgcggttccagaactcagaagcttaaaaggtcttgcaccatccacttatactcacaaatagggtcagawtggagggccaaccagacaggaatggtcgc

SEQ ID NO: 223222 - DNA, 554 bp, Homo sapiens
gggcaaatttaattcattgtttatgtttttaggaatgtatggtctaataatttgttatttatacatatatcaagattcaattaaaaatagcaaggtcctactgctaacggaatatgygctatgtgaatatacctgtcagtaaaagggttaatattatacaaatagaaagaaactaaaatattgttttatagtggtgcagtcaaactgagtaaaccattaactgaggcttatcttcatctttgctctgtggatgcttatctgtgtcattaccataatgcactgcaggcccacactctctgggcctgatgcaatcctccactttatgtattcagaaatctagaatttgggagtcagtccttcaccaaagaggaagcaaatgtcttcaaagacagacagtgattcgctaaagtttattatggccattaggacatactttcttttttcattagattgttgttgattacaattaggaaacgtatagctttaaaattatcttttttatgaccttgtggcagtttaaaggtgatacctcattgattaaataggttttagtt

SEQ ID NO: 223223 - DNA, 611 bp, Homo sapiens
tgcttaacgacttgttttaaattttaagcttattattactcaggccckccaggcctcatctcaacctcagcaaccttgtattttagccagctgtgaaagagaccttctctgtacaccactgtccaatgtaggaatgctctggttatgtagataaaattgggagctcaaactgtaaggagggtgagtgtattggaggtgagaaatattctcaagttatgccaactcttcattcttttattcttccctatagtggttacttttctcaggtgagcatagaataaacaatccttagtttagatagtaatttggaaaggagaggtgaaagggtcatactccaaagaattttaccaggatacatcatctcttaatttgtagtcaggacacatcttatttgccagtcctacctctatttttctgatgagaaaaaatatataattaagaatatgataaacacaagttatttgaagatagaaattaaagtaagaagatggtgctactaataacttggcacatagatgaacagtggcaaatcccaattaacacacattttttatttgaaaaattcactttaaatattatttggacaactggaggggcgtctctgttttttc

SEQ ID NO: 223224 - DNA, 611 bp, Homo sapiens
tgcttaacgacttgttttaaattttaagcttattattactcaggccctccaggcctcatctcaacctcagcaaccttgtattttagccagctgtgaaagagaccttctctgtacaccactgtccaatgtaggaatgctctggttatgtagataaaattgggagctcaaactgtaaggagggtgagtgtattggaggtgagaaatattctcaagttatgccaactcttcattcttttattcttccctatagtggttacttttctcaggtgagcatagaataaacaatccttagtttagatagkaatttggaaaggagaggtgaaagggtcatactccaaagaattttaccaggatacatcatctcttaatttgtagtcaggacacatcttatttgccagtcctacctctatttttctgatgagaaaaaatatataattaagaatatgataaacacaagttatttgaagatagaaattaaagtaagaagatggtgctactaataacttggcacatagatgaacagtggcaaatcccaattaacacacattttttatttgaaaaattcactttaaatattatttggacaactggaggggcgtctctgttttttc

SEQ ID NO: 223225 - DNA, 602 bp, Homo sapiens
ccacattcacccaggatttttacttaaaggctttgctaagtcttgtgggaagtgttgggggaaagagtcaaagccaygtctgggctgaggagggagttgtaggttggtgttcagggatgccaaatggctgagacctgaggagtaaagatcctggtgaagagggaaattgctgagaagagagcccaaagatctatatgcaatttccccttgaggcatttgccaactcttgagccacatatgagcaggaggaaactccaagaaacctagggggaaaaactccagcagttggaaagctatcgagatgagcagagacttcagtagccccttgaggctgaggaggcaagggttggagttcaagtccagccaggtggaagggctctgtaagcaccccaggtcttcagttgaggcccagaatgtccactcccaagagtgagagctctgcctcaggaatagggacaaagcataagtaaattctccctaacgaagcctaaaacccaccctcagcaaaatgaaggtattttctgtaatctgtttgcttgctgagaaaaaaatgtttccatctttggaggaaaacaccatcatccaggggcttttcaatgttt

SEQ ID NO: 223226 - DNA, 546 bp, Homo sapiens
aagtaatatatgcatttataatgtgttgcctagtgggaatacgttggtttgaaaagatgtttatgtattagataattagcaacttacagcataattttctctctgaaatgttttagatttaaataattctgaaaggatccttctagaaatatatcacagttcaattggattacccattctaatataggtataaacaacagttttgaaagcctgtrgctattgcttatgttcacaaatttcttgctatttattttgaaacaataaaaaaagatattttgctgaatttaatttggactctattattaaatgaaaattgatatatgccatgttcctcttattactgaaatactttggaaaatgtaatagagattttgactgcacactccccttttttccagtacaacagtgctgtgatatatgtggttttataacagtccaaccttcccaaattcctgctttgaatagtttatttttcaaaatatagagcaatcatcactgtgcaattgtgtgtgccagctaacctttcatcttaaacaggatttccaa

SEQ ID NO: 223227 - DNA, 546 bp, Homo sapiens
aagtaatatatgcatttataatgtgttgcctagtgggaatacgttggtttgaaaagatgtttatgtattagataattagcaacttacagcataattttctctctgaaatgttttagatttaaataattctgaaaggatccttctagaaatatatcacagttcaattggattacccattctaatataggtataaacaacagttttgaaagcctgtggctattgcttatgttcacaaatttcttgctatttattttgaaacaataaaaaaagatattttgctgaatttaatttggactctattattaaatgaaaattgatatatgccaygttcctcttattactgaaatactttggaaaatgtaatagagattttgactgcacactccccttttttccagtacaacagtgctgtgatatatgtggttttataacagtccaaccttcccaaattcctgctttgaatagtttatttttcaaaatatagagcaatcatcactgtgcaattgtgtgtgccagctaacctttcatcttaaacaggatttccaa

SEQ ID NO: 223228 - DNA, 528 bp, Homo sapiens
taagtctgaatttctagtagtgaatgatggggttggacggagcataatcaagaccaaaatattgcttcttaaatagatgctgaatccctgctcttcttggctggatagtgttaaaattcatttggagactttagtcaggctttcgtgccctgtgctacagatcaagagatctgtagatcttagatgctggtagagtagaggtaatatggagaaaataacatgttataacatgtaatggactatcaactacttttccaggatggttacaatgctggtgaacatcatttttgaaagactgaaagaaaagacagtcaaatctgaggtctgattaagtgrctttctgggatcataagccttttttctaagagaccatggatgggacctttcttttaccttcttgccctgctttctatacctggcaagctagtgtgtataaaaaaaaattttagctttggagcaaaacgagcctgggtttgaatcctgattcagtgtgacttgactgatctccagttttctaacctgtaaaat

SEQ ID NO: 223229 - DNA, 329 bp, Homo sapiens
gtgaggcccctcacctctctggcaattatgagcctgtggtaataaaataaacacacacagccactgtcctccatatgatttttctcgcttgagggttgcagaagcaacactgagagccttgataataaaagtcacagtgtcaggcagggactggggtggtgctctttaacatttttgcagtggccctrggtgagttggattcacacataatgccaggcacctgctctcaggtgcttgaaagacttttgcattagttggcaagagtagcggagaggaggaaaagagggaagaggccattgagatagagtcggtaaaatggctcttgaaat

SEQ ID NO: 223230 - DNA, 329 bp, Homo sapiens
gtgaggcccctcacctctctggcaattatgagcctgtggtaataaaataaacacacacagccactgtcctccatatgatttttctcgcttgagggttgcagaagcaacactgagagccttgataataaaagtcacagtgtcaggcagggactggggtggtgctctttaacatttttgcagtggccctaggtgagytggattcacacataatgccaggcacctgctctcaggtgcttgaaagacttttgcattagttggcaagagtagcggagaggaggaaaagagggaagaggccattgagatagagtcggtaaaatggctcttgaaat

SEQ ID NO: 223231 - DNA, 542 bp, Homo sapiens
ctgattctccaagtcttgctgtaagctttaataagttgttggtattgtgggttcttttggtaaactttttgagaaatgtaccaactagcrctatttggtgtgtgttttttgcttctactctaatgtcaagtcagtgggagaagctttgtgtacttgctttggtaaactgattctgagtatcttatttccttatgtgcgtggaagtgcacttaatgaatttctgctacagtgtgtggtaaggatgctatttttaaagtctgagttcccagagtaaattttttaaataggattagggttttatcttataactaatataataaagcttaaattagaattataaataatatatgtatatgtatgtgtgtgtgtgtatctatctatctatctatctatctatctatctatctatctatctatctataatcccatcatgggggcaagaccctcatgacctcatttcatatatatatatttcatatatatacatatttcatatatatatatgtgagtcagattcaaaaacagcaacaaacatagaatat

SEQ ID NO: 223232 - DNA, 542 bp, Homo sapiens
ctgattctccaagtcttgctgtaagctttaataagttgttggtattgtgggttcttttggtaaactttttgagaaatgtaccaactagcgctatttggtgtgtgttttttgcttctactctaatgtcaagtcagtgggagaagctttgtgtacttgctttggtaaactgattctgagtatcttatttccttatgtgcgtggaagtgcacttaatgaatttctgctacagtgtgtggtaaggatgctatttttaaagtctgagttcccagagtaaattttttaaataggattagggttttatcttataactaatataataaagcttaaattagaattataaataatatatgtatatgtatgtgtgtgtgtgtatctatctatytatctatctatctatctatctatctatctatctatctataatcccatcatgggggcaagaccctcatgacctcatttcatatatatatatttcatatatatacatatttcatatatatatatgtgagtcagattcaaaaacagcaacaaacatagaatat

SEQ ID NO: 223233 - DNA, 542 bp, Homo sapiens
ctgattctccaagtcttgctgtaagctttaataagttgttggtattgtgggttcttttggtaaactttttgagaaatgtaccaactagcgctatttggtgtgtgttttttgcttctactctaatgtcaagtcagtgggagaagctttgtgtacttgctttggtaaactgattctgagtatcttatttccttatgtgcgtggaagtgcacttaatgaatttctgctacagtgtgtggtaaggatgctatttttaaagtctgagttcccagagtaaattttttaaataggattagggttttatcttataactaatataataaagcttaaattagaattataaataatatatgtatatgtatgtgtgtgtgtgtatctatctatctatctatctatctatctatctatctatctatctatctataatcccatcatggggkcaagaccctcatgacctcatttcatatatatatatttcatatatatacatatttcatatatatatatgtgagtcagattcaaaaacagcaacaaacatagaatat

SEQ ID NO: 223234 - DNA, 528 bp, Homo sapiens
gaagtgtacccactttataataacacaagtgtttccttgctaatcccttggcaggttcattatctgtgcagcctcaggcaatggttagcctatcgtgaaagtgaaatttaaccctcagcatgaaattaatcctcaaagacttatgtctgctcagtctagaaataatacattctaagtgattttataatccctgactctttctttatgcatgggtgctaaattgttatcgagatgttatagaccatgctaggaaattgatttttgtttactttagaaaactggacaaatctataagaacaaaaagtctgatttcccagttcacatttgcagttgtaaacccaacatggtgggatgactattttttaggcattaatagggttaccatttgttggtgatcatacttgtgtttatgctrttctttacctaatatatctaggaaaagatttttttttaatgtcatttgacaaaaaggccctttcgttgatctcattgacatttgacatggaaaaactgggaagcaccatgaga

SEQ ID NO: 223235 - DNA, 447 bp, Homo sapiens
aacttacaacaggaacaataaagtaaagcacaaggaataggcagggtaaagaacccaaagtatagaaaacaactcaagtacsggagaaatgagagtacttgttataaacctctttagaaacaaactccagagcaaatacaaaacaaaaagataagaccctagtactggaaacttccacatttggagggctaagagttcagggatgcatgatcatatgcaaaaagaagaaaaaagaacttacctttcaaaaatgggacacatgtttattgagctctaattatatgcagggcactatgcttctgtgaagatccgggtagcctgaactacccagaatgatcaaccttgttccatcaccgagtagcgatagtaaactgtagagtaatacaacctcaatatacaaccccacctcttgcttcaaatgcagactcctgcctgccagaatgaatt

SEQ ID NO: 223236 - DNA, 432 bp, Homo sapiens
ttaaatgatcaaataaatagaatatttgtttacataggctaaaattatcttcaatgtgtagattcagttaaaaaccatatccagtaaacatatgtgtgcgtgtgtctgttggaagcgaggggctaggggagggatagcattaggagaaatacctaatgtagatgactggctgatgggtgcagcaaaccaccatggcatgtgtaacaaacctgcacgttctgcacatgtatsctagaatttgaagtataataaaaaaaatttttttaactatccagtataatttttcaaagaatattatatttgcttttggaaattgtttttataagaaaattcattgaaaataataatctttcaaaaatgtaacagtaataataattagtatatatttagcttctattatgtagtagggattcttcttacaactttatgatg

SEQ ID NO: 223237 - DNA, 464 bp, Homo sapiens
tccattctgcatgaccttgattaagtcaccgggtgtctctargctcctttcctgttcttccggtggggatagtaacacctgcctcatctcacttggttcttggagaataaagagacataatagatgataaagggttttgcagatataataagctgctattacttcttggccttggcatcaccacaaaagcagtggcgaggttcctgttgagctctggcagcttctccaaggtgaccagtctttaggaagggggaagacggtgggggagaaaagcaagatgtgttggcaagctctacttagaaatgccaccttggagatacctgtcaaaactgctccatgccagatgggtgcatctacttgcagggcagtgtgctgtggtggttaagatcctggaggacctgagtttaagccccagatcaccctctggttagcatgtgacctcaggcaaattaagcaaattttct

SEQ ID NO: 223238 - DNA, 468 bp, Homo sapiens
tcagtgggtctggcctgtgggctgagattttgcatttctaaccagctccccagggatgccagggctgctactsctgagaccacacattgaggatcaagaggtgaagggatgctactggctgaatttcgtggcacttgccttcaccagcccggatatttggctatttcaggaggctggtgggtcagcggccctgtgctgcttcattccgcccccacctcccacccccagggagctgctacccagagcttccttcctggggaaaaggaatgatctgcatacaagagggatgagcctggatttaccacccaacaggctctgacaatctgtcttgctaggatattcctgatctattagaaatgacacagaaatccattcctaaaaattcctagcagctgaggacagtgagaaggctgctgggagaaaaagcagtgagtgggtgggtgtagctccccactggctgccccagat

SEQ ID NO: 223239 - DNA, 593 bp, Homo sapiens
attccctggtattggtctcctgcctgtttgtcctcaaggcccttcctcgaaacatacaaccacccaccctcctctgcaactccagactctatgcctgttgggttctgtttcccttgggggagtttagggtttgggggagaagcwgcaggtgtctttcctgctctcctttctggggaggctcctctggcagtggcctcagctcctgacctgtaggctggcatggttccagctctcatgggtggccctggctcccaggcactgtcaacaccactcccctgccaccagccctcgagctggcaggagcttcttgaggttgctgatttgaagtttcttcactgtcccacttggctcttggcccctccacacctataaccaggtcactgcattaccttccttctgtcatgtcctgccttaacttgatttctgttttcctgtttagaccctgactgctgtaccatctacatggcaagaccctggtgggggagagggaaggaacaagaggagagagagtggatgctaactgaggcagagaatatgaaaaacagaaatcagataccatcggtggtctccttcctacccagcctttgtgatct

SEQ ID NO: 223240 - DNA, 593 bp, Homo sapiens
attccctggtattggtctcctgcctgtttgtcctcaaggcccttcctcgaaacatacaaccacccaccctcctctgcaactccagactctatgcctgttgggttctgtttcccttgggggagtttagggtttgggggagaagctgcargtgtctttcctgctctcctttctggggaggctcctctggcagtggcctcagctcctgacctgtaggctggcatggttccagctctcatgggtggccctggctcccaggcactgtcaacaccactcccctgccaccagccctcgagctggcaggagcttcttgaggttgctgatttgaagtttcttcactgtcccacttggctcttggcccctccacacctataaccaggtcactgcattaccttccttctgtcatgtcctgccttaacttgatttctgttttcctgtttagaccctgactgctgtaccatctacatggcaagaccctggtgggggagagggaaggaacaagaggagagagagtggatgctaactgaggcagagaatatgaaaaacagaaatcagataccatcggtggtctccttcctacccagcctttgtgatct

SEQ ID NO: 223241 - DNA, 510 bp, Homo sapiens
caaggcaaatggtaagataggcagagttgagccctccaagtgagaacagaatttttctagaacttcccgcaggcaaggcctgtgttgcctcatccattcataacccctgtgctggggaagctttgggggagatgttttggaacaggtagggcttcgctgcatcacaaaaatcacccccaggaaggcgaccagcttctcagccaactcggtggactaaagctgcacatccatccaagcccagcttatggcggccccagcagcacaggcagcagacagcctgagttctctgtatgcagaagagcagctctgaggtggggcaataaataaaatcagaaaccgtaaataaacctgctggcctcacacagggtgaacaagcagccccctggggagctgggctctgcttccaaggaggtgattaaattccaaaccaccccagcaacttccattggaaagkcagggccgggactctgggctgggggagagggatacaatcataaaatattagaaaac

SEQ ID NO: 223242 - DNA, 637 bp, Homo sapiens
ggctctgggtgtatggaaggcaggtgcatggcctgggcactgaccttgagctttgctgcatccgtgtrcaatttcttataactgctttctgatttatgcttccttccttggcatggtattgatgaatggaagatttgaaagattctctacagccatctattaacatgccctcaggtaattcaggaaagaaatggtgttctgttttcaagtgattgaactccagccacattttattttcggtagcatgcccagatacctaagcagccactctggcctgagcttggaagtggatgtgttggatgcagggagatcagccctgcttgactgctgccttcctaggtggtccctgaaaactataaaattgtgttactagcagttttaatccagggcaggtgaggagcgcgagagggagtcagacacattgactctgacgctaaggcccaaataggattgaggaaggagggttctgttcattcctgctctggtcaccaagggacaccctaatggatgattagaccagctgcctggcatggctcctgtgagagggctgcccggacaccagctgttatggattacatcacttggctccaattatttgcttctcctggtactcatgccctttgctgtgtaactttgc

SEQ ID NO: 223243 - DNA, 539 bp, Homo sapiens
ttgagcaagaccaggtgatagagcctggtgggaggtggggctgggtgggggatggctgtgtagggatgttccatcattctctctaggacagttcagaatctgcagtccaggccactctygtggatttcatgagacagtgaacatctctggattgcctgttacgttatccaacatcctttgtaagagcatctctgcaataactccctcttggaatgacaaattgctctttttgaactctgaacagagactacccaccttgcagtagaaatttcatctctccagataagcttgtttgcctccttttatctgctaccacaaactatataacctaaccattggcatctttggaattgcatcctatacgtttaatgtaggtctgtgtaatgggctacagaaaacagaatgggcccagtggaaatttccattgaggttgtgagtgatcattcttcctggaaaaatactattggacaagatggtaaaaataattttgttttcctagaatcttaaacagaaaagtattgtcagaaaaagcccaggga

SEQ ID NO: 223244 - DNA, 539 bp, Homo sapiens
ttgagcaagaccaggtgatagagcctggtgggaggtggggctgggtgggggatggctgtgtagggatgttccatcattctctctaggacagttcagaatctgcagtccaggccactcttrtggatttcatgagacagtgaacatctctggattgcctgttacgttatccaacatcctttgtaagagcatctctgcaataactccctcttggaatgacaaattgctctttttgaactctgaacagagactacccaccttgcagtagaaatttcatctctccagataagcttgtttgcctccttttatctgctaccacaaactatataacctaaccattggcatctttggaattgcatcctatacgtttaatgtaggtctgtgtaatgggctacagaaaacagaatgggcccagtggaaatttccattgaggttgtgagtgatcattcttcctggaaaaatactattggacaagatggtaaaaataattttgttttcctagaatcttaaacagaaaagtattgtcagaaaaagcccaggga

SEQ ID NO: 223245 - DNA, 538 bp, Homo sapiens
tagagcctggtgggaggtggggctgggtgggggatggctgtgtagggatgttccatcattctctctaggacagttcagaatctgcagtccaggccactcttgtggatttcatgagacagtgaacatctctggattgcctgttaygttatccaacatcctttgtaagagcatctctgcaataactccctcttggaatgacaaattgctctttttgaactctgaacagagactacccaccttgcagtagaaatttcatctctccagataagcttgtttgcctccttttatctgctaccacaaactatataacctaaccattggcatctttggaattgcatcctatacgtttaatgtaggtctgtgtaatgggctacagaaaacagaatgggcccagtggaaatttccattgaggttgtgagtgatcattcttcctggaaaaatactattggacaagatggtaaaaataattttgttttcctagaatcttaaacagaaaagtattgtcagaaaaagcccagggacttcaatttttccagaa

SEQ ID NO: 223246 - DNA, 457 bp, Homo sapiens
ttgctctcagcttcactagtgcttgctccctgtctactgaggtgtgacaaggtcattgtaaaaggagcacctccttgatacccggcattgtggatacagccatcaattctgtgaacttcctgctttgtttatttcttcatcaccttctctgtctaaccttttcagttctgattctcaatcattgaatttcaggtcccaattttttgctcatttttttctgcttattcattttgagacatcccctcttgctgagctattcctattgttagactccagtggtagccatcttgattggtcagcctacaaatactcgtttcttgggctagaagtgcccccagtgcacttcaacaatataaatgtgagattgaattctrttgagttaaaattccacgaaatatcttagagtggaatccaattggaataatgaataaggaagaaataatttttaaaagataat

SEQ ID NO: 223247 - DNA, 618 bp, Homo sapiens
caaggtcccaggccagtgcaaaagccagcagggaagacattaaactttagaactccaaaataatcctcaactccatgtcctgcattctgggmacattggtttaaggggtgggttcccaaggccttgggcagccctgccctcatggctttgctgggcacagtacacgtagctgttctctcaagttggagtcaaatgcctgtggcttttccaggttgaagttatgcactacaggtgactataattctggggtctagagggtgatggccctgcttccatagctctattagacagtgccccagtgggtaccttctgtgagggatccagccccatatgtctgctcagcattgtcttactagagtctttccatgagggctctgcccctgcagcagggttccttctgggcacccaagctttctgatacatcctcttaaacctaggtggaggataccaagcctccaccactcttgcattctggacacctgcagacttaacaccatgtggaagccaccaaagcttactgcttgcactctccggagcaatggcccacgtcatacctgggatcattagaatcacagctggagctggagtggcctggatgcagggagcagcattccaagg

SEQ ID NO: 223248 - DNA, 618 bp, Homo sapiens
caaggtcccaggccagtgcaaaagccagcagggaagacattaaactttagaactccaaaataatcctcaactccatgtcctgcattctgggaacattggtttaaggggtgggttcccaaggccttgggcagccctgccctcatggctttgctgggcacagtacacgtagctgttctctcaagttggagtcaaatgcctgtggcttttccaggttgaagttatgcactacaggtgactataattctggggtctagagggtgatggccctgcttccatagctctaytagacagtgccccagtgggtaccttctgtgagggatccagccccatatgtctgctcagcattgtcttactagagtctttccatgagggctctgcccctgcagcagggttccttctgggcacccaagctttctgatacatcctcttaaacctaggtggaggataccaagcctccaccactcttgcattctggacacctgcagacttaacaccatgtggaagccaccaaagcttactgcttgcactctccggagcaatggcccacgtcatacctgggatcattagaatcacagctggagctggagtggcctggatgcagggagcagcattccaagg

SEQ ID NO: 223249 - DNA, 411 bp, Homo sapiens
aagaagcactaaatatagaaagactgctaacaactaatacaaaaacacacttaaacacacagaccagtgtcactataaaggaaccacataaacaagccaacataataatgagctaacaacasaatgacgggatcaaatccacccatatcaatactaaccttgaatgtaaatgggctaaatgccctacttaaaaggcacagagtggcaagctggataaaaaagcaagacccaatggtatgttgtcttcaagagatgtatctcacacaaaatgacactcacaggctcagaataaaggggtggaggaaaatctaccaagcaaatggaaaacagaaaaaagcaggggttgcaatcctaatttcagacaaaacagattataaaccaacaaagataaaaaaagataatgagggtaaa

SEQ ID NO: 223250 - DNA, 411 bp, Homo sapiens
aagaagcactaaatatagaaagactgctaacaactaatacaaaaacacacttaaacacacagaccagtgtcactataaaggaaccacataaacaagccaacataataatgagctaacaacacaatgacgggatcaaatccacccatatcaatactaaccttgaatgtaaatgggctaaatgccctacttaaaaggcacagagtggcaagctggataaaaaagcaagacccaatggtatgttgtcttcaagagatgtatctcacacaaaatgacactcacaggctcagaataaagggrtggaggaaaatctaccaagcaaatggaaaacagaaaaaagcaggggttgcaatcctaatttcagacaaaacagattataaaccaacaaagataaaaaaagataatgagggtaaa

SEQ ID NO: 223251 - DNA, 411 bp, Homo sapiens
aagaagcactaaatatagaaagactgctaacaactaatacaaaaacacacttaaacacacagaccagtgtcactataaaggaaccacataaacaagccaacataataatgagctaacaacacaatgacgggatcaaatccacccatatcaatactaaccttgaatgtaaatgggctaaatgccctacttaaaaggcacagagtggcaagctggataaaaaagcaagacccaatggtatgttgtcttcaagagatgtatctcacacaaaatgacactcacaggctcagaataaaggggtggaggaaaatctaccaagcaaatggaaaacagaaaaaagcaggggttgcaatcctaatttcagacaaaacagattrtaaaccaacaaagataaaaaaagataatgagggtaaa

SEQ ID NO: 223252 - DNA, 584 bp, Homo sapiens
ttcattgaaagattggcaggcgagcccaagtttaatttgaatattaatgaacatttgttagaacaaatgcatgcttatctcctctaaggtaaattataggttataaccttttctcacaggaattattgtgaaatggtttaaccatttaaattttgcctttgtgacgctgtggagagaaaagaatgcttatgcactatttgtgggaatgtaaattagcttagccactgtggaaagcagtttggcgatttctcaaagaagttacatttttttttttaatttccataggttattgaggaacagatggtgtttggttacataagtaagatctttcgtggtgatttgtgagattctggtkcactcatcacacgaacagtatatactgtaccctatttgtagtcttttatccctcacccccttcccaccctttcccccaaagtcgtcaaaatccattgtgtcatttttatgcttttgcatcctcatagcttagatcccacatatgagtgagaacatatgatgtttggttttccattcctgagttacttcacttagaataatagtctccagtctcatccaggttgctgtaa

SEQ ID NO: 223253 - DNA, 557 bp, Homo sapiens
agtagtgggattgctggattgagtggtagttctacttttagttctttaaggaatctccacattatatttcatggtggttgtactagtttacattcccaccagcagtgtagaagtgttccctgttcaccgcattcatgccaacatctatttttttttatttttttattatggccattcttgcaagagtaaggtagtatcacattgtggttttgatttgcatttccctgattattagtgattttgarcattttttcatatgtttgttggctatttgtatatcttcttttgagaattttctatttatgtccttaacccatttttgatggtattatttgtttgttttttcttgctgatttgtttgagttcattgtagattctggatattagtactttgtcagatgtatagattgtgaagactcccactctgtgggttgtctgtgtactctgctgactgctccttttgccacacaaaagcactttagtttaataaagtcctagttatttatctttgtttttattgcatttgcttttgggttcttggtcataaaatccttgcc

SEQ ID NO: 223254 - DNA, 593 bp, Homo sapiens
tgtggctcccttagagccaagctgtagtgattgttatctctattttggatctagccacccagcaagtctatccagctctgggctggaactkggggttgtctgcacagagtcctgtgatgtgaacaatctgtgggtctctcagccatggataccagcacagtatttggggtatatcccaggtcctgcaagagcaatcctcttccttcagagagtctgtggttcctcttgtgtttcttgatttatttcttcagttgttctggagcaaaaatttacgatgtgggcctccacactctgctctgttcatctgagtaacagctgcaatctagtccttcctcaagtctgccatgatccctccctcccatctgccataatcctcttaaagaacttaaaacaaaacaaccatttgacccagcaatcccattactgactatgtatctacaagacaacatattgttctaccaaaaggtcatgtattcacatgttcatggccacactattcacaatagcaaagacattgaatcgacctaggtgcccatcaacggtaaaccagataaagaaaatatgctacatatacaccatgaaatgctatgcag

SEQ ID NO: 223255 - DNA, 385 bp, Homo sapiens
gaattctaaccaaaagcaacctcaactttataagtacttcctttgaaatattaracactaggccttcatgtgtcaattcatgtgagtagtgactactttctttctggggcgtaatcagcttctatttcctggataacctagggcaataaataaaatgttcttgctatggaaaaagctacaaatgagactacattgttcaatcttcaaattcctccagagactcaaactggatatgggaagaaaacgtatttttttctttgatcttttattaggttctatatcactctatctctttttcttatttttctttagtagttttcccccttttatctttaaacataaacccctctatcttctctacatttatttgagctacctcgtatgc

SEQ ID NO: 223256 - DNA, 607 bp, Homo sapiens
agaggtcaccaccatttgcacatcgttcattgacttggtcactgtcacctagatgaagagtgttgacattaaatattaaatttaattaatatgattctttgtaagactttgtaagactgttcctggctggcactactgaggttgtgccagcagatctaaacaggcatgcagatctaaaggccgagatacctggggcaaactggcttaatggaactgtactgatgctgagccatgtgaggaggtgcaaagtgtcaaacagtagatgctaccttttcaatatacatgaatcacttaactcaaatgcagctgctgctcatctccattttggaagctattccaaggaaaaattcagttaatagtattttcatctggctgtcttcctttgctataatctcttgaagtgagagttatatatcactgatatgtaaaacatatatgttayatatatatatgtgacattttcaagagcacttcatttttccaaaggcctgataaacactttatatctttctggtacttggaagaaatgtgtacttctcatgctatgttgggcacatgtccatgctgctgctggttgatggagctttaagggttggtttggttccta

SEQ ID NO: 223257 - DNA, 540 bp, Homo sapiens
aagataagggaacagagtgttccaaaaacaagtgagtgctcagttggccgaataggaacagctctggtctgcagctcccagcgtgatcaatgcagaagacgggtgatttctgcatttccaactgaggtacctggttcatctcattgggaccggtaggacagtgggtgcagcccacgaagggcaagccaaagcagagaggggcatcgtttcatccgggaagygcaaggggtcaggggatttccctttcctagacaagggaagatgtcacagactgtactgggacaatcaggacactcaggacactcctgccttaatactgtgcttttccaatggtcttaacaaatggcacaccaggagattatttcctgtgcctggtttactggctcccacacccacggagccttgctcactgctagtgcagcagtccaagatcaaactgcgaggtggcagcctgggtgggggaagggcgtctgacattgctgaagcttgagtaggtaaacaaagtggctaggaagctcgaactgggtggagcccaccgca

SEQ ID NO: 223258 - DNA, 540 bp, Homo sapiens
aagataagggaacagagtgttccaaaaacaagtgagtgctcagttggccgaataggaacagctctggtctgcagctcccagcgtgatcaatgcagaagacgggtgatttctgcatttccaactgaggtacctggttcatctcattgggaccggtaggacagtgggtgcagcccacgaagggcaagccaaagcagagaggggcatcgtttcatccgggaagcgcaaggggtcaggggatttccctttcctagacaagggaagatgtcacagactgtactgggacaatcaggacactcaggacactcctgccttaatactgtgctwttccaatggtcttaacaaatggcacaccaggagattatttcctgtgcctggtttactggctcccacacccacggagccttgctcactgctagtgcagcagtccaagatcaaactgcgaggtggcagcctgggtgggggaagggcgtctgacattgctgaagcttgagtaggtaaacaaagtggctaggaagctcgaactgggtggagcccaccgca

SEQ ID NO: 223259 - DNA, 554 bp, Homo sapiens
gaattctcatgtattgtgggagggaccccagaggaggtaattgaatcatgggggctggtttttcctttggtattcttgtgatagtgaataagtttcacaagatctgatgggtttattrggggtttccacttttgcttcttcctcagttttctcttgccgctgccatttaagaagtgcctttcgcctcctgccatgattctgaggccaccccagccatgtggaactgtaagtccaattaaacgtctgtttgttcccagttttgggtatgtctttatcagcaccgtgaaaaaataactaatacaatggttgtctggaacccagtgccagaagagtatgtagaacctgacagccttgtagataattgggctgtagccgcccaccttaacccccttccctcccatatggggctaagaatcatgaactggaggcttaagctctgaactctacctaatgagttaggaaactggaatatagtatacttatcccattcctgacatctttctttttcctgtgtgtagttttcctcacttagaggccagccctatggcctggct

SEQ ID NO: 223260 - DNA, 555 bp, Homo sapiens
ggagggaccccagaggaggtaattgaatcatgggggctggtttttcctttggtattcttgtgatagtgaataagtttcacaagatctgatgggtttattgggggtttccacttttgcttcttcctcagttttctcttgccgctgccatttaagaagtgcctttcgcctcctgccatgaytctgaggccaccccagccatgtggaactgtaagtccaattaaacgtctgtttgttcccagttttgggtatgtctttatcagcaccgtgaaaaaataactaatacaatggttgtctggaacccagtgccagaagagtatgtagaacctgacagccttgtagataattgggctgtagccgcccaccttaacccccttccctcccatatggggctaagaatcatgaactggaggcttaagctctgaactctacctaatgagttaggaaactggaatatagtatacttatcccattcctgacatctttctttttcctgtgtgtagttttcctcacttagaggccagccctatggcctggctggtgggtttaggggaattc

SEQ ID NO: 223261 - DNA, 626 bp, Homo sapiens
gagaacaattcagccataaaatagaataagattcaatcatttgcaacaacgtggatggaactggaggtcattatgttaagtgaaataaaccaggcacagaaagaaaacatctcatgttctcacttatttgtgggatctaaacatcaaaacaattgaatccataaagatagagaatagaagaatggttaccagagactggaaagtgtagtggaggagtctgtgggaaaagtgggtatggttaatgggtacaaaaaaaatttagatgaatgaataagacctagtatttgatagcacaacagcatgtctatagtcaataatamtttaattatacattttaaaataactaaaagagtataactggttttcatataacacaaaaaattaatgctccattttccataatgtgattattatccattgcatgactgtatcaaaacatctcatgtatcccataaatatatacatttactgtgtagccacaaaagttaaaaataaaaaattattaaaaatttaaaaaagttattcaggacccaaactcaacacttgtccaaatggaactaaaagatatctacagaacactccacccaacaacaaaagaataaacattttcatctgcacatggcacg

SEQ ID NO: 223262 - DNA, 565 bp, Homo sapiens
aagcttggagatgcctaggactgcagagccccaaagagggtgtcacagccctggctcagggagcccctaggtctgggctccttgaagggccacagcacttctctcctcatcacccacatggtaagtgggggggtacatgtttcaatcctgtttgtggtacagctctttcagtctttgccatttggcaggtcccaagttattgtcccacatcgaggaagaatgaggtacttggacaactggagggtgagcaaggtggagaggtggagaggagcttcattgagtgacagaacagatctcaggagaaccacagtgggtagctcctttctgcaggctggttgtccyaacaagtgtccagctctcagctcagaggagacccaaagtgggtagctccttcccacagctggtggtcccaacatctggctgagtctggctgagtccggggtgtttataggctcagaagggaggaagtgtgtgctgattggtccatgggtggccatgggtggccatgggtgggcccagaaaaagcaccataaattctcactctgggccatggactccacctaga

SEQ ID NO: 223263 - DNA, 663 bp, Homo sapiens
agtaacctacaattaatgatatgtaatgatccaccagtgaaatagccagatctgtgcctaatgaccatatattgaagcccaccaagtataagccctacatacgcacaaggaatttccaaaagcatttaatgcctcagttttaagagacaatcaaggatttccagatatttgaacatgtctcaaagatggaagacagaaaccaacataaaaacaaaaagcagaaatattgggaaaaaaacaatagccacataaatgaaacagaaatctctgcagaaagagagacaaggcatagaccttaagaaaactttttaaagatagctataaaattattatctcacagtgagactagtcactgtattcataagaaagaacaagagactatagaaggtggtatttccgagaaagataagggttatttaaattaatagtatagcaggttaagtttttaaattcttaatygtataaatttatgggttaccagtgtaattttgttatatgaatatattttatagtggtgaaggcagagcttttagtatatccaccactggaataacatacatggtatgcatagcagttttagagcaatgaaactactctgtgtgatactataatggtggatacctttcattatatatttgtccaaacccatagaagatacaacat

SEQ ID NO: 223264 - DNA, 469 bp, Homo sapiens
aactcactcattttcatgaggacagtaccaagaggatggtattaaaccgtgagaaaccaccctgatgatccagtcacctctcaccaggccccacctccaacrttggggattacaatttaatatgagatttgggtggggacacagatccaaatcatatcaaagacttgcatgggaaaataaggaattgttgacataacatctttgaggttcacatcaaatgttctgatgaggatagtccaagtagcagttggctatatacctcagataagggctgaaatttggagctatgtcataatcagcctagattaagagtcaataatctcctgcccatgggccaattacacccaccacttgtttttgtaaagtagtattgaatcccagccatatccatttgcttatgctccatgtataccttttttttgaacttcaaggcagagttgagtagttgtaacaaaaaccatacggccca

SEQ ID NO: 223265 - DNA, 527 bp, Homo sapiens
gaacctttccagaaggagaacttgtggcatacttagctaaaatgaagttgctagaaatatccatcatgataaaattacagttctgttttcctaaagacaattttgtagtgctgtagcaatatttctatatattctattgacaaaatgccttctgaaatagtccagaggccaaaacaatgcagagttaattgttggtacttattgacattttatggtttatgttaatagrgaaacagcatatggatgataaccagtgtgtagtttaatttcaacttgtggtgtcctttgaatatgcaggtaaagatagattagattgtccaggatataatttggttgctaaattacatagtttaggcataagaaacactgtgtttattacacgaagacttaattatttttgcatcttttttagctcaaattgttcatgttgcaatagtcaatcaagtggatttgaattgtagccaatttttaaggccagaaaatactgattaagacagatgagggcaaaaaacacccagtagtttatt

SEQ ID NO: 223266 - DNA, 579 bp, Homo sapiens
ctagtatattctttggggtatatatggttaaaaatgaaaataaacacaaagaaataaaatgaattaatcagattatagcatttccttgctaatgatgcatgagtatctataatgatataaggtggtaaagaacattaacaaaagcaagttgattttcaaaaggttagacgggatttgtacacatcagaactcagaaggatawaattattcaaggcagagttaatgaaattcaaatgaaaaggattaatctgaatgagtacctggattttgcataaagaagagaaaatgaacatgatatttctaattacactgatttttaaataactgtctgaaatttttattaaaccaaactgaaagtcattcaatggatgtagttttctcattatagattcgcatgactgtgtcaataggaatgctatacttttaaggaatagatagcaaactagatctccaaatgtctggttctcttttgattcaatttctggtagtttcttgtatatgaaaattacaaaaaagtctatatattaaacattattgtatatatcagattgctataataaatgagaatattcaaactta

SEQ ID NO: 223267 - DNA, 476 bp, Homo sapiens
atatagtaaacagaaaaggcctcttcctcgagggagtgcaaaagcacaccataatgtgtctagaaaatcggaacgctatgtaactcacacccttccaactgtgagcaagctttcagaagtatctacactggtcgtatgatggtgtgtgtcctactgaatagcagtgtttaatggtcatctggcattcctctaaagaaatctacatgacatctctaaatattttacatattatacatcactttgtgcttaggaaatgaaagatgtttcagattgatgaccaccaagccctttctcctggcaaagatgtgagttatgtcacaaataaggcatggctcaactctaattcacgtggctgtatcttgctacctttgaaaaaagcagcgttcgatctgactcctcagaaggtttgaaaattyaacataaaacataaagtacagcaaggtttaaattcccaattttaaacaaactagataatg

SEQ ID NO: 223268 - DNA, 572 bp, Homo sapiens
ctgaattctgctgagctgttttcctaaacttccttcccacttcagctcaaatgtgaatagcaactagatacttgattcaattaatgaacttttgttaagactgtaggtgtgttaatggtattatatatgtactttccgaaaaaagttctcatgagagaatatttcagcaagagaaaaatgctgaagtatttatggagaaaataatatatcagtttgtttcagaataatctagttgaagaggtgagtgggtggattgtccatggagtcataacagttggcactggattatagggttatgggagctatttgtattattttcctactttcaaatatatttgaaatcttacataatgataactttttaaaaatcatagttccccattasctactgaagtacaggcagaattttctgttgagattcaaagcacattattgaacatcctcagcctctgtttcatgccccatcttcccctaagcttctatgttactgaaaaggcagccaaatatgactgcgcttgttacctagctttgcgtgtgtgttacctactagctctaatgttcttcccacttct

SEQ ID NO: 223269 - DNA, 604 bp, Homo sapiens
ataccttttgtttggccttccagatccatgttccaccctcctctgtgcatgaggagactgaccagagtgtagtttctggttgggtttggctgctgaggtgctctggaaggagataagatgaggtggagatagtgaagttagggtatttatttccaccacttaccctcttgtggggaaggttttgccatggctgggctacattttcactgcgtctcttttcacttctttaggtctagaatggtgggtatacccctactgttatagttccaaggtactacactaccctatttgcatcttctgtaattatttttctattaaatctcagcacaaattcccaatttgagcatrccatttgtttcctgccaggatcctaactgacaaaaaggtaacttaatgctctgcatccaaagatttaccctaaggatggtgctgtccaagtgtttagcctctattcagtatagaagaatgaatgaaggtcaaatacttcaatagaagagcattatgtttatgacttctaagtatatcttgatgtctagtctagaggagcagtgagagactttcatttttgtctcattacttttttttatttgtaacatgaaagcaa

SEQ ID NO: 223270 - DNA, 521 bp, Homo sapiens
acagaattacaaatattagtaatatgctactattaaaaatactacactaatatattaaattacctggacaaaatggataaattcttagaaacttacaacctaccaacactaaatcataaagaaaccggaaatttaaacaaaccagtaacaaagaaggtgcttaaaggtgtacaaaaaacctgcaacaaaagaaaatttcaggacatggtttcacaggtaaatcctacaaaatttttaagaaaaaacaaatgcctactttcgaacacttccaaaaaaataaaaagagaacacttacaaactcactttacaagtctaccatacaaatccgaataaggttcctacaaaaaatgaaaattacagaccaatgtctctgatgagtagatgcaaaagttttcagcaaaatactagcaaactgaattcaacagcttattgaaagaatcatrcaccatgatcaagtgtaatttgtccctgagatgaaagtgtggttctacatacaaaaattgataagtgtgatatacccc

SEQ ID NO: 223271 - DNA, 458 bp, Homo sapiens
taataatatgcttgttcttgtatacatatgtactaagaaaatatctttgttttcttttttccctttataatgtgacataagatttagtgactccatatcagcatttcagtgttgttaacttcttgtaatagcatttagattagggattagcgtgcttcctgttgtacaaaggatagctgtattatgttaggtgtaattgtgatcttattattttctttatttggatatgtatatgggttcaatttgatgaggagttgacttgtratggttaatattaagtgtcagcttgattggattgaagcattcaatgtattgtttctgggtgtgtctgtgagggtgttgctagagaaaattaacatttgagtcagtggactgggagagatagttccacttttaacctgggtgggcaccatcccctaggccgccagagcagctagaaaaagcaggcagaaaaatgt

SEQ ID NO: 223272 - DNA, 565 bp, Homo sapiens
aatgcataagagtctcgtaatagtggaattgatcaagcataagacagaattagtgagcttaaagacaggctatttgaaaaggcagtcagaaaagacaaaaaatacaattaaaaaaatgaagctttcytacagaatctagaaaatagcctgaaaaggacaaatctgaaatttattggatttaaagataacatagagagagaaatgggggtaaaaagtttagttaaagggataacaacagagaatgtcccaagtcttaataaagatataaacatccaagtataaggttatagaacatcaagtagatttaacacaaaaagactacctcaaagcatttaataattgaactcctaaaagtcaagaataaggaaaagattttaaaagcagcaaaatgcaataaacaataacatacaatggaggtaaaatacatctgacaacagacttctcagtggaaaacttacaggttaggaaacactggcaggacatatttaaagtactgaaaaaaataatttttacctgagaatagtatatctagtgataatatctgatatggtaggctttgtgttct

SEQ ID NO: 223273 - DNA, 429 bp, Homo sapiens
aaatcaacatacaataatcagtagcatttttatatgccaacagtgaaaaatctgaaaaagaaaccaaaaataatctcatttacaataggtacatatataaaatatctatgtattaacttaatgaaataaacataagatctctataatgaaaactatgaaatagtgatgcaaaaaattgaagaaagcacggaaaaatggaaagaaattccatgtttatgaatttgaasaactaatattgttaaaatatgcatactactcaaagaagtctaaagattccagcaaactccaacagacctgcagctgagggtcctgactattagaaggaaaactaacaaacagaaaggacatccacaacaaaaacccatctgtatgtcaccattatcaaagaccaaaggtagataaaaccgcaaagatggggaaaaggagcag

SEQ ID NO: 223274 - DNA, 409 bp, Homo sapiens
ctttgggcccgggccacaccccaccttgtgtggattaaatgtgctatcccttgttgttggttgtgcaaattttcacactttttcatgcgagacagcttttggagtaggataagttctggcctttgaaaacgtacaatatcctttctcacaggtaaaagccagagggtgccctgaagcccctctcaggttgtaaggttgtggcatccccctttggcgaatgaggggatcccagcccaagaaggagggattcccaggagatcacacagctcctcaccaccccgctctcctatttcctaagtgtggtgtgctgaggagtccacaaagctgccttggggatttaacaaaagcctcttcaaataacacacaggacagggctcccgggttaatyatctttctttgtctaagaaag

SEQ ID NO: 223275 - DNA, 264 bp, Homo sapiens
atgatatgtgtctaaggtcctatggcctgtgagtgacagagcaaggactacagctcaggtctttagagcttttttattttccatgccagccaccccctgccttcagagatggagtcaggcagggagtgctaagagtcagagtggaaaggaggactcctgcgctgagaacacagagggttcaccacyggggatgctgccaccgtctcaggagtaatttgtatcaattcgataaatgtttatctggaaacacccaagagtcaggta

SEQ ID NO: 223276 - DNA, 617 bp, Homo sapiens
catgcctgtaattctagcactttgggaagctgaggtgggagaatcgcctgaggccaggagttagaggccagcctgggcaatacaggcagaccttgtctctatttttgaaaaacctatatttaaaaaaaaactgacattaactttctgtgtgaccttagggaagcctctgaacgtctctgggcctcagaggcctttcagcatgaaccttgtgagtgtattttccaaatcttttcctaagagtacagggataaagggtggaccaatgagggtacctggccactcaagtggggagaagaaagatatctcagataaggagtkgtgacagggacacaggagaggagaaaccacccacctgccatcaccactgcatttctgagatgggggagggaacagtttgggccatgaggaattaacatggaccctttctcaagctaggagcagactgcgagccacatccataagtacctgctttcaggcactaaggaggtgtgtaggatactatgggtgagacagctgcatcctggtttctgcagtgtgaggttcctgcagggaggatacacacccagcatcatgcactatgagaatgttccatgggtaagctgatgatggagagccag

SEQ ID NO: 223277 - DNA, 617 bp, Homo sapiens
catgcctgtaattctagcactttgggaagctgaggtgggagaatcgcctgaggccaggagttagaggccagcctgggcaatacaggcagaccttgtctctatttttgaaaaacctatatttaaaaaaaaactgacattaactttctgtgtgaccttagggaagcctctgaacgtctctgggcctcagaggcctttcagcatgaaccttgtgagtgtattttccaaatcttttcctaagagtacagggataaagggtggaccaatgagggtacctggccactcaagtggggagaagaaagatatctcagataaggagttgtgacagggacacaggagaggagaaaccacccacctgccatcaccactgcatttctgagatgggggagggaacagtttgggccatgaggaattaacatggaccctttctcaagctaggagcagactgcgagccacatccayaagtacctgctttcaggcactaaggaggtgtgtaggatactatgggtgagacagctgcatcctggtttctgcagtgtgaggttcctgcagggaggatacacacccagcatcatgcactatgagaatgttccatgggtaagctgatgatggagagccag

SEQ ID NO: 223278 - DNA, 610 bp, Homo sapiens
tagctttttcctataagccctcccccttcctccttgcacccaccatgccttccaaggaccagttggcccattcctctgcagctctgcccaagttcagttcccaagacacaggtcagaaaggggtcagatcaagcctaggcatctgcaagcgcccagtcctttgggatggcactacctttcttcttttccttttgatatgtgcatttggtttcttcagaaagagagtgacatgcaccataacactctcttttagagataagagaaaccagccagyatcttttgaaattcaatgtacgacaagcagagatgcatcaaggtgtgatagcagcccagccggaggtctctgttgatttgtagcctcgataaatggccaggaggccagcagaccctcaatggaggtcccttagaggaacactgtctgtgttggtttaatccagccctgaccttgggactcaaaacacagaactaaagagggacaaagctttccttccattctcatggcctcgtcatctgcgtctgtagttgcatagcgcattgatggcttaatcctctcagcaatccagtggggtcattatttatctcccccacctttcagtgagaaactaaagcc

SEQ ID NO: 223279 - DNA, 402 bp, Homo sapiens
cacattccattatttataaagttacctgctgttagcwttcattatttttgctacactcattttatttgtatttaaatgttttaggcaacctaagaacaaatgtaaaagtaaagatgcagtaaaaatgaattgcttggtattcactacttcatgtatatcaagcacagcaataaaacaaaaacccatgtatttaactttttttaggttttttgcttttgtgattttttttgatacttgcctaacatgcatgtgctgtaaaaatagttaacagggaaataacttgagatgatggctagctttgtttaatgtcttatgaaattttcatgaacaatccaagcataattgttaagaacacacgtattaaattcatgtaagtggaataaacgttttatgaatggactt

SEQ ID NO: 223280 - DNA, 402 bp, Homo sapiens
cacattccattatttataaagttacctgctgttagcattcattatttttgctacactcattttatttgtatttaaatgttttaggcaacctaagaacaaatgtaaaagtaaagatgcagtaaaaatgaattgcttggtattcactacttcatgtatatcaagcacagcartaaaacaaaaacccatgtatttaactttttttaggttttttgcttttgtgattttttttgatacttgcctaacatgcatgtgctgtaaaaatagttaacagggaaataacttgagatgatggctagctttgtttaatgtcttatgaaattttcatgaacaatccaagcataattgttaagaacacacgtattaaattcatgtaagtggaataaacgttttatgaatggactt

SEQ ID NO: 223281 - DNA, 594 bp, Homo sapiens
ttagataattctatactgaaaggtgtcaacctttacatctgaaaacagacttaggggtaggttcagacttaggggcaggttcccaaagtcttcctgcatctttcaatggttagtgaggaacagggtaaggtagacaccagaaaaaagacatcattatttgcagatagagtggccagccccatcaataaactttccatgaactgtcccccagagaatgccaaaccaggcacctcttttagttgtccactttttgaggctatcgcagggayattggcatagcttccaatacaggtccatattcggggagctcagtagttcctagcaaacaggcaaagtcctgttattctgcctacagctgccctgaagctttggttcaaggtttccctgaggttctgagccaccctgaaagaactccagaaggctataacaatacttcagagtcggtcagaatcagtactaaaataattttttttcctatgtaagagtgcgtgaaagattaaaaactccatttcctgatggtgatggaggtggggaacggtgggcatttaacaacaattttagaggaaccagagctcattaaaacagaaacagatc

SEQ ID NO: 223282 - DNA, 573 bp, Homo sapiens
acaaacaaaaggaaggcagggatagacattttaattccagaaagagtagaatacaaagccacaggcatttaaaggggtaaaaggattggcaagatgtatgatcctaataaagataaaaggctcacaaaaaattatatacttaactatctaatatcaawttatataaatcaaaactgtttggaatacaagggaaaaatgaaagaagcacaattgcataaaaggttgacaccacattctcaaccaggtagactgggaaatctatgcagattgaagaaaaagtgtaaatgctgtaaagagatgagtagagtagtcaaaagtttcaattatggtcatcaatccatgtcctggaaaaggagataatgttctgtatcttttgaagattcagcactcatagatcttatggatatattatcaggtaagtcacagaagttacaatcaattttttcattttatccatgtgattggaagaacaaaattcgataggagaaaccacatgcccatcagcaattcttgcctgctgttaaacttttctatcttgaccttgtaaattcccaaagtagaaagagtcctgtt

SEQ ID NO: 223283 - DNA, 566 bp, Homo sapiens
aaatgtagatagctgagaaacacctacaaagccatttaagttctgttgcattttttaccaaaatatgagacaattaatattaatggcacaattcaaatttccattttctatttaaaaataggacatgaaaataagattaagattcaaaataacaacacctaggtatatattcaataagagcattactaaaatttactgttactatttccttttcttcatgttcaattcttcacagcaataccacagggctattccagtaatttgccagctgtccatcaatatatagttattaattattctcttaacaatttcctctaagacccttctgtggtaaatctatctctacttgccagatataagccactgtccacaggacttggttgaaagtctattttgggctttcaactcatgcatttcaccaaacctactcaaagcactctccaaagccaatgtatgtgcttttggaatgactttcccatgatgattctctctctctctctctctctctctctctacatgtrcgtatagttttgttttgtttttcttcttataacccagtaactact

SEQ ID NO: 223284 - DNA, 387 bp, Homo sapiens
tgacattaaaatatttttaaatgcactgctattttaaaaacttcaatgtgtggttatsctctaccaaatcattgcaatctatgcagatgacaatggaaaataatctgcatctaagaaacctgttgatggtagctttaatcagaattggaaaagtgttgtagactgcctccctggagtggcaagagtctagagttaaaagcaccttatactctagagtcaaagttaaaatttttaccagtgattctccaaggctaaaatatgttaggatcctcttttattcttcatgattgaatctattacacacagtcaccaaaatatgtcttgcattcactttggcttagaatgtttccttaccctaatttgtatgtagagtccatttgattgtgc

SEQ ID NO: 223285 - DNA, 484 bp, Homo sapiens
caccaaacaagcccccaaaacttatagaaaaaatatcttctttcaccattgtactaggtcatcaaataagtctttaattttagggataactttgagtccattataggaaaccagtcactattacttttcacaagaaacaaggaaggcrtgagagacagcgaagaataatacagaagctgaattaaggcaagaaagaccagatgacaagtttttccgagggccaggaagatgccatttttttaaaattagatgtcaccttttggtggggaaagggtggtaggcagctaagaatttgtgcttgactagtgctggaaaaagagaatctgattttttttttttttttttttagtaacatacagtaaaacatgctgagcctaaattaaccaagccaccttgttgaccaacttcaaaaacagtacaatgggccaccttgacccataaactcttttcctttatttccattggactcttcttcagagtaaat

SEQ ID NO: 223286 - DNA, 535 bp, Homo sapiens
agtcagttattcaattcagaccaaacatataaatacctcactcactcactatgggtcagattttccagtgagcaaggggatctgaaaatccataaacctagtyaaggcccttaaagagttcaaaatctttaatcagatccctgttgatgaatattttggttatttccagtcatttgctataacaaacaaagcttatatataaatcatgtacaagtatatctgaagaataaattcataatagtggagttgacaatacccaccttatagatttttaatgatgcataattcaattttgagactaattaatttatactgacatctctccttaactgctacagaaattgcaaaagttggtggtacctgtgtcatatcctttcctagattgcaaaatcctttagaatagggactatctagcattcctacttcttacctcagtgacttatggaaagacgaaattttacaagcatttgccagccactaattatgatatcgtgtctctagccttcttctatgaaaatcatatatctcataaaga

SEQ ID NO: 223287 - DNA, 489 bp, Homo sapiens
aaaacaaggacagaccatatgataggcaacaaaacaagtctaagtaatttaagaaaattgaaattatattaagtactatctcagaccacgtggaataaaactgggaatacacttttattccaggggattaaatggaatccatttaattatattgcttagtcttgctttggctatgcaggctcttttttggttccatatgaattttaggatagttttttctagttctgtgaaaaatgatggtggtattttgatgggaattgcattgaatctgtagactgtttttggcagcatggtcrttttcacaatattaattctacccatccatgagcatgggatgtgtttccatttgctcgtgttgcctatgatttctttcaaaaatcataggaatcttcaaaaggaaccttcaaaaccatgcaaatacatggaaattaaataacctaatcctgaatgatctttggtttaacaatgaaatcaagagggaaatttaaa

SEQ ID NO: 223288 - DNA, 618 bp, Homo sapiens
taagaaggtgatattagcccctctggaaaaataatacagaaaatagatggtaattaaaagtcagtgtatttaccgaggaatcactataggaggaggcaaggaaaccctgtaataaaagttacaggtagaagacctgaaacagggaaccagaygaaggattcaactaagcctcaaatcatcagccagcccatgacagccaaggtgatgcctggagtaatcacccagtcccacttattcccagacaccaaagaacaagctacatcctcagtgggagaagcaagtaaggaccagcattgtttttaaaagccagaagccccctgggcctcctccctttatggaggctgagaagtctcatgacctactgtttgcaagcctctcttctactatgacgatgatggctaatatatattgagcatttattgtatgctaggacctgatctaagcattcacatgctttatgtcatttaattctgctagcaacctataaagttggtagtattattatctctattttaaagatgagacaatgaggtacagaaaatttaaggtcacataactataatttggtagattcaggatttttctgctgtgtccagacactattgaagggagaaaaat

SEQ ID NO: 223289 - DNA, 618 bp, Homo sapiens
taagaaggtgatattagcccctctggaaaaataatacagaaaatagatggtaattaaaagtcagtgtatttaccgaggaatcactataggaggaggcaaggaaaccctgtaataaaagttacaggtagaagacctgaaacagggaaccagacgaaggattcaactaagcctcaaatcatcagccagcccatgasagccaaggtgatgcctggagtaatcacccagtcccacttattcccagacaccaaagaacaagctacatcctcagtgggagaagcaagtaaggaccagcattgtttttaaaagccagaagccccctgggcctcctccctttatggaggctgagaagtctcatgacctactgtttgcaagcctctcttctactatgacgatgatggctaatatatattgagcatttattgtatgctaggacctgatctaagcattcacatgctttatgtcatttaattctgctagcaacctataaagttggtagtattattatctctattttaaagatgagacaatgaggtacagaaaatttaaggtcacataactataatttggtagattcaggatttttctgctgtgtccagacactattgaagggagaaaaat

SEQ ID NO: 223290 - DNA, 503 bp, Homo sapiens
tgacactctcttattaaaaaaagactttatttaaaaagtagatttatgttttttgaaaaatgcatacctaaaatacagtaataaaagagcctgaagataaaagaagaaccaaaccagacaatgaaaaagcacagaaaagtatgaacagaggcaattttaacagcaaacaatgcagaatagaaggttaaagcactaagaaatataaggaaagatattatcaaattgattatatgttctgtttttagcaaacaaaayaaaaaaaactaaataaacaagccaaacttttaggactgcaaggggacattttatttaaattagaaaaaggaaattaaagaacatgataaaaataattgttctggatttttcagtgtatctctcccagaaatgaaatgattttgacaaaaaagaaaagctatggagacaacatagagtaagtgagtaatacaattattaaacttaacatgttaaacattgtcatagtccattcaggctgctataacaaa

SEQ ID NO: 223291 - DNA, 357 bp, Homo sapiens
tttcacggggaaagaatagaaccaaaatgcatttccctcttagggggaggcaagaaaccatcttgggccctgtgtcttacacccctactaatcagaagtctgctggcagtgggggagaggcaggatactcctgcacaaaaccaatcccagaacaagacagtttcattgccacttggaggctgtgcaagaatagtgagaaagtgccaccctggaggccyagctgcacaaggcctgactaagaatgaagctggaacaggacaacagggagcccctccctggaacagcattataccgttgaggaaggggaagcaagagtgtagggagtgattccctctgcagcacaggtgtgcagaaatg

SEQ ID NO: 223292 - DNA, 633 bp, Homo sapiens
ggagtaaggaggaggacgtggctgcagccagagtaggaggttgctaaagatttgggagttttaagatacctattaaatattgtctcacgttgactcaatgacatcaggccacataattttgtactgttttttcatcacattcaatccttgtttttctttttgagatggagtctcactctgtctcccaggctggagtgtagtggcgtgatctcagttcactggaacctccccctccagggttccagcaattctcgtccctcagcctcctgagtagctggatttacaggcatatgccaccatgcctggctaattctygtatttttattagagatgggtttcaccatgctagccaggctggcgtcgaactcctgacctcaagtgacctgtttgcctcggcctcccaaagtgctgaaattgcaggcatgagccaccatgcccagcccatcacattcaatcttaatcccctcttctctaaatgtacaccataagttctctcttgttcaggtaagaaaatataggtaactcagtgaaagatagtcattgtgggtagaaaagaatacaaaacaggtgttattagtgatgtcaggttaacaatgccaccttcatgaattgattattggtaattaattcagt

SEQ ID NO: 223293 - DNA, 595 bp, Homo sapiens
cagttctttaaatcttcgcaattagaagtcagtaaggttttgattttgatttttacacactggacattcagtaaacgttattcatgctggcagtgttctggggcttgtcaaatatcaggaagagcctttaaacttcatagagactcaagacaattccagtaattgctcttccacctaaaagcagataagtaactgatgctgactatggatagagaaaagatatttttaaacccacttattcctagtgttccattattggaaygctaagcatgtgggagttatttatatcatgctgctgaagttcatcgccaaggtctgatttttcactcatgcaaaaattcaaaaaattgcaacctctagcataaatgggttaagataagaaaaagaacaaaactaattaaaattcctgacaatatagataagaagcagccattcttttctatctaaggtggcatgtaaatttgaaatcagttagtttcaaagattgataaaagtcacattcccaactttaaagagttaccatgtgataatgttctctgacacttattatagctattgctaaaactggcatctgcggaacattgcatcttaatgt

SEQ ID NO: 223294 - DNA, 496 bp, Homo sapiens
gaggtcagcttcaaaaataggaggcacacaggccagctggagagtgtccataaggagaatgactagggtaataaaaagtaaagaaaacccatctcatgaggaaagactgaaagagctagaaagagaaaggtaagccagaaaggcaagattaggtttcaagtaactcaagggcagtaagttaaacagggcttctctctttggacwcaagtttcttcatctgtaaaataaagaggtaaacccagaaaaatcccttttaggtacagcatgagggacctataaattcaaaagaatgtatgttgcaccaagggaaagaactacaagccacctagatacagaactgagagagtgaagggcagatttccactgaacatcaataaacatcccagcaatgtttcttgtccagcaatagaatggctgccttccaaagtccagagctacctaactagagggttcagtcaagaactagacttggatacaggtccctagaggatgttct

SEQ ID NO: 223295 - DNA, 588 bp, Homo sapiens
ccactctttgggaatgaatgactaagctagcagaagctctagacaagttattgaaagatcatttcatctgcctaatttggaatatatattctgggtctctgcttacctatcaactaatcaagaattaaaatgcctcaaaagttccaagrgagtgtaaaagcttttttttttggtgcccagtttttcctcagagtaaaatttgcagctgggaaagtttaatccacagtatgacagcagtgtttttttcctttcatttttgtttttttgctcagacaataaaaagccttattccctttcaattcagggtttcactcgttgttcttgaaaattcccttcagtttagctctcaagatggccttgcttgctgagcatgagtcactggtttagtgactcagagtggcatctaacaagacaaggatgtgcagggttgtcaagggacttagtggccagtggagcctgcctgaagcttttcctaaacccagtttttgagatagagcatcttttccattagcggctgttcctaatcatcctcagtaccagtttatctgaagcttggggtctgacagagacattgccttgttgtggaaa

SEQ ID NO: 223296 - DNA, 620 bp, Homo sapiens
ttaacctgttcctttgtcctctgtgttcccggtagattaaaggcttgatcagacttacattcagattagctttttgcaagactatctcgtaggtcgtgttttgtatttccatyggggatatacaatgtgtggttgtttctgttttttgtcatcactgtctagtgccattgttttattaggggctgcaaatgtaattcttactttttttttttgtttgctggactatttctatgaggaaaaactcttcctcatcagatatttggttatcctggagtaaagttcatatagcaaacaaaggaaaaaggcttgattcttaccctttatttaccagttttcaaaaataaaaagtaggtcccctatccttctctgagggtgacttatgaagcttctctctttctctttttctcttcattttattattatgaactcatatttttaaacacacattcatgtttcagtccactgcagttattacagttggccctctggggattccacatctgtggattcaaccaaccctgaatcaaaaatatttggaaaaacaccaagacaacaacaacaaaaaagtacagaataaaacaatgatttgtctagcatttacattgcaatgtaataggtat

SEQ ID NO: 223297 - DNA, 587 bp, Homo sapiens
aaagcttgactactagtgggaaaggcagatgtatacacaactcacatagtgtggggactctagmatgtgctaagtattataaaggaggtagaaacaggagtagtgtgtgcacagctaaaaatgccattgacttttgtgtgaataaagttaacattaacatattggcgtatttattttttcttcctgtttgtgtttgaataaaaataaaagaaaaaagatacctatgtccttgtaagaagtcacatagattgactgtattttagagcattcccagtgagactaatggtttttctgaccattgacttcctagagttcctttccctaactcttctcagaactcttgcctgtcctttacaactcaactttcagtaaaatccttctgactcttgagtattttcacaatacagacattcccattatatctaaatgtcttctgtggcttttaatactctgtgtcatagtaagctcttctcctgcatattttcccactagactattataatcttgcaggaaagaaccatgcctttttttaaacttttgtactgcaggcataaaaggcttcaataagtgattgaatacacaaatgg

SEQ ID NO: 223298 - DNA, 586 bp, Homo sapiens
agcagcattatacaaaccccaagtaaaggtcatcctagtaaataaatggcctgtattattcaaaactgttaaggtcacgaaagcaaagaaaagctgaggaactgttccatatgcaaggaggtgaaagaaacacaactcagtgcaatgtgtaatcccagactggttcctattctggaggagaaaatgctttaaagggtgctattgggacaactaatgaaattggaacatgagctgcagattagatgagtgtgttttatcagtgctaaatttcctgaagttggcaaccatagttaggtaagaaatatccttgtttcaggaagtacatactgaactattaagggatgagagacaatccactctcaaatagattctgaaaataaataatagtatgcatacatattattatatatgtaaacatatacacacatgcatgtgtatatatgaagataatattaaaaaatagaaacaaatattaaaatttggygtatctgagtaaaaggtatatggaattcttctgtatcattttataacttttctaaaaatttgaaactcagaccaagcatggtgactcacacctataatccta

SEQ ID NO: 223299 - DNA, 596 bp, Homo sapiens
gtgacaggaggggatagtggagttttgctgctctctgtggtcagggctcaggcaggactctaagggaagcctcactgaacccactgtcctcagtccttctgtggttggaatggtcagggcacatgtccacgactcttccaattagtgggatagaaagcagggccctagccccagattctaccactcagcwccctagcctattctcctcatttgcaattggaaaagttgactccgattttcccaaccacaaaagtttacatacaattcagaagggaataaaactgcaacccaaccctctcattcgacatgtctttcccattgatgcctgattctttcccgacaggcaggaaggaatctatcaaaccacaggccaaagatccctattcagacagcacattttaccctcatgacaataattacctaaatagttggataaggagaaatgcttcaatttggcaatgactgatgcttcccccacaaaaaatgcaagaaataaaatccaagtgctgttctttgtcctaataagaaatatacaaggatattcaatcatattggtgcttgtgtaatatttacaaaatgtaagggacaatgcctct

SEQ ID NO: 223300 - DNA, 596 bp, Homo sapiens
gtgacaggaggggatagtggagttttgctgctctctgtggtcagggctcaggcaggactctaagggaagcctcactgaacccactgtcctcagtccttctgtggttggaatggtcagggcacatgtccacgactcttccaattagtgggatagaaagcagggccctagccccagattctaccactcagctmcctagcctattctcctcatttgcaattggaaaagttgactccgattttcccaaccacaaaagtttacatacaattcagaagggaataaaactgcaacccaaccctctcattcgacatgtctttcccattgatgcctgattctttcccgacaggcaggaaggaatctatcaaaccacaggccaaagatccctattcagacagcacattttaccctcatgacaataattacctaaatagttggataaggagaaatgcttcaatttggcaatgactgatgcttcccccacaaaaaatgcaagaaataaaatccaagtgctgttctttgtcctaataagaaatatacaaggatattcaatcatattggtgcttgtgtaatatttacaaaatgtaagggacaatgcctct

SEQ ID NO: 223301 - DNA, 417 bp, Homo sapiens
ttcagattcacatacttgcctgttcaccaggtatctccacttaacatgttccacagacccttaaagctcaacatctctccaagctcaacatctcctaattgtaatccaccattctccactctttccaattcaacactgaaaaccttaaaataccactcatgtcaaaaaacagctcctccaatgtatcatcaatcagtaagtttttaaatctaaaacgttctcatgtctgtcccagactttcccttccctgttygcggtgctgtgctttaggccttatcatcgccagcctgatttactgcaacagcttcataacttcaatccctgcaggaactcattcttgtcttccttaaattcgtcttccatgctattgccagaaaaagctatcaaaaacataattctgcagtcaataaaaatggc

SEQ ID NO: 223302 - DNA, 417 bp, Homo sapiens
ttcagattcacatacttgcctgttcaccaggtatctccacttaacatgttccacagacccttaaagctcaacatctctccaagctcaacatctcctaattgtaatccaccattctccactctttccaattcaacactgaaaaccttaaaataccactcatgtcaaaaaacagctcctccaatgtatcatcaatcagtaagtttttaaatctaaaacgttctcatgtctgtcccagactttcccttccctgtttgcggtgctgtgctttaggccttatcatcgccagcctgatttactgcaacagcttcataacttcaatccctgcaggaactcattcttgtcttccttaaattcgtcttccatgctattgccagaaaaagctatcaaaaacrtaattctgcagtcaataaaaatggc

SEQ ID NO: 223303 - DNA, 724 bp, Homo sapiens
tcactgggctggagtacagtgccatgatcttggctcactgcaacctctgcctcctgggttgaagggattctcctgcctcagcctcctaaatagctgggattacagccacacaccaccacacccggctaatttttgtatttttagtaaagacaggatttcaccatgttggccaggctggtctccaactcctggcctcaagtgatctacccacctcgacttcccaaaatgctaggattacaggcatgagccaccgcacccggccggattctgtcattattaacattattaacattttcactcatctcaaagaactcacagtggcatgtacagaccttgttgatcttcargtatgggctggtggtaagggacataatttggatatgctaaggcacagaaaaatgagacgtgaaggaagatatttatgtgtggtacagtttgcatttaataggttgagcatccctttttaactgctaaagcactagaactgcaacatgcctaacctgcatgttcaccatgggaaatgcacaacagcaggctgcaacatgctcctagataccaggacttcagagcaccatggatattcggcttctgcaggctctggaaatagtgtctagtgggctgtgaatacacctggagcagaggagagagaggaaagctgcaggcctcagtgctccttgctgtgcccacacaagtgctggacgtccttcaagactcacagggaaca

SEQ ID NO: 223304 - DNA, 390 bp, Homo sapiens
ggcagccagtcagtactactcctcaggttcccaatgggcaacaatctttctgcaggttttgtggctgcacagccttggaagctttgcagtccccatgggcaagcagcttcagagatatttaagctggagaagattcaatctctcttcaatgaggggtgtgatggggaggagctgatagctrtgtttgcatacaaggcagtgccattcctgcttcaatttctcagcatatgttagcctctttgtaaattctttgcaaaatatatttaagtattcagattattataggcaagaataaaatatgatgtgctcataacaaaattatctggttgaatattgaggggaaagtgttattgatcctgtagggaaatcactgaagccaaccgctcaatt

SEQ ID NO: 223305 - DNA, 546 bp, Homo sapiens
agaggagatatgtcaataattttcagtgatatgcagatagtgttccacccggaagaaagggattccattgtatatgttttcatcactgactttgatacacatagatgatatattaactaacaattattaaatgccattagctttttacatkaataaacttctctcatcttctcaaaaaaaggactctacgagagagagtattatccttaatttatagatgcaaaaactgagatacaggactaagaagcttgtcgaagtttgcacagccagtaatggcagaagtgtggatgcaagtaaaggctctttgccttcccagccctctctaaaccaccactctatacagaagcttataaatctacatagaatcactccatgcttgtaggagtggccaaattcttaaatgacaggatgaagattttcaaaaggttctgttagttctgttagaaactaatgatgtaacttaataggtataaatgtacatttctacatttaagttaaaaaaaatcagctgcacacatatcaggatgctagtaagacctgacttaa

SEQ ID NO: 223306 - DNA, 394 bp, Homo sapiens
tggcagaagtgtggatgcaagtaaaggctctttgccttcccagccctctctaaaccaccactctatacagaagcttataaatctacatagaatcactccatgcttgtaggagtggccaaattcttaaatgacaggatgaagattttsaaaaggttctgttagttctgttagaaactaatgatgtaacttaataggtataaatgtacatttctacatttaagttaaaaaaaatcagctgcacacatatcaggatgctagtaagacctgacttaaacaccaatcctacgaaagtcttaggggtttcctctgactttgcactcctatgaacatgtaatgaaaagtggctgacaaaagcttgtgtaatcttaggcataagccagaacaaggtagataa

SEQ ID NO: 223307 - DNA, 602 bp, Homo sapiens
ttaaatgctgatctttagctaaaatatgtcatcaatagaaaactggcaaacagcctcttctaaagccacaactagagatatttaacactgccaaaattagtaatacaatgctttcagctggtttttcctggtcagctataaatgttaacaggctgatattaaaagttgatatcaatgttgatatcaaaagtatagatctgccttatgttaaaataaaaaggaaaaagaattagtctcagtaagaagatctgggttctagtgccatgttaggagtgctacaaayttgctgtataattttaattggactaatacataacaacattagtaggagttttgtttgaaccagagatcacctcacctatgaagtaggtatcactattatttccattttgcagatgaggaattcagggcatatggaggtaaataatttgcctgaagtcatacatttagtaagtggtagagtcaagggcaccaaaactcagatctcgccaactcttaactaccatgaacaggtgttgtctctacaaatgttgaggggaaatcaagtggtcacgctatacttttaaaatctctcattcctccattttatatgcattctcaag

SEQ ID NO: 223308 - DNA, 643 bp, Homo sapiens
gtctgtatatttcagtttatagtcctttagtagcctagaaatatattgaagcattatggataaaatttcaacaaagtaaatgacagatttttatatgtgcattcaagaaagaaaaatatgtctctcatgcaggccataattgtagaacttatgctaatggaaatcattgtaacrctttattcatgagggtcatttataaatgatgtatgaatgtccataaatgtctctcttatttgctattaatagttaggaatgctattatttttacataagccaagtgtgattcctttcaagtggaaacaacaataggtataatgtgttggaatgagtctacaaataaaataagcatatttttgcctggttattaactacaataaagtatttccacatgggttatttaaggttttatttagatttcatctttaatttgggaaagcctcagggtgctgttttcaatgaaatgtatcaatcataacacttggaacccaattattacacttcagctaaattacttactgtgatcttaccagttaaagtacacttcaaaaccacaagtgagttgtcataaaaatattttctttttctcagactcttttttttattattactaataatattctttaatcaaatttgtttaagggca

SEQ ID NO: 223309 - DNA, 410 bp, Homo sapiens
gaattcctgagaaattggataacttaatctggagaaaaaaactgaaaatgcaaacaatggcacattgattctgtagarttaattgtaagaaagatatcatcaaattttttctccatttttctgtcagaatcagagtgtaaaagtaaactatagtgggaggaatgcatgtaattccatacctgtacccctttgccacctggaaaactacttttgtgccaagttcccgagttactagaatgatttaaatcaagctggtctctccaatcaatattttttctaaaggaagtgtgggatatagtggaaggagctcagaagttcacctggatctgacacagagaagaggaacactagctagctggcagactttagcaggatcagagccaatgttcaaaaaagaaggaaatagaaca

SEQ ID NO: 223310 - DNA, 567 bp, Homo sapiens
taacctgctgggagaccccaataaaaagactgtctttacaaacactttgcctctcccttcatttataattgaggttgagcttgtcaataaagctttccaaaggccattcaccacaatactcttagacaagtatttacattctttcctcctcccctatcaaaaacagactgtttttgttgccttaaaaaaaatgaataatagtagcaggcaattggaagcagaccttagattttctatcctggtatgatattaaaagataccctctcgaacagaaatacatcatgggcaataagaagttgttccacttttttctgttactgtakttcttgtgatgtagtctaaaggaatttcaaaatggggtcctgaagtcctttttctccttgctcttcctgctgcgactattctgctgggcattccctgtctttccttttttccctttatttttggtagcaaatgaaagaagaaattactggacttgggtctattttttcttctcctaatccattggtcttattgagctttggtgcttgtgttcacatttataaaaataatcctctgtagagtcct

SEQ ID NO: 223311 - DNA, 605 bp, Homo sapiens
ttttgaaaacaagattcaaagcagtgttactttcttaaacaaggcttgtttcatatagccattcagttgaattaaattttcttagaaaagccattttaattcttttacatagtcttcctctttttgacatacatataaagatatagaaatggatgtatttaacagaaacacaagtcacattgaagttattggaatttacatatatatggatacatatatgtattcaaaattatgtttgattcttcaatgaragtatgaaatacaagagaataatcctatgtaaactcagcctatatcctagatgtaatcttgctagtcctatatatatagaaggaagccatttgtagtatagctgtcttcagatagcagacttatttaaacaattctgcttacagagaatttaccaaaatttcatctcctttcccttcattccaacttatcactctcttatttccaccacttcctctcctaacccctgcctcacacacacatagagacacaaacacaccacttattctagactagatcactgccctaggctatgcttggcttctaaaaatccttcaagaactacaggatgattgtatatttagagtctaccttac

SEQ ID NO: 223312 - DNA, 570 bp, Homo sapiens
ccagtaccttaaggaaaacatttcttatttccattaacaaccagaaaaggaaagacagtgcaacagctggaagagcactgcaaatatcagggttacaaagagtaacccagaaacctttaaaataatttaaagtggtgataaaaccagtaacacactgcacttctattaatgcagtaatccttaaccyttgaacctaacttgtacttacactaagaagtcagaagaactgtttttacttgatctaccaaggcaatttcccatagtttgattggaaatagtgctgatgattttctcatttaagttatctacaaagcactaaaaaaaagtgactctgctggaattatccttctaagaaaataagaaaaaaatagaaatttcttacaactaagaaatggatcaagataacattggtctgtgagatttaaatctatcaaaatatgtgagcataccagagatatgatttcttcagttctctgcaaggtaaccaaagcaattccaagaagtcttattttattagaactcaaatttattaagtatgacctatctaagatcatagtgggcagacaacta

SEQ ID NO: 223313 - DNA, 566 bp, Homo sapiens
cacctcgccatctagatgctcaccatctggtaagagatttcagaagtgaaagtatgacccagatattgaactaagctgcacattagaatataactctgtgtattactccagcctgtagaatctttccttcrtatattgaatttcaccatgaaacattagaattagaagactgctattacagactcataggagaatatgaagaagttgaagacacacagcctataaaaaaacctataatttagttggaaagataaaattcattaaaaagataataaatcatacaaataacaaaaatgctaaagaagagttatagactcaaagtagctgaacagactgaaataataatagactttcatagccagaaaaggagttgagaaggacaaggactttgttctgatcttaaaatataggtcatgttaaagtagtagaaaagaggaaaacattttagaccatggaaaaaatgataattacaatgaaacagatgttagattgtgcctggcattgcaaagacagtgagaagacatacttgagcaaaccaatgagctcctgcagggaggaagcagaaa

SEQ ID NO: 223314 - DNA, 566 bp, Homo sapiens
cacctcgccatctagatgctcaccatctggtaagagatttcagaagtgaaagtatgacccagatattgaactaagctgcacattagaatataactctgtgtattactccagcctgtagaatctttccttcatatattgaatttcaccatgaaacattagaattagaagactgctattacagactcataggagaatatgaagaagttgaagacacacagcctataaaaaaacytataatttagttggaaagataaaattcattaaaaagataataaatcatacaaataacaaaaatgctaaagaagagttatagactcaaagtagctgaacagactgaaataataatagactttcatagccagaaaaggagttgagaaggacaaggactttgttctgatcttaaaatataggtcatgttaaagtagtagaaaagaggaaaacattttagaccatggaaaaaatgataattacaatgaaacagatgttagattgtgcctggcattgcaaagacagtgagaagacatacttgagcaaaccaatgagctcctgcagggaggaagcagaaa

SEQ ID NO: 223315 - DNA, 523 bp, Homo sapiens
ttttccaacaatgaaatccagtcatacttttctataaaataacggtttttttacaaatgcattttatttaaaactgatgatgtttcaagtcaataacagcaaaaacaaatcaactttttatggaagagttctatgtttaaaaatacctctagtgctttttttttttaacattaacaactgtttaaaatcgcagcttttaaaatgtactattctttttgaacatcaagtgttttccttcacagatttgccggtgaaattaaaaagatttggctaaaataagatgacttcagatgatataatctcarctcttaagaaactttgtacatttggcatctgatctagtcccaagtcaccaagaaatagaggctctctagtcactgtggagcagtaggtggcacactaaatgttttaaaatgtattaccctccaaagaaaagccattcagttactaggtgtttttagggtagaatatcacatctaaacctccaaattcctctgtccctgaccctaaatttaaatgtttt

SEQ ID NO: 223316 - DNA, 585 bp, Homo sapiens
aaagaagacatatgaatggctaataaacatatgaaaagatmctttcaggaaatgtaaattaatagcataatagatgccactacacacctattacaatggctaaacttataaaagcctgactgtactgcttgttggtgaggatgtggagcaactggaattcccatacattgttgatgaaaatgtaaaagataaaccactttgaacaacactttggcagtttttaaaaacacaaacacactaataaactaaaggctgccaattataggagggttgctgtatacataccaatagcatataaaacctaagaaattcaaaatggagcttcctaatctccttttgagagcaaggaagataacctgctgatattttccccctgctacaaaaatgaattgcaataaactaactagcggaaacaggcctgctttcttatgtctatctcaggcctggcctgcaaagcctgatgctccagtacttagccttgcaaacctcaacatggcttctccaggtactgagcatgcctgtccttaatagcagcatgccagcagggactatcagttgcagctgtttcccaactgtttacagcag

SEQ ID NO: 223317 - DNA, 628 bp, Homo sapiens
tggttgacaaactaaaaacacacttttagtcatcctcattgtcatcattgctctcttaccctttctctttttgtaattttacctctttttcttggttatttcttttcaattagggtgggatttttttwatgcagaattctatgtcagccctggaaattgtttctttctttcctcaattagtacacgagttagtcttttcttgatcaatccatcacccacctggggccagacacatgacctcttgtatctgaaacagttcagaaacacaatttcatgttattaaatttactaggaagaaattgctttccatatttatattcacctctatacacaagtctggaacctagcacttctctaaagaagaaagaggaagagaaagaggatgatgaggatgagaagaagcaaaagtagaagccaatatttgtgagacttcatgatgagtgttaatgtcatttggataaatgggctgatagctcataaagagtgatctatgcaaaagtacctgggttcagattgggctttcagcctcaaaaggcacaggaaccaaggtagaggtgtacagaaatcttggtgaggagtgcacagtctcctgcagatgccaatatcagaatcattctgctccaaccac

SEQ ID NO: 223318 - DNA, 435 bp, Homo sapiens
aagactttgtaatgaaaaatatgtcacctgccttaaaaacagtgtgttgtcagtaaattatcagcccacttccagagtccaatcaaatatatcagtataactggagactctactatgtgttccatgaaaacatagcatctgaatgatgaatggtctttgccttcaagagatttatatcctggtggtaacaagaacatattgaaaataagagtaataataatttcctttaaattatctttattaattgaattgtttaaactatttaggtacacaacaggggcagctgctttaatttgaacttctccagcgggaaacctgaaacacaaagtagataggtgacctgyttcagtctccttgtgggatcagccatagattcactgctgctgaggcctcctgctttctggcaagctgggcagtaaagctgatacctatgtg

SEQ ID NO: 223319 - DNA, 435 bp, Homo sapiens
aagactttgtaatgaaaaatatgtcacctgccttaaaaacagtgtgttgtcagtaaattatcagcccacttccagagtccaatcaaatatatcagtataactggagactctactatgtgttccatgaaaacatagcatctgaatgatgaatggtctttgccttcaagagatttatatcctggtggtaacaagaacatattgaaaataagagtaataataatttcctttaaattatctttattaattgaattgtttaaactatttaggtacacaacaggggcagctgctttaatttgaacttctccagcgggaaacctgaaacacaaagtagataggtgacctgtttcagtctcctkgtgggatcagccatagattcactgctgctgaggcctcctgctttctggcaagctgggcagtaaagctgatacctatgtg

SEQ ID NO: 223320 - DNA, 605 bp, Homo sapiens
tccaacccctttgtgtttgttcacacaccccctattttcccttctgttgcaaaagaagacaaaccctcactcctgtatgtgccaaaatctccttttgtgctttggatccctttcccctcttgacttcttagggactttgttgcctatcgctgtaatacccccatcactcttcatccatcactaatatcctctctttatcattcccattggyattcctaaccgtcgtctcatttttatgctctctcctttacagcaaaacatgaaagaattgtctgtattttctgtcttcacttcttcatctttcattgtctctcaacctccagtcaggtttccatccccaacattcgctgaaacagtgcttgtcggtaactgatcagagtgacttccaagcagttaaatcccatagtcacatctcagtgcacatcaaactcaatctcacatcaatattttacttatctggccgctgcctctctcttgaaaaactttcttgccttgacttctgtgatatcatattctcctttcctacatcacaggacccctccttgtcagtttcctctgctggttgctcttcctcttcctttgcttgctggagtgccttcttttct

SEQ ID NO: 223321 - DNA, 573 bp, Homo sapiens
ccacttctctaaactctctcctgtgatcatgggttttttgtttgtttgtttgtttgtttgcttgttttgagacggagcctygccctatcatccaggctggagtacagtggcacgatctcggctcgcagcaacctctgcctccaaggttcaagtgattctcctgccttagcctccatgcccagctaatttttgtatttttagtagagacgggatttcaccatgttggccaggctggtcttgaactcctgacctcaggttatctgcctgcttcggcttcccaaagggctgagatgacaggtgtgagccatcgcgcctgtctatgatcatgggttttttattctttttttcaatagagcacctttcctggttggtgaaggtgcagagctggatgtttaggaaatacagcctttcaggagaacttccttgagttttgctgattggcctagattttgtcactgtttgcaggaccatgaggtgggtggtgagctcaacttggaatggcctggaagcatttcaatgttttggggtggttgcttctctgtttgtgttttattttttaaatctgtaattccc

SEQ ID NO: 223322 - DNA, 536 bp, Homo sapiens
tcatgggttttttgtttgtttgtttgtttgtttgcttgttttgagacggagccttgccctatcatccaggctggagtacagtggcacgatctcggctcgcagcaacctctgcctccaaggttcaagtgattctcctgccttagcctccatgcccagctaatttttgtatttttagtagagacgggatttcaccatgttggccaggctggtcttgaactcctgacctcaggttatctgcctgcttcggcttcccaaagggctgagatgacaggtgtgagccatcgcgcctgtctatgatcatgggttttttattctttttttcaatagagcacctttcctggttggtgaaggtgcagagctggatgtttaggaaatacagcctttcaggagaacttccttgagttttgctgattggcctagattttgtcactgtttgcaggaccatgaggtgggtggtgagctcracttggaatggcctggaagcatttcaatgttttggggtggttgcttctctgtttgtgttttattttttaaat

SEQ ID NO: 223323 - DNA, 590 bp, Homo sapiens
tgcccaggctggtctcaaactcctgagctcaagcaatcctccttccttggcctcccaaagtcctgggattatggacgtgagccaccatccctggcctagttcttaaagcagagatgcttctaaaagcaaatctactccagtctttctctccctgctccctcaactatcccaggacaaagactcagttgattctcaggtcctcagtccactggtaagctggcaagactgctgaatatttcggatcagtcttacttcaagaacaccaagtttgcagtcagttgatctgggttttggttgtggtctaaccacytgatgtgtgaccttgaaaagatcacttcatgtcttagaacctctattctgttagtatattgaggatactaatgaggattaacctgagactcaaatcaaagagcccttcaggaactgtgaagctcaaatacaaactgctggtaccatttcctattcccaattcttggttgttagtttgctccttcttctccagttcttcacatatggatatggagaggccttttggggagcaccatagatggaagataataatacatttcccatgctttgtcctaaagctt

SEQ ID NO: 223324 - DNA, 504 bp, Homo sapiens
aataatgaaaagggtccatatagatgtcttcatagacaccagtcctatgatctcaaaagcctcctgaccaagccggtcttcttataaacatatttgccagccacaagggaaggaataagtggatgacactgaaaaaaaaaatacatctcagagatcccaggaccctttrgtttccagatccttatccttggctgacaagcgttagctgatttatccatgaatattttcctgcttgctgagtgccttcaggacagggactaattgttcgtgtgtccttactgctagtacagtgcccgacatgcaatgtatgcttgccatatattcatagcacagatcgatgcattagtaacagcttccaatatgaagatcacactggttctgtcctttataccattcaggtgtgccagccactgtcccacctggcattgtctgagacaatcagctgccgtaagacaggaatgctgcctccctacctgacttgtgaagtagttaagcagcagttaa

SEQ ID NO: 223325 - DNA, 504 bp, Homo sapiens
aataatgaaaagggtccatatagatgtcttcatagacaccagtcctatgatctcaaaagcctcctgaccaagccggtcttcttataaacatatttgccagccacaagggaaggaataagtggatgacactgaaaaaaaaaatacatctcagagatcccaggaccctttagtttccagatccttatccttggctgacaagcrttagctgatttatccatgaatattttcctgcttgctgagtgccttcaggacagggactaattgttcgtgtgtccttactgctagtacagtgcccgacatgcaatgtatgcttgccatatattcatagcacagatcgatgcattagtaacagcttccaatatgaagatcacactggttctgtcctttataccattcaggtgtgccagccactgtcccacctggcattgtctgagacaatcagctgccgtaagacaggaatgctgcctccctacctgacttgtgaagtagttaagcagcagttaa

SEQ ID NO: 223326 - DNA, 590 bp, Homo sapiens
aggattctactgatgtgatgggaaggcatgggggctgggaagtgttctacagtcctctagtctcagtccttcagtgagcctgtgcccctgggctgtgaccttcacaagtgcttctcagtactccctcctcccctctagatgggacaggaggctagaggggttagagttggatatttctcttctcccaggtaggttaggctccaataaaaccccaacagtttkgggtctggtaaaatagtttcttctgagagcagaccttgttaagaagaatgcaattctctggcatatttcaaaatggttccttttcccctcctcctgccagaagcacagggggatttttctctcatctgtcttgtgagaacatggtgggactcctggaggtaaaactcacaaaagcctgactggatgcccctgaagttcttaacactcagaattgtctatactgagcctcctgcaatttgtcaattacaattcagattttcctgcttaggtattggttctctcggaggtttctgttcctgtaaattaggattctctgtatccacctgtctgtctctctcattttggggcagaggtttgtcctgtgactt

SEQ ID NO: 223327 - DNA, 521 bp, Homo sapiens
atcttcttttggttatgtttatgggtatgctaytgatataaatgttctaagaattacataaatttataaaaatctcatatgctatcagtcataattttgatatgttaaatctttttaaaagttatatttgtacagatatataattaatacaaatattcttaagattacattattataaaaatcagatggtcttgatgtgatgctgtcagtcatggttctggttgttatcttaaaatgctatatataatagaaataacttaattttcttgacaattgagaacttttatcagattttaaccatggctaagtttttgtaatccacagttattgttttgaattcttctctaaaaagctttccaatcagctacaacccaacttacttttcatggaaaggactctgacaagtactcttaaatacagatttctgataactttggagataatgccatcagactaggaaaagtcttccaggactctgattaaaaagttacatgagaattgctaacccaacatcaaaccga

SEQ ID NO: 223328 - DNA, 508 bp, Homo sapiens
gaattcttttggatatgtacccaaaagtgagatagatggatcattgtaatactattttacattttctgaggcacccccacactgttttccaaatcagctgcatgattttacattccctccaacagaaggatttcaatttctctgcatgctcagcaatacttgttttctatttttccaaaggattttttggtcaagcatggtggctaacgcctgtaatcccagcactttgtgaggccaaggcaggtggatcacttgaggtcaggagtttgagaccaggctggccagcatagtgaaaccccatctctagtaaaaatacaaaattagccaggtgtrgtggtacacacttgtaatcctagctattcgggaggctgatccagaagaatcacttcaacctgggaagcagagtttgcagtgagccaagatcatgccactgccctccagcctaggcaacagagtgagactctgtgtcaaaaaaaaaaaaaaaaggtttttataaaagtggttaagt

SEQ ID NO: 223329 - DNA, 493 bp, Homo sapiens
actttgggaggccgaggcaggtcagcctcaatcacctgaggtcaggagtttgagaccggcctggccaacatggcgaaactttgtctctacttaaaatacaaaaattagctgggcgtggttagtgcacgattgtaatcccagctacttgggaggctgaagctggaagatcgcttgaacacaggaggtggaggttgcagtgagctggtattacgccactgcactctagcctgggtgacagaatgagwctctgtctcaaaaaaaaaagaaaaagaatccattcagaatactaaaaaaatagtttcacttacataaaaaattacctgagaaataaaaaagaaatagttgtctaagaaagaatcatggatttcatggtcagaaaactgtacatgaaaggaatagactggttgaccacaggtgcacagacagaaacagttccagttcatcttttcaattaatactgtggttcagatatttactcccttaggtaaggaat

SEQ ID NO: 223330 - DNA, 590 bp, Homo sapiens
catgagcaaaactccatatcaaaaaaaaattaaaattgaaaaattagggggttaaaaaaaagagggggactgttctagattaaaagagactaaagaaacatgaaattcaaatrcagtgcatgaaccttaggtagaatcctggttccaattttattttttaagagatgggggtctcactctgtcacccagcctggagtgcagtggcaccatcacagcccactgcagcctcaaactcctgggctcaaaagatcctctggccttggcctcctaaaaggttgggattacaggtgtgagtcaccacgcccagccccttggttccaatttttttaagctataaataatattttgtaaagaatcagaaatttaatatggactggatattagatagtattaggagattactgggttttttagatgtggtaatagtaatattaagaacatcctggctgggcatggtggcttatgcctgtaatcccagccctttgggaggctaaggcgggaggattgcttgagcccaggagtctgagactagcctgggcaacatgacgaaaccctatctctaccaaaaattagccaggcaagatggcaca

SEQ ID NO: 223331 - DNA, 590 bp, Homo sapiens
catgagcaaaactccatatcaaaaaaaaattaaaattgaaaaattagggggttaaaaaaaagagggggactgttctagattaaaagagactaaagaaacatgaaattcaaatgmagtgcatgaaccttaggtagaatcctggttccaattttattttttaagagatgggggtctcactctgtcacccagcctggagtgcagtggcaccatcacagcccactgcagcctcaaactcctgggctcaaaagatcctctggccttggcctcctaaaaggttgggattacaggtgtgagtcaccacgcccagccccttggttccaatttttttaagctataaataatattttgtaaagaatcagaaatttaatatggactggatattagatagtattaggagattactgggttttttagatgtggtaatagtaatattaagaacatcctggctgggcatggtggcttatgcctgtaatcccagccctttgggaggctaaggcgggaggattgcttgagcccaggagtctgagactagcctgggcaacatgacgaaaccctatctctaccaaaaattagccaggcaagatggcaca

SEQ ID NO: 223332 - DNA, 603 bp, Homo sapiens
taatagtatatgtttcagaattatgaggattaaatgagataagcatcagcaacttgcttagcatccaactaagtgctcaatacatgttgaccattcacatgctgagaactttcatagtaataatatggtcaatgtgtattgaatacttagttggttgccaagcattgtgctgagtatatacgcctcttttaaagttatcattactacttaaagtgactgcagtgtctacaatgtgtaagcattatcamattcgttaacctttctttgaagtagaaactagccaatgagtgtttttcatctttacacaacttacagttgaaggcaaatttataatctagtaataacactttctaagtactgagatgattagaattgggggatacagacagggatgcattaagattttaattcccaaagaatttcttgacagtctttatagctgtggcttaataaagcacctagaagtagaacagagtcaaaggggatgacacttgttgactccattagtctaaagactccttatgatatcagctttgaggcttttcaaaacgaatctagtacatatagcctatgatgattgacacttgatgaaagaggcctaac

SEQ ID NO: 223333 - DNA, 603 bp, Homo sapiens
taatagtatatgtttcagaattatgaggattaaatgagataagcatcagcaacttgcttagcatccaactaagtgctcaatacatgttgaccattcacatgctgagaactttcatagtaataatatggtcaatgtgtattgaatacttagttggttgccaagcattgtgctgagtatatacgcctcttttaaagttatcattactacttaaagtgactgcagtgtctacaatgtgtaagcattatcacattcgttaacctttctttgaagtagaaactagccaatgagtgtttttcatctttacacaacttacagttgaaggcaaatttataatctagtaataacactttctaagtactgagatgattagaattgggggatacagacagggatgcattaagattttaattcccaaagaatttctygacagtctttatagctgtggcttaataaagcacctagaagtagaacagagtcaaaggggatgacacttgttgactccattagtctaaagactccttatgatatcagctttgaggcttttcaaaacgaatctagtacatatagcctatgatgattgacacttgatgaaagaggcctaac

SEQ ID NO: 223334 - DNA, 580 bp, Homo sapiens
tgatttttattcacccttgttttatttttatccagccatactacctttatcacttttttttttttttgggggcaaagcttaacattctgcaaactttttttccccttgagtatgcattgcatttgtcatgaagagtaaaaagaatgtaataaacacatcagtcataatgtaaattaactgttttgatccacattggttggatacagcatggttaattctaggcttggttaaaaatacataatttggaaagtcttctaatattttaaagacctagtagtttacaaggcctttttttgttgttgttgttagacttttggttcacatttacaaactagccacagggtgttcataaatatttccccaaattagttgagtatttttaattgtaaacaaagaattttctgcccctactacactggtttactgctagggtaaagaccattgtctgaagacactaaacttggtgttaacagtgttgattgtttaatggatatggactacatgccactacctgcaactttgtcatcctggagtttttrtttggtttggtttgatttttcgttttttgcttttaaaattc

SEQ ID NO: 223335 - DNA, 589 bp, Homo sapiens
ttaaaatgatacaggcccctcaagtgtcttaggaaaaagtcattggtgctataaaacctttcagtatcatttttgaacccattgttcagactttgctaggttttaatctgattccttgtgatttattataatgtagcagcatacttataaaagtggtctgtgctgagtcagagagcccagcccattagaaacacatcataatttaagaatatgatgcagaatgcccttacacttatttgtgcccagcttcccaaaaagaaaattgttttgttaagaggaaggcagttaatttggctagaatccaaaaactcattcagcatggctgttttcccttatttcaaatgaaaaacttttctaatactaaaatatgtaatcctgctttgctttaaatttccatgtctgtcactcaacagaaggcatagtgattcttaaatatttacggaacatttggtgagttgtaaagagaagtattattgcattgtaggtttttgcattgatgtgtcratttttttgttttgtcccaagatttccttctcagcaccttaatgaatgttcatatgatagaatgtttaaaggggggtggtgtcag

SEQ ID NO: 223336 - DNA, 537 bp, Homo sapiens
ttggataacaaaaatataagctcctcacaagacagagagagacgttcccctaagccacacctgactaaatatatcaacaatttattattgatgaatagatggaattaatactagaatcacatggtattgtatttgtttcatagatatttatgatagtttcatagatatttatgataaagctaagtttggtcaaccataaatagttctttcgacaatgctgtgagttctgtcattctcaactargtttttaaaaatatttctaagttctaaagcatgggctctgaagtccaaatacttgggtttgaatctcagctctgccacttaacaatttgacttgtcttggaccccttaagtaatctgagctacatgttgtcacagggaaacctgagattggtctggcctttctagggctgttgtaaaggttaaatgagatagcacgcctgaagcatttgcctaataatgccaagtacatagtatgtgtgaaacaaatataatctattaccattataattgattatgaattgttaaaggtacata

SEQ ID NO: 223337 - DNA, 537 bp, Homo sapiens
ttggataacaaaaatataagctcctcacaagacagagagagacgttcccctaagccacacctgactaaatatatcaacaatttattattgatgaatagatggaattaatactagaatcacatggtattgtatttgtttcatagatatttatgatagtttcatagatatttatgataaagctaagtttggtcaaccataaatagttctttcgacaatgctgtgagttctgtcattctcaactaagtttttaaaaatatttctaagttctaaagcatgggctctgaagtccaaayacttgggtttgaatctcagctctgccacttaacaatttgacttgtcttggaccccttaagtaatctgagctacatgttgtcacagggaaacctgagattggtctggcctttctagggctgttgtaaaggttaaatgagatagcacgcctgaagcatttgcctaataatgccaagtacatagtatgtgtgaaacaaatataatctattaccattataattgattatgaattgttaaaggtacata

SEQ ID NO: 223338 - DNA, 537 bp, Homo sapiens
ttggataacaaaaatataagctcctcacaagacagagagagacgttcccctaagccacacctgactaaatatatcaacaatttattattgatgaatagatggaattaatactagaatcacatggtattgtatttgtttcatagatatttatgatagtttcatagatatttatgataaagctaagtttggtcaaccataaatagttctttcgacaatgctgtgagttctgtcattctcaactaagtttttaaaaatatttctaagttctaaagcatgggctctgaagtccaaatacttgggtttgaatctcagctctgccacttaacaayttgacttgtcttggaccccttaagtaatctgagctacatgttgtcacagggaaacctgagattggtctggcctttctagggctgttgtaaaggttaaatgagatagcacgcctgaagcatttgcctaataatgccaagtacatagtatgtgtgaaacaaatataatctattaccattataattgattatgaattgttaaaggtacata

SEQ ID NO: 223339 - DNA, 537 bp, Homo sapiens
ttggataacaaaaatataagctcctcacaagacagagagagacgttcccctaagccacacctgactaaatatatcaacaatttattattgatgaatagatggaattaatactagaatcacatggtattgtatttgtttcatagatatttatgatagtttcatagatatttatgataaagctaagtttggtcaaccataaatagttctttcgacaatgctgtgagttctgtcattctcaactaagtttttaaaaatatttctaagttctaaagcatgggctctgaagtccaaatacttgggtttgaatctcagctctgccacttaacaatttgacttgtcttggaccccttaagtaatctgagctacatgttgtcacagggaaacctgagattggtctggcctttctagggctgttgtaaaggttaaatgagatagcacrcctgaagcatttgcctaataatgccaagtacatagtatgtgtgaaacaaatataatctattaccattataattgattatgaattgttaaaggtacata

SEQ ID NO: 223340 - DNA, 562 bp, Homo sapiens
agatgtaatttttacacctatgagcatttgtccaatttctgtctcttcctcaccattgggtatctattctttatatgtcaataagataaggtaatctgatagctttattcaatcttcatcattttcattcatcattgttcctatgtagattattggtcatttattgtagcactacataactgattataaaaatcaggaaatgaattggcactttcatattgaaacaagcctgctagcctatgtataaaatagcaaaatgtttgctgtttataaaaagatgtaatggggtgtgrggcaagggtaatttcaagttattaattgaaaaacgaactagcaattttgtacctgctgactttgtggtgcgctcacctctgatagtgacttgaattcggtatgtaaaaagggtttagtggtatttcattgctgctaaaaatgacagctccctctgtgtcctcttttcttaaagctgtcagtgtacaagtgggtatttgaataccagaccttactgtaaaaaataagaaaggtggtatctagagcatttaattggatataaagttctact

SEQ ID NO: 223341 - DNA, 562 bp, Homo sapiens
agatgtaatttttacacctatgagcatttgtccaatttctgtctcttcctcaccattgggtatctattctttatatgtcaataagataaggtaatctgatagctttattcaatcttcatcattttcattcatcattgttcctatgtagattattggtcatttattgtagcactacataactgattataaaaatcaggaaatgaattggcactttcatattgaaacaagcctgctagcctatgtataaaatagcaaaatgtttgctgtttataaaaagatgtaatggggtgtgaggcaagggtaatttcaagttattaattgaaaaaygaactagcaattttgtacctgctgactttgtggtgcgctcacctctgatagtgacttgaattcggtatgtaaaaagggtttagtggtatttcattgctgctaaaaatgacagctccctctgtgtcctcttttcttaaagctgtcagtgtacaagtgggtatttgaataccagaccttactgtaaaaaataagaaaggtggtatctagagcatttaattggatataaagttctact

SEQ ID NO: 223342 - DNA, 551 bp, Homo sapiens
gttcatggtgttctgtcatagcagcctgaatggtctaggacatctatatactcacctcccacagtgatacagctgacctggaaccccaaaatgacattgcagaaatgatggcgtgtgacttctgagactagaycataaggttctgtggctctcaccttgtcctctcctgagtcacctgctctggagaagccagctaccaggttgtaaggacaggaaaactgtgctcaggagagatccatgaggtgaggagctgaggctgcctgccagccaccagcactgacctgctggcatctgagtgagccacccatgaagtggctcttctattcctggtcaagcttgcagatgaatacggcctccgctgataccttgatcacaacccactgagaaatctggaaccggaagcacacaggcagggcacccgtgttcccgaccctctgacactgtgtgggatgatgaatgttcattgcggttgtaaaccagcagtctccaacctttttggcaccacggactggttttgtagaagacaatttttccatggacatgaagggaga

SEQ ID NO: 223343 - DNA, 551 bp, Homo sapiens
gttcatggtgttctgtcatagcagcctgaatggtctaggacatctatatactcacctcccacagtgatacagctgacctggaaccccaaaatgacattgcagaaatgatggcgtgtgacttctgagactagatcataaggtkctgtggctctcaccttgtcctctcctgagtcacctgctctggagaagccagctaccaggttgtaaggacaggaaaactgtgctcaggagagatccatgaggtgaggagctgaggctgcctgccagccaccagcactgacctgctggcatctgagtgagccacccatgaagtggctcttctattcctggtcaagcttgcagatgaatacggcctccgctgataccttgatcacaacccactgagaaatctggaaccggaagcacacaggcagggcacccgtgttcccgaccctctgacactgtgtgggatgatgaatgttcattgcggttgtaaaccagcagtctccaacctttttggcaccacggactggttttgtagaagacaatttttccatggacatgaagggaga

SEQ ID NO: 223344 - DNA, 532 bp, Homo sapiens
tcatcggtggccttgatgtcacagagtatcagtgacactgtatgacatattgtacacctcagcctgtaggtaacagtgtagggcacagactcatcttctgtgccctatggcatgtggaacgtccatcgcacatgttaatgttgtgcattactgtatgcctcgtgggctgttctttaatcattttgtttcttggagtcttatcttcctccaaagagttaggcaactctcttgacatttgggaaaccacttccagtgcacctstcttctgtcccctcacctcctggaaacacacgtacctcctaataagttcccaatgctcccttttgtcattccgagggttctgtcatcctctggtaaggaaaggaggaaaatacctgcatgaatatcaacaagttttgttctattcattcatctaagcatttatttcctgtctattatatgcttggtgctgtggatgtaaagatgagtgaacacatagtgttactgtcaaagacctccattttgtccttgctgttggcctaattgatgcaat

SEQ ID NO: 223345 - DNA, 519 bp, Homo sapiens
  misc_feature (1)...(519): n = A,T,C or G
tttggggatggaggggtggggacttaggggcaaggggaagctgagaagagattacacagaggagatgatatgaggcgaatcttcagaggtgggagctttaggggggaagtggtagcgattggagtcanaggcagcagtgctatcaaaagtctaggctgcaagagcctgctaagagttatgttctccagggcagggcagagggagatgcccaagggacagaggaggcagtggccgccagcctggggtcctaggagttccccggcacctgttcctcctcctcagccccggcccacccctgcagctcctcaccaggttcagacgtcctggctctggtcctcccacctcatctgtgcaccttgccagtcctttggcttcctctgcgtgcactgaagccctaccagctggtgaggagtccctgtgtttggacgcagggtttggcttcttacaccwgcatcctgtgctgtgtccaggctcctcgggtctctgtgcttaacgcaattccaaatggaagaaagggag

SEQ ID NO: 223346 - DNA, 519 bp, Homo sapiens
  misc_feature (1)...(519): n = A,T,C or G
tttggggatggaggggtggggacttaggggcaaggggaagctgagaagagattacacagaggagatgatatgaggcgaatcttcagaggtgggagctttaggggggaagtggtagcgattggagtcanaggcagcagtgctatcaaaagtctaggctgcaagagcctgctaagagttatgttctccagggcagggcagagggagatgcccaagggacagaggaggcagtggccgccagcctggggtcctaggagttccccggcacctgttcctcctcctcagccccggcccacccctgcagctcctcaccaggttcagacgtcctggctctggtcctcccacctcatctgtgcaccttgccagtcctttggcttcctctgcgtgcactgaagccctaccagctggtgaggagtccctgtgtttggacgcagggtttggcttcttacaccagcatcctgtgctgtgtccrggctcctcgggtctctgtgcttaacgcaattccaaatggaagaaagggag

SEQ ID NO: 223347 - DNA, 518 bp, Homo sapiens
actctcagattccccatactccatgcatgtcatacatctctattcaatgcaacaccatgctgaattagaattgccgattttaagatggtcactgtttcagatgcattttgacactcttaaaagtgactgatactgagcaggtcttgactggataaatccctcaatcttttctcccggccctatcaccttgccwacatttttctcttgcctgagtcttaacaggtaacacttgctgccttctggaatggctctgctgataagattcttggggatgccatttagaaatacttgcatttaaagagtatgtgggatgatgaatatgttaatttacttgactacaataaccatttcactatgtataaatatgtcaatatatcatgttttacttcttaaatatatgtaattaataaaccaagacttttttaaaagccagaaatgattgtgtttaggaaaccaatttagatattttaaaaattagccctcaaagacgttttcaagtattttttttcagcaccctt

SEQ ID NO: 223348 - DNA, 594 bp, Homo sapiens
tttttttcatatgtttgttggccaccctgtgtcttttttgagaactgtctctttacatcttttgcccactttttaatggggtcatttgctttttgcttgttgaattgtttaggctccttatagattctggatattagacctttttcagatgcatagtttgcaaatattttatcccattttgtaggttgtgcgtttacagtgttgatagtttattttgctgtgcagaagctcttyagtttaattaggttccacttgtcaatttttgtttctgtttcaaatgttttgaggactccaaattctttcttaaggccaatgtatagaatggtattttctaggttttctcctaggactcttatagtttgaaatcttacatttaaatctttaatccatcttgagttaatgtttgtatatggtataagctaagggggtccagtttcattcttctgcacatggctagccagttatgccagcaccttttattgaataggaagtcttttccccattatttatttttgtctaatctgttgtagatcagatgattagaggtgtgcatctttatttcttgggtctctatactgttccagtggtctatgt

SEQ ID NO: 223349 - DNA, 594 bp, Homo sapiens
tttttttcatatgtttgttggccaccctgtgtcttttttgagaactgtctctttacatcttttgcccactttttaatggggtcatttgctttttgcttgttgaattgtttaggctccttatagattctggatattagacctttttcagatgcatagtttgcaaatattttatcccattttgtaggttgtgcgtttacagtgttgatagtttattttgctgtgcagaagctctttagtttaattaggttccacttgtcaatttttgtttctgtttcaaatgttttgaggactccaaattctttcttaaggccaatgtatagaatggtattttctaggttttctcctaggactcttatagtttgaaatcttacatttaaatctttaatccatcttgagttaatgtttgtatatggtataagctaagggggtccagtttcattcttctgcacatggctagccagttatgccagcaccttttattgaataggaagtcttttccccattatttatttttgtctaatctgttgtagatcagatgattagaggtgtgcakctttatttcttgggtctctatactgttccagtggtctatgt

SEQ ID NO: 223350 - DNA, 398 bp, Homo sapiens
caaatgaatgtctcattttactaacaggttcagtgtaggtttcaatcctctagttcatttaaaatatcaatccaggctactctgggcacactgcctatggggtaggcctgcccatgtggagtagtaacacacacacacacacacacacacacacacacacacacacacacagatatatccattcacctctaaaataacaagatttgaaacttgtcaaatttcccataatgtaaaatggtaggtgattgtgcttcactctcaatatgctgaactccttgcacaacgagatcccatgatgtttccartctgaggaaactgcagacatctgggtctgagatggaatacaacagcaaaaacagcctgacgtgactgaaattcctgtggccaaatgactgctg

SEQ ID NO: 223351 - DNA, 557 bp, Homo sapiens
caacaattttaagaaaaattacttaatgcattcagacccrtggattgcatttagttcttctgtctcttagacttcgtctggagcagttcctcagttttcccttgaccttatgaccttgaatctttcaaagagtaaagtccagtaatgtagaatgttcgacaattgggtttatctgatgtttcattgtgattagatttaaattatactttttaaaaaattcaacttttagttccagggagtacatgtgcagctttgttacatgagtatattgcatcatgctgaggtctggggtacaaagagattttacatttttggtaaagtgtatcacagaagtgatcctgtaatcgtctcactgcatcttaccatgtgtcctacaattttgatttgtcctgttaattaatatcttgtggggaggtaatttgagactacgtaagtatctcttcctcataaaaccttcaatttattcatttacttgtatcaatacggactcatgggttattttctccaatagtgtataatttgttaatttttaaaaaaacttttcttttaagaaatgt

SEQ ID NO: 223352 - DNA, 557 bp, Homo sapiens
caacaattttaagaaaaattacttaatgcattcagacccatggattgcatttagttcttctgtctcttagacttcgtctggagcagttcctcagttttcccttgaccttatgaccttgaatctttcaaagagtaaagtccagtaatgtagaatgttcgacaattgggtttatctgatgtttcattgtgattagatttaaattatactttttaaaaaattcaacttttagttccagggagtacatgtgcagctttgttacatgagtatattgcatcatgctgaggtctggggtacaaagagattttacatttttggtaaagtgtatcacagaagtgatcctgtaatcgtctcactgcatcttaccatgtgtcctacaattttgatttgtcctgttaattaatatcttgtggggaggtaatttgagactacgtaagtatctcttcctcataaaaccttcaatttattcatttacttgtatcaatacggaytcatgggttattttctccaatagtgtataatttgttaatttttaaaaaaacttttcttttaagaaatgt

SEQ ID NO: 223353 - DNA, 557 bp, Homo sapiens
caacaattttaagaaaaattacttaatgcattcagacccatggattgcatttagttcttctgtctcttagacttcgtctggagcagttcctcagttttcccttgaccttatgaccttgaatctttcaaagagtaaagtccagtaatgtagaatgttcgacaattgggtttatctgatgtttcattgtgattagatttaaattatactttttaaaaaattcaacttttagttccagggagtacatgtgcagctttgttacatgagtatattgcatcatgctgaggtctggggtacaaagagattttacatttttggtaaagtgtatcacagaagtgatcctgtaatcgtctcactgcatcttaccatgtgtcctacaattttgatttgtcctgttaattaatatcttgtggggaggtaatttgagactacgtaagtatctcttcctcataaaaccttcaatttattcatttacttgtatcaatacggactcatkggttattttctccaatagtgtataatttgttaatttttaaaaaaacttttcttttaagaaatgt

SEQ ID NO: 223354 - DNA, 570 bp, Homo sapiens
attgcatccttgctacttccgtggctgagcatgagaattcaactcttcagcatgggaagtacaaggatgaacaaagcacagtgtatactgagctcaagttctggttggagataaaacacgtgtaggattgattgtcrtacaatgtggggagcactacagagtggcacagaaggtgctgtaggggcaacaagagcagagtagcaaactgacccagtgagttaagggtagatttttattgtaaatggaaaatgtttaggtcaaaccaaacagctttgctacaatgccagaggagagaacaatctgttttaattggtgtctggccaataactcagctttgcaagaaggaatggggggcagaagtgcagaaaggaaaggacatttccactgtaagtgagactgaaggacagcctagagagtgtcctgtgggccaactagagaagatgcatcaactgtataaaaatgctgcttttagaagatgaggccaaagaactaccatttgccaactgtcaagaacaagagtctttatccaattcaaaacgatctagagaatataagaatgagaaagtgctt

SEQ ID NO: 223355 - DNA, 570 bp, Homo sapiens
attgcatccttgctacttccgtggctgagcatgagaattcaactcttcagcatgggaagtacaaggatgaacaaagcacagtgtatactgagctcaagttctggttggagataaaacacgtgtaggattgattgtcatacaatgtggggagcactacagagtggcacagaaggtgctgtaggggcaacaagagcagagtagcaaactgacccagtgagttaagggtagatttttattgtaaatggaaaatgtttaggtcaaaccaaacagctttgctacaatgccagaggagagaacaatctgttttaattggtgtctggccaataactcagctttgcaagaaggartggggggcagaagtgcagaaaggaaaggacatttccactgtaagtgagactgaaggacagcctagagagtgtcctgtgggccaactagagaagatgcatcaactgtataaaaatgctgcttttagaagatgaggccaaagaactaccatttgccaactgtcaagaacaagagtctttatccaattcaaaacgatctagagaatataagaatgagaaagtgctt

SEQ ID NO: 223356 - DNA, 570 bp, Homo sapiens
attgcatccttgctacttccgtggctgagcatgagaattcaactcttcagcatgggaagtacaaggatgaacaaagcacagtgtatactgagctcaagttctggttggagataaaacacgtgtaggattgattgtcatacaatgtggggagcactacagagtggcacagaaggtgctgtaggggcaacaagagcagagtagcaaactgacccagtgagttaagggtagatttttattgtaaatggaaaatgtttaggtcaaaccaaacagctttgctacaatgccagaggagagaacaatctgttttaattggtgtctggccaataactcagctttgcaagaaggaatggggggcagaagtgcagaaaggaaaggacatttccactgtaagtgagactgaaggacagcctagagagtgtcctgtgggccaactagagaagatgcatcaactgtataaaaatgctgcttttagaagatgaggccaaagaactaccatttgccaactgtcaagaacaagagtctttatycaattcaaaacgatctagagaatataagaatgagaaagtgctt

SEQ ID NO: 223357 - DNA, 596 bp, Homo sapiens
caacttaattttatgagtccttttttaactttaaatgtaaatgtaatattcctagaagttgagaaaaaacctctgtgtaagaatcttttacaaacatttacattcttaactaaacatatatatcagttgataatataagttaggatatttaacttggcaatttcaaatatctaagctttcttgcctttaggcttacttcaggtgtaagacattgcaactcaaaagtatgtatttttggaaacgactcatcatcatcccagaaaaaactgcggagactttgtatatttaaaggagaaaattctaaactatttttgccttgaatattctttgtagaaaaatgatttttagtgcctttggcaaattgtcacaggcaaacaaccctacttctcaacttaaaaaaaaaatttgaaatttaccaaacttaaaagcctttttctaggactgcgtccatcactgtaatggggcaacacatcaacacatgtacctgttctagaagactacaaaagcacaaatcacatccactttccattatagagcyttatctctaatttctagaaaggatggtgaatttcaggatcattatgaaacgacaatat

SEQ ID NO: 223358 - DNA, 535 bp, Homo sapiens
atcgtttactgtggtaagataaaagaatcatcctttcattcactgacattattctgtgaggcaatatttttcttttcactttggattacttgtaagtcctttctattcttgaattttatatattctaatcatacaaaatattactataataaaagttgctttgmtatttaaaaaatatcagtctattatctgcaaggaaagtattttatattttacatataagggattaatggattttacagtgggcttttagacactgcagttgaactgtgaatattaactcagaaaagtttgaattaaaaagagcttacaatttcatgttggaaaattgtgatgtcaaattagttggttaaatcatgtcattatttattcaatatatggcttagtaagcttgattggtgtttttttttttttttacttttcatttaaacgtctaaaaacaaatgttacttaaaaaagaaaaaaagcaaacaaaactattgtactcaaaaacaaggggtaatctccaacacgccctcagtcaagagcttaagta

SEQ ID NO: 223359 - DNA, 355 bp, Homo sapiens
catgagggaggctgagtagaggacacatacaaatgcagatttatctatttttagtgaggggcataaaactgtaaaacaggggytttgcatggagtaagcatggcaccttatttttcagtcagagagaaatgccatcagagctattcacattcaatttatgagaggaagaaatggactgatgtataagtgagggtgttcattttgtccatatttgcatcagggttgtatgtgtgtgtgctgtgtgtatgtgaatatgtgagtgtcttggtatatttccaaggtaataaagagattaaatataattcaggtaacacgtgattgccaaagaggatcttatttcttgccctgcgaaatg

SEQ ID NO: 223360 - DNA, 542 bp, Homo sapiens
atccattagctattcttcctgatgctctccctcctgccagctttctgagaggcctcagtgtatgttgttcccctgccaatatgtctatggctttttatatatcagaggtaggtttaaattgcccatttttcattgttccttgttcagaggaacagaaatattttcttctacagtaaatacaatgatttactgatatgaaacttaaaattgttaagaactatkaaaattataaaaatatttttaaatgcctgttcaaaagacgttaacctcttatagtgttataataattttgttttgcttcatggcattaaaattagtagttacttttagaaagtacacaagattattttatcaaatagagttactgtaacttgtcataggatatatgtccacatatatggtccatatgcataaatatttcccataggagtcagtcacatcttctttcagatggagcaatttaccctttctagtgtagaattctgtgaagccagttatcaactaacattatagccagatgtatttatataagaaatggaaaa

SEQ ID NO: 223361 - DNA, 289 bp, Homo sapiens
atgaaactgacgatactatgtaataaaaagacctctgctttttgtggtgtatgagcatgaaaaggctttaaaaagataagagatttgcgctctgtacytagctgaatttttcaacatagttaaggataactctgagaaatagcatagagaaagttaataatttctttgggaagtgatatcaggcaaatgagttttgctcaaacaatcatatccacctttttattctaaactaataaattatcagtttttcttcatgtaaacgtaattgcccattgtatgtattggatac

SEQ ID NO: 223362 - DNA, 289 bp, Homo sapiens
atgaaactgacgatactatgtaataaaaagacctctgctttttgtggtgtatgagcatgaaaaggctttaaaaagataagagatttgcgctctgtacttagctgaatttttcaacatagttaaggataactctgagaaatagcatagagaaagttaataatttctttgggaartgatatcaggcaaatgagttttgctcaaacaatcatatccacctttttattctaaactaataaattatcagtttttcttcatgtaaacgtaattgcccattgtatgtattggatac

SEQ ID NO: 223363 - DNA, 289 bp, Homo sapiens
atgaaactgacgatactatgtaataaaaagacctctgctttttgtggtgtatgagcatgaaaaggctttaaaaagataagagatttgcgctctgtacttagctgaatttttcaacatagttaaggataactctgagaaatagcatagagaaagttaataatttctttgggaagtgatatcaggcaaatgagttttgctcaaacaatcatatccacctttttatwctaaactaataaattatcagtttttcttcatgtaaacgtaattgcccattgtatgtattggatac

SEQ ID NO: 223364 - DNA, 356 bp, Homo sapiens
ctgtccctcttaccactgtcttcttctgtatccattccttatctcgttctaatttcttcctatgatgaacaacacgttgaggcttttggatttcttctgtctcaggcttctcaggtgttggtttgctcattaaatgaaatrtgaaactggtcatctctgttaacttttgagctgccattcaattcaacgattgcattgaataagattttggtgggaaagagaaaggaaacttagatctgtctctctcaaggtgccaaagggagtttgagggtttgggagatctgccatttttccccagtgaggaaggctgtcgggtagtgggaagattaaggcctttgaagagagaagtgttgggg

SEQ ID NO: 223365 - DNA, 511 bp, Homo sapiens
ttggtttgctcattaaatgaaatgtgaaactggtcatctctgttaacttttgagctgccattcaattcaacgattgcattgaataagattttggtgggaaagagaaaggaaacttagatctgtctctctcaaggtgccaaagggagtttgagggtttgggagatctgccatttttccccagtgaggaaggctgtcgggtagtgggaagattaaggcctttgaagagagaagtgttggggctgacattccagctcactctgtttggtcacacattcactcaacatgtacttatcaagtgcctagtgygtgtcagcccagtgctggatgcctgatatgacagtgatggtcaacctgtacagatgtgtgggtatgagtgggtgatgcaatgaaaatgccaactacaacgtaatgagaggaatgctcacacagtgaatggtgtggctgctaattgaaaaaacaggcgaaagtcagggagtcatcaaaaaaaggtaaaatggaagtgtatattaac

SEQ ID NO: 223366 - DNA, 602 bp, Homo sapiens
tccatctgcaaaacagggacacatgcctacctcataaggtcataatgatttgatgagttggtaaaaatgaaaatatctataatggtgactggcacacaatagttactcaataaacattagcaatttttttcctgttcctcaacagtttytaactttggatagtttgtttgctgcgtagtttctgtctctcttctccactaaaatgtaagctctgcagcacaaggacgtgcctgtcttgtttaccgctgtgtttcccaggctgggcacacagtgtgctacagatatttgtgaaatgaatgagtggaagtgcaaaagcacgtttttaaaggatgggaaggaactctgacaatgtgagaatgctcacattggatcagccccaagggggacccggagctgtgccaagaaccctattaggggtcaagagagttggcctctggtcctagctctgccgctcaactgctgagccacctccgggcaatttgttggccttctctggccctctttgtgtttcctccagagcgtgggagccctaagactccagggcttccctcttagaggctgacctccaaggagctctggccagctgggaagtgtgggatttc

SEQ ID NO: 223367 - DNA, 449 bp, Homo sapiens
tgggttggtgccctccccacctctcccgtgcccttctgcacctttaggccagctctacgagagcagtcaaggccccatcagaggcactctgggcaggtggagaggccctgcccaggagaagaaaatctgtgtgcaacccaggctctgccactgatgaggcttgttctttgggcttcatgttttttttttagctgctatctgagggagttggactggataatcccttaacttgcaccaactctctgagtctaatttcactactttgtgagagaaggagggaatattatgttcaagtaaaactgcagcacatttatagtaatggctaacgtatttgggcactcacaatggactgggcattttacatacattctctcatgacagcamccctctgatgtgacaattattcacccccacttttaccagaggaaatggaggtatagggagatgaa

SEQ ID NO: 223368 - DNA, 580 bp, Homo sapiens
actgggttctggtgcttaggttcaagtgcttaacttaagtgtgaccctgcagttgttgtagagcagtggttgggaacacaggctctggagccaggctacctgggctcatgtgccagcttcccacttaatatatctgtgaccttgactgcacctcttggagcctcagttttcttatcagtaaaatggggaatcatagtacctactcaaaggayttttggatgcattaaatgaatgaatcacataaagtatgtaggaaaatgcctggcacatagtaactgctcagtaaatgttattgttaggaaagacccttctgtctgggttacaagatcattacctgtatggtgaaagagattgggttagatcagttttttagttgcaggggcacagctccctggagaagattttgttttgttttgcaggaagggaaaaactatagaaagtaaaacttggtaaaacattctgttggtgcagcttgcagaagatttcactgttttcccaaaggggcatgagtttacaagatggattcacagaattggagcatcttaggatcttaggagcctcagatgctcagggctgtgac

SEQ ID NO: 223369 - DNA, 468 bp, Homo sapiens
ttaaatgaaagaaaattggcagatagtgtaraacatttccttataacctatgctcagtttctcctattattaatatcttacattagtttggtaaatttttgaaattaaagaatcaatattaatacattattattatgagttcatactttatttagttttccttactttttacctcatgttatttttctgttccaggatcctatcctggataccacattgcttttcattgtcttgtctctttaagaccctttaggctatgacagtttctcaggctttccctgcttttgatgagcttgacagtttgtagaagtattggtcagatatttggtggaatattcctcaattgggaattgtctgatgtttttctcatgattagtctggggctaggagatttttgggaggaagaacagaaaggtaaagtgccattttcatcacataatatcgagggtgcattctttcaaagtgact

SEQ ID NO: 223370 - DNA, 545 bp, Homo sapiens
tttaggctatgacagtttctcaggctttccctgcttttgatgagcttgacagtttgtagaagtattggtcagatatttggtggaatattcctcaattgggaattgtctgatgtttttctcatgattagtctggggctaggagatttttgggaggaagaacagaaaggtaaagtgccattttcatcacataatatcgagggtgcattctttcaaagtgacktatcactgttgatgtgaaccttgatcactcaactgaagtggcatttttcaggtttctccactgtaaagttaatctttttactatcctctgtactgtgtttttttggacagaagtcactatgtgcagcttacacttaaggagtggagagttaggctctacctccttcctccttaaggttggagtccgtaatttgcaaatcttgtgcacaagatatttgtctattttctctatttattcattcattcatccagccagtcttttatttatattggcatggactcatggatatttctggatatttcttttctactttgggctataattt

SEQ ID NO: 223371 - DNA, 588 bp, Homo sapiens
cttctaattctatcagaatcctattaagaggagactgggagaattcactcaaaaagcttcataggaacagtgcttcccccaaaagctacttgcatcttcagttattttgtttccataaaggagcagctccaatacgaatgagtgatgtaagaagacttaaatgtgggcaaatgtctrggaatcagtggcccaacaatatacaatgaaaaggtcttaaccatgaaggaatgacattaaaaattagctaaagtaaactcgttcagagatagcaagttttaggattattttctgatttgttctcctaagtaacttacattcatttgtcccctggtatttactctccaattttcctttttcactggatgtctgaatatctagttccaacaaattgttaagtaaagaagctggcaaagtcacagcttataccaagacatggcaagtgttaagaatatagctaatattcttgatatggattttaaacaccttgttaaaaatttgtttagccattgatttattcaacaaacatttcagtgaggatcccttatatacttgaacctatgctggaccctgagggaatgaagatgcgtt

SEQ ID NO: 223372 - DNA, 578 bp, Homo sapiens
tcaaaattcctatcttattcatttcaataaaagaggattcttagcatgataaaaaagtgggaataaataaaattggagcataccaatacctgtttttcatgctctaggccaagtgtcagtaaactgcataarcaaatgagcatggctgtgtgccattaagactttatttaaaagaaaaactggcaagggccaggtttgtttggtgggctgtacattgccaacccccactttatattaaaaaacacagtgtcactcaatcattatttttttcaaaatgataaataatgtttttcttctactggaaaacagataccctcagctccaagtttgcgctgtaaatctgttttctttctgtcttcaaaatgttgcatctacaactgcacttcgactggaagactcagatctacaaagaaaaaaatagacaaatgtattacaagtttctattacatacttgcactcaatttggaagtaatttgtggacactaaaagactggatgaaaagaatgtagttccagataacagcagaataccctcatggtgtgtcaaaactttctgacaggagggagtagaaaatgtca

SEQ ID NO: 223373 - DNA, 578 bp, Homo sapiens
tcaaaattcctatcttattcatttcaataaaagaggattcttagcatgataaaaaagtgggaataaataaaattggagcataccaatacctgtttttcatgctctaggccaagtgtcagtaaactgcataagcaaatgagcatggctgtgtgccattaagactttatttaaaagaaaaactggcaagggccaggtttgtttggtgggctgtacattgccaacccccactttatattaaaaaacacmgtgtcactcaatcattatttttttcaaaatgataaataatgtttttcttctactggaaaacagataccctcagctccaagtttgcgctgtaaatctgttttctttctgtcttcaaaatgttgcatctacaactgcacttcgactggaagactcagatctacaaagaaaaaaatagacaaatgtattacaagtttctattacatacttgcactcaatttggaagtaatttgtggacactaaaagactggatgaaaagaatgtagttccagataacagcagaataccctcatggtgtgtcaaaactttctgacaggagggagtagaaaatgtca

SEQ ID NO: 223374 - DNA, 407 bp, Homo sapiens
cttctagttggcttctagtcttaactccatccattatgagatatgttgycttgaacagcctcttgacttctctctgtaaaatgtgaatactaatagtatccatttcacagaattgttgaggcattaaaacataggaaagcaccatctggcatatagttgacacttaatacatagtttttactttttctctttcttaatacctctaccatgctctaaagttgttcataaaaaaatactccttgttcgtaatatagaaccacccttttggccttcaaatttacaactgatgattttaaaccctcattgtgggagctaggaaataggatgcaccagacatttttttttttcctttctttctgactcctctgaggcaaaaactgacttatagtaggtgtttcactgaggga

SEQ ID NO: 223375 - DNA, 632 bp, Homo sapiens
ataactgtccttagacatctctccttatccaaatgggccatcactgagacctaaacctgtcattttaggtcatgtgtacctgcatttcttgtaaaataaacatgactattatatttgtcacacaacagacactgtacaggtaattttagtcaaaagcttacagtatacccaaacttcctgtttttccctaatatccaggggcccaggattttctacaaaatatagtatccactagggccataattctttaagggatccttatgtttgacttttcaaaacctgtttattttatggatggttacttcagggacttgctgaaggtgctttccaaggtaacagattgttgctctggactgccctgctcatgagaagcaaacagcatccaatttaattattcattaattccctcctgaattaatattcttaagaataattttccataaaatggtgctcccaaccctattgtctaacacattatcatagcatctcgtagtaaaaatttcaggcccaagtaaragaccaacacaggctcttgaaatcaatggaaaagatgtttgagagaaggcagaaactatgtaaaaacactcagtgttggtccaactacccttttgacatgaagaaaaaatattaat

SEQ ID NO: 223376 - DNA, 477 bp, Homo sapiens
gcattttttccagaaggaatttagtcagttttattaagttcaatttatgtgcacatcatgtaattgatcgaatttctgccacttttcttggaakactcatctgaagccctaataaacctgactaatatcgtgacacttctctattataaaactatttctctttattatgatgttccattattcctttttctattaacaatgtagaatgaccttacataattcttcttttcttaataagccatgttgatacctagttttcattaacaggctagaaatcgaaaaacacaacttggctttgtagaatagaagccaacgtaaacagaaacatatttgatgtagttttacattgaggtctttctgccacaaattttgactgggggaaactggtagccaaagtttttcttatcttatttaataatgactactctgagagtacccaaaatattgaagatatggtgaataaacatttatggagtc

SEQ ID NO: 223377 - DNA, 586 bp, Homo sapiens
tgtgacttccaaaagagtcactgcaccatttgtctgcttgaccctgttcatgcccagaagctgcacagccaagaactcccaagacaggtgtttccaaagaagaaaaaaatttttttaatgtatgtgaagatatgtgtgtgcatctgtggagatagtggaatagaaaggaccccagtttcaataaatgaatgacctaatataggaaatcactaatttgatatagtcggcatctatacattaaaaaaaaaaacctttttcaggagttttgagagaaaaaatctttttcctaaattgaaggaggatttaatgcacttagaaactagagattcytcagggaaaccttataacctgctttttttgttttcttaacatggtgtccccatttaaatgaatccagaggctgacaagggtttcagctttacaaagctgagcagccccttgatgtttagtgaaacgaaacagatgatttatcagctttaaatctaggttagggtttgcctgcttcaaacttattgatgggagcatgttggatgtgtggttaggcagcatgcttttcatttccccgaatcctttgccatcaacatta

SEQ ID NO: 223378 - DNA, 508 bp, Homo sapiens
ggagaccaagatcatccccaccccgccaaaaataccatacttctttccatgtcctgacaccataagcaataatgcactctaaccgtttttattttcttaatcttttctactttaaataattctatattacaagtgaagcaatctttatgttgcatttttcaaaatayattgtgtatgcagaatattttgcattttaacccactagcgattacaccgtgatttgaccacattgcttttaattctgttctagaattgaccagcttttgcccagacctgtttcagatacatccataggctcaagttaaatatttttaaagaagaaatatgaaaattccaacctcctagttttgcccaagacaccttttgattggacagcagatctatttcttccctaacttagttaaacaaatcactcaagtctcctccccagggtggaatcatggaatgactcatttctctagagtgtttctgccagtgtgctggtggacaagggtacatttacaacagc

SEQ ID NO: 223379 - DNA, 508 bp, Homo sapiens
ggagaccaagatcatccccaccccgccaaaaataccatacttctttccatgtcctgacaccataagcaataatgcactctaaccgtttttattttcttaatcttttctactttaaataattctatattacaagtgaagcaatctttatgttgcatttttcaaaatatattgtgtatgcagaatattttgcattttaacccactagcgattacaccgtgatttgaccacattgcttttaattctgttctagaattgaccagcttttgcccagacctgtttcagatacatccataggctcaakttaaatatttttaaagaagaaatatgaaaattccaacctcctagttttgcccaagacaccttttgattggacagcagatctatttcttccctaacttagttaaacaaatcactcaagtctcctccccagggtggaatcatggaatgactcatttctctagagtgtttctgccagtgtgctggtggacaagggtacatttacaacagc

SEQ ID NO: 223380 - DNA, 508 bp, Homo sapiens
ggagaccaagatcatccccaccccgccaaaaataccatacttctttccatgtcctgacaccataagcaataatgcactctaaccgtttttattttcttaatcttttctactttaaataattctatattacaagtgaagcaatctttatgttgcatttttcaaaatatattgtgtatgcagaatattttgcattttaacccactagcgattacaccgtgatttgaccacattgcttttaattctgttctagaattgaccagcttttgcccagacctgtttcagatacatccataggctcaagwtaaatatttttaaagaagaaatatgaaaattccaacctcctagttttgcccaagacaccttttgattggacagcagatctatttcttccctaacttagttaaacaaatcactcaagtctcctccccagggtggaatcatggaatgactcatttctctagagtgtttctgccagtgtgctggtggacaagggtacatttacaacagc

SEQ ID NO: 223381 - DNA, 468 bp, Homo sapiens
tggaggaattcaatttttaaatcctttgagcttctgagttgaaaagagaaagatggaagatatttttattactattttaatggattcaggaaaaaataaagcaaataagttaaaacaaacaaatataccctccgaaatactaccagctaagaatatctaacagcaagaagatatctgttgcctcttgctactgaaatatgcattcacttctttcttctttattacttatttgattctttagttgatgtgggagagaggatgtagacgatattgaaaaaatacctgcagcattagttaaaacaaygctcttacaaatatcttgatgataaagattactgtttcactctatcaacttgtagttgtcatcacttcaatcaaattgcatcagtataacatcccatttggcagtcctaaaaacaagtacagggtaaatgtcttttggaagtatgaggaggagatggattaagg

SEQ ID NO: 223382 - DNA, 590 bp, Homo sapiens
aagctttaagaaacgagaaaatgtttttagcttgtcctttgcttctgtatttgttgttgtttatccaaatcactgcagttaactgaggacaacatttaacaaggtccctagcacatttaaatatatgctgtcggaatatcaaacaacttatatatactcacagaaagtaacaaccaaaggacaacaggggtggtggtgaagggttgcagttaaaattagactctccacttacattaagattgttaattttaccacaacataatttcctggctatcaaaagattaattgacttyctttttacaagattacttaaattatgcatggacccatgaaaaatagtagtattatatttgggaaataatcatctaatgtgaataaatctgataaaatgtttaatgtatatgaagatgccattgcctactgaactatcaaatcagggacaggcaaatgcaattctttcttggaccttttaaatcatttaaattcaaccttttttgtcatttgtttcaatagctagaatttaatatgcacagcttatgataggtactaatatactttaaatgtttcaggcattgagtatactgtatcac

SEQ ID NO: 223383 - DNA, 590 bp, Homo sapiens
aagctttaagaaacgagaaaatgtttttagcttgtcctttgcttctgtatttgttgttgtttatccaaatcactgcagttaactgaggacaacatttaacaaggtccctagcacatttaaatatatgctgtcggaatatcaaacaacttatatatactcacagaaagtaacaaccaaaggacaacaggggtggtggtgaagggttgcagttaaaattagactctccacttacattaagattgttaattttaccacaacataatttcctggctatcaaaagattaattgactttctttttacaagattacttaaattatgcatggacccaygaaaaatagtagtattatatttgggaaataatcatctaatgtgaataaatctgataaaatgtttaatgtatatgaagatgccattgcctactgaactatcaaatcagggacaggcaaatgcaattctttcttggaccttttaaatcatttaaattcaaccttttttgtcatttgtttcaatagctagaatttaatatgcacagcttatgataggtactaatatactttaaatgtttcaggcattgagtatactgtatcac

SEQ ID NO: 223384 - DNA, 590 bp, Homo sapiens
aagctttaagaaacgagaaaatgtttttagcttgtcctttgcttctgtatttgttgttgtttatccaaatcactgcagttaactgaggacaacatttaacaaggtccctagcacatttaaatatatgctgtcggaatatcaaacaacttatatatactcacagaaagtaacaaccaaaggacaacaggggtggtggtgaagggttgcagttaaaattagactctccacttacattaagattgttaattttaccacaacataatttcctggctatcaaaagattaattgactttctttttacaagattacttaaattatgcatggacccatkaaaaatagtagtattatatttgggaaataatcatctaatgtgaataaatctgataaaatgtttaatgtatatgaagatgccattgcctactgaactatcaaatcagggacaggcaaatgcaattctttcttggaccttttaaatcatttaaattcaaccttttttgtcatttgtttcaatagctagaatttaatatgcacagcttatgataggtactaatatactttaaatgtttcaggcattgagtatactgtatcac

SEQ ID NO: 223385 - DNA, 373 bp, Homo sapiens
agcctctcaagtggctgagactatgggtcaaaccaccatgcctgggctatttttwatctatttttttgtagagatggggtcttgctatgtttctcacgctagtctctatctgctgcctgaagtgatcctcccacctcagcctctcaagtgctgaggttacaggcatgagccaccgcacctgggcttttttttttttaaattgtgtatatttaaggtgtacaacatcacgatttgaaatacatctccatagtgaaatgattactacagtcaattaacatacccatcttttttgtgtatgtggtaagaggacctaaaacctacagtgttcttgggaaattttcagtctataatacaatattattagccatagtcc

SEQ ID NO: 223386 - DNA, 373 bp, Homo sapiens
agcctctcaagtggctgagactatgggtcaaaccaccatgcctgggctattttttwtctatttttttgtagagatggggtcttgctatgtttctcacgctagtctctatctgctgcctgaagtgatcctcccacctcagcctctcaagtgctgaggttacaggcatgagccaccgcacctgggcttttttttttttaaattgtgtatatttaaggtgtacaacatcacgatttgaaatacatctccatagtgaaatgattactacagtcaattaacatacccatcttttttgtgtatgtggtaagaggacctaaaacctacagtgttcttgggaaattttcagtctataatacaatattattagccatagtcc

SEQ ID NO: 223387 - DNA, 533 bp, Homo sapiens
tctgggaccattcttctaccactgattaagactggggtggcaggtattagagataatatgcatttaggcttctgagctttctgggaatatttggtgaccttgtcagctccaacagcaatctggtccactgctttgatgacatccacagcaactgtctgtctcatatcaccaagagcaaaacaatccagaggaggatagtcagagaagctctcaacacacatgggctagccaggaatcgtatccatgatggcagcatcgccagacttctagaatatagggccatcttccaggttcttatcagaacagcaatcaatcattttcttcagcttggcaaacctgcaagcaatgtgagctgtgtgacaatctagtacagggtcatagccagcactgacttaacctggatggttcaggataatcacctgagcagtgaagccaattggttgattatgtttgctgtcaccarcaatgttgccatgatgaacatcttaacagacaaattctagacattgaagcccaaattgtcaccagaaaga

SEQ ID NO: 223388 - DNA, 479 bp, Homo sapiens
atcttttgtatttctgtggcgtcacttgtaatatctcatgtttcatttctgattgagcttatttgaaacttctctcttcttttctgggtgaatgttactaatggtctaataattttgttcatcttttaaaagaaccagctttttgttttacttgtcttttgtatttttttttgtttcaatttcatttagttctgctctgatatttattatttcttttcttctgctgggtttgggtttggcttgttcttgtttctctatttccttgaggtgtgaccttggattgtctayttgcactctttcagactttttgatgtaggcatttaatgctatgaacattcctcctagcaccacttttgctgtatcccagaggttttggtaagttttatcactattatcatctagttcaatcaatttttaaattttcatcttgatttcattgttgacccaaagatcattcaagaggagattatttaattttg

SEQ ID NO: 223389 - DNA, 521 bp, Homo sapiens
gtttctcttgaaagacttctaagcagtgtatctcaatggctgccatatgcattaaaaacaaaatagatttaaactcatacattagatatttttaaagttagtgatttttttttctgttacaaatggtcatttctttacagatgagtccactacacaggttaggggatcacttattaatttaggtatacacttaactaatctttgatgttaatgctacgatttcacttcatttttataaagcaaagtattccaaatratattcctagaagtttatcggtattttttatctttctaacaaaccagcatttgaattcattgacttacaatacagtttatctagaactagaacacattttatggctttctattctgatatttattatttctattttcttatttacttctagtttcattttctcttctctttttttttggataaaagctgaatcattgattcgagactttttattttttccctaatattttttttaaatgctgctttagttttattcacaaattct

SEQ ID NO: 223390 - DNA, 409 bp, Homo sapiens
cttgcctccctacaaatttatcttggtccaagattcacttcttttcttcattcacttgttcatgtattccttcattcacacttattaactgagcatcctttatgtactaggcacactgtgctaagcattgggcatatggtagtgaataaaacagatgaggacttttagcctttatggtacaatgggagcccctagatattaaataacccacccacctcaaaaagtaattacaattgtattcagtgctggaaggggaagtacatccagggggctctgaaagcctgtatcctgcaggactggtctcagcagaaggttcaggaaggyctctctaaagaaggaactgtaggggagggaaaacgtccccttcacccaatgaaagttcactgaaaatcactgacaaaaagcagat

SEQ ID NO: 223391 - DNA, 463 bp, Homo sapiens
  misc_feature (1)...(463): n = A,T,C or G
cacttcctgcagacctctgagtacctggtggggaaacccatttcccatcctgtgtcttggatttaaagaaaacctgttgcagataatgagttgtaaattcaaggagggtggctgttttgctgttctttctctgcagtaaactcttatggggagtgtgccttggttataaggcaacgcaaaagggtagggtatacccatggatgaatgttcatcacacccagtctaattcataccaggtggcaggctcagcaaactgaaccaccacaggtgtcacatatacttgagaatgtctggtaccaacaagacgccaaaggaggttgccttcctcccacatgtgcccaatggagtttgaacaaaggttctaatttgtggaggtgggtcctcaccaaaaagacccaaagtggtcnctgctctttgagccawacaacttgagagactggctttggattggacagtcaaagga

SEQ ID NO: 223392 - DNA, 340 bp, Homo sapiens
ttgtaggttttacctatggatgaatgtatagtagtataaataaactggatatttgcaaatgtttattgtagtctgaaggcaaaaataattatccatttyggcaagttggaaccgtaaccatcacctgaaatgttcaaaacctgtaaagatcagtattatcaatatctgtcatctcataagaatgccttagtgtttaagctaattcaattatagtttgcatatttctagaatgaaacaccatcttttatgatataatgtgctaaggatataataattgtatgatctttggcctccaagagtatgaatctgactgaagcaatattcaaataaattagtcatt

SEQ ID NO: 223393 - DNA, 491 bp, Homo sapiens
ctcatggttgtaatcccagcactttgagaggctgaggcagcaggcagatctcttgagcccgggagtttgagactagstcaggcaacacggtgaaactctcttaaaaaaaaaaaaaaaaaaaaaaaaaatatatatatatatatatatatatatatatatacacacacacacacacacacacacacatatacatatatatatacacacacacacacatatatacatatatatacggaggtgtgtgggcacatgtctgtggtcccagctattcaggagtctgaggtgggaggattacctgagcccagggaggttgaggctgcagtgaactgtgagtacaccactgcactccagcctgggcaaaagaatgagatctcatttcaataataataataaaaataataataataaataagcataaacttattatataacccagaaattttattcctaggtatgtgttcttgagaaataaaaacatatgttcatacaaa

SEQ ID NO: 223394 - DNA, 491 bp, Homo sapiens
ctcatggttgtaatcccagcactttgagaggctgaggcagcaggcagatctcttgagcccgggagtttgagactagctcaggcaacacggtgaaactctcttaaaaaaaaaaaaaaaaaaaaaaaawatatatatatatatatatatatatatatatatacacacacacacacacacacacacacatatacatatatatatacacacacacacacatatatacatatatatacggaggtgtgtgggcacatgtctgtggtcccagctattcaggagtctgaggtgggaggattacctgagcccagggaggttgaggctgcagtgaactgtgagtacaccactgcactccagcctgggcaaaagaatgagatctcatttcaataataataataaaaataataataataaataagcataaacttattatataacccagaaattttattcctaggtatgtgttcttgagaaataaaaacatatgttcatacaaa

SEQ ID NO: 223395 - DNA, 491 bp, Homo sapiens
ctcatggttgtaatcccagcactttgagaggctgaggcagcaggcagatctcttgagcccgggagtttgagactagctcaggcaacacggtgaaactctcttaaaaaaaaaaaaaaaaaaaaaaaaaatatatatatatatatatatatatatatatayacacacacacacacacacacacacacatatacatatatatatacacacacacacacatatatacatatatatacggaggtgtgtgggcacatgtctgtggtcccagctattcaggagtctgaggtgggaggattacctgagcccagggaggttgaggctgcagtgaactgtgagtacaccactgcactccagcctgggcaaaagaatgagatctcatttcaataataataataaaaataataataataaataagcataaacttattatataacccagaaattttattcctaggtatgtgttcttgagaaataaaaacatatgttcatacaaa

SEQ ID NO: 223396 - DNA, 561 bp, Homo sapiens
ataaaaatctctgcgatgcagtaaaagcagtgttaagaggaaagtttatagtactaaacacctacctaggaaacttagatctcaaataaatcatctaacatcacacctagaggagctagaaaaacaggaacaaatgaaccccaaagctagcagaagaaaagaaataactaaaatcagagtagaactcaatgaaacttagatccgaacatccatacaaagaatcaacaaaacccaaagttggttctttaaaaggttaaacaagattgacagactgatagctagtttaacaaaggaaaaagagkagatccaaataagcacaatcagatatgacaaaggtgacattgcaaccaatcccacagaaatacaaaagattcctagagactattatgaacacttctatgcacacaggctagaaaatctagaggagatagataaattcctggaaacaaaacattccaggataaaatcagaaagaaattaaaaccctgaccagaccaacatgaagttctgaaattgaataattaatacaaaacctactaaccaaagaaagccatggaccag

SEQ ID NO: 223397 - DNA, 561 bp, Homo sapiens
ataaaaatctctgcgatgcagtaaaagcagtgttaagaggaaagtttatagtactaaacacctacctaggaaacttagatctcaaataaatcatctaacatcacacctagaggagctagaaaaacaggaacaaatgaaccccaaagctagcagaagaaaagaaataactaaaatcagagtagaactcaatgaaacttagatccgaacatccatacaaagaatcaacaaaacccaaagttggttctttaaaaggttaaacaagattgacagactgatagctagtttaacaaaggaaaaagaggagatccaaataagcacaatcagatatgacaaaggtgacattgcaaccaatcccacagaaatacaaaagattcctagagactattatgaacacttctatgcacacaggcyagaaaatctagaggagatagataaattcctggaaacaaaacattccaggataaaatcagaaagaaattaaaaccctgaccagaccaacatgaagttctgaaattgaataattaatacaaaacctactaaccaaagaaagccatggaccag

SEQ ID NO: 223398 - DNA, 574 bp, Homo sapiens
gattcacaggtacaacatagaatgctgattaatttaaaatattgattatttcaaagaatttaaggttatgaaaatggacttttcatattgaatattgaaacaattatttgtggcatattttctgaaagagaaacctttaaataactaaagttacttaggagaattctcacattatattttgatgtatttggaatattagagttatctgcttggtacatagttggtgctaaataaattttcttgaatcaattattaaatacattaatgaaatggctgaacatttctaatattaacatacagagaagttgggttgatttctcttgaaaatattttttaatattttatctctaatgaagaattttctctttattttctctctggctttacatgccaactgtatatgtgtttccccccccccmcacacacaattttttttaaaattctccttaaaaaaaattttttttttgctcctcacactttgccaagtcccactcctaagtttttaaatttgtttatcattgacttataaaaattagtgagtgcctacaaggtgcaaaatgccaaacctaggcct

SEQ ID NO: 223399 - DNA, 427 bp, Homo sapiens
ttgatactactattatctctccacatgaggcaattgaggcgaagcgaggctaagtacttgttcaaggccatgcatctagttagtggcagagcccrgttaaggaagtccagtttcagggcgtgtgctcttatccacaatgcacaaactcatgctgcagttacagaaagagaaaagagggcacaaccacgagtgatggaattggtaggacttggtatttgatgcgaaaggaagggataagtgatgactccaaaatttctagcctgaatggtggaagtttgcaatgccattagttgaaagttctagaggttgaggaataggttgagctgatgagttccataggtttaaagccaataaactcttcatttgggcatatttagcttaagtttggaaatcgggatatgtagttcaaggcttaatgatagaattc

SEQ ID NO: 223400 - DNA, 594 bp, Homo sapiens
acctcccttttctctgcttgtaagctcagttttctgaggttctttaacaagataaaatttctccaattcacactccatatcaacagcggttttccccatcttcccccaaattaccatcttatttgtctttataatactgatttttatcaaagttatgcatttatatttttacagattaaataatactgagttgtgtagttaaaaataatattttttaagcagcaactgccctacttctcttgactgattcctgtactcctgaggtaactgttttctcttctttctactttttcatttgggctgtttacctctgtctaaatagtcttcttaatactgttgttatttcttgatatttctgttttgatgctaactatgggtgtcctggtatggaacatgagtagttatgcttgttactgctccccatccccactatagcacacatataaatcygtgcttggaatacacactatgatagttatttgaatattcttcaatgctgagccacatggtatattattattacatttctgcttttacaacttgatttttcttagaattaatagttgcctttgttttgggtaagcccttctatga

SEQ ID NO: 223401 - DNA, 484 bp, Homo sapiens
cactttcctggtaatcctgccaaagacacaaaatctgaacttaatcacaaaggarcatcaaatatacctgaattgaaagacatcctacaaaataattggcctctacttttcaaaaatgtcaaggtcatggaggactaagaaagactgaagaaccattacggattgaagaagactaaagagattacatgctgattaagagcaataattttaaataatattttaaataattttaaaatatctaatccaggattacatgttgcatttaatcaacatgtaatatttaaaaattatttttctattactgtgtagatattattaaggtaactagcaaatgttgaatgaggtctatggattagataataatattgccttgctattaatctcctgattttgacatctgtttggtggttatgtaagagaaggtctttgttcttaggaattacatactgaaatattgaggagtaaaagagcatatgcctgcaac

SEQ ID NO: 223402 - DNA, 434 bp, Homo sapiens
gaattccaggcactgggccagggtgagaatcagttaggaagacctgactctgttcaaaatgaaattcagatcaaataaaccaacacatggccaacctggctggatttgaatcmtggctgtcatctcccacttgtgtgattctggggcaattatttcatttccctctgcctcgatttctccatttgtaaagtggagataataatgcctaacttacagaattgttgtcattattagcacgaatgcactagagaacacagcccagagtaggcgctcagtgaaggaccctaacagcaaggatgggctggttctgaatgcggcaggcgaggattcactgagcatgtgctgtctccctacagctcaagagtgaatgagagtccaagaaaataattctggagaaagtgggaaagtgagtctggggagaagaaaaaagaaag

SEQ ID NO: 223403 - DNA, 579 bp, Homo sapiens
atgcaggctgagctcctggctccaccacttgatatctcgggtaccctagagcaagtgtttaacctcttagagcttcactttgctcaccaatacaacgggaatgataacagtcataccttattgagtagtgggtaaagatgaaacaactgctatattcaaaggtcttggcacggtgtctggcacaagttygataaaaggtagcaaaaaaaaacacaaccactactctaataaatattgctccagtagacgctcctgtttcctggcttcctcctcaaaatcaccatggggccagtcctccacatcctccctcctcctcctttgcataccctccatttcagaacccacttcaaagctacttcttcaccagcttcatctccttcctaggattctagtttgcactggatcaagggattcatcagttagtctacacaaactccttaacctctcgggatcatcattgcgcgctaggtggttgttccagtagattgctttgcatgggattaaccaagcaatcagctcaggggctggtgggtttgtgggctgatagaattacccgatgagtcagccgtgtgtgcctgc

SEQ ID NO: 223404 - DNA, 522 bp, Homo sapiens
tacatcataatctctgatgactatgtctcttttttgtttctgattttatttatttgggtcttctctctgcctttatcagtctagctaaaggcttaatgattttgtttatatttttagaaaactaactttttgtttcattaatcttctgtatttttagtcttaatttcatttatttctgctctggtattattaatattttattctttctactaatttgggtttggtttgttcttgttttttagttccttgagggcaacattaggttgtttatttgaagtctttctacttttttgatgtaagtatttattttctaaactttcctcttagtactgcttttgttgtatcccatagattttggaatgttgtatttccatcttcatttgtttcaaggaatttttaaattttctcctttatttcttcactgacccattggtcattcaggagcatgttktttaatttccatatactgtaggaaacagtttccaaggttctgcttggtattgatttctagtttttttccat

SEQ ID NO: 223405 - DNA, 397 bp, Homo sapiens
gggaaactcagactgaccaaaagagccgaggaggtcctttgtggcctgtctgctccatggtgagtctcccccmacgcctgtctccccaatgcaccatcccacagtcccaaggggccccaggcacagcctttaccactgtgtctagcatcatgaaatgctccagtgagcaagaaggtcctcaggaatccagtaaatatgaatttactaattgtgacgtaatcttgtcctcacagagcttacaatattgctaaaagtgtagtacacatactcacacactacatatacaaacctatattaaagaattatttagaattacagagtatcatgctgagtaatgtgtagaatgcattttagaggatttcaataacaagatttgtttgtggggtagatacaagta

SEQ ID NO: 223406 - DNA, 409 bp, Homo sapiens
ttcttggaaaacaagtttctrgatagggctgggatggaatcttttctgtttttgtatccccggtgcttaacctaatacctggcatgtggaaagcccctgaagacagatatggcaggcacttttcttggattggcagttgaaaagaactgaaaacaatgacaacaacaacaacaaaaacacaaagaacacatagcatagtctgtacaaacatctcctgtattctatgaaagaaaaaactagaggtagaacataggctaatgggaatattgaaactatggtgccttttccaggtttttaatcatagatttggagaatttgacaatgccgagatgaagctcttgaatgttttagctggaggattctggaaatccttctggagttcatgtctggaggaattaatagagaattc

SEQ ID NO: 223407 - DNA, 555 bp, Homo sapiens
actgagtttgagagtccattagatttcttagtatttttgctttattggagattttgtgttttaattttgcctttgcctttgatttgttgttaagtcagcaactggagaagtcatttgatgcctaacgaattacatattaaaatccgttatcactacccagtcactaaaaattcctacctcttcttaatataggttatcattattttggcttaagatatttatacctgctatcaattctgttgctcctactcctgagtgattttattaatcttgatttagtccttaaattaatatgtaatcagtccattttaaacagatgttcctaatttcaagttatgaatatggcatttgaaaatgtttatagtgtagataataagtaacattttacatcctatatgtttttttaaaaagttgaaggtataagtctttgtaaaaattatatgcgtatgtatatacacacacatttcctaaggattcatatataactgatatytaagaactttttctgctaatggcttaacaagtttccattccagttctccccctttaattggg

SEQ ID NO: 223408 - DNA, 508 bp, Homo sapiens
tatttagcaaggtaaaaattgttgtcaacttgtgtaaatttttgagttgtaaatgttatttcacaaggatatcaaatatgaatgttgaatcaacttcatttttactttttctgcttatagaagataaggatcctgatttagaaacaatattgaatatcccttcagcactcactccaacagtggttcctgttatagtgaccgttcctcaaagcaaagctaaagggaaaataaaaggcaaagaaaaacccaaagaatcccttaaagaagaagaacacccaaaagaagaagagaaaaaggtaaatgaaccttgccatagattcccaaactctgtttctgcttcagtgttaacttttttaaaaccatgacttatgtcaatagtgttattatagtgcatacgttttmttgtgcagatacattaacgtcccttgtagtctcaactttgaatagacaagaaggatttgtacccaaaagttgggttaccactccaggagacatattgtcatacata

SEQ ID NO: 223409 - DNA, 579 bp, Homo sapiens
aagctttatgggaggaatggtcttgaaaaataaacagaatttcatagattttaagatttaagaggtgaatcacctacaacaaccctcattttacttaaggaaactgaaacctggagaagtcaagtgacatctaaaaatcatacagcaaatttgtgactgagctagggctrgaatgagttttaagactcttaattctctatattatgttacactacattcctgatgtagggaagagaaaagaatatttattttattaatttctttttttgagagggagtcttgctctgtcgcccaggctagagtgcagtggcacaatcttgactcactgcaacctccacctcctgggttcaagcaattctcctgcctcagcctcctgagtagctgggattacaggcacccaccatcacacccagctaattttttttttttttttgtatttttagtagagacggggtttcactatgttggccagtctggtctcgaactcctgacctcaggtgatctgcccacctcggcctcccaaagtgctggaattacaggtgtgagccaccgtgcccagcctgaatattttatttaaaa

SEQ ID NO: 223410 - DNA, 446 bp, Homo sapiens
gaattcacccgaatgtgttaagtggattgcatttcctaatgtgggtgggcctcatctaataagctgaaggttgaaaagaacaaaaaggcttaccctcatgtgagtaagggggaactcctcctgcctgagctgttgagctgggacactggccttttcctaactttggactaaattggggttttcttgggtcttaagccttcagactgaactatgccgttggctctcctgggtctccagcttgctgactgcagatcctgggactcctcagcctccatagttgcgtgagccaattacttataataaatctctccctctctctatctygctctctgtgtgtctgtgtatactgtatacacacacacacacccctttttggttctgtttctatggagaaccctgattaatacaacctgtcaggcaatgatcagccagccagatgtcaaggg

SEQ ID NO: 223411 - DNA, 415 bp, Homo sapiens
gaattccaaaatgatttgataaaaattttacatatgtattgaaaatacatactaagacatttatattttcagaaaacttcaggaacaaatcaaaagttgtaaatttcaaaacaatttttttaacaacctccctttcagggcttcaacattgaaagcaaacaactgattctggttttgtttctgttttccccaatcatacctggaaattgtttttaattgactttacttactaaccttagaaaaacgaaatcactggttcacagraagtaacaactctgagattccaaaaccactgccagcagagatcttttgctagccatcattagctgaaacgtcttctaaaacatggctttgagttgcacttttaaaatcaatcttgctatgttttaagcttctacaatgaatatctctgtgt

SEQ ID NO: 223412 - DNA, 388 bp, Homo sapiens
attcagctttgttctttagattggcttgagaaacagatacaaaggtggggttaggagtgcaggagatttattgggggaaatatctgtgaaatataaaggggaaggagccagagaaagtggaaagaacattcagatggtgtgcaatgtagattggctctctgtgaggaagaggaggaaggaaggagtcagtagtaggagttgcagactaaagccatatttaagagttttggtcaggccaataaagagttcttgagccaaagcaactcatttaagaaatgccatgccttgcaggactaagcttgtcccccacyatatccattttctgggaacgtggtcttgccatgatcaggctggggttggggtagatcttgaagggcatgagcagccg

SEQ ID NO: 223413 - DNA, 589 bp, Homo sapiens
tttgctgcaatggtggctgcatcagtgtctataatccggtgcattgaatattcatccaagaactgatccttgtcttccatattgcaaatacccaattttcttatgtcattaccttaatctttaatttacaggcaggatgtagaattttaacaaatctgcttcaggagaaaaaagtcatctagagagattgtaccttattccctattgtaactttgaaggaatttactctttttagctaagagaatcatttgaaatcatgagccaaggccaattatatttccaagatgctaaaacaatatgtaaacaacttatttgaatgaagacactacaatgattgcagagtacattgcaaagctactttcttgaattttgagaaaagtttttagrgaagaataatggcacaattttaaaacttcaagtttgaagtttttatgaaatagacaatgcattacaaaaagagtcaggactttaaattccaaagtagttcagttattaacttaaaataataataaatgatagaaacagtaatttgaggtcaaaactgtaatctttggctttaacctcactaaataaaattcaatgtttaatc

SEQ ID NO: 223414 - DNA, 441 bp, Homo sapiens
ggtcctacaaattttgtagctggtcttgcctggagaggttaaacccctttactcaaattaaggtctatgtcacgccaaagcacaaggccagaataaaacacctgctttgctcctctccacctacaccaccaaacagacgttcttggactatttatttagcagagaggctgacagttggcaggggaggagggaggaagaagaaagatctctaatagtagtgctcagcttttcctcttttgccttcaaactgatgtatctctcataaaaaccaaagcactatggtgcataggttccattttctgagaaagttggtaatwtttatcagctactttactaacaattcatctcccacaacaacacattaaaaaattcttctcaaccttttatagtatttttccagagagaaattccaaggaaaacaaaaacaaaccaaaaaaccct

SEQ ID NO: 223415 - DNA, 611 bp, Homo sapiens
ctttactcttcctgctcccagctttgacactggctgtgaaatctgcctcctgtgctcaaaatgacttctccctctcctccttcgggatacgctttctgcatcctgcctcgctgtagctcagatttctattaagtagtcaaacataatataaaattgccaacaaaaagatcattcctggattaatctccccctttacatagggaaagacataaaagagagcataagataagaaaaggaaatgaaattaatcttatactttctatggctgcctgttaatttcaagctttcctgcatccaggtgcctgtgttcctgctcggtttctggattgcttggtacttaaatgaaacatcttattaatcatttcccgggaatgctgtgcaggcaaaaggaaaacaaaggcattcaggagccacagtaagtttatttttatagtaatgcataccttatcatcaagcatggccaagacatcaaaatgytaagccacatttgtatacgatctcacactgctattgataaatcacgttaacagtaagctgctggatcaattctgccctgacaccaacctctccacgaaatagagattcgagaataaatgtgaaggtaaccaggg

SEQ ID NO: 223416 - DNA, 552 bp, Homo sapiens
gtctttctataggtgggagaaagaccaatgttaaaaggtgtctttgagatggtttagccccctcttccacatgagtgtgcaytgcagacacatctggattcccaaggtccagaacaagaagctcggaaacgtgcttagatttccaagtgttcagttctcaataccatgccattctctttggagtttatgatgccttccagggagagcagagcccacgtgagctttccaacagtaagactactgctgtaataaatcatattgcccatttgtggcgcacttactctatgctgaggttgtataagggcttacatgagccctatctcatttaaattgttttcaccaaagggtgtgtgtcccactgctgacctgttgagctaaccatcccctctcagtacttgaaaacctgcacctgcccaagccatggcctggcttcaatggggcttcctcctgcactgaatgagatgacaagaaaacaatgaaacacttgtccccaaaagtgacttattggattcgttggcagaatgttagaaagtgggtatgaagcccaagaaa

SEQ ID NO: 223417 - DNA, 457 bp, Homo sapiens
tcctccctgggtcgccagcttcctgaccctcgaacaacagaaacattactcctccctgggtcagcagctccatgatcctcaaactagaatgagacctctcctccctgcgtcgccagcttctggacccttgaactatgaaaayattgctcctccctgggtcgggagctccatgaccctcaaactagaacaagacctctcctccctaggtctgcagcttccagtccctcaaataacaacattgctcctccctggatctgcagctccacgaccctcagactagaacacgatctgtcctccctgggtcaccagcttccgaaccttcgaactaaaacaacattgctcctccctgggtctgcagctccacgaccctcaaactagaaaaagacctctcctcactgtgtcgccagcttctggaccctcgaactacaaaaacattgctcctgcctgggtctgcagc

SEQ ID NO: 223418 - DNA, 566 bp, Homo sapiens
tttttccacagtggagggtggattccacaaagatggagatgttgttgtttcagatttatattccctggaatccaacactacctccagcctacagtagatgtttaagaaatgtttattgtgagacccaaacatttaccaagagctgaaggacagtgcaaaggagagtaacagagagatgcacaaaccagaacaaagtagaagagatgcgtggagaggcagagacagacgtggcagagagccatggtcatcacaacccctccgagtccttatccataaagtgaggatcatgatctggctctctgcggtctaacagaccagcctgcgagttcttctctgtcgagtctgcagtggtcagagacagctctgagccaagggctggtgttcttggtgggagagtgatgagagacatctcraacgagacctggtgagctcagcgttccaatttggattcttcaggaaacatctgattacttggcacagggagaggcactgcccagcccaaaccgatgattttccttttgaacaaagggataagtcactgtgatcccctgttaactgcctagcag

SEQ ID NO: 223419 - DNA, 566 bp, Homo sapiens
tttttccacagtggagggtggattccacaaagatggagatgttgttgtttcagatttatattccctggaatccaacactacctccagcctacagtagatgtttaagaaatgtttattgtgagacccaaacatttaccaagagctgaaggacagtgcaaaggagagtaacagagagatgcacaaaccagaacaaagtagaagagatgcgtggagaggcagagacagacgtggcagagagccatggtcatcacaacccctccgagtccttatccataaagtgaggatcatgatctggctctctgcggtctaacagaccagcctgcgagttcttctctgtcgagtctgcagtggtcagagacagctctgagccaagggctggtgttcttggtgggagagtgatgagagacatctcaaacgagacctggtgagctcagcgttcyaatttggattcttcaggaaacatctgattacttggcacagggagaggcactgcccagcccaaaccgatgattttccttttgaacaaagggataagtcactgtgatcccctgttaactgcctagcag

SEQ ID NO: 223420 - DNA, 617 bp, Homo sapiens
tgtggagtggtaggaatgggggtggggtagtgacacaagatgagactggagagatggcaggagtgacattgtacaaagaaagatgtggctctttgtaagagctatgtcataggaaggaggaaagcatttgccagtttcctaatagagcaaaacatcaagctttcttctatgcccaagtgtacccaagacccctaaaaggtttgcctggagaggaggcacagtgactctacgtcatccaagatcccctagaaatgcatactcaacttgatcacttaaatattcaaataacatttcccaattatcttctcttttgagacagagtcttgctctgtcgcctaggctggagtgcagtggtgtgatctcggctcattgcaactgctgcttcctgggtycaaatgattctcctgcttcagcctcccgagtagctgggattacaggcgcccaccatcatgcccagctaatttttgtatttttagtagagatggggtttcaccatgttggccaggctagtctcgaactcctaacctcaagtgatccacccacctcgacctcccaaagtgctgggattacaggcgtgagccaccacgcccagccaaataaacagaatttcaagccac

SEQ ID NO: 223421 - DNA, 616 bp, Homo sapiens
ctgggctcgagtgattcttccatccagcctcctgagtagctgtgactacaggtgcctgctgccatgcacagctcattttttatttttagagaagggggactcgctatgttgcccaggctagtctcgaactcctggcctcaggtgatcttcctgccttggcctcccataatgcgggcattacaaatgtgagcaactgtgcctggcctactaagagcttaatatcaataataatggcaaacttaatgagggcttaataggtrtattatcccatttaatcctcataacaagcctatgatatagttactatttgctatgacttgaatgtcccctcagaaatgcaagttgaaatttaactgccattgtaacaattacacggcaacagtggcaggagtgggttagttattgagagtgagtttctgatttaaaaagatgcgtttgacccaatttcctttctctgtctcatgcattagctggccaggtgatgccttgcaccataggttgaccctcaccagatgtcagcaccatgctctcggatttcccagcctccagaaaccttgtttctttataaataccagtctgtggtatgctattatagcagagaaaatagactgaaaca

SEQ ID NO: 223422 - DNA, 398 bp, Homo sapiens
ctctggtttcaagcttcaggtaaaaattttatgtttgttgtttgttatgtggattgtgatgctgcctccggaaaagcgagctgtgcatcccgctgaaaagctgggtggcctgagctgagatgtggggtccagggcccttgcctgtgtcccgcagagtgcatcctagagtgttcctcctgcccacagcccgttctyccccagatcagaacaggaggcaggaccccagcctactgggatgctatgtgactgtgtgaactcctgccttcgtgggccataaatgggatctcatccaagttcccagaacagtgacaacgttgtaaacttcaagtgccatgaaactcactcgagaactgctgtgggttgaattgtgtcttcccaaagacatgttgaactcctaa

SEQ ID NO: 223423 - DNA, 468 bp, Homo sapiens
gagggaactttaaaaatgcccactcagtcagagacagaaaggctttctctttctctgcctgtgctggtgggttcactgttctcctgagttatcttcaagagtcttgtctgtatattggagtttcagttccatctcctagctcctctgggtaactgagataaatccctgccacaccctctcaaccaacttcatgctgccacaatgtgggctcacatcatcttcacttttttttttttttttgagtcagagtcttgccttgttgcccaggctggtgtgcagtggtgcgatcatggcttactgcagccttgacctcctgggctcaagtgatcctcccacctcagcctcccaagtagctgtgccagcyaattttttgtttttttgtattttttgtagagactggggtgggcgggcggggggtcgggggggtctcaccgtgttgcccaggctggtctctaatttctgagatct

SEQ ID NO: 223424 - DNA, 468 bp, Homo sapiens
gagggaactttaaaaatgcccactcagtcagagacagaaaggctttctctttctctgcctgtgctggtgggttcactgttctcctgagttatcttcaagagtcttgtctgtatattggagtttcagttccatctcctagctcctctgggtaactgagataaatccctgccacaccctctcaaccaacttcatgctgccacaatgtgggctcacatcatcttcacttttttttttttttttgagtcagagtcttgccttgttgcccaggctggtgtgcagtggtgcgatcatggcttactgcagccttgacctcctgggctcaagtgatcctcccacctcagcctcccaagtagctgtgccagccaattttttgtttttttgtattttttgtagagactggggtgggcrggcggggggtcgggggggtctcaccgtgttgcccaggctggtctctaatttctgagatct

SEQ ID NO: 223425 - DNA, 483 bp, Homo sapiens
aaacttagactttagattttaccccagagatcccaaactttcctttcagcatgtacatatgactttggcttgtcatccctgggagaagttgaggatctccaatgtgttttacttaaaagggagaggagccaaaattgatgatcacaaggggaccctgaggcaaaaacagtgctgttcaccaaatattctacctgcttcatagaatttcttagcctcctaacaattaagtgggacagtgtgactgaatactactgctgcacattcagaagtaatatgtgtcactttagggctgaagtagttaacagaccatttgctattctaccctgtctttccttgctcctgcctttgagaaagccaagtgtcccaaggggtatagccacaagatggaaggacaacgtcaccatgggttttgaatgaccaygcagagcaaagttcctcatctgatgggcattagacaagtagcacagatagaaaattaacgtg

SEQ ID NO: 223426 - DNA, 395 bp, Homo sapiens
gaattctattattccctgagcaagactttctttcctctgtgggagtacccctctgaacatgtgttaaaagtttatgagctaatatgatttgctaaacaaacattcatttttataggcagcttccaaggaagacctctcaattgtctagtttgtcctgtggtatatttggcaggttctgtccttggcagcagactgggtaccacatggttggtgagcatgcagcactgaagatgtgtgcgtgtgtgtgtgtgcgtgtgtgtgtgtgtgtgtgtgtgtgtgtgtgtgagagagactakattcagcctgggacccatatcattgagttcccaaatattgacgtaagcagcttctgggaaagggtcttttctgttttccttttcgttttttgttttagg

SEQ ID NO: 223427 - DNA, 440 bp, Homo sapiens
tttctttctattactaatttattatgggcatggtggctcastcctgtaatcccagcactttgggagaccgaggcgagaggatcacttgaggtcaggagattgagatcagcctggccaatatggtgaaaccccatctctactagaaatacaaaaattagctgggcgtggtggcgggtgcctgtaatcccagctacttgggaggctgaagcagagaatcgtttgaacccaggaggcagaggttgccgtgagctgagatcgtaccactgtgctccagtctgggtgacagagtgagaccctgtctcaaaaaagaagaagaaaaaaaagaaactttctcaacctgataaaaggggtctatgagaaacctatggtgaacatcatacttatgaaagaatgagtgctttactgcaaaactcagggagatgacagacatgtatactttt

SEQ ID NO: 223428 - DNA, 428 bp, Homo sapiens
ttttgctgtgcagaagctttttagtttaatatggtcccatttaattatttttatttttgtcacatttgctatggggtcttaatcactaactttttgcctagggcaatgtccagaagagtttttcttaggttttcttctaggatttttatggtttcagctcttacatttaagcatttaatccatcttgatttgatttttgtatatgatgagagatagggatctagtttcattcttctacacagggctagccagttttcacagcaccatttattgaatagggtgtcctttcctcaatttatgtttttgtatgatttgttgaagaccagtttgttgcaagtatttggctttattcctgagttctgtattctgtttcattggtctrcgtatctacttttaaacaagtatcatgctgttttggttactatagc

SEQ ID NO: 223429 - DNA, 477 bp, Homo sapiens
atatttcacatcatttgcagaaggaataaatttaaatatacaatttcccagtgagtcaaatgtattgttgctatctctgtatcataattgggatgcctgaatttattagaaaatatataaaataagttatatttaagccaaattaactttatttgttataattccagaaaaaattccctattttcaaacccaaagaatctttggaaaaactgttaatgactttttttaaaggtgaatattcttaaraaacaactaaagtttaatgaacatatttgaatgtaaattatttgtgaaaattactaaatattaaagaaaaattttataattttcaagtaataatataattatgggtcagaaatattttaataaataaaatcttctgcaatcctaggaaaaaagaaaaagattataactaaaagctataattagttggtttaattgtctaatcactaccatttttctggcttcttctctact

SEQ ID NO: 223430 - DNA, 550 bp, Homo sapiens
ccctagatctattaaaacagaatctccaaggtggggccctggagtctgcattttaacaacctctcggtgtgaatgtgacgcatacatagggaagcaaaaagatgctacagaatataaacacagatggcccaggactgacagggccccatgtgtcagtgagtacaaagaatgctgaaaaaccacctgctgcacaaggggcctccctcaccagcctgctctgatgcctgagattctttagttagacattctgtcttcagtatgttcttgtaccagtgtgatgctgaaggattgaagagagaaatcttgccttcatcaaactcacccttcaatctacttttccagagctgtctaatcagcacaaaatcttctaaaacacaggctattcacacttctatgacttcaccatcctcacgtgatggcacrgtttggtgtccctgccccaatctcatgtcaaattgtaatgcccaatgttggaggcggggcctggttggaggtgattggctcatgggggtggtttctcatgagtgggttagcaccattccccttgtgc

SEQ ID NO: 223431 - DNA, 461 bp, Homo sapiens
tacctttcactccattttgctgtgttaagattctcagaacagatagtcaacaataacaacaaattatacttctttcyggactcctaacagtaacaagagaaaagtactgatagttctatccaattccatggctacagacattaagcaaactggtaaatgacccttgtattattggatcagataattaacatgaccaatacttttatagactttactttcccactctagcaaagaaaagaattaaaaatacttcagtccctttgcctttttttccctctgaataacaataattcaatccaacttctagggactgaaaattcactttcaccctaagtaactgttcagctacctttcaccaatgattactgtaatctgcaactcaaaaaaaaattttaaaccaaacttcttccatatttgtgtttacgtattcggcttaagttacactcttttgcatttataaa

SEQ ID NO: 223432 - DNA, 634 bp, Homo sapiens
tgaaaactgtgtccctctaatcccaaatctctagtctctcagtctctttgcccagaggcggacattatgaaagttgttcaatagaaaaaaatagaaataaatataatagaaaaagaaatgaagagagaagactaaagatggctgcagattatttgctaaccctccatgcacaagtggagtmtatttcctcatctcttgaatctgggctggccctgaaactgctttaaccaacagaatatggcagaagcacaacagtccctttctgggctgaggactttagggggacaagctgcttcctcttcttggaaatcagatgccatgtaagacagactgacgtgctgtggaaataatacccatcatgctacacaccaagtaagtgtttaggaatggctggattatccacacccttgtcaataaagtgttttatgcactctaatttggttaatatatttttaactctgactagcttaaaaggatctttttgctgctttgacagttttgtatatgagtgtgtgtgtttttctctctgactgtaaacttgttttacctttcatatggttaatccttttattgaattataatgcttttacacaataaaaaaaaataattcattttatgctatgaatatttatat

SEQ ID NO: 223433 - DNA, 498 bp, Homo sapiens
aatgtatgtatgtgtatgtgtgctacataaatgccagatcaattatatgaatgcatgaattcaatatacatatctatatatctatatatctagatatatatatatatctatatatctagatatatatatatatctagatatatagatatggagacaggatctcaatattgagacaaggtctcgttctgtcktgcaggctggagttcagtggcacaatctcatctcactgcaacctctgctgcctgggttcaggctattctcgtgcctcagcctctgagtagctgggattacaggtgtgcaccaccacacctggctaatttttgcatttttagtagagatggggtttcaccatgttgtccaggctggtctaaaactcctgatctcaggtgatccgctcgccttggcctcctgaagtattgggattacaggcatgagccattgcacactgcccaatgtcatgtatttttatgtaaaacttcattaatcttccaaagtcaa

SEQ ID NO: 223434 - DNA, 566 bp, Homo sapiens
aagaaagtgataccaaaaaacaacaaaaaaaattctatgtgaagtagtcatctcaaacagaaaaaattaaacatgaggatgatttatcttagaaaagtcctaaatcataatgttaagtgcaaacaataaaaattasatcaatttccaatcacgaaaaccaatcacagtcctttttattttttttgaattatggaagcctgctgggacagtgaaaccatttcattctttaaatgctcagggaaaaaatggagagttggcttcctcatttcaaaatgaaggggttttaaaaatatatttattagtctaatcatctctggctcagtcttctttcacccactattaaaatcacatgtctcttttatattctaagatgtttaattagtaggtaaagaaaaatgagagggaataaagagcagttattgatcacttaacaaagttctgaggctttctttctatatcaaaaagtattttaagtccttaatcttttaaatctttaatatgaatggtttatgaaacgatgttctgaaatgtttaagtatttttgttgactacatccttattactaa

SEQ ID NO: 223435 - DNA, 552 bp, Homo sapiens
tgcccttttgccccagaggtatacaccctcagcttgatctagaatcatgcaccttccagaaaagcctgggcaggaaattagacgtgaattagaagtggttcattgcatcatacaaactgtaccaagtaatattctatagaagtgaggggagataggaagaatgttggtatcaatgcatgctaggggtacttcaatggttaataatatttggaaacaagctatggggaaagaaagtattgtactcrtggcatataggaacataaataaagacctgtgtgttagaaagccacaccacgaagatctaaggatgaaggggatatgttacaaaaatagcttccattcttcatctcctccccataaccatgcctttcgccaagtaattcttcagttcttcctattctgactctacacttgcccatgacagttgctttggccaaacgtgtgaggaataagctcaggccaacccactggccccaggaggaggaagagagatgagggcaacaggcccagaccactcagtcaagaccagtttacatcaaccaatattcagtc

SEQ ID NO: 223436 - DNA, 482 bp, Homo sapiens
caggaagaaaaattctttgagctaaaaaaggatttgcaaccacaggtttaaaaattcactacattttaagtaaaacaaagaaaaattttattatacctaagtacattctggccaaaaaaaaaaaaaaaagtgatgacaaagaggtaaaacaagaatttctacaggcatgtaggcagagttaggggttgaaagaatgcaactgcaaacaaataactattaaagkccttttggacttccctataaacacctaagacaatacccagagtcctctgggaaagttgtgatccaccaacttttcacatggccaagttgtctttcgcttatgaaatcaacagagaactttgaaaaggcatcacgatgtgcccttttataataataaaattgtctgtgaaacccataacaccaaaaactccccaaagaagtaattgaggcttaaaagggtctaagtgtctacccaggatggtggtgaaaagcactgagtt

SEQ ID NO: 223437 - DNA, 636 bp, Homo sapiens
taaaggacatctaccataaccacattagcttgcattttcacagaaaaagatttgatggagatcacaatctgtgaatgagggtatggctggaaagactgtctagtgctcaatagttgacaaacactatcaagtaatttgtagccacgccagctatctgtgtgatcgagtgctattgcggctttactatcacgaggagaaaattatcctaaggaaggtaaacgaaataacaaaacactgctagttttctgttgtcattttcccccttccattccctgatttattaatctttacattccttgtaactttctattaatgtttcttgactgtttttctactggcaaatatttcacctgttacaattaaaacacggtggcagtccaacacatgttgagtggttaaacaccacagtcttctccacatccacgtgaagtttctatttaaaatgttagtttgaattcctttattctcagttacttgggctgccctgttttcttctagatctcaaaacaatttcagatagcaaasattttctggccgaagagaaaagatgtaatttttaaaagttcaatcattcttaattattattgtaaatgtaaacatacccatataaataaaccacatatgtggatataacgt

SEQ ID NO: 223438 - DNA, 589 bp, Homo sapiens
gttgtgaagacatctaaatgcagaatctttctagacttttatgactttccttttttatttaacttgtctacaatgaattggcaagaattatttttagtaacaagtttttaccgaattgctgtaaagcattcaacttaatttgcataacaacaatgctctttctttctgtacttgtttttcatcattttatgtcctacttaattatattattgaattacaaaccaagtacaactagctttaccaaatgtggaggataccaaaaaacaactcattcttagtaaggaggtgctagctgaactggcaagactgaaatgtacaaggaccaactagggtgagactcagtattgttaggtagaaattggtacaccaaaaatatctgtcagtgggttttgcagaaaaaaaatgaatctggcaagaaaattgtgtggtgctctgttaggagagccaccaccacaaaaatagtatgtatctagttagtgtcgcttttattcacttttacattcctagattgcctccaacccagtcttctgtataatttctatgaaaacattcttggraaaatcattagtttattattcaaaggcttcag

SEQ ID NO: 223439 - DNA, 589 bp, Homo sapiens
aattattctgccttaattaacagggggaagataaaaatctgatgaagaaattttatttttaaatatctttcattaagggaaaactgtcacaaatttttaagctgctattttcagcttcccttgcttgctctaaagtatccggtataaacaatatactttgtcttcacaccttccttgaagcttgaggaggtggagrtagaaacaaatctacgaggaaagagcaaatatgttcaaatctcttttctttcacagtcttgactcaaagtagccttcacttcaccttggctccaagaagacaacggtccgtgttgcaaatacagccaacactgctgacattaattggctcttcactgagccagagaagaaaaggaagaacagcttgagagtaactttaacttctcataaattcaaaaaaacttttgaggtttccaaactttcaggtaaattataaaagcattcactttattttttcatcagttactttcaggaagaaatacgtatttcctactaaaccaaaagcagctcattgattataatttaaaatggcagattaaaaattaatatttagtaaacagaaaagtccagaaaa

SEQ ID NO: 223440 - DNA, 535 bp, Homo sapiens
aaattttttttgcatatgcttatgaggatatgcttgctagctactggcatgtcttttttgtgaaatttctattgtgttctttgcccatttctagtaggttttcatatttacacatgaaaagagtttgtcttatattaaagatactaatcttttttgttgttgttttgttttttgagatagggtcccactctgtctcccaggctggagtgcagtggtgcgatcacggctcactgcagtttcaatctccyaggctcaagcaatcccctgcctcaagcccccaagtagctgggaccatgggcaggcaccaccatgcccggctaatttttgtattgtttgtagagacagggtttcaccatgttgcccaggctggtctataagtcctgatctcaaacagtcctcccacctcggcctcccaaagtgctgggattacaggtgcgagccaccgagcccagccactaatcgttattcttgaccttgagttagatgaggatttctttttttttttttgagatgcagtttagctcttgtcacccag

SEQ ID NO: 223441 - DNA, 462 bp, Homo sapiens
tgacaaaaacagctccttacatctttggtgcctagactttctcccattattcctttgctaattcatggctctggttatccagccatcctctatccgcgtgcacagtggggctgttgaaagctgtagaaggatgtcttactccataaggtttgctatagctacagatttaagatgttaggcctcatggagggccttagctctgtttggcagtaatgtcacatgtttctggtcaggtccctcacctgttacccaagayggttattccagattttcataattctcccactctccttacccattttatgagttcctagtagaaaaattagaaggagtcacaagtaaactctcatcttcacatctttatagcctcatacaaacatttcttgtttcacacccatcactctcaccttcctctaacttctgaggaagaaagatgtcttttctggtattcaaggttaacct

SEQ ID NO: 223442 - DNA, 465 bp, Homo sapiens
tttaacagctcttgacaaaaacagctccttacatctttggtgcctagactttctcccattattcctttgctaattcatggctctggttatccagccatcctctatccgcgtgcacagtggggctgttgaaagctgtagaaggatgtcttactccataaggtttgctatagctacagatttaagatgttaggcctcatggagggccttagctctgtttggcagtaatgtcacatgtttctggtcaggtccctcacctgttacccaagatggttattccagattttcataattctcccactctccttacccwttttatgagttcctagtagaaaaattagaaggagtcacaagtaaactctcatcttcacatctttatagcctcatacaaacatttcttgtttcacacccatcactctcaccttcctctaacttctgaggaagaaagatgtcttttctggtattcaa

SEQ ID NO: 223443 - DNA, 462 bp, Homo sapiens
tgacaaaaacagctccttacatctttggtgcctagactttctcccattattcctttgctaattcatggctctggttatccagccatcctctatccgcgtgcacagtggggctgttgaaagctgtagaaggatgtcttactccataaggtttgctatagctacagatttaagatgttaggcctcatggagggccttagctctgtttggcagtaatgtcacatgtttctggtcaggtccctcacctgttacccaagatggttattccagattttcataattctcccactctccttacccattttwtgagttcctagtagaaaaattagaaggagtcacaagtaaactctcatcttcacatctttatagcctcatacaaacatttcttgtttcacacccatcactctcaccttcctctaacttctgaggaagaaagatgtcttttctggtattcaaggttaacct

SEQ ID NO: 223444 - DNA, 559 bp, Homo sapiens
caaatagcctgtcctcaagctcactaattcttctgcttgatcaattctgctatcaagagattctgatgcatcctttaacatgtccattgcatttttcaactccagaatttctgcttaattctttttaattatttcaatttttttgttaaaygtatttgctaggattctgacttccttctctatgttattttgaatttctttgagtttcctcaaataagccaatttgaattctgtctgaaagatcacatagctctgtctctccaggattagcccctggtgccctacttagttcatttggtgaggtcatgttttcctggatgatcttgatgcttgcagatgtttgttggtgtctgggcattgaagtgttaggtatttattgtagtctgcgcagtctgggcttgtttgtacctggccttttttgggaagtcttttcaatttgaagggacttaagtgttgtgatctaagtttttggtcactgtagctgtatctgcattaggaggcatgccaagcccagtaacactgtggttcttacaaacttgtagaggtatcgccttggtag

SEQ ID NO: 223445 - DNA, 559 bp, Homo sapiens
caaatagcctgtcctcaagctcactaattcttctgcttgatcaattctgctatcaagagattctgatgcatcctttaacatgtccattgcatttttcaactccagaatttctgcttaattctttttaattatttcaatttttttgttaaacgtatttgctaggattctgacttccttctctatgttattttgaatttctttgagtttcctcaaataagccaatttgaattctgtctgaaagatcacatagctctgtctctccaggattagcccctggtgccctacttagttcatttggtgaggtcatgttttcctggatgatcttgatgcttgcagatgtttgttggtgtctgggcattgaagtgttaggtatttattgtagtctgcgcagtctgggcttgtttgtacctggccttttttgggaagtcttttcaatttgaagggacttaagtgttgtgatctaagtttttggtcactgtagctgtatctgcattaggaggcaygccaagcccagtaacactgtggttcttacaaacttgtagaggtatcgccttggtag

SEQ ID NO: 223446 - DNA, 294 bp, Homo sapiens
ccatccccccggacttcttcttatgtgagataacaaaccatctaattgttccarttatgatgaattagggtttctattacttgcagccaaatgcattccaaatgactcaactgatattttgttccatgttctttgagaagagcagagaaagagtttctgactaccacaacccctttcttagtggctcagtcagctttctaagtagattcttagtttatactctttcccacttctcttactcatgattccactaatcttaaaccccacatgttagagagaggctctgctgaattc

SEQ ID NO: 223447 - DNA, 380 bp, Homo sapiens
tttcttgcacatccacagtgacttgcagtaggaaatatttagtaagaaattgttgaacaaatatttaaagttttctattgttatccagttactcctcctaacttctggcgttgccaaccagattacattagcttgtgatttcttttttttctttttcttttttttttttttgagacagagtcttgctgtgttgccaggctggagtgcagtggtgcaatctcagctccctgcaacctccgactccctggttcaagcgattctcctgcctcagcctccccagtagctgggattacaggcacacacaaccacgcccagctaattttttgtattttttgtgagccaccgtgcccgrccagtttctgatttctaaatgactgcca

SEQ ID NO: 223448 - DNA, 544 bp, Homo sapiens
ggacaagcacaaaatctctggtaaaaaacaaacacaatgtaccatagtaaatgggagcagctttaaaaaaagtacaaaatccattggggaccccgttgccataggaactggcattacagcttgcttccgataattaatggagggttttgctattacagtattmttgaaacttcgctttcccctgtgctacactgcagaatacagtgtcctctccccattcataactatttcatgaccaccagctgctgcgtttcatcactgcagatagcactcggcctaatccaccccttgccaaattcatgtcctgtcagagagcaacttccatttcttcctctttcttctgcagtcttcatttatctgatttgaagttctttacattcccaaacccagaatggtggctttagacatctctttcctgtgcctgtctcattttcctaaaggtctcatgggcctcccccaggggtgttggttctggctcaggccctactgccctctgcacatctgctttgatggagtcctgggaggatactgggcttttgaattc

SEQ ID NO: 223449 - DNA, 524 bp, Homo sapiens
atgaattcatttgcagaggacaagcacaaaatctctggtaaaaaacaaacacaatgtaccatagtaaatgggagcagctttaaaaaaagtacaaaatccattggggaccccgttgccataggaactggcattacagcttgcttccgataattaatggagggttttgctattacagtattcttgaaacttcgctttcccctgtgctacactgcagaatacagtgtcctctccccattcataactatttcatgaccaccagctgctgcgtttcatcactgcagatagcactcggcctaatccaccccttgccaaattcawgtcctgtcagagagcaacttccatttcttcctctttcttctgcagtcttcatttatctgatttgaagttctttacattcccaaacccagaatggtggctttagacatctctttcctgtgcctgtctcattttcctaaaggtctcatgggcctcccccaggggtgttggttctggctcaggccctactgccctctgcacatctgctt

SEQ ID NO: 223450 - DNA, 592 bp, Homo sapiens
gaatgatgctcacatttcagtattgaacaaatagtaattgctctataaacatttatcaaattgatttatggaatcaatcatactactgtatgtagtgtgtggtgcatcaaattaagtattagactacagatgtacctatctttgaggaatttatggtttaacaaagaatttctcaaaagagcttgtaattctatattttctctcttaaccagttccaaatgtactcattgctagaaatgagttagtggctggaaatttaagcacatggtatsttttcacatctcctcacataaatggacaggcccagtaaatcatagaaccgtgatctgaaatgaagttgggagaaactattttcactactataagcaatggcctgaaacccctgcctccttggctgtacctctgtctctcttaacaccaatgagatggtgaagatatttgtgtcatcttttacgtcctggggtttgctccctcttcgagcctcacagtttgctcatcggtaaaatggagtaatgataatacttgtgaagattaaattaggctatgttaagaaacggctagcttctgacttctatcaggcattcgataagca

SEQ ID NO: 223451 - DNA, 592 bp, Homo sapiens
gaatgatgctcacatttcagtattgaacaaatagtaattgctctataaacatttatcaaattgatttatggaatcaatcatactactgtatgtagtgtgtggtgcatcaaattaagtattagactacagatgtacctatctttgaggaatttatggtttaacaaagaatttctcaaaagagcttgtaattctatattttctctcttaaccagttccaaatgtactcattgctagaaatgagttagtggctggaaatttaagcacatggtatcttttcacatctcytcacataaatggacaggcccagtaaatcatagaaccgtgatctgaaatgaagttgggagaaactattttcactactataagcaatggcctgaaacccctgcctccttggctgtacctctgtctctcttaacaccaatgagatggtgaagatatttgtgtcatcttttacgtcctggggtttgctccctcttcgagcctcacagtttgctcatcggtaaaatggagtaatgataatacttgtgaagattaaattaggctatgttaagaaacggctagcttctgacttctatcaggcattcgataagca

SEQ ID NO: 223452 - DNA, 592 bp, Homo sapiens
gaatgatgctcacatttcagtattgaacaaatagtaattgctctataaacatttatcaaattgatttatggaatcaatcatactactgtatgtagtgtgtggtgcatcaaattaagtattagactacagatgtacctatctttgaggaatttatggtttaacaaagaatttctcaaaagagcttgtaattctatattttctctcttaaccagttccaaatgtactcattgctagaaatgagttagtggctggaaatttaagcacatggtatcttttcacatctcctcacataaatggacaggcccagtaaatcatagaaccgtgatctgaaatgaagttgggagaaactattttcastactataagcaatggcctgaaacccctgcctccttggctgtacctctgtctctcttaacaccaatgagatggtgaagatatttgtgtcatcttttacgtcctggggtttgctccctcttcgagcctcacagtttgctcatcggtaaaatggagtaatgataatacttgtgaagattaaattaggctatgttaagaaacggctagcttctgacttctatcaggcattcgataagca

SEQ ID NO: 223453 - DNA, 471 bp, Homo sapiens
tcagccttttgctcatctcactattaatgccaccgacatcccatctggtaagctctatctgcatccagcctgaaaaatattttaagagtcatttatcagcccatttcaatactgaaacctatttttagtctgtcactgaatttttgagagcccttacttcaaagccaaaggaaagaccattcatcctcaggtgatgattcacatcctggaaactgtgattctcaaaaatgtcagaatggacatcatcaccctattcattttcagatcatcagaatggatgcttattttaaatgactgccagctgaaagcctgtaacctggaaggacaatcctttgttatgctcatctgtactttcccaagctaaagttgacacagccctgctgctgacctcrgaggtgaatgaattcatcaggtagtcacatactcagctatctcctgcagaggtccagggaggacactttagacccccgt

SEQ ID NO: 223454 - DNA, 627 bp, Homo sapiens
gacatatatttagtgttaatttctcaataaacttcatttctatgtttactgatatttttgcattatcctcaaacttgctaaacacattaaaccgcctaagcatcccttgcttcacttttagaaaaattagtaacttttaaatataactgagaagctggatctttttctatgctgtgatgaggaatgatttttctgttttatatcacatgttcgggcagtacaaattttcaagcaagctctgctttctcaaaggtgcattactgaaactttggcctctagttttaaatttcctgcagatatcacagtccattccacagagatagcattaatctcctgtactgagacaagatgttcccattattcaccaagataactagttctyagattttgctgacaagaatcttttttcaaatgtgcagaccaaagaggttggcaagaacccacttaagagaagaaggcagcagagttgaagatcagccttcctgatgttcagaacacaagttattttaatctctatcctgacagttgtgaaaataactccaaggtaataccatccagtattaagcaagagatgagtatggtttttctacatgaatagaattgtattttgtctatatgacatataaa

SEQ ID NO: 223455 - DNA, 426 bp, Homo sapiens
aatcagttggataaatggtgagctaagatgagctaacatcagtgggaacaccaactacttcttaacccagcatgctctgtagttctatggtaggagtcattagcattatggaatagaaatacgattacaagttcatattaacttgttacatgaagttcaccrtctcagagagagtgtactgtgaacttgttgataaaaactgaggtcatcaaaaaatgacagtatgtgtgcactcacatgtatacacttctgtgtgagagtttgtgcaggtgtgttagcatgtgtgggtaaatgtgcttgtaactttagaggaaggaaataatagtggtatagacatgatgagaaaaggtaagcttgcctcagagaaaccccattttcaggctctttggcaatgttgataaaatgtgacagtttatacaaggtcat

SEQ ID NO: 223456 - DNA, 418 bp, Homo sapiens
atgactgtaatcccagtactttgggaggccaaagtggaatgactgcttgagcccaaggagttcaacaccagcatgggcaacataaaaaccctgtctctacaaaaaatttaaaaaattagccaggcattgtggtccatgcctgtagtcccagctactaaggggytgaggcaggaggattgcttgagcccaggagtttgaggctgcagtgagctaggatcataccactgtactccatcctgggtgacagagtgagaccccatcacacacacacacacaagtgaaaatttctagaatgaactgcaaggctctacatgatctgtaggttgccatcccttggccccatgccttttgatgctgtaacctcatcttctactactctttctctcacccccctctatacatatgtcttcttgaacac

SEQ ID NO: 223457 - DNA, 418 bp, Homo sapiens
atgactgtaatcccagtactttgggaggccaaagtggaatgactgcttgagcccaaggagttcaacaccagcatgggcaacataaaaaccctgtctctacaaaaaatttaaaaaattagccaggcattgtggtccatgcctgtagtcccagctactaaggggctgaggcaggaggattgcttgagcccaggagtttgaggctgcagtgagctaggatcataccactgtactccatcctgggtgacagagtgagaccccatcacacacacacacacaagtgaaaatttytagaatgaactgcaaggctctacatgatctgtaggttgccatcccttggccccatgccttttgatgctgtaacctcatcttctactactctttctctcacccccctctatacatatgtcttcttgaacac

SEQ ID NO: 223458 - DNA, 491 bp, Homo sapiens
tcatgtgtcaggcaagcaccttcccatttgcatggatttcggttgacttaaaagagacaagaaacaaactaggggccagcacaacacaaaagccaactcaggatgtctgttactgtgtgtgtgacaacgtgagacctggcctggttttgcaaaaatttaaatataggttgatgtggtcactgcctasagaacagcatgatgagaagtgggtcatagagtgtgcacccccagggtttatccttctgcctgtatgcctctgggtgaggagaatacgagccaaaaagcccctgaagggaaatggatgtggagaagtcctgcccttctccccaaaacagtatcttggagtggagtaagtgctaggagaagagaaatgtaatcattgtatggaggagatcataaagcaatggtcaatgaaaaggaggaaaactcaggaaaacagaaaaaggaggtgaacaatcaattaataattatttttattaatttagtaataa

SEQ ID NO: 223459 - DNA, 491 bp, Homo sapiens
tcatgtgtcaggcaagcaccttcccatttgcatggatttcggttgacttaaaagagacaagaaacaaactaggggccagcacaacacaaaagccaactcaggatgtctgttactgtgtgtgtgacaacgtgagacctggcctggttttgcaaaaatttaaatataggttgatgtggtcactgcctagagaacagcatgatgagaagtgggtcatagagtgtgcacccccagggtttatccttctgcctgtatgcctctgggtgaggagaatacgagccaaaaagccccygaagggaaatggatgtggagaagtcctgcccttctccccaaaacagtatcttggagtggagtaagtgctaggagaagagaaatgtaatcattgtatggaggagatcataaagcaatggtcaatgaaaaggaggaaaactcaggaaaacagaaaaaggaggtgaacaatcaattaataattatttttattaatttagtaataa

SEQ ID NO: 223460 - DNA, 491 bp, Homo sapiens
tcatgtgtcaggcaagcaccttcccatttgcatggatttcggttgacttaaaagagacaagaaacaaactaggggccagcacaacacaaaagccaactcaggatgtctgttactgtgtgtgtgacaacgtgagacctggcctggttttgcaaaaatttaaatataggttgatgtggtcactgcctagagaacagcatgatgagaagtgggtcatagagtgtgcacccccagggtttatccttctgcctgtatgcctctgggtgaggagaatacgagccaaaaagcccctraagggaaatggatgtggagaagtcctgcccttctccccaaaacagtatcttggagtggagtaagtgctaggagaagagaaatgtaatcattgtatggaggagatcataaagcaatggtcaatgaaaaggaggaaaactcaggaaaacagaaaaaggaggtgaacaatcaattaataattatttttattaatttagtaataa

SEQ ID NO: 223461 - DNA, 530 bp, Homo sapiens
ggaattccaagagcaccagctctatcttgttttgcagcgcaagctttactctacttgagaatgacagagggcactgggagctccaacctcttcataaatttgtatcatttgttacaaagaagaaataagagggcaaaaataaatgaatgcaaatctaacatcactattggaaatataactcaggacacacactttgtgtcaggaatgctatggtcaagtatgaagagagagttgttattcctggtccaggaagagagcgagctcccattctagctcctttagagaataatgcaggctttatctctggtgaatatcatactagtggctagaaaaccctatccgtcattaagatgcaagagttctttacattttgcacactgggccagaaggagaactactctagatgcatcgttaaaaatctctgtgtcccttttctcctctagataagtttatatatcatatttcaggtgcagtttcatggactggttcctacttctrtctttctttaacaggacatactgattttatca

SEQ ID NO: 223462 - DNA, 608 bp, Homo sapiens
tccttctccctctcttgatcttttcatttaagaattgtattagttcattctcacrttgctataaagaaatacctgagattgggtaatttataaagaaaagaggtttaattggctcatggttccacaggcagctatacaggaagcatgatgctggcattggcttggcttctggggagacttcaggagacttacaatcatggcagaaggagaagggggagcaggcatctcacatagcgagtgcaggaacaaaaagaagggaggtgctacacacttttaaacaaccagatctcacgagaattcactatcatgagaacagcgccaagagaatggtgctaaactatccatgagaaatccacccccaagatccagtcacctcctgccagatgccacctccaacactggggattacaattcatcatgagatctgggcgaggacacatatccaaagtatatcaacaatacatctgtgtcaactccatagcagtacatagagataatctttatttctttgttcaggaacgtttatttctttgttcaaacaccttagcactccattgcatggatatgccataatttatccaagcagtcctttgctgacatatgtttga

SEQ ID NO: 223463 - DNA, 608 bp, Homo sapiens
tccttctccctctcttgatcttttcatttaagaattgtattagttcattctcacattgctataaagaaatacctgagattgggtaatttataaagaaaagaggtttaattggctcatggttccacaggcagctatacaggaagcatgatgctggcattggcttggcttctggggagacttcaggagacttacaatcatggcagaaggagaagggggagcaggcatctcacatagcgagtgcaggaacaaaaagaagggaggtgctacacacttttaaacaaccagatctcacgagaaytcactatcatgagaacagcgccaagagaatggtgctaaactatccatgagaaatccacccccaagatccagtcacctcctgccagatgccacctccaacactggggattacaattcatcatgagatctgggcgaggacacatatccaaagtatatcaacaatacatctgtgtcaactccatagcagtacatagagataatctttatttctttgttcaggaacgtttatttctttgttcaaacaccttagcactccattgcatggatatgccataatttatccaagcagtcctttgctgacatatgtttga

SEQ ID NO: 223464 - DNA, 494 bp, Homo sapiens
cccttcataggggttatgccgtgtttgcattcccaccagcagtgcatcaagtgcctctttcctcttgctaaaagagaatgctattaaagttttggcattttgcttatctaatagatgagaaatggaatctctgtgtagttttaatacgcatttatcttatgagcaagacggataatcttttcatatgtttaaatgccattcgcattgtgatctacttttctgtgaatcattatgttcatttctatagcccatttttctatagagctgttggattttttccctacttataaaatctctttatatattaggatattaattttttgaatgggatatatttaacaaatattctktcccaatttgtaatttgaccttttactttattgttattattatttgagacagggtcttcctctgtcacccaggctggagtatagtggcatggttacatctcactgcagccttgacttccagagcttaatcaatcctcccacctc

SEQ ID NO: 223465 - DNA, 425 bp, Homo sapiens
ctttccaatttcaactcatcaaaatttccatgcaaacttttaggctttaaagcagtttttaaaagaagctgtttaatttgttaatcctaccattacagtccctatggtttcatctattttatggcaacatttctgacttgtaatatttgacttcttcaaaatattgggacatagcaagatttactacatcatttatttcattatacataacttaatagacatcttcagccttttaaattaaatttagaaaattccttagcagagtaagctcctgtcaggcaaaataagcgccattctccataataaaaggcgtatgtgggacagataacaggcagaaactgtttccacccttgctgttgtacttcttcccatttcctttyttacttgtcagaagtggactgattcacttcagagtctgtttttaa

SEQ ID NO: 223466 - DNA, 588 bp, Homo sapiens
aggagtcagtgtctttttcagacccagaagtcaaaaggcttcattaatagggtgtttattcaagatgttaaaaggctcaaaatacttgatcaaaatagctaatatgtcacaaattaaaacactgttatttggtgtctactggttattgcctgcrgcactttaaaccattgtattaaagtagtgaggttacttcctgcataagtctaactgttagcattctagtgtccaaaagcatcaaaaacagaggtcctatgccaaacttatcaaagcaagacaattaatttttctctccttcattacaaaaatggtaatggtaaatatccgttttggaaatttagtatgaggataaatgatctccttttacttaaataatgtaccacaaaacagggacaaagtaagaacaagtgcacaataatttctttttagctatttaaaagagtgtcacacattgctaagattgattctagatatagtgctgaaaactgattaggtaatttttaccactagaatctttacaccagtacaacacttgaaaacattttgtttttaaatatatatatgaaggtccaacagtgataaaatgtttgg

SEQ ID NO: 223467 - DNA, 588 bp, Homo sapiens
aggagtcagtgtctttttcagacccagaagtcaaaaggcttcattaatagggtgtttattcaagatgttaaaaggctcaaaatacttgatcaaaatagctaatatgtcacaaattaaaacactgttatttggtgtctactggttattgcctgcagcactttaaaccattgtattaaagtagtgaggttacttcctgcataagtctaactgttagcattctagtgtccaaaagcatcaaaaacagaggtcctatgccaaacttatcaaagcaagacaattaatttttctctccttcattacaaaaatggtaatggtaaatatccgttttggaaatttagtatgaggataaatgatctccttttacttaaataatgtaccacaaaacagggacaaagtaagaacaagtgcacaataatttctttttasctatttaaaagagtgtcacacattgctaagattgattctagatatagtgctgaaaactgattaggtaatttttaccactagaatctttacaccagtacaacacttgaaaacattttgtttttaaatatatatatgaaggtccaacagtgataaaatgtttgg

SEQ ID NO: 223468 - DNA, 647 bp, Homo sapiens
tgaggttacttcctgcataagtctaactgttagcattctagtgtccaaaagcatcaaaaacagaggtcctatgccaaacttatcaaagcaagacaattaatttttctctccttcattacaaaaatggtaatggtaaatatccgttttggaaatttagtatgaggataaatgatctccttttacttaaataatgtaccacaaaacagggacaaagtaagaacaagtgcacaataatttctttttagctatttaaaagagtgtcacacattgctaagattgattctagatatagtgctgaaaactgattaggtaatttttaccactagaatctttacaccagtacaacacttgaaaacattttgtttttaaatatatatatgaaggtccaacagtgataaaatgyttgggatcaaagatcactaaaaatctcattttttattattattcaatccagatggattctacttaattataataatggtaaacacaattaaagtaatttgagggaaatccgagtcaatataattttcttaaggacaaggccaattgttgctgaatattaaaactttgtacccgtatcacaatttttctcattacctaaaggaaaagatctgaaaccaatggaagttattgatcaaaatgaatta

SEQ ID NO: 223469 - DNA, 552 bp, Homo sapiens
cgtatctcctttggcaatttattaaatctttttttgcctcaatttttctgtctataagtaactgcctatggtgataaagcaaaaytaaaatagtggatgaatatgttagttcatgtcttccaagagtagatacgaagataggattagatgtgcaagagatttcttagggaaggtagaaaggaaagttgggaagagcctccagactgcaatggatgcctgacactcatggaaggagggagagaaggagggttttcagaccacagtgcagttccaagaaagcttagcctgatcagtggagattcccagagccaaacccacctataggaagtgtcccacctctcactggaaacagtctgtatcagtcctcctgccaagttcattcactgggcaggagcagcctgcaggaagtgtgttcttcacatcaggaggatgacggattgacagaggcagaagcaccctgtagcaaaatatctgaacagtgcattctcatagcctccacaagtagaaagccctttgagttgttaggagatgagacattaagtaaacacacac

SEQ ID NO: 223470 - DNA, 590 bp, Homo sapiens
attacttgtccattcttccctgggtcgcatccctgttttttgttccttcttggagtctcttctcaaaaaaacatctgaaactaagcttttgtcttaggctctgcatttggaggaaacaggttaagacaattgtactgggcatgtccttagaaaatagaccctcatgatgaaatgctggtgctgaatttatatgctggtcagacagcaataggggccccagtgcagctgggtggtggaaggtgatcccctgtgacaggcagtaccagcaaaatcactaagactcccatctgaggtggattgggaagaggtacattgggaaggtcaagctttgagctaggccatagctttggcaaccaacagtaattttgcctttgcttcttctgtttgcctcwtttctattttattttttttcctttcatatgttttgtttatgcttgtttttgatttgtgtttagttggttctttttctagctttttcaaaatggaacatgattttagacctttcttccttgctaataaattcctaaagctataaattttctcctaggtactgttttagttatatttccaaattttaataggtattttca

SEQ ID NO: 223471 - DNA, 586 bp, Homo sapiens
atatattttctgcccttgctgtttgaagtgttatgtaaacatcagtttacatacaggtcatatttccctatcaatcaagctaccaagacgaaccaaatgcttatggaaggtgaataaaatctagaatgtgtaataaaagagggaaatgatgaacattaattatgtccacaagaccagctccacaaggactactacttattctattaacccattaaaaatttttttcttgcagaggctgcagttggccaccactgtgaatggcatttggtagtaaatggattagatagcatggaggaccagaaagaccatgagcagttcagaatggaaactatgttgaatccttcttgtgtgccactctccatccttctctcctgctcttggaagtcacttctcaataaggatcctgcatacatgtatttatctcaggctccattgcctcttttatttttttcyggggtgaagtttcaggaacagaagtgggatgggatggatatagaacagagaccatgtcagtggttcataaacattatttcattcatttccccataatacactatgcgttagatactatgtatttatagacaag

SEQ ID NO: 223472 - DNA, 523 bp, Homo sapiens
actgctttctttgaaccttcttcactcgggctggtagagttgtgagaggagtactcccgtggtcttatggagaggaggaaacgttccttcttcatccacttccttgaggcttgatgtggtagttgctttatyaatctttgttgattgagtcaaaacatggatgaatgaatgggtgaatgtgtaaacctctaatttctttcatttttgtgtgtgttgtggaaacatcttaaaccatttcttaaaaacatcttttattatttttcccaaaatttattgagatataattgacaaaacattgtatatatttaggatgtataacacaacgattttatatatatatatacattgtgaaaagatttccacaaattaattaatacacctgtcaccacactatgttatcattatgtgtgtgtgtgtgtgtgtgtgtgagagagagagagagagagagagagagagagagagatacagacacttaggatctattctttttgcaaatttcaagtaaacaatactgtattgttaa

SEQ ID NO: 223473 - DNA, 523 bp, Homo sapiens
actgctttctttgaaccttcttcactcgggctggtagagttgtgagaggagtactcccgtggtcttatggagaggaggaaacgttccttcttcatccacttccttgaggcttgatgtggtagttgctttattaatctttgttgattgagtcaaaacatggatgaatgaatgggtgaatgtgtaaacctctaatttctttcatttttgtgtgtgttgtggaaacatcttaaaccatttcttaaaaacatcttttattatttttcccaaaatttattgagatataattgacaaaacattgtatatatttaggatgtataacacaacgattttatatatatatatacattgtgaaaagatttccacaaattaattaatacacctgtcaccacactatgttatcattatgtgtgtgtgtgtgtgtgtgtgtgwgagagagagagagagagagagagagagagagagatacagacacttaggatctattctttttgcaaatttcaagtaaacaatactgtattgttaa

SEQ ID NO: 223474 - DNA, 482 bp, Homo sapiens
ctgcctctaaccaagcaaacaaatgaagaaacatctagatgttgttatccaggctcaaagaggttaagaatttgtccaatgacacaccactaagaaatgacagagctggattctgacattataccatgctctccacccccacaagacagttatcagaaatctgtgtaataaaatatatgctaacaaaaaaatgaayataaaaataacttaaattaatttagcatttcaatatttaaagtaacatttataacatatagtttaacatatatttccatttttaatgtgactggatcatatatttttggatgaatcacccaatttatgggaaatctcttggtgtcagtaacacatagaattacatcacacttatgaaagataaaaataatacagtttaagatgtatttttcacgttaaaagtaaagttatgtgtcaaaatgaaatcattcgctaattataagtcaaaaaagtacctgtaactttcc

SEQ ID NO: 223475 - DNA, 482 bp, Homo sapiens
ctgcctctaaccaagcaaacaaatgaagaaacatctagatgttgttatccaggctcaaagaggttaagaatttgtccaatgacacaccactaagaaatgacagagctggattctgacattataccatgctctccacccccacaagacagttatcagaaatctgtgtaataaaatatatgctaacaaaaaaatgaatataaaaataacttaaattaatttagcatttyaatatttaaagtaacatttataacatatagtttaacatatatttccatttttaatgtgactggatcatatatttttggatgaatcacccaatttatgggaaatctcttggtgtcagtaacacatagaattacatcacacttatgaaagataaaaataatacagtttaagatgtatttttcacgttaaaagtaaagttatgtgtcaaaatgaaatcattcgctaattataagtcaaaaaagtacctgtaactttcc

SEQ ID NO: 223476 - DNA, 510 bp, Homo sapiens
caatttgggaggctgaggcacaagaatcgcttaaaccaggaggcagatgttgcagtgagccaagattgcaccactgtactccagcctgggtgacagagcaagacgctgtctcaaaaacaaataaacaaaaaagggtaacagaggaaaaacagagagcagayatataaccacattagtgggtattccttactgtgctaattgactcccagtgttcctgtcccattattgagtattcaaggccctagaaatagacaatcacttatattactgaggagtagctgaggagttttttgaacttcttatccatgctttgtctttaaatccatcaaataaattttctgactttgatttgcctttccaggagcaaggtcacggggctgtgattgcttatgtatatcttccctttgtctgcataaattttagatgcatattagttggttagaatatttcacttaatgtctacttttttgattttacaaaaaaaaaccagaatgcattgctgaaaaatga

SEQ ID NO: 223477 - DNA, 520 bp, Homo sapiens
ctcagaggtggtctgtgtggtacatctgcatagtccatgtagggggtggaggtcagcaggcaggtgaagtgggttgtatctagctctcccatagacaggtggtcaccaggaggtggttgtataaggcagttatctggattaaccacattgaagaactgggaggaggcagagaactggaaactgtcaagggtgactgaggcccgcatctggtaagacaaagtctaacttctatttaaaatgaatatcagaggaacacgaaattataagaatttactacagaaagrctataggaacaatttgtttgagttctttcatgtgacatcaatttatctatggtctttatgtggagaagtcaatttgcctggatatcaaatccttcattcatattttctttttttggctaacttgtaattaatattctattttcttctggcataaactgatgctgaaagtctgatgacaatctggtcttctttgttttataaattactaaaacaccaagaggtgttttgattttatt

SEQ ID NO: 223478 - DNA, 526 bp, Homo sapiens
ttcctgatatcacccacatgctgaggcctccttctcagatgcaaagctcctttattcacaggttccttggaagaatgtttcccaaaataggctgcatgttaaaatcaccagaaggtcttgcaaaaatactgatgggtaactccaagatattctgatttaatttctatggggtgccacttgggcatcaagatttgtaaaagttccttagatgattctagtgttcagcaatatttaaaataaagaggctcccaatgtcttccaaccagagatgaaaggaataaggaaagattgaaagtaggagatgtcaacaaatagtaactatttgaagcaacagaatttctataacatttactgttcaattcaaagtaagtgcaactaaatcttccacagataataaagaagctacctaagacaatatatgggaractctaacaaaatgcagttgctcaaataatatacaatttatattttaaaaatttatataatacataacaaggcccattttatgaatttatcactgaaatat

SEQ ID NO: 223479 - DNA, 514 bp, Homo sapiens
ttttaatataagaattatcttgtttgatttcatagtactttatctaaatttttctttcctataaggaaatattttcaaattttkgggttaggaaacacctaaaaagtctcttaaattccatttatttcaagatttcagcacacagtttggcctttattttttccaaaccagcaaatattttgcaaaacaaacttagttgctcagctttcagatagagcctaagactatacacataatgtaagacaggcagtgaataatttatttcacaaaatatcacgcagaaattgtgaaaacagaggaatatggcctgtgactacttagatgcctcaggtaagagataggtctgtatatgaatcattgctcaaccaaaaatctagtaataacccatctcaggtaaagttcatattgcacaagtaaagaaaactttacagaaatatgcagctataataatatactttgctattttgaacgattctaaacatataatttgcaagtgacaccagatcacaatgtt

SEQ ID NO: 223480 - DNA, 638 bp, Homo sapiens
ccaaatactctacaagtagtcagtactaatgattacactaccaagattccagtgatttagtggttcattgctaatctcactcttacactctctacatggcttagttccatcccatgacttgagttactctttcatccaatgacagcaccactcactgcattatgttgccaattacagcagaattttatagctgagataaaagccaaaactttctagtttagatctcaaattttcctagtccacaattgtggttctgagagagtaaaaaaagtttgaaggtggaatgagaatacattttgatgatttcartgtctgaagtgatgaagttttgaagctctgttgtgtctcctactatctgtgacactccggatgtgtttctaaagttctctaaacctcagtgactctatgcgaataaaagaaaatcatggaggggggataaagtatctgacacacgatggatcagcaaatgtgtggctattataatttttaatcgaaagggctatgttcctatgaagtgacagaattgtgataattcaggcttcttgactttttagtacataattctttcattattccatattctctcatatttgtctggaagtagggaatcctgtaataatgtacacttgcaattgcca

SEQ ID NO: 223481 - DNA, 511 bp, Homo sapiens
ttatttatcatttattataaattcctaaatacattatagaagtgatggattgtacattggaagaaagaaagaaggaaagagcacatgataaagaaaattttgagtagcattactgtattcaacaagtttcaagctgattgtttctctggcttgtgaaatttatgcttttagcttataatgttccaaaggaaataaaaccacccactggatgtaagtcaatatcattatctcttccatttttctgttttgccatccaagtttttttttttaattcacaattttacaaaataaaaagagagtctttawggcccaacaatcaggagaccctcaagagtacagaagagctgaagaggaggccaaagggaggtggagaagggaagatataacacattctcaggataaatctgctaggaaatctcacaagtaaggcattcagccaactgccatatgccctgacaaagataccaacagcagcagtgagcccagggagctgttttatcattagcccctc

SEQ ID NO: 223482 - DNA, 365 bp, Homo sapiens
cttaccacattatggttaaactgttgaaagtcaagggcgaagagaaaatcttaaaagcagcaaaagagaayggactcactgtgtacagaagagcagcaatataattaaaagttgcctttttgtcaaaagtgatagagatctgaaggtagtggagtggcaaaattaaacttctttaaaaagaaaaagcaaaaacaaacttgtccaccaagaattcaacaaaactatctttcaaaaagaaaaaataaaggcattatcttgcctgagaaaattgattgctggcagaattgctttgcaagagatgtaaaagagagttctacagcccgaaaaagaatcacgctaaatggtaattcaaatctagaggaaga

SEQ ID NO: 223483 - DNA, 365 bp, Homo sapiens
cttaccacattatggttaaactgttgaaagtcaagggcgaagagaaaatcttaaaagcagcaaaagagaacggactcactgtgtacagaagagcagcaatataattaaaagttgcctttttgtcaaaagtgatagagatctgaaggtagtggagtggcaaaattaaayttctttaaaaagaaaaagcaaaaacaaacttgtccaccaagaattcaacaaaactatctttcaaaaagaaaaaataaaggcattatcttgcctgagaaaattgattgctggcagaattgctttgcaagagatgtaaaagagagttctacagcccgaaaaagaatcacgctaaatggtaattcaaatctagaggaaga

SEQ ID NO: 223484 - DNA, 418 bp, Homo sapiens
gctgtggctgcaaaaggaaactcaattygtgctcagcatgcgagtttaatgcctgaagactgaatccaggatccggttaggaggaaaaggaatggtgtgtgtgatgcagagttggttggcagatgagaatatggtagtgatttggaagagatgtggtaggcatgaaaagttttagttacacaaacatgtgctgagtgcctgtaatagataaagattatcctaggggcaggtagttttttttaaataaaataattgaaaataataatacaatttacaaatacaatccctggattttggccctcaacaaactcacaaccgaggtgcgactggatagtagcaggataataaccctcatatagcacagttccttggcatactcaccgtgcgctaggtaccgctttaaggctttccaaatgtt

SEQ ID NO: 223485 - DNA, 403 bp, Homo sapiens
aggaaactcaattcgtgctcagcatgcragtttaatgcctgaagactgaatccaggatccggttaggaggaaaaggaatggtgtgtgtgatgcagagttggttggcagatgagaatatggtagtgatttggaagagatgtggtaggcatgaaaagttttagttacacaaacatgtgctgagtgcctgtaatagataaagattatcctaggggcaggtagttttttttaaataaaataattgaaaataataatacaatttacaaatacaatccctggattttggccctcaacaaactcacaaccgaggtgcgactggatagtagcaggataataaccctcatatagcacagttccttggcatactcaccgtgcgctaggtaccgctttaaggctttccaaatgt

SEQ ID NO: 223486 - DNA, 561 bp, Homo sapiens
ctggttgtccccttattttggttctgggccatattttttgaatgactataaaaaatacattttagtccatctaagggagaaaacatgttctttctaaaattacttctgaggyagagtgttttttgaagcattagaaaatatttgaatcaagtgagaactgtaagaactttgaaaagtgcttttttaatttgtgcaccatcttaaaaaaatgcaattcctttattggaaacttattgaaaagtaaaatgtgaggttttaaaaaactactgctattaacattggtgacaatttctacatagcaatagtaattcggatataaaactaaattcataccttcagagtctgtaaaacaaactggctaaaatcagttgagaatcaagtccagcatgttccgttttctcaactactatataatagcacgttttcaaggggctttcaatttattttctcttgtgcatggttacatccacagaggtacttggttgaacaggatttgctcttgcatttgcagtcaatatatttctaggccctttcaacggtcgatacacttcctagtagttc

SEQ ID NO: 223487 - DNA, 561 bp, Homo sapiens
ctggttgtccccttattttggttctgggccatattttttgaatgactataaaaaatacattttagtccatctaagggagaaaacatgttctttctaaaattacttctgaggcagagtgttttttgaagcattagaaaatatttgaatcaagtgagaactgtaagaactttgaaaagtgcttttttaatttgtgcaccatcttaaaaaaatgcaattcctttattggaaacttattgaaaagtaaaatgtgaggttttaaaaaactactgctattaacattggtgacaatttctacrtagcaatagtaattcggatataaaactaaattcataccttcagagtctgtaaaacaaactggctaaaatcagttgagaatcaagtccagcatgttccgttttctcaactactatataatagcacgttttcaaggggctttcaatttattttctcttgtgcatggttacatccacagaggtacttggttgaacaggatttgctcttgcatttgcagtcaatatatttctaggccctttcaacggtcgatacacttcctagtagttc

SEQ ID NO: 223488 - DNA, 561 bp, Homo sapiens
ctggttgtccccttattttggttctgggccatattttttgaatgactataaaaaatacattttagtccatctaagggagaaaacatgttctttctaaaattacttctgaggcagagtgttttttgaagcattagaaaatatttgaatcaagtgagaactgtaagaactttgaaaagtgcttttttaatttgtgcaccatcttaaaaaaatgcaattcctttattggaaacttattgaaaagtaaaatgtgaggttttaaaaaactactgctattaacattggtgacaatttctacatagcaatagtaattcggatataaaactaaattcataccttcagagtctgtaaaacaaactggctaaaatcagttgagaatcaagtccagcatgttccgttttctcaactactatataatagcacgttttcaaggggctttcaatttattttctcttgtgcatggttacatccacagaggtacttggttgaacaggwtttgctcttgcatttgcagtcaatatatttctaggccctttcaacggtcgatacacttcctagtagttc

SEQ ID NO: 223489 - DNA, 592 bp, Homo sapiens
gcaagggttaagtaattttccaagtctacatagagagaaaagagtagatagagccaggattcaaaactaatatttacttccaaactagacctctcagccactacctactctaagccttggattttctccaccaggaacaaatcccagtccttatcaacactcccctagagaaaaataagagggcctgaagcccacaggtagagcatcccaggcagcccacactctattcctccttccatccttctttctttctttcttaaacttccacatctgttggaataagaagggaagactgacaatactgttttggtgactaaggtaattattttttcattaaaaatagaacttttgggagactctcttgggcaaccccctttctcagcatgaggcagcttcctctccyttttttttttttttttgtctattaaacttcccgctccaaaacccacccccaataaaataaaataaaataaatgttttattttattaccaactaaatttatatataccacagaaattttggaaaacacaaagaggtacaaacagaaaattttaaattatctgtaaaaccacaactcaaatataccacagt

SEQ ID NO: 223490 - DNA, 534 bp, Homo sapiens
cctccctctcactgactagtttattaatataaatgttgctcccaatttgagaagttcattgaggcataatttagaattaataagctcaggcaatagtatacaattaatgtacttcccaagttaggcaggagtttaatrtcacctcataaaaccaagtctttgtaattatcgaagtgccagctgtgaactgatcaggaacacaataggaattttgttaattatcattacccagaggaaaataattagtttctttgtagggagaataaaaacaaatgttgctattttcattttaatttcaaccactgaagttgataaaactcagaattggtctaccagttttggtcctcctatttctaaatattacaaactcattaatgcattagcagattgcatgttaatcttcatgtccataaattaattggaacactagtcactggataattggtacattgtttttagggggcataaaataaccgccaaaccccaaggtaaaaagggcgactgaaacacctttggagagaatgatataatcta

SEQ ID NO: 223491 - DNA, 492 bp, Homo sapiens
aggcacaatttaagacaaagagtgatgcaggaaaatcagttaggaagctatgttatagaagtccatgcacgatgtgaccagtagagagaaaaaaaatgatttaagaaacaggaaaaaaatgcaagtggacttggcaatgcactaaacaaatataaagaatttatttttaaggttaacactagctaaaattagaactatcacaattgatagataaattgtaattggcaacaatgatttacacaagcacactaatagtccaattctagcattatcaaaggattttaaacctacattgggaaacttttgcytcttgcagcacattgagcagaaaaagccatcaataaactattttaaaatttcatgtatgaaaatatttttcatacgaaatgctatcaaaactttataaaaataaaatttattagaggtgatacatgattttactcacctacgacaggttttcttgtgagtgtaaaaaaattatgccagattttt

SEQ ID NO: 223492 - DNA, 414 bp, Homo sapiens
ttgcttccagccatttaggtctctggttttgaaagaacactttagtattactaattttccagataataggaggcagtgtaggagacaatgttttcatcatacaatgtgtaatattaaactataacaaatgtacttacttaatctttcatttctaacttcagaaaatcagagcagcyttcctattattgtggggtaaatgaggctttatcacaaacataagtcatttggagtccatagctccttgagtgatatgtataactaagaagacctgagaatcacagacctaaatctcatgtccagataattgagaataaaatctaaaaaattgagttgctaaatgtagatttacttccaaaaaccttagtgataaacttctagatttttgaatatgttttgtatatactagaaagcctg

SEQ ID NO: 223493 - DNA, 554 bp, Homo sapiens
tcagccttcaataagtgtttgatgtcttaccagtaaatttcatgatgtataaagcataaagtaaaaaaaaacagtgtatggcaaaatacgtatttatgcattttaaatgttcatctctcagttggctcatctaaaggtagatagaataarcagaaggaagaaatttgaatatgtaattggattagaagataaaggtcagactatcaggagtagtaaaatcaaagttaatggaaagcgttgtcctaccaacctgtagggaggaaaagaaaaagtacttatgtctcagaagcattcattcaactccagaggaccaagtccaccagtaagagtcaccttttcaaaggattacattcatacattcagtttttttcttacatttcaaattgttgacaaataaaacccaagataatgttgcacctttgagccctcgggtaatctcttttttaatgttagtattttacttctatgaagagagtcacaaatatctgataaacacattctaaagaagaccataaatatagatagcactggggtctctttacaatttcttaatg

SEQ ID NO: 223494 - DNA, 554 bp, Homo sapiens
tcagccttcaataagtgtttgatgtcttaccagtaaatttcatgatgtataaagcataaagtaaaaaaaaacagtgtatggcaaaatacgtatttatgcattttaaatgttcatctctcagttggctcatctaaaggtagatagaataaacagaaggaagaaatttgaatatgtaattggattagaagataaaggtcagactatcaggagtagtaaaatcaaagttaatggaaagcgttgtcctaccaacctgtagggaggaaaagaaaaagtacttatgtctcagaagcattcattcaactccagaggaccaagtccaccagtaagagtcaccttttcaaaggattacattcatacattcagtttttttcttacatttcaaattgttgacaaataaaacccaagataatgttgcacctttgagccctcgggtaatctctttttwaatgttagtattttacttctatgaagagagtcacaaatatctgataaacacattctaaagaagaccataaatatagatagcactggggtctctttacaatttcttaatg

SEQ ID NO: 223495 - DNA, 547 bp, Homo sapiens
caataagatgtatcttatataaaatgctgggagttaaatatggattaagtccaattaagacctcttaaaaaaccaccaacacttttgagtgaccacgactataagaagtctttytttttctggtacatattaaaaaacaaaaacaaacaaaaaaaaggaacattcacacaaacaggttaatgaaacccagaagaaacaggatgaaagaatgaccagcagagatgaaagctaacagcagcataaaaaagaaaaccctctaaaaggtcagagagtgaagtgagaaaaggaaaaaaaaacagtgttagttcaagacaggccagctggaagcaaatgtttttggatttttatactacagacttacaaaacagtccagccaatgcatgatggaagccactaattttaaagcaaatgtattttgtttaggagatgctgtgagaacccaatgtccaacaaaggaaatatttgcattgccaatttgagtatacctaaagtgacatcacttagtttaaacctcccactgtgaggttaaagaaattgactagaaatg

SEQ ID NO: 223496 - DNA, 558 bp, Homo sapiens
tctgaataatacagtaaggtacatttgcaggtttcgagtccagaggaggtaagggaagcaaaggcgaccatgaaagagtttgtcaggactgttgaatgaagagaggagggacccagtggaaaagttctggggaaggagtattaggtttggtaaattacagcatggaaagtggccagagctcaggtgaaaaagccccactgctggtgatgccagaggaacttctaagaacaggatgcctggcattctatactcagttccttcccatcccgtgctatgctgcagtccacctccactaactttctaacctccagtaaacgtcaactctgtaggacagttttgtggagcggtagttggaggaaggcagtaagagggacaactgatactatgagattagataacataaaagaggaggcaggacaaatacagggatgatggaggatccaataaaggaggaatggggagcaagaggtgawaccaagctgaggatactattgcttttggtgaatctttttaaatattctaggagccatggactcccacaatatggtggggggaaag

SEQ ID NO: 223497 - DNA, 572 bp, Homo sapiens
aaagcagtaacataggatggaagaaggaaaaatttcaagttactaaaataatacattatataaaggtattttgtatatcatgaaagagaaactgaaagagcaatcatcttaccagaaaaaaagcactttatgtacttatcaagcttgtccacaaattaaaataaagacactaccaaacacaacaaagaatggctccatcacttccataaagaaaacaggttatctaacacttacagcttttgtaagaattaaataaaattatacatgggacgtctccaacatgatgagcaccatgtgataagctttcaaaagagattagttattattgttgtagcagcatattataatcctgagtttccaaggtaactagaaatctaacattaagtgtgtacgtagaaccaatgcatgccagtgacatcatcatcatttaaaaatttcataaaaacgattactgaatgtactccaaagcacttttcttttaaatcagcattttgatttccttttttctctgatcaacttttmtcattttttcttgcctttacatttatacccttatatctcttcataaaatg

SEQ ID NO: 223498 - DNA, 478 bp, Homo sapiens
cctggaagatgattaataattatttatcaaactgaattttgatacttgaaagggaagtaaagacccaattataaacacagcatttccattcatttgcccaattagttatcctacatgttttttttctattccccctaaaatatacacatacacacacatataatgtctctacacaaaatacagagtatatttttytaagcctgtgatccaaaattatttgcctaatttgacctctagaaagtccgactactataacttagctttctgtttaaagtttcaggggtaaagtggaagaaaatatgcaagtcaacatggtgtattattacaggtcagattttcttctcctgttaaatactatcaatacatttgttgaacctttagtctctatttttgcctctctgtctcaaacagtttgtaaaggtctcttgcatttcttcagtaaaacaggagctctatttaatggcagaaatgtcatact

SEQ ID NO: 223499 - DNA, 593 bp, Homo sapiens
aaatttctggcatgccaaataacataacttatgcaatgatttcacatagtatatagtatgataccctgaacagaaaaaaaaagttgctgggtttaaaatgtatttgaatctttagtcttggtccatttttgccgctataacaaaatatctgagactggataatttatgaagaacagaaatatactccgggaagyccaagatcagggtgccagcaggttctgtgtctggtaaaggctcatttctcattgatggtgtcttctaggcatcctcacatggtggaagggacagaaggcaaaaaagggaggaacactgtgtcctcacatggcagaagagcagaagagaatgaactcattccctcaagccctgctagaagggcactactctcatccactaggactccaacctcacagcttcatcacctcttaaaagccccacctcttcatactatcagttgattattaaattccaacatctgaatgttggaggacacatccagaccgtagcatccctcaaaaaaagaataaagatgttccatagcacccatcatttattgaaatgattttcgaacacaaatacagcattgagagcaagct

SEQ ID NO: 223500 - DNA, 551 bp, Homo sapiens
tactaagtgttttttttaaaaggaaattccaaatctaaattcagtgcttgaggggtacaaacatgcttgcttagacctttttatcataatcacgagaatgagaaaggaggagagcattccatcacccacacattttctgtatcagaccacatctgttacatttaagtgagtagcgatacttggcaaatatgtcatgcaccttcctgtttcatgacctacaattttaaaaaatgatctgggccaggcactatggctcatgcctataatcccagcactttgggaggcttaggcaggaggatcacttgaagccaggagtttgagaccagcctgggcaacacagaccaccaagtctacaaaaaattaaaaataaaaaaattatccaggtgtgatggtacgtgcctgaggtcccagctacttgggaggctgaggtaggaggattgcttgagcctagaagttcawtgctacacaagagctatgatcacgccactgcactccagcctgggaaacacagtgaaaccctgtcttgaccgggcatagcggctcaaacctgt

SEQ ID NO: 223501 - DNA, 425 bp, Homo sapiens
tttagataataactctcttccacttttccaaattcctgtccactgtgtgtgggaagctcagcctcaggccacactggccagtacagctgacaggcccagggacattcctgtcctctcccatctcacctcccttccttctgatattgtgtgagcaccaagataactcatgcacttctacttcccaccctgtgtgcagcagagaaacatcgccagcgtctctctgcctgtaacaagcccacctttgcttccagctctgagaaagcacgttatctgtgtgctcagctcctgaacctgggcwcccctctgctttggtctctaacctgacttgaagacggcctcttcaccccaccatttctgctttttttttttttaattccttttacacacacaccacacaattttgttttaatttgaccaatgaattc

SEQ ID NO: 223502 - DNA, 472 bp, Homo sapiens
tcttttttttttttttttcctgaggagtctcgctttgttgcccaggctggagtacagtggcacgatctcggctcacttcaacctcacctccgggttcaggcaattctcctgcctcagcctcccgagtagctgagattacaggcatccaccacygcgcccgactaatttttgtatttttagtagagacagtgttttgccgtgttggccaggctggttttgaactcccaaccttgtgatctgccctccttggcctcccaaagtgctgggatttacaggcatgggccaccgcgcccggccttcggctattttcatgcagcaattaaaaatatgttagtttcgtttctcaagatttcctgactctcttctttctcacttttaactggactctttcctctgtccctgcctacctttttaaaaaaaattccactcccagaagtgtctcagtgggggggttctgttctgaaagggagcc

SEQ ID NO: 223503 - DNA, 386 bp, Homo sapiens
accccaccaccccagcacacaggaaagaaggagacagttgcagggtcaccccgtacccccaagcaactcagtgttacacattccaagggagagacacagaaactcttggaagaggagcaaggagacagtgcagcatcctgtcctgctgcccttccctgggagtcaagaggcacctctcagatagcacagaccaggtcgggcctaacagaggccctccattcctgtgtgcacctccaagaggaggtctttgtagtgcagaaaatgtatttgttgagggggccaagaaccttaatctaggggtaatgggggcagttgggaggggaagttccagtctyggggtttccccacgtcaggtggggaaaacgaaagccagtgatggagggtct

SEQ ID NO: 223504 - DNA, 408 bp, Homo sapiens
aatctagcaaacatacaaatttgtacttctttgctccacagctactaagcaatagctgttgaaatcattaaggtacaaattgaggacaggtggcacacagtggctcctgcctgtaawcccagcactttgagaggcccaggctggcagattgcttgagctcaggagttcgagaccagcctgggcaacatggcgaaaccccatctttacaaaaaatacaaaaaattagctgggcatggaggtgtgcacctgtggtcccagctactcgggaggctgaggtaggaggattgctcgagcctaagaggtggaggctgcagtgagccatgatagcaccatagcactccagccagggtgacagcacaagaccctgtctcaaaaaaaccccaaaccaaaaccaaaacaaaacaaaac

SEQ ID NO: 223505 - DNA, 574 bp, Homo sapiens
tcattttatgagtctagcatcaccttaataccaaagccagataaagataccacaagaaaggaaaactacaggccaatatccytgatgaacacagatgtgaaattccccaataaaatgctagaaaacccaattccacagcacattaaaagaatggttcaacatacacaaatcagtcaatgtgatacaccacattaacaaaataaaagaaaacaacaacatgatcatctcaatagagaaaaaacatttgacaagttcaacattcactcatgattaaaacactcaataaaataggcatagaaataacttatctcaacacaacaaaggtaatatatgaaaagcccacagttaacatcataatcaaagagtggaaaatggaaagatttcctggtacacggcaaggatgttcactctcaccacttctattcaacatagtactctaaaaccaagctgaaataattaaagaagaaaaagaagcaaaggcatgaaaatcagaaagggagaagtaaaattatctctgtttgcagatgacatgatcatatatgtagaaaactctagggcctcaacaaaataactg

SEQ ID NO: 223506 - DNA, 443 bp, Homo sapiens
ctgcctgtgctgcacaatgttacccatttctttgttcctgtacatgaggtaacaaaaaaagaaagatggagcctccatgttagaaatgcatagtccccaggtagaccttttctgtcttcacagctacccccatgtaattttctaacccccattcccccgtgagcttctaacttccttatttaggtttgcagctctatttttcaatcctgtatcagattaactattatcaaaacgataaaagctaacaagtgttggcaaagatgtagagaaaagtaaactcttatacactctttgtggtatatatwtatttttttgttttctggaaaaataacatgggatttcctcaaaaatgactacagttaacaataatgtattatatatttcaaaatatctgatagaattttagatgttcatgctacaaagaaatgataaatatttgaggt

SEQ ID NO: 223507 - DNA, 443 bp, Homo sapiens
ctgcctgtgctgcacaatgttacccatttctttgttcctgtacatgaggtaacaaaaaaagaaagatggagcctccatgttagaaatgcatagtccccaggtagaccttttctgtcttcacagctacccccatgtaattttctaacccccattcccccgtgagcttctaacttccttatttaggtttgcagctctatttttcaatcctgtatcagattaactattatcaaaacgataaaagctaacaagtgttggcaaagatgtagagaaaagtaaactcttatacactctttgtggtatatatatwtttttttgttttctggaaaaataacatgggatttcctcaaaaatgactacagttaacaataatgtattatatatttcaaaatatctgatagaattttagatgttcatgctacaaagaaatgataaatatttgaggt

SEQ ID NO: 223508 - DNA, 515 bp, Homo sapiens
agtctgaaagaaaatgtgaaaatattataaacttaaaatacaacatggcaaaattcatcagatgctgtcaacatagtgcttaaagaaaaacttaaagcatttaatgtttatattaacaatgtggggtgcctgagaattggccagctcagccttccagtgcctacacgccttataaggggtcttggaaattgacctgctctgcacaaccctgctgrcatctgtatgctcttcccagtggcttgaggatgggctcatccagacagccagtgacaccacctccagcacccaccaacatgtgccatctaggagtctggggacttactcagacaacccactgcttccaccattgctacatatgcctgcttcctggggttatgaggcttggctcctaaccactactgccattgctgatgccacacatgtttcccaggggttctgggacccacaaacctgcccagcccactgctgccacaaccagagcacaagatagccccctggagggtcaaaaactagtt

SEQ ID NO: 223509 - DNA, 632 bp, Homo sapiens
cactgactccaagtatgctttcttagttcttcgtgctcatgctgccatttggaaggaaagacactttcttaatgctaatggatcccctataaaatatcatcaggaaattagcaggttattatcctcagtttttcttccacgagaagtagcagtgattaattgtaagagacatcagaagggaacagatgaaatagcmgaaagatcaagttagctgatcagacagccaaatcagcagcaagaaagcctcagggactcaatacatttaaagtctctctaatttgggttggctaaataagagacattaagcctcagtactctgctgtagagatagaatgggccatctctcaagggtacattttctaagcctcaggatagctacagtcagaggatggcaaactccacttgccatcctccagccagtggaaagttcttaaaatcctccaccaagcttttcacttgggaaaagacaaaacttacccgtgtgcccagagattgttttcgggagagaactttacaaaaacagtcaaacaagttgttaatgcttgtaaagtctcccttaaaaataatccccttaacagacggctcttgcttctcaaacccaaaggatgggaagctatccaggggaggactgg

SEQ ID NO: 223510 - DNA, 497 bp, Homo sapiens
aaaaaatctgtaattaccatgtccaatggacatttattcagagcaatagtctgaatcaccaatagatccccaatcagtcagtcaggactaatgacaaaggtttcacatgtgaacacttagaataaaaaaaattcaattacgcttgttaaaacatggtgaggcagaccctattcaagatcatcaaaataaatagagaacactgcaataagattttgcagtgggagaaagcagttaggtttgacacctaatayaacatggggaaagtgggaatttatatccaagaagcaagattggggtcaatagataaaaaattactaagagaaaacatcagggataattggaattctagctaaacttttataacaggatttttgctgatgaccagccagggtaatcagacatctcctgaagaatgctggagggtgaggaacctgatcatatattgaaggtgtttagttaccaatgagggtgaaggtgttgctaaactgacttaacag

SEQ ID NO: 223511 - DNA, 567 bp, Homo sapiens
ttcttaacctatggaatttcttttaatgctgacatcagacctgtctaaaagatattctgatcatttgcatactctgtgactaaaagggaatgatagtaattttaaacataccaaaactgtatatctcaattaatggtattcttcaaagaagttaaattgggtgattacacacttaatcctattataatatcaattctctgaacagtggtagaaatctggtatttgaagggtcttcagagacatgtttaaactttatactctaatattgaagtatctttgcaagctatttttaattcatatatccaactttaaatattagtctctatgggctagattatgacaataaaagaaactacactaaaatgtcagtattttaaagtaacaggaagatattacaaagtctgttacagtcctagtcatcttttcaaggcagcagtmccctatgtgatagctcagtaatacaggatgattcaattttgtggcaccaccccctcaataatagaatcctatatttacctccatggagaaaaagggaagtagaattgtgtacctgcttgtaaatacttc

SEQ ID NO: 223512 - DNA, 237 bp, Homo sapiens
aatgtctttctctctctacaaaccagtgtgccatttctgtctacttataatttagtattaattcattctgtcactgattagataattttctctggtaattcacttctttaacaaatacttattgaagatacactacatgacttagaactatgctgggcatcatgaaaratgctccaaagaatcatgtaataatattgatgataaaaattacaataatagtcacacttgaattatata

SEQ ID NO: 223513 - DNA, 513 bp, Homo sapiens
actactcagccaaaaaaaggaacaaaattatggcatttgcatcaaccagtattgagtttaagaccattattctaagtaaagtaactcagaaatggaaacccaaatatcatacattctcactcaaaaatgggggctaaagctatgaggattcaaagacataaaaatgatataatgaaatttggggactttctgggaagagtgggaggggattgagggatcaaagtctacacaactgcttgggacaggtgcacaaaaatctcagaaattaccacttaagaacttattcaggtaaccaaataccacctgttcccccaaaactattaaaatttttaaactaaaataaaatatttatttaaatatttttaaaaactttatatgcgtccttatgtgttaggtgagtctcttgaagacaggacatacttaattggyaaaggcttatctattctgccattctttattatttaagtgcagcatttagacatttattttcaatgtcagtattgagaggtgagg

SEQ ID NO: 223514 - DNA, 378 bp, Homo sapiens
actactgacactacctaacttcaaaacttcctataaagttataataatcaagacagtgatattcacaaatgactagacaaatagaccaatggaacataatagagagcctggaaaaggacatacgtgaatacagtcagttgaccwccaacacaaatgaaaaaacaatataatagagcaaatataatcgttttaacaaatagtgctggaacatctggatatctacatgcaaacaaaaaataataatctagacacagacctcatacttttcacaaaaattaactgaaaatgcatcacggacctaaatatataatgcaaactatataactcctagagggtaacatagcagaaaatctagacgaacagaggtataataataac

SEQ ID NO: 223515 - DNA, 387 bp, Homo sapiens
ccttacatgcattatctccaatcctaaagacagccctaagaggtaagttggcattagccgcattacatagatgaggaaacagaggctcagaggataaatgacttgcccagagtcaccgagttggtaagtggcagaactcggacttgaataaaggtactgactccactatttttcccctatgacgtcatcctgcttggaagggccaaagagtgaacaagaccatttctggtggaggaaggggatgaaggaaagctagcactcttccaagactcagtacaaacgtcccctccagtaggaagccttcccagatggggttaattgcccctcatctggcagccttctgggcctacttctgtcccrtcccaaatcacactacggtgtcattgt

SEQ ID NO: 223516 - DNA, 650 bp, Homo sapiens
tgaaagactcaagggtggttattcctaccacctctccattcaactctcctattcagcctgtgcaaaagaaagatgaatcctggagaatgaaagtggattatcatatacttaaccaagtagtgactacaactgcagctgctgtaccagatatggtttcattgcttgagcaaattaacacatctcttggtacctggtatgcaaccagtaaggtccagaacaggagaagtctctgcagcaggtccaggctgctgcgcaagttgctctgccacttgggccatatgacccaacagaaccaatggtgcttgaggtttcagtggcaaatagggatgctatttggagcctttggctggctcccatatgtgaatcacaatggagacctctaggattttggagcaagactctgctgtgttctgcagataactattctccttttgagagacagctcttggcctgttactgggcattcatggaaactgaacatttgactatgagtcatcaaccaccatgcgacccgaactgcttatcatgaactgggtgctttctgacccatctagccataaagtgggrcatgcacagtggcatttcatcatcaaatggaagtggtatatacgtgtttgagcttgagcatgtcctgagggcacaaggaagtt

SEQ ID NO: 223517 - DNA, 524 bp, Homo sapiens
attgctcaattaaactcctttaactttaatttggctcaagtttttcttttaacactatattttttttttttgycttttagcatcatttttaaaaatagcatttaactcctttgattcagtggttgctatggtttcactatttatcccctccaaaatttaacccccagtgtggcagtattgagaggggaggcctttaagaggcacttggatcatgaaagttctgccctaatggattaatgagttaatggattaatgcattatcatgggaatggcactggtggcttgataagaagagagacctgagctagcaagttagcatacacagccctcctgccatgtgatgccccaggccattgggaccctgtagagagttcccaccagcaagaaggccctcaccagatgtgtccttttgacctgggacttcttgaaatggtctttgcaaaaattataacggtgagaaaatgatggaagtgaaagggatctaatctagccaactcctctcttgcctttagccttcaagctgc

SEQ ID NO: 223518 - DNA, 608 bp, Homo sapiens
tattacaaaaacaaatttggttttaaagatcaataaactacatttttaatacaaagtagtatatacaatatgcatgtaattaccttttgctatttcaagctttgctctgtgtgcatacaaatatatcaatacacatatataatttttaaaatacataaaatcttaatgtgtacaacacacatatgacaacgttttgaatatttaaacaaaagcaaatgacttgctaaattgcaaatatgtacatatggaaaatagatatatttgctcatgcaactgctttttaaaattccattacttctgccaaatcaagcaacactcacacgggtggtataagtacacagaaatagcgaacaacataaatgttagcattcatagatcagccttttatgggaatgtaatttttcatgtacaattcactcaacatattaaaacaatctttttatgtcccttgttatggttttatcagacaagcagaacaatttcaagggaacctaagagtagactatcaatattagtcattgctcatgttgtgtttacaggaagttcactaattyacattcgatttatattaataatcaagagtggaactgcaatgaagtgcaaacttt

SEQ ID NO: 223519 - DNA, 622 bp, Homo sapiens
gaggttgcagtgagctgagatcaggccactgcactccaggctgggtgacagagtcagaccctgtctcaaaaaaaaaaaaaacaaaaaacccttgaaattaatgtaaaaatataagtgcttacacactgagccaagagatgaaattcagtatcccttgattttctttttgagctccaactwtttaaactactgtaaagacactcatctggccaggcacagtggctcatgcctgtaatcccagcactctgggaggctgaggtaggagaactgcttgacaccaggagtttgagatcaacctgtgccacatagtgagaccctcgtctctaaaaaagttttaacaaattagctgggcatggtggaaggtacctgtagtcccagctactttggaggctgaggcgggaggatcacttaagcctgggaggtggaggttgcagtgagctacaatcccaccactgcactccagcctgactgataaagcaagaccctgtgtcttaaagaaaaagagatacttaccttgtatttaaatcatattgagttttacttttaaactgcattactttgatctcattttgaattcttaaaacttttaagaaggaataatggtggtgggtgttagcagtat

SEQ ID NO: 223520 - DNA, 383 bp, Homo sapiens
tttcaaagattatctttgggagagtttgggagatatcatacttacatgtctttgagggcaagcaagttgttgtatgctggtttgcttattaaatcaggtaggcagttgttgcctacagaatgctcttggctccaggcatcagatggaggattgcagttacttacaggagaccagagtaagtttaagcaaaacattcttcrgtatttacccacctggcttcaggtacacacatgcacatgcaagagacaggacataatggctcatctggtacatgttctggcaaatggagtaaatcattgaatctgagcctctttagaacacccacaactggggatcttcatatatttggaagaagatgcctacaaggaaatcccagtaaacat

SEQ ID NO: 223521 - DNA, 451 bp, Homo sapiens
tagaattggcattaattctcctttaaatatttggtattattctccagtgaaatcatctaggcctggagatttcttctgggaagattttaaaattacagatccaattttctaaatagttatagggctatttgaattttctgtttcatgttgggttagttatgatagtttgtgtatttttgaagaattgatctgttttatctaagctgtcaaatttatgcctataaagttgttcatagcatttccatttttttaaatgtttgcagagtctacagttatatgccttgtttcattcttgatattggtaattggtatcttctctctttttttctttgtgagtcttgctagacgtttgtcaattttagtgatctttttgaaaagtaagctcttcattttgttaatttttctmttattcttctgttttcaattttattgatttctctatcattttctt

SEQ ID NO: 223522 - DNA, 586 bp, Homo sapiens
agataaagctgctatgaacatttgtggacagtctttgtttggacatatgatttaattttttcatgtrtaaacacctataagtggaatggctagagtacatggtaggtatatgtttaactttttaaaaaaaatcatcatactgtttttgcatattagtatcattttgtatttccacaagcagtgcatgggagttttcattgattcaagttcatcccctgtcttttcttttatttatttatttttaagacagtgtctctctgtcatccaggctggagtacagtggtataatcacagctcactgcagcctcaacctcccaggcccaagtgatcctcctacttcagtctcctgagtagttgggaccacaggcgtgcaccaccacacctaactaggaatctctatatctagggatggtcctcaagctcctgggctcaagcaattctcctgcctcagctttgagtttgctgggattacaggcatgagctactgttcctagccaattttagatactgtaataggtctagtcagcggaattgtatctattaataattgcagctttaatttgcaattccctaataattaataatg

SEQ ID NO: 223523 - DNA, 569 bp, Homo sapiens
atattattttataaaatacattaaaataactgagaataccaagctcccagaatgaaaacacataattctcagagagatatcttattaatataaacacttcatcatttttaggcaactgatacagaaaagcatttttaaacacttgttataatgaagttttctttttaagtcaatgtattgtttgaaatctcgtgccatctttaggatctaaagatgaaataaattaaccagttggcctctgtagtaaattcccagctgggggaggggataggtgttttaaacttagcagtggaaaaaaggaaataaatacatatatttttctacttttttttcctgttttttttttttttactttgaaacactttaactgyacgtcttttggttaatgaaaaacatggaaattttaggcgagttaaatttttttttcagtttttgcaggtacatacagagtaggtgtatatatttatggggtacatgagatattttgatacaggcatgcaatgtgtaataatcacattatggaaaatggagtttccatcccctcaagcatttatcctttatgttacaaa

SEQ ID NO: 223524 - DNA, 602 bp, Homo sapiens
ggggtttttgcagcaatttaaatatattattctattgtcttctggctttcttttctattgagaattcagtcattagcccattattactcctttgaaagcagtatgcctttttccccccttctggcttctggtggtaagattttttataatatacttaagtgtggttttctttttagttatactgcttggagttcatagggcttcttgattcataatctttttaatctttttttttagctgcatcttatcttctatttaacctgaatctaatttgctattaaaaccrtgtatacgcattttcaattactttatttcaattccagaattttcatgtgagttcttgttagactttctagttcgctaataaagttattaattatcttttatcttcctgaatatagaacataggggagctcctttgttgtttatgtttgaatattccagtatctggggatcctacaggtctttttctgttattggatctttctgcaagttttccttcatattgtcttgcttcctaatattatgattattctagacaaaatttaagaccaagatctattttatcttccttcagaaaggttctatatttcttgagtgtg

SEQ ID NO: 223525 - DNA, 602 bp, Homo sapiens
ggggtttttgcagcaatttaaatatattattctattgtcttctggctttcttttctattgagaattcagtcattagcccattattactcctttgaaagcagtatgcctttttccccccttctggcttctggtggtaagattttttataatatacttaagtgtggttttctttttagttatactgcttggagttcatagggcttcttgattcataatctttttaatctttttttttagctgcatcttatcttctatttaacctgaatctaatttgctattaaaaccgtgtatacgcattttcaattactttatttcaattccagaattttcatgtgagttcttgttagactttctagttcgctaataaagttattaattatcttttatcttcctgaatatagaacataggggagctcctttgttgtttatgtttgaatattccagtatctggggatcctacrggtctttttctgttattggatctttctgcaagttttccttcatattgtcttgcttcctaatattatgattattctagacaaaatttaagaccaagatctattttatcttccttcagaaaggttctatatttcttgagtgtg

SEQ ID NO: 223526 - DNA, 619 bp, Homo sapiens
tgtaagcctaacagagactcttcaggccatggaagttgggttcccagtcatgactcaaagaagcagaactggacagtaggtctgaattccaggcaatggctggagaacttaacagaaagagctctggcttttctttagggccaaccagccatggaataaccttgctctagggactccacccctttctcctgtttctgtcttctggtgggaacctcctactcactttactgaatttttgcattctgttcccacaattcaattcctctgtaattcaatctgagattccaagggaaaaaaatcagctatgatgcccttgatgggtggtctccatcccagaaccagccaagtctgcctgaagaggcagaatccatgccacaaacatggctgcctgattcttcttcagtagaaactttagagagaggaagtatcaataggcacttcaaaatagacctttcccattatgaccttgctgtcctcttatccttcccatcctgggaggctgaggaatgcagagcttgaactcagcctttagaatcagtgagcctaaaawataaatcctgtctctcccattgctggctgtgtgacattagacaagttactaagcctctgcagaacagtt

SEQ ID NO: 223527 - DNA, 628 bp, Homo sapiens
ttcttcccaacctacaacatggacatttggctcctggtcccagagccactttaggatatggaagctgtctgttgaggacaattcagtggggaggggtggggaaatagaagtagcctgagtctcggaaatctatagaacctcctaccagctgtaaactacctacctccagacttctattttgtgagacagaaacatgtatcttgcttaagccactgttacttcagggtgtttgttgcagaatataatcctaactgaccacttgcaacaacatggatgaacctggaggacatcatgctaagtgaaataagccaggcacagaaagacaaatattgcatgatctcacttctatgtggaatctaatagtcaaactcatagaaacagggtagaacagtggttaccaggcgtggggaggagaaggaagtgaggagaagtagtccaaggatacacacytgcagttatggaggatgagtcagcctagagttcagcttgaggactagagttaataataatgtactgcataccacaaattcgctctcagagtgaattttaggtgctcttaccccacacgaaaagggtaactgtggaaggtgggtggataaggtcatttgcttagctgtagtaatcactt

SEQ ID NO: 223528 - DNA, 536 bp, Homo sapiens
actcaaggtgaccatgaaaacagctccgcctgcagtggagtctggaaatcagcttaagtgtaaccagtgaaagaaaagggctgaaaaaactgaccaaatctgaccttatattccacgaagaccttgttcaggaagaacaaacagaattatcagacaaatcctaatgtccagaattcactaagtattcagagaagttgcatagaagacagtcccattggcccaaaagccaaaaatgatggcataaaatagaagagaacaaaaaaaggggtctttaaasaagatgccacagcaaagcaaagttccatcagtgcttcagcctccccaagggaatttgatcacttctaattcaacaatcataagaactgcaaaaatggccttagaagtaataatcttgtaagtatttgcatatgtgtacttatcacacctaaattttgagtgttggttgataatttatccaaatcaacttttctgagataaattacaagcacttaccttgcgttgttaacattatttggctctttacttgttttactcac

SEQ ID NO: 223529 - DNA, 536 bp, Homo sapiens
actcaaggtgaccatgaaaacagctccgcctgcagtggagtctggaaatcagcttaagtgtaaccagtgaaagaaaagggctgaaaaaactgaccaaatctgaccttatattccacgaagaccttgttcaggaagaacaaacagaattatcagacaaatcctaatgtccagaattcactaagtattcagagaagttgcatagaagacagtcccattggcccaaaagccaaaaatgatggcataaaatagaagagaacaaaaaaaggggtctttaaagaagatgccacagcaaagcaaagttccatcagtgcttcagcctccccaagggaatttgatcacttctaattcaacaatcataagaactgcaaaaatggccttagaagtaataatcttgtaagtatttgcatatgtgtacttatmacacctaaattttgagtgttggttgataatttatccaaatcaacttttctgagataaattacaagcacttaccttgcgttgttaacattatttggctctttacttgttttactcac

SEQ ID NO: 223530 - DNA, 486 bp, Homo sapiens
ttgcatagaagacagtcccattggcccaaaagccaaaaatgatggcataaaatagaagagaacaaaaaaaggggtctttaaagaagatgccacagcaaagcaaagttccatcagtgcttcagcctccccaagggaatttgatcacttctaattcaacaatcataagaactgcaaaaatggccttagaagtaataatcttgtaagtatttgcatatgtgtacttatcacacctaaattttgagtgttggttgataatttatccaaatcaacttttctgagataaattacaagcacttaccttgcgttgttaacattatttggctctttacttkttttactcactattttgggggatgtgcttttcatttcttttactttctttttttttttttgattttgtttcgcacttgattctgacaacattctgatcatcaggtgggtaatagcaaaagtaatataggaaagacaagctgttggggggctggg

SEQ ID NO: 223531 - DNA, 417 bp, Homo sapiens
ggatattaagttgttccagtgccatctgttgaaaagactatcttttcctcattgtattgcctttgcccctttgtcaagwatttgtataggtctattttgggactttctattctgttccattgatctattcatctattcttttgccactaccacactgtcttgattgctgtagctttgttgtaaattttgaaattgggtggtattagtcctctgtttttcttcttttctaatattgtgctgccattttttttttgcctctccatataaactttggaatcaatttgtcaatatccaagtgatatatttctgggattttgatggagattgcattgaatctagagagcaagttgggaagaactgacattttgttaatgctaggccttcctatccgagaacatggaatatctctctattcat

SEQ ID NO: 223532 - DNA, 555 bp, Homo sapiens
  misc_feature (1)...(555): n = A,T,C or G
gattatatacgtgaatattttgagccaattaaattggaacatattctttgaaatatctttatgatcatttttgttctattcagtaggtttaatggaataataaggtgtttttgataaaccacatgagttattctcaatggttacaagatcttatgacagttgtaatcaaaagtgtgctggctcacgcctgtaatcccagcactttgggaggacgaggtgggtggatcacctaaggtcagaagttcaagactagcctggccaacatggtgaaaccctttctctactaaaaagacccccmaaaaaaattagctgggcgtggtggtggttgcctgtaatcccagctacttgggaggctgaggcaggagaatcgcttgaacccgggaggcggaggttgcagtgagccgaaatctcaccattgcactccagcctgggcaacaagagtgaaacgccatctaaaaaaaatgcattattaaatactgatctagtatttactgtaaattcagcactttggggcatatcagtgggtatttagttttattnnnnnnnnnnnnnnnn

SEQ ID NO: 223533 - DNA, 502 bp, Homo sapiens
actgacatttcctaattaaccaagttctgccaagtttcacatgaaacttggggaaccgatttcattcccccagtatcaycctgtggcgccaccttccggagctgtgaggaaactccggacttccccccaacaccgccccctccctccaccctcggtctccgctttctgcgctctgccgcgttggttttcggaggtgtctgggcgcatgcgctttggacgggccgcctagcctaggagagactacaattcccagaagacagtgcgaaagaaaaaaaaaatcccgcggtccgtgggggtgggagaaataaacgctcgcgagagaacgaggttcaggcggctgcacgaagggggtggaggggggctggagagagtgaggaggaaggggaggaggtgccgtcccacaataccaggcgggagggcgggtaggcggtttgtatccgggctgtgaggtgctcggagcctcggcggaccttgctgcctctgtctctttaacgcgagagga

SEQ ID NO: 223534 - DNA, 502 bp, Homo sapiens
actgacatttcctaattaaccaagttctgccaagtttcacatgaaacttggggaaccgatttcattcccccagtatcaccctgtggcgccaccttccggagctgtgaggaaactccggacttccccccaacaccgccccctccctccaccctcggtctccgctttctgcgctctgccgcgttggttttcggaggtgtctgggcgcatgcgctttggacgggcmgcctagcctaggagagactacaattcccagaagacagtgcgaaagaaaaaaaaaatcccgcggtccgtgggggtgggagaaataaacgctcgcgagagaacgaggttcaggcggctgcacgaagggggtggaggggggctggagagagtgaggaggaaggggaggaggtgccgtcccacaataccaggcgggagggcgggtaggcggtttgtatccgggctgtgaggtgctcggagcctcggcggaccttgctgcctctgtctctttaacgcgagagga

SEQ ID NO: 223535 - DNA, 548 bp, Homo sapiens
ctagaactcaaaactggttcaggaataccgtggaataaacagaatagactggtattgggcaagcctgggaacctaacaactctttaccattgtttccaggttgtgaatataagaagagatatgtttgtaatttagggacttgcctatatcaccaaaagatggtaactttggcatttgaagtgttcaactacaggttaagtatcctttattcaaaatgcttgggaccagaaatgtttcagatttttttytgaattttggaatgtttgcattatatacttactggttgagcctccctaatctgaaaatctgaaatccagaatagtctaatgagcatttatttttgtgtcatgttgatgctcaagaagttttgggttttggatttccagattagggatactgaacctgtataggaattacagcctagcttttcactgagctccctggatccttttttcttttcctgcatccttgcctgtcttttttctattgttagtctgtgttgcaattgtgctaagaaattttgaagaagcatttgtagagattaacaa

SEQ ID NO: 223536 - DNA, 548 bp, Homo sapiens
ctagaactcaaaactggttcaggaataccgtggaataaacagaatagactggtattgggcaagcctgggaacctaacaactctttaccattgtttccaggttgtgaatataagaagagatatgtttgtaatttagggacttgcctatatcaccaaaagatggtaactttggcatttgaagtgttcaactacaggttaagtatcctttattcaaaatgcttgggaccagaaatgtttcagatttttttttgaattttggaatgtttgcattatatacttactggttgagcctccctaatctgaaaatctgaaatccagaatagtctaatgagcatttatttttgtgtcatgttgatgctcaagaagttttgggttttggatttccagattagggatactgaacctgtataggaattacagsctagcttttcactgagctccctggatccttttttcttttcctgcatccttgcctgtcttttttctattgttagtctgtgttgcaattgtgctaagaaattttgaagaagcatttgtagagattaacaa

SEQ ID NO: 223537 - DNA, 455 bp, Homo sapiens
caaatatagaaagaaacactggcccaaaggtccaaatttaaaacccactgatgtcctggtagacatttggcaatgaggttattagaaatgtaatgtaacagatwttttaaaatttgctccattctcctccacttttttttggtatgggctcctgtagttacaggggaattttaagagcatatgcggtagacagaagatgaaattagtcggaatatctgtaaatgggattgggatcaatgcactaaatgaagctgtctgtgaggttgctcagctttctcaagctcgtagctggtcagtccattgatgtcttagatggtgtattaatcaaggttctctagagggacagaactaataggctagatgtagatataaaggggaatttatcaagaagtattgacacatatgattgcaaggtgaggtcccacaataggtcatctgcaagctgaggagcaagg

SEQ ID NO: 223538 - DNA, 396 bp, Homo sapiens
tctcatgagatctgatgggtttatcaggggtttctgcttttgcctcctctcctcctctttctgtcttgccaccaccatgtaagaagtgccttctgccttcggccgtgattctgasgcctccccagccatgtggaactgtaagtccaattaaacctctttttcttcccagtctcaggtatgtctttatcagcagtgtgaaaacagattaatataggggttaatatttaaaatataaggctccctggaagagctgcatggaaattcttacacaactcaattgaaaaaattctcatacaactcaaattctcatacaactcaatggcaagaaaaaaaaaaaaatcccacaaatagccaaattaaaaaaatgaacgaagttcctctaaaaactaaaaaaag

SEQ ID NO: 223539 - DNA, 457 bp, Homo sapiens
tggattttatagactggcttcaggaggcagtatcagatttacacagggcccacagattggctggagcttccccragctccctccttcaccacttacatcacgtaacctatgttgctgtgcatagttatttattaacctgcctacgcagcccaccaagttgcatatgctttagcagaattaagctttctatatcttatgtgccctgcagtgccctgaagatgttgatttcaataaaggtttgctgaattaacaaacacatgcgtactatggacagacactacttgggaggctgaggcaggaggatcgctggactccaggagttcaaggctgcagtgagctatgatcatacccctgcactccagcctgagtgacagagcaagattctgtctcttaaaaaaaaaaggacagacaatgcataacccaaaagaatgaaaagaaagatctctaatgggaattc

SEQ ID NO: 223540 - DNA, 581 bp, Homo sapiens
acaattttctctaaggaaatagaccatgaagatagggaaaattacctcattgtcactgggatattttctcacatccacagtagatttagggtgggtaccaggtgtgagaaatcactctgactttgctcctttctacaaacatagggcatctcaacccagtgatttccatggcatttataaaaaggccatttctgcccggggtttgtgccactacaaagcttgtaatggatctagagacaaaatgacaggttttccacattgggggcactttcctggaagcgtgcaattcagcttcacgtcccactctgggagctttggaaacaytgcaacgtatcaaattgctgggccatctgtggtttcctgtccacgggtagggagaggggacagacagaagctgcctctctggatctcagcaaatgtgctgggctgaggccacagaccagggcactaggacccttctgtgcccaacagatgccatttgtgagctcagagcttctgccacctgtctgaacaggcaccaaaactagcagctgaaacatcctccattccacaaaagccagtgcttatatatttagcagctt

SEQ ID NO: 223541 - DNA, 317 bp, Homo sapiens
aggaataaacaaactcatttctcattggcaaaaatgtgttgattgtaatggtccctatttttattaataaagatgtttgtgaacctagttataatgatttaaaattcatggttcaaaaccgcaattacttttgcaccaacatggagggaaggtcctctattttggcctcagggcctattgtcagcagagtcttcctcccacmaacactacccatcctactcccttcccagcgacttcaccacctttgtggaaaaggctcatctgtagaactatgaatctagtactttccaaatgagttacacagacactgaaaacag

SEQ ID NO: 223542 - DNA, 548 bp, Homo sapiens
tctaaaagcatttttagtgggacaattcttcattgtgcaggaccatccattagcttgaagtacgttagcattactagcccctgggcactaaatgacagagcacttctcagtcactgtgacaaccaaatacattctgcacccatttccaaatgcccccagggtaggagaatactgcctgtggtggaacaccacggatctagacattaataarttggtttccattcattgcaatgaaacaattccagatgaagacagtggctcataaataagcatatgagaatcatttaattcttccctaaagcactcaactcaaatatacatgggatcctagatagcaaacatgatgctatttgcttcatcatgaacaaggattgcaaatgcagcataagatattatcctcctagtctaacacaaaatcctgaaactgaaagtgggtaatgacaactaacgtcaatgggaagatagcagagtaggcctttcacaaaaaaaacatggcagacagcaagaagaaaatgggcctcagtctggagatgaggttaagaaagttt

SEQ ID NO: 223543 - DNA, 623 bp, Homo sapiens
tcattatattctacagtgcataataaattttgcatctttgtagtataacttattcatgttttacgtgtcagtttaagcatatgttaaggttaacagcctttagaacaacatttctcaaagtcttaagagtgttttctttcttccaatctaattagataaagttatttaccacctcaatgtatccagccaggttttgaaagatagattcagtatttttgatgaactaagacccctgtcatttgttcaacagatgttcccctccaaggctcaccayaatctgccccaaatccatctctctggttttatcttctaaaattccccaccataaagcctagctcctaccaaatcagtccattttcagcctcccaaatataaaatgaacatttctatttcaaactttatgataagaccattcttctctctaaagcactctctccctttcccactgaatgtcctccaagacgttttcagattgtttcactcattcattcattcattcattcaatgcagactgagagcctacatatacgaggcactcacaaaggaatcctgggaaaacaggaacaggtaagtccaagcaagtacctgtttgagtggactctatattctaccagaaaagacac

SEQ ID NO: 223544 - DNA, 539 bp, Homo sapiens
tttctcccttggaattaatgagttatctgtggratttattctctgaaattaataaataatctttaagggaaaggtgatataaatttctgttccttaacacccaggttttaacatccagtgatgatccttgcctgaattaattgtcattattctttaaaaaactttttttaatattccttcttctctcccaccctctcctctctcttccttgaatccttccttttctctctcccctactttcttgcctcctcctctctctctttctgtctctccttcccgtcctccctttctccaacacacatgcacacagtttttctctgtctcactcacactcacaaacagagtgtctctgctacttctctttctctctcttcctctacctttcctcctttccctctttttacctcccagtgttatgatttaatacattgttattctttttgaagcttccagattctttttttttttaattgagaacctctcctgtgtccttttcagatgatgccatagctattgttaagcacttcctggctttctgg

SEQ ID NO: 223545 - DNA, 539 bp, Homo sapiens
tttctcccttggaattaatgagttatctgtgggatttattctctgaaattaataaataatctttaagggaaaggtgatataaatttctgttccttaacamccaggttttaacatccagtgatgatccttgcctgaattaattgtcattattctttaaaaaactttttttaatattccttcttctctcccaccctctcctctctcttccttgaatccttccttttctctctcccctactttcttgcctcctcctctctctctttctgtctctccttcccgtcctccctttctccaacacacatgcacacagtttttctctgtctcactcacactcacaaacagagtgtctctgctacttctctttctctctcttcctctacctttcctcctttccctctttttacctcccagtgttatgatttaatacattgttattctttttgaagcttccagattctttttttttttaattgagaacctctcctgtgtccttttcagatgatgccatagctattgttaagcacttcctggctttctgg

SEQ ID NO: 223546 - DNA, 570 bp, Homo sapiens
gaatcaaaatattttttgctttagcaccagttttttccacaaagtacttaaaaagtcctttaattagaatgacatacaaatggaagtcaatagtcatggtatgttctacctttattttatgtcattgataacccaaagtgataattttatgctttcaaataagagatcttgactatacgtagacaaccacaagtatggattgaaatttttggtttcatttacactacattcttgtttttgtttctgcaaaggaatacaattttacttattataactttagaaccctactgtgagaagaaattcagtggccaaaccatctccacaccctgcttccaagttttttcctttatttaaaattttcaaactactgtgagataatttatttggttttatagatagtgaattaccacaacatttctttagcacttattgtggtcatccaaatgtggataaaataaatttattttacaggctttttcaggcaacaaagacttcttgcctaaaacctcatttaaaaaattcrttggttcaaagctgtgtccactacagatttttgataagatttgcctc

SEQ ID NO: 223547 - DNA, 609 bp, Homo sapiens
tgtggttctaaagcctcagcatattcattgaggccttgagcttaacaaagtttctgttgaaaatctggcaaaggcaaaagagttgcaacaccttttggactcacaccattgatacctctgaccctgatgacaaatgccaatttgggttctgccagtatatagcagttgccagctttttttgccagcctagccatttgaatctcagttatgggcatctgcctatagtccttgtgatagtgcttagctttttcatagataagcttcctccttgccttttgaagcatattttccttcttaggcattttgatcttcagctctgtgaaattcttttgctctttcttaaaagtttctggcacagcaggaaccttctttttcttctcttcagcacccttcatggttccagccagaaaagacatcaaactgttttgtacttcaggattttaatttatttttgttaaytatgcgtacatattaggaagaagaaaataattgcctttgctgatacttgctttctgttggtactggtattctgtggtatgataggaagtgcgcagatttatgaactgattggcatatattaatgatataacccgggcaacccgcttgggt

SEQ ID NO: 223548 - DNA, 517 bp, Homo sapiens
ggagtaagaaatgtgaaactgaaggaatagagggaatgaaggaggaaagtaataccagggtgggtaatagagtggtggtgaagaggtgatcatttcaaacttaatgtgtccaaatctcacctctggatttccctttaataacttttcagtttsctagtctttaccagctcattaaatggcaaaataataacttcattgggccaggtgagaaatctgctcatgtctaaaaactccaagtctagctcattctagctcttaaatttatctcaaatctgtctgcacccaggccatcactctagtccaagcgactgttagttctctgctgttgacctgagtctctgcctttgacctgtgtttatgtgaacccctctaacacatctttctcatagttgccagggcaatctcctaacaggctaaattgtttatcatcattccacttatctcacacaactctcgtcctcattctcaattcttcagtaatttggcctactttcagctcctcaaacaagcatcttcc

SEQ ID NO: 223549 - DNA, 470 bp, Homo sapiens
aatgaaggaggaaagtaataccagggtgggtaatagagtggtggtgaagaggtgatcatttcaaacttaatgtgtccaaatctcacctctggatttccctttaataacttttcagtttcctagtctttaccagctcattaaatggcaaaataataacttcattgggccaggtgagaaatctgctcatgtctaaaaactccaagtctagctcattctagctcttaaatttatctcaaatctgtctgcacccaggccatcactctagtccaagcgactgttagttctctgctgttgacctgagtctctgmctttgacctgtgtttatgtgaacccctctaacacatctttctcatagttgccagggcaatctcctaacaggctaaattgtttatcatcattccacttatctcacacaactctcgtcctcattctcaattcttcagtaatttggcctactttcagctcctcaa

SEQ ID NO: 223550 - DNA, 315 bp, Homo sapiens
tctatttttacctgtgtttagatacacaaataccattttgctacagttgcctacagtattcagtacagtaacatgctgtacaggtttgtagcctaggagcaataggctgtatcaccctagcctaggtgtgtagtagactgttcatcaaggtttgtgttagtacactctatgatgttttgcaaaacaacaaaattgccttatatttcttagaacatatyctcacgggtaagttatgcatgactagttaaattccccacatagacgattttctgggacccattattaacagagaatttcagacttgttggtgataag

SEQ ID NO: 223551 - DNA, 594 bp, Homo sapiens
tagtttcttaacctaaaacaagagtgttttagttccattttataggcggggagtctgagccaaacatgttatgtcactttccaagtctccatagcacagaagtcttctgtctccccatcctgactttcccagctcatagggactgtcaaaggcagcagctctggccggctgtgatgcctcatgcctgtaatcccagtaatttgggaggctgaggcaggaggatcatttgaacccaggggttcaaaaccagcctgagcaacatagtgggaccctgtctctacaaaaaataaattaaaaaaaaaaaatagccaggcatggggtatgtgcctatggtctcaggaactcaggaagctgaagtgggaggatcacttgagcctgggagttagaggctacagtgagctgtgaytgcaccactgcactggataatagtgagactctgtcccctaccaaaaaaaagcaaaactatatacagatataaagtagcagctctgttgctgatagaaggaacagtaatgaggagccctgcaggtcttattccactctttctagctgcaagctttcttcctggtggcagatgacatcatggattcatcc

SEQ ID NO: 223552 - DNA, 481 bp, Homo sapiens
tctgccagtcatttcattaaagactggatgtgaagttgagtgacagatggttccctgtctttgaggatctcccaatctggttggagtagagggggagtcacaaagataacttcctagcattgtgctaatgtctaggaaccagctgtgtcaggtaggagtggagtcaagggaagggtgactcattctgctcagggtatcttattaagttccacaaaggagatggcaggtgggttgcaggttaagtgtgcgtagggctttgccaacccagaaggggcactcccggtagaaagaacagcatatgcaaaggctcggrgtcctagaaaaggcatattggaaggtaaccgagaaacgtgatgtggctggaacagagaagcattgggccttcatgcaggcggtagtgagaatggtgagagatgatactgaaaaaggagactggaatttggtcttcctttcaggatactcatggggagaattaccagct

SEQ ID NO: 223553 - DNA, 534 bp, Homo sapiens
cccatctaccttgcagttatttagtaagtggataagaaactccaggctgtgagcttgcagactgtttgttcagccgccatggaaatgtcaagggtggacacctctgatgaagtctgctcccaggggctgcagtgcccttactcgcaccacatattctccagtgctttgtctggtgccatttaaactatctcaggcaacagtccaagttctgcaaggacatgccrgttgagagcccaatctgcagaactcctcccaagcagccttcattttactggtcaggggctaacagtgctttctcgtcctgtgtaaccctgaggcaaccacccaccccacaacccaatgggcatgggcagatttggacaaaatctacaaagcctgatctcttggggagaaacatcaggggccagtcatcctgactgggccaagaggggcagctgtgacagagggcacgttacttggcctggcttcaatgggagcatgccaggcagggcagcaggctcctgctgattagcacgtgcactgggtgaaaatctg

SEQ ID NO: 223554 - DNA, 588 bp, Homo sapiens
aaaacaatgggtagaagaaaatctccattcagaaatctacttgaagagaagatttgggtcgggtgatattagttggaggttaaccccaagatttcttcacttgtaactgtaagtggaccctgttgaactttcttctctgggagatgccaacaggaatgggcttatggagttggaaagcccttgaatatgtcaatgggggaattggcttagatgctgaatgacattcttgtttctcttcaatagtttcctgaatataaattgtccccaagaaaactgttaagttgttgaggaaagcacttgcgtttttaagttaatctgtatcccacacacagcctaaaatgaggataggcaactacacaggctcagacagaaaagggtttgaataaataaygccacactcccttgggttcgcatattttgacaaatatttacaacagtgctcactctgtgcccagctctgtgctaaaagctttacatgttttgtttcatggaatccacatcatgagtctatgaggctggaatattactagctccatttcacccacgaagaaaccaagccacaaagaggttaacaaacctgcccaaatt

SEQ ID NO: 223555 - DNA, 497 bp, Homo sapiens
gctaagaagaaacattaaggcctattgggagcatagagagttcctagatgtgaagaatgttgatctttcatgtgatgtagccaatgtgagctagagaagtgacattgagtagacttggaggaagtgaagtgtgatctcaaatcagcattcttcagctgtctgccctgtcttggttggaaatggttccaatttrgtcatttctggtcagatttgactgcaggagggtggttctcaaatgcggtgtggctggtttccatcaaagagtcaacttaaggaaccctcagccacccctgaactctccatcttgtttgtcctgctcccatctggtgcagaaatagcaaaatgggacccttgcccttgggtgaaccaagtcctctgatccctttctgtagctctctctgatacaccatgagcacatcaacgatggaggaagagaacagaaaaaagggaggtggggcagggatagagggtcaaccctgctgtgattggctggagca

SEQ ID NO: 223556 - DNA, 596 bp, Homo sapiens
tgtgtttccttcttaaattgtgyatcctcctgggacatggaaagccggctcctctgtctggcacaaaggtccaggattaggtgcagctgatttactgcagctcacccacctgggacaggctgaatctatcatctcactgccaacctctcacagacttccaagaagttcacagcacaacatacctgcccacttcttagtcattcaagtgggtggaagaaggctgattgagggctggaaggacagcatggaacaggccctccattgcctggcaacactcagaagccagagctagggaacccaagaggaggcagctccagggctggaatggctctgtcttggttctaccagggacatgcaaaagcaggggcagtaacctgtcctccacttcccatgcctgacctggggcttagggttgccacagtatgtcgcaccagtaggtaaaatggttgtgggaagcactgaatggcagaagaggcaagggtggagagaagggaggaataaaaagggaagccagagagatgaaagagcccttgggagaaaagagctcctggtgccaaaaggcagcaagctgctttgatcttcaggcagaagaagaa

SEQ ID NO: 223557 - DNA, 483 bp, Homo sapiens
tcaaatggtttgaagaaatgatatctaaatctcaaaggcctgatgatttctctcaattcattctttctttctttctttctttctttctttctttctttctttctttcttttcttttctcttctcttctctttctctmtctctttctttctttcttttttttagacaggatctcactctatcgcccaagtggagtacagtggtacaattatagcttactgtagccttgatctgccaaactcaagtgatccttccacctcagcctcctgagtagctgggattatgagcacatgacaccacatctggctaattaaaaataaaaaaaaaagtttagtagagatgtggtctcactatattgcccaggccgttcacaaactcctgagctcaagccatcctcctgcctcggccttctaaagtgctgagattacaggtgtgagctgccactcctagcctcgaatatttctttaatctgtcttcccctctcc

SEQ ID NO: 223558 - DNA, 537 bp, Homo sapiens
agaattcttttaggttgttggtatgtatcagtttttttaaactatgtatttcctccaactcagttgartaccactgcagtagaaagccagtcaccactgaaaatgtttaatatccctcagaagtgctgaggttgaatactacagacaagcactcttacacaacacttaatgatgtcaatttcaaagtggagttcaaaatctgaacgatatgagtcagaaatgctttagtcaatggtcaaatgtcacagaacacaaatgatgtgaccattacctatggctggtcctccgggtgtagtcacacaaccacttttatgaaaaatatatcttaaaaagtgttaagtctatgtagtatgattcatgtatatggtgttaaaaaaaaactacaatgaaaagtaacaatccacactcctatcccttccacctctagtggcaacccttgttaaccagttcttttttgttcttttggtaattaactccttaaactgaaatcatatgcttacatcattatttcatgattcatcagctttgaatgtattg

SEQ ID NO: 223559 - DNA, 538 bp, Homo sapiens
aagaattcttttaggttgttggtatgtatcagtttttttaaactatgtatttcctccaactcagttgaataccactgcagtagaaagccagtcaccactgaaaatgtttaatatccctcagaagtgctgaggttgaatactacagacaagcactcttacacaacacttaatgatgtcaatttcaaagtggagttcaaaatctgaacgatatgagtcagaaatgctttagtcaatggtcaaatgtcacagaacacaaatgatgtgaccattacctatggctggtcctccgggtgtagtcacacaaccacttttatgaaaaatatatcttaaaaagtgttaagtctatgtagtatgattcatgtatatggkgttaaaaaaaaactacaatgaaaagtaacaatccacactcctatcccttccacctctagtggcaacccttgttaaccagttcttttttgttcttttggtaattaactccttaaactgaaatcatatgcttacatcattatttcatgattcatcagctttgaatgtattg

SEQ ID NO: 223560 - DNA, 564 bp, Homo sapiens
ggacaatgagttaagctaggccaggagggggttcagctccccataacaaggcaggggtggccctttgtgtccggcagcatggtagcccccccgcaggagctccggctaccctttgtgtttgaccttgtggaagggcatgggaaatgctggcctgtcagcaggcataaactcaaaagtttctccttcagctaatttcagggactgtctagccaagtgaatacacaggattaggtaatccatggatcctgcgagggcaattggctgattggcttaggtgtgcccaagagccctgcaggtgtcagaacaaatccatgtagaaatgcagacgcccacaccrgcttgaatggcataaaggcacacattggaatgtggctcatgagctgggacccaggatcaaccactggtttaaggagaggaccgtgaaatgtccaaacatggaggccaggccacctccctggatgcctggctgagggcagccacatgtctgcagcggtggcttgtgtccatgactgagatgggcagggtttgcaggcagtggtgatcccatcagcagtccccagatct

SEQ ID NO: 223561 - DNA, 561 bp, Homo sapiens
aaaggaaaataaattggagaggcagggcagtagagtgggagaaatatacctgttactcttcgccttgattttttcacttttatgatgtgaacaattcctctctctctttttttttttttgagaatatttattgcgtcctcactattttaggtgctggcagtaaagctataaagttctcctagaacttatatcctactgagagaggcttataatgaacggagagacaaataaggacattagataatttcagatagtaataaatgctataaagaaacaataaataggtcagtatgatagcaagtgacatgtatgtggtttcaaaatactagataagttgatgaaggaagaaagaatagaggaaagaaagctaagggctaagccttataatactcccaacagagtgcagagaaagaagcaacaaaggattaacaacatcgaagtatgagacaaaactatgtataggattaaaggagwttatgtatatgaaactgtgaacttcattaacatgtttccttaaacatcttgtctggcatagtgaagggaatcaaagttgtaaaagaa

SEQ ID NO: 223562 - DNA, 572 bp, Homo sapiens
acttatatcctactgagagaggcttataatgaacggagagacaaataaggacattagataatttcagatagtaataaatgctataaagaaacaataaataggtcagtatgatagcaagtgacatgtatgtggtttcaaaatactagataagttgatgaaggaagaaagaatagaggaaagaaagctaagggctaagccttataatactcccaacagagtgcagagaaagaagcaacaaaggattaacaacatcgaagtatgagacaaaactatgtataggattaaaggagtttatgtatatgaaactgtgaacttcattaacatgtttccttaaacatcttgtctggcatagtgaagggaatcaaagttgtaaaagaataacataacacaaagcagatagyggcatctttcataaaagtggtatgataaagggttatgagagtttaaagaaagttaacaatatagatcaggataaatattcgttctgcagtcccagcttaagcaatgtctctctggagctttccagacttagcagaggtgattgcctcttccttttgtcactaccatagtgt

SEQ ID NO: 223563 - DNA, 400 bp, Homo sapiens
ctagatctctgtataagatggtttgctttagcttgagatccatcagtgagaattatccatgggcaatgtccagaaatcacattattgctcatagaccttgtagccttgatataatggagaactgtacactgtcttccctaggaagctaggatggttgtttctgatattgggacccattgtacacttggccaaaccagtgcccaaatatgtcccaagatttttacctaagactttcctcagtatccactggtcgtctggaagaataaacttctgagtggyggcaactcatgatccctcctctgttggtacagaggtaaatgcatctttgttgcacaatttacaatctttttaaggaaaaaacatgattttgatcattgaactgcatgttcttgtaaacttt

SEQ ID NO: 223564 - DNA, 635 bp, Homo sapiens
attgtgagatacggttgtttaaaagtgtgttgcacctccccacttctctccctcctgctccagccctgtragacatgcctactccctctttgccttccaccattattgtaagttttctaaggcctctccagaagcagaagccactatgctttctgtacagcctgtagaaccatgagccaagtaaacctcttttctttataaattactaagtctcaggtatttctttacctaagtgcaagaacggactaaaacacaactttagggtaaattcttagaagatggattgctttcatggggcaaacacatgtgtaattttgtttggtgttgccattgtccttcacagaatttgtagcactttagattcctgccagcaatgtttaacacagctaaaattgtgtttaaaaaaaaacccaaaccatgcttgataacagtgaatatgtatctgctccccaaattccaaattatattagaaggccctgcaacagaaggatagaaggagaattaagtcaattcaaatatgcaatataaaagtaataccttcaccaaaagacaatgcttctaccctgagttactataacacttacctgtaaaggagttgcacaagtataaatcgtgttttgttgaactgtctgtaa

SEQ ID NO: 223565 - DNA, 635 bp, Homo sapiens
attgtgagatacggttgtttaaaagtgtgttgcacctccccacttctctccctcctgctccagccctgtgagacatgcctactccctctttgccttccaccattattgtaagttttctaaggcctctccagaagcagaagccactatgctttctgtacagcctgtagaaccatgagccaagtaaacctcttttctttataaattactaagtctcaggtatttctttacctaagtgcaagaayggactaaaacacaactttagggtaaattcttagaagatggattgctttcatggggcaaacacatgtgtaattttgtttggtgttgccattgtccttcacagaatttgtagcactttagattcctgccagcaatgtttaacacagctaaaattgtgtttaaaaaaaaacccaaaccatgcttgataacagtgaatatgtatctgctccccaaattccaaattatattagaaggccctgcaacagaaggatagaaggagaattaagtcaattcaaatatgcaatataaaagtaataccttcaccaaaagacaatgcttctaccctgagttactataacacttacctgtaaaggagttgcacaagtataaatcgtgttttgttgaactgtctgtaa

SEQ ID NO: 223566 - DNA, 566 bp, Homo sapiens
tctgggactcactctagagactgctgaagctctgtcttaggctactgaaggaagagtttaaagggattctccattagaacacctgctgccagaggctagatgattatcctgtctttctgatggcagttcataaatgaatggttactactctacctggaaagttgtggcagatcctcatgggaaaatataagactaaaggaattcaatagggtaaactttaatgtgttttctcagctattatggaagacattgaggacataaaaggccagatcacatgggttgataccaattcatgaccagtgattaattaatgcaaaaatagttgatkcgagtacttgttgcctgagatactacctttatgggaattaaaaagacaaatcaaactgggacaagctgatgcccaccaaaataaaaactctaccaggattggaaagcgactggagtcaacaaataggtattttggttcattacctagaagtaactacttatatacatgaaaggaatggtcacagaaggacctaaaccaacagaagcaccagaaaaggtataaattgtttaccataatg

SEQ ID NO: 223567 - DNA, 566 bp, Homo sapiens
tctgggactcactctagagactgctgaagctctgtcttaggctactgaaggaagagtttaaagggattctccattagaacacctgctgccagaggctagatgattatcctgtctttctgatggcagttcataaatgaatggttactactctacctggaaagttgtggcagatcctcatgggaaaatataagactaaaggaattcaatagggtaaactttaatgtgttttctcagctattatggaagacattgaggacataaaaggccagatcacatgggttgataccaattcatgaccagtgattaattaatgcaaaaatagttgatgcragtacttgttgcctgagatactacctttatgggaattaaaaagacaaatcaaactgggacaagctgatgcccaccaaaataaaaactctaccaggattggaaagcgactggagtcaacaaataggtattttggttcattacctagaagtaactacttatatacatgaaaggaatggtcacagaaggacctaaaccaacagaagcaccagaaaaggtataaattgtttaccataatg

SEQ ID NO: 223568 - DNA, 372 bp, Homo sapiens
gtttttgcccaccaagttatattcttctgatcaaggaagctattttacagcacgtgatatacaacaatgggcaaataaacaccacatcgaatatatatatcatatcctttatcttctgcagagtagtggaaatatttgaagtcattaattgaaatacctgccaaaaaaaaaaagactggggcagataggtcagtaataaaggatgaaagagctggtttacttgttttcaagttgtgcattaaaattaaacatgagataatcatgtggttttgtttttagttctggtttctgtgatgaataacatttattgatycatgtttgttgagccaaccttgcaccacaggaataaagcctacttgattgtggtgtatt

SEQ ID NO: 223569 - DNA, 539 bp, Homo sapiens
tatgcaggattttagaaataaattaatgtttgtactttatatgtgcataaataaatcaattaaaagtttttcagttttttttgagacagggtctcactctgtgctgatgtcaattccctggtctcagttattgtacttgataatacatgggagggcataatctactgaaattacttaaaataagaaacagaaaaacaaaaggaaaatctaagtttccaaattasaagaatggaagaaatattcagcaaaaaaattggaaaataattgttgagtactgcttcaaaaaagaatagacaagagaagatactgttaattcaactaaaaattggcactagctctgtgaaaattaactctgtgctcataaataaatgataacatcccctagattcagacaagccagtatttaaatgtcagagagtttagaagaagccatcaaaacattgacatggtgaagcctttcaaatagaagagaaaccaggagaatgtgttgttccatagaccatgtgaggcaggtatttcaaaatggaaggatgggaaac

SEQ ID NO: 223570 - DNA, 543 bp, Homo sapiens
cagtagcaaaatatttatcaagcactatgttgtgcttcatgtagcaaagaagctggaagaaaatgacaaccctaaccacacctcactgcaacttacagtgtcctaaagaaaagcaaaatgtaaatakgcaaataaattgcaaggctatatataggtgactgtgagtgagtgtgtgtgtgtgtgtgtgtgtgtgtgtataaacagtcatgcatcacttaatgatagggacacgttctgagaagtgcgtccttaggcgatttccttcttattcaaacattatagagtggacttacacaaacctaggttttatagcctactaggtaactaggccatatggtatagcctgtcgctcctaggctgcaaacctgtacagcatgttactgtactgaatactgtgggcaactgtagcacaattgtaagtatatgtttatctcaatatagcaaagtacaataaaaatacagtataaaatattaaaaacggcagacttgtatagggcttttaccatgaatagggtgtgtaggactgaaagttgctctcagtaa

SEQ ID NO: 223571 - DNA, 589 bp, Homo sapiens
  misc_feature (1)...(589): n = A,T,C or G
tttggttttttgtttgtttggtttgttttgttttgttttgtttttgagacaaagtctcattctgtcacccaggctgaagtgcagtggtgccatctcgactcactgatacctttgccttctgggttcaagtgattcttctgtctcagccttcagagtagctgaaattacaagggcacaccactatgcccgctatttttgatttttagtagaaccagggtttcaacatgttgaccaggctggcctcgaactcatggcctcaaatgatccactcacctcagcctcccaaagtgcagggattacnagcttgagccacttcaccctatttattaaaatattttaaaatgcagttgtactttttctttgctacttccatcttgtctattaatctgtttttggtctttaggactgtgtttctttccttttgtggaaaatggtcattctgaatcttcaggacaaacacatctggaaggtgatactgtacaaattatttgcaacacaggatacagacttcaaaacaatgagaacaacatttcatgtgtagaacggggctggtccactcctcccaaatgyaggtccactagtaagtgca

SEQ ID NO: 223572 - DNA, 472 bp, Homo sapiens
agggcttgttcaggggaactcccatttataaaaccatcagatcttgtgagacttactcactaccatgagaacaatatggggaaayagtccccatgattcaattatctccacatggccctgcccttaacatgtagtaagatttgagcagagacacagagtcaaactatatcattccaccctggtccctcccaaatctcatgtcctcacatttcagaaccaataataccttcccaaaagcctctcaaagtcttaactcattacagcattaactcaaaagtccacagtcccaagtctcatctgagacaaggcaagtccctttgtaaaatcaaaagcaaattagttatttcctagatacaatggtacagacaatggtgcagacaatgggtaagtaaacctgttccaaatgggagaaattggccaaaacaaaggggctacaggtctcatgcaagtacaaaatccagcagggcagtca

SEQ ID NO: 223573 - DNA, 419 bp, Homo sapiens
ctggggtctcaaacaagtggactaactgacacgaatgcatctgggaggaggagaccattcatcctctgtacatggaactgtggtctgcacatttgaaagactgtagccaggatatcctcaacttttacagattgactctgtaaagatattccttcatattttgtgttatatccattctccaaataactgagaatacattgtcctaaagaccataaaatgattaaaaggtagattagraacatgaatttgatcaaaatagtatattaaaataattttttgaatatttaaataagactgcatcagtacacaaaaatgacgtatcactgaaggaaaactaaagctactactaaatgtttgtacaaaaaggtcagtattcaatgttacttatctttagtttttatgataaaatatgtttaaat

SEQ ID NO: 223574 - DNA, 371 bp, Homo sapiens
ttatcatttcatttcctctcctcacttatcatgtcaattgtactatttttttagtagttgccctagagtttgcaatatacatatgcaactaatccaagttcattctcaaataatgttatactgcttcacargtagtgtgagtattttacagtaacaaaataatcctaattcctccctcccatccttatatcattgctgtcattcattttgctcatatataagcatacataagtggatatttatgaatacattgttgctattattattttgaacaaactattgtctgttaaatcaattaagagtaagaaaaatacattttttaaattttaccttcgcttattctttcttcagtgttcttcttgtatgtagat

SEQ ID NO: 223575 - DNA, 595 bp, Homo sapiens
agataaataaaaaataaataaaagtagaagtcagagagaggtccaggctaattaattaatgaatttcaaagtcattaatatatagatagcatttacagtcaggagtcttgatgaaatctctaaatgagtgagcatggacagggaaaagaggatgtgcaaagactgatcctgtttagaggtagagagaaatgagaaactatgcagcaaagagcctgagraaagaagcacaagatgacaaaaggaaaagcagggtagagttttgattgccctgaaagccaagtagaaaagctatcttcaggaaaaagactagtctatgtcaagtacagtgaggactgaaaaaggatcactggatttagcaatgtgtgggtcactgttgaccttgattaaagcagtttgggtggatagtggggtcaaaagtctacctgaatatatttaaaaaggaatggaaagagaaaaattggagacaatgttcttgacaaccctttcaaggactattgctgaaaaaggaagcagaaaaatgcaatagtatgacagtgatttggaatcaaaagagggttttgttactgtcttagtccattttttgttgctataacag

SEQ ID NO: 223576 - DNA, 595 bp, Homo sapiens
agataaataaaaaataaataaaagtagaagtcagagagaggtccaggctaattaattaatgaatttcaaagtcattaatatatagatagcatttacagtcaggagtcttgatgaaatctctaaatgagtgagcatggacagggaaaagaggatgtgcaaagactgatcctgtttagaggtagagagaaatgagaaactatgcagcaaagagcctgagaaaagaagcacaagatgacaaaaggaaaagcagggtagagttttgattgccctgaaagccaagtagaaaagctatcttcaggaaaaagactagtctatgtcaagtacagtgaggactgaaaaaggatcactggatttagcaatgtgtgggtcactgktgaccttgattaaagcagtttgggtggatagtggggtcaaaagtctacctgaatatatttaaaaaggaatggaaagagaaaaattggagacaatgttcttgacaaccctttcaaggactattgctgaaaaaggaagcagaaaaatgcaatagtatgacagtgatttggaatcaaaagagggttttgttactgtcttagtccattttttgttgctataacag

SEQ ID NO: 223577 - DNA, 565 bp, Homo sapiens
ttgaaattcagaagcatgaggcccaatccaagctcatagggaagagtaccagattgattagtgatgtstttcatggacacaggagtcaggaatagcagcatatgcattacatatttattatcatattatttctaaggcttctactggaatgctgctgtgcatgaattgtcacaatatccctcttacatgctttcaggaaataaaagctattgtgtcattgttcatattttatgttattctttccaagtggcccagattttccagaggcatctgagaggccactaatctctcccctctagaaataaggtcatcatgttagcaaacttcctctgctctgacacagttgtggttttaatggagaactaatgtcttcatcagtatctgtgctatttcacacttcatttcctccccaactcttggatgaaaaccatccagtcctggtgatttactttgtgggagtttctttcaagtttgtttccttctccaaggatgtcacacaagcattttcagggctccagctggggagcacccagccttgaaacatcagcgtgtgatcaagtcactc

SEQ ID NO: 223578 - DNA, 565 bp, Homo sapiens
ttgaaattcagaagcatgaggcccaatccaagctcatagggaagagtaccagattgattagtgatgtgtttcatggacacaggagtmaggaatagcagcatatgcattacatatttattatcatattatttctaaggcttctactggaatgctgctgtgcatgaattgtcacaatatccctcttacatgctttcaggaaataaaagctattgtgtcattgttcatattttatgttattctttccaagtggcccagattttccagaggcatctgagaggccactaatctctcccctctagaaataaggtcatcatgttagcaaacttcctctgctctgacacagttgtggttttaatggagaactaatgtcttcatcagtatctgtgctatttcacacttcatttcctccccaactcttggatgaaaaccatccagtcctggtgatttactttgtgggagtttctttcaagtttgtttccttctccaaggatgtcacacaagcattttcagggctccagctggggagcacccagccttgaaacatcagcgtgtgatcaagtcactc

SEQ ID NO: 223579 - DNA, 565 bp, Homo sapiens
ttgaaattcagaagcatgaggcccaatccaagctcatagggaagagtaccagattgattagtgatgtgtttcatggacacaggagtcrggaatagcagcatatgcattacatatttattatcatattatttctaaggcttctactggaatgctgctgtgcatgaattgtcacaatatccctcttacatgctttcaggaaataaaagctattgtgtcattgttcatattttatgttattctttccaagtggcccagattttccagaggcatctgagaggccactaatctctcccctctagaaataaggtcatcatgttagcaaacttcctctgctctgacacagttgtggttttaatggagaactaatgtcttcatcagtatctgtgctatttcacacttcatttcctccccaactcttggatgaaaaccatccagtcctggtgatttactttgtgggagtttctttcaagtttgtttccttctccaaggatgtcacacaagcattttcagggctccagctggggagcacccagccttgaaacatcagcgtgtgatcaagtcactc

SEQ ID NO: 223580 - DNA, 555 bp, Homo sapiens
agaagtttcatctcactagatccccatatttaagtgtgaatcctgaggcctagggaagaaaagtgatttgctcaaaatttcctatctagtactagcagagctgggagtatcatgtgtctaaccccattctttcccactacaagctgagtcacttccatgagcatctccttggtacctgctacctgggggactctctggtgagctctgaggggaatgcaaagatgattaaggcactatccctgtcttcaaggtatgtacagtccaagtgctgakataagaccctctcctataatcaagacaggctatggtacctattggtacccatgccgaagcaaatgacaatggctttggtcttcctacaacccaatatatggatgtttactgaagaactttttaagttacagtcaacttctacttttccagaagaactacaagaagccaggattaacatttatatcatgaggatatgccaatttttcaaaagttctagtacattaagcccaaatcctagccaacaaaatttcttttttctatgaggacagtgttacacaaaag

SEQ ID NO: 223581 - DNA, 570 bp, Homo sapiens
gggcaggcaagactttttggcctgtgtaagacagttccatcagtgccccatctttccctactaagttacttgagtcagttgcaaccrgagagaacttaggtgtgcacagagaagggctgagggcataggagcaaataattccagctctagaattctttttagaattttacctgcactaaaagctgtgagacctttgccaagccgcctaactcctttgtacctcagttttctcatgtgtaaaatggggccggtaatactagttcttggcttgcagagcttgaagcaggtgacataaatccatgcaaagcacttagcacagggtgctaaagtctggagtaacaagctcagtaaatattagctcttcttaatttgtgcagaccagaaagagaggagatacagaatgaaacttgatggcaagagaggaaggccgtggaaataaacacttatcttgttctctttgtctttcctggaaggagaggcctcttgatagcaaacaccttctgctgttttctgagctgactcagaagttctcatatcctgtgggaaaggcaaccaaggatagtaatattg

SEQ ID NO: 223582 - DNA, 570 bp, Homo sapiens
gggcaggcaagactttttggcctgtgtaagacagttccatcagtgccccatctttccctactaagttacttgagtcagttgcaaccggagagaacttaggtgtgcacagagaagggctgagggcataggagcaaataattccagctctagaattctttttagaattttacctgcactaaaagctgtgagacctttgccaagccgcctaactcctttgtacctcagttttctcatgtgtaaaatggggccggtaatactagttcttggcttgcagagcttgaagcaggtgacataaatccatgcaaagcacttagcacagggtgctaaagtctggagtaacaagctcagtaaatattagctcttcttaatttgtgcagaccagaaagagaggagatacagaatgaaacttgatggcaagagaggaaggccgtggaaataaacacttatcttgttctctttgtctttcctggaaggagaggcctcttgatagcaaacaccttctgctgttttctgagctgactcagaagttctcatatcctgtggkaaaggcaaccaaggatagtaatattg

SEQ ID NO: 223583 - DNA, 592 bp, Homo sapiens
aaactctgaaatcaaagccggctggtggttcaccttggtattgaggcattagcagtggtgttatttaaggtgctattcagtgtggggtaatgggaggaaaagacaggtatgtggaggatgtgggcgctccgtttcttggaatgcctatttgtgtttatgactctgatctgttgtcgcatgactctgctcttcctttgaaaaatcaaaatatctggacctggtcagttgtaggtgaacagttactgtattgcctttctctttctaatttttccccttccaagactaggcctggacctccacccctctgtaagcccctgcaggtagcctgtgaaaccccagggctcctcagacttcccaggtatccaataacctycgcttccttttgggggacctgcagggggtaagtgggaggcagacatcttgcttggtctttgtcaatcagtttcaggccaaaaacagccctgaaatggagtcatttcagggtggatcgcctgtaggatgcactcagggcgaaaagttgaagcctgtagcagggaaacctaggtagtgcctagggaattagcctcataaactgcggaccccacccttaccc

SEQ ID NO: 223584 - DNA, 417 bp, Homo sapiens
ttaagactttcattatactttcatttgttacttattggagaatattgttctagccttttaaataagtcaaaagctacttattacaaataataaatgttatcaagagtccagcatacaagttaatacaacaaacagacaaataagccttgcaagttttcatcagaattgaagataggctgcatgtactcatggacattccctgtttgtagagctaagcagctgctcttttggccgtttccatcataattgcacaagggctctggagtcatgccacgaggtacagatactgtcatcttcatgctattatcagacttccatgcaaagaattgcaattcacagctttaggggaaagggatgcaaaaacactggtgmagtgtcttcttttcccagaagctttcacagtagcatggccctaag

SEQ ID NO: 223585 - DNA, 492 bp, Homo sapiens
ctcacttataatgattagttttgaggtgttatgttgcttttccagggctgttgtaataaattaccataactttgatgacttaaaactacccaaaactattttcttccagttytggagaccagaagcctaaaattaaggtgacagtgggggtcacatcccttctgaaggctctagaagagaattcattccttgcctcttccagcttctgttggctgttggcattccttggtgttccttggcttgtagtcacattacttcaatctctgccttcgtcttcccaacaccttcccctctgtgtctgtctcaaatctcctgctgctttctttatgagggcacttgttactggattttggacccagctgaataatcctagatgatcttttcatctcaagatcttaactattatatatgcaaagtttctttttccaaataagctaacttttacaggttctgggaattaggacatgaggcatatcttttggggggccagca

SEQ ID NO: 223586 - DNA, 492 bp, Homo sapiens
ctcacttataatgattagttttgaggtgttatgttgcttttccagggctgttgtaataaattaccataactttgatgacttaaaactacccaaaactattttcttccagttctggagaccagaagcctaaaattaaggtgacagtgggggtcacatcccttctgaaggctctagaagagaattcattccttgcctcttccagcttctgttggctgttggcattccttggtgttccttggcttgtagtcacattacttcaatctctgccttcgtcttcccaacaccttcccctctgtgtctgtctcaaatctccygctgctttctttatgagggcacttgttactggattttggacccagctgaataatcctagatgatcttttcatctcaagatcttaactattatatatgcaaagtttctttttccaaataagctaacttttacaggttctgggaattaggacatgaggcatatcttttggggggccagca

SEQ ID NO: 223587 - DNA, 492 bp, Homo sapiens
ctcacttataatgattagttttgaggtgttatgttgcttttccagggctgttgtaataaattaccataactttgatgacttaaaactacccaaaactattttcttccagttctggagaccagaagcctaaaattaaggtgacagtgggggtcacatcccttctgaaggctctagaagagaattcattccttgcctcttccagcttctgttggctgttggcattccttggtgttccttggcttgtagtcacattacttcaatctctgccttcgtcttcccaacaccttcccctctgtgtctgtctcaaatctcctgctgctttctttatgagggcacttgttactggattttggacccagctgaataatcctagatgatcttttcatctcaagatcttaactattatatatrcaaagtttctttttccaaataagctaacttttacaggttctgggaattaggacatgaggcatatcttttggggggccagca

SEQ ID NO: 223588 - DNA, 632 bp, Homo sapiens
accctttaatacactgatcttcattcacaycaaatatgacctgtcctgaaagtataaggataagcaggtactaacgagcctctcttagacatatcagctcttgcagccataaagattttcctttatgctgcctaggatcttcccgtctgaaataaatcttgttcttgtttcaactaaacttgcagctctgctgtgttcttcccaaattgccaagtatataagatatccaatctgccagcaaactttatcctccctctggatgtgagaccccaaagatttcaatttagacagctttatttactaagctgtcttacaggatattttaaaataattcagttaaggtggttcaggctatttaactgcgtatttggagggagggtcggtgttgatcttccaatttgaatttaactcttgggccaaattattttcctatggcaattctgaaagaagattgatgtgtaaatgggcacgtcacagacaccaaatggagactccagaaacatagctcatttgtttggccttctgctatggctcatttgtggaccctgtgccatttatggtttagctgaggatgcctgatgcctgtattcacagagccatgctgcctctgtgggctgaacactatgctagtt

SEQ ID NO: 223589 - DNA, 445 bp, Homo sapiens
aatagaccttaaatgcagttatactggtctcttcacaatagcacagattgtagaagccttaagaattcacagaaaggggaaatattaaagtaattgagggagttgaggtttcataaggaagtgcagagcatgaaaagaagaactggaagggaggcggggaagtcttgaacaaagacaggactgaatgagcaagagtggaaggcagagagcaaatacagctagttattgtggatgtttcacttttggactaagattggataggggtggatggsaattggagaaatagaactgttaccactttcaaataagtggggacttcgacatagtttggggggattgatagccaaaaaccttaggcaggaagaagggtaaactctagaaatattgcccagctggaatcctggttccaccagttattagctgcgtgaccttgggcaagttactg

SEQ ID NO: 223590 - DNA, 542 bp, Homo sapiens
ttcacagaggagaaaactgaggaacagagaaagaactaacttttccaaggtacatagctagtaagtggcccagtgatgattatcagcctgagcagtctgaaaccaagagactgtgctcatgaccactacactatgttctttctgcatgatgcagttacagtgcagaggggtaaatattttaacaagttgtagcagcagcactgatggaagactggtggtcaaggaaggcattcgagaggagatgaggaataatgaagtcttagaggagcaggaattaaycaaagggcagggagtatatgagcattttaggaagaaggagtgatgtctgtagagatgagcaggctgtggagaagaatctaccaccttgatctggagttgtagttatggctgaataccaaagaaaaggggaaaggagaaaaacaggaagaccaagatggacatcagtgtgtgttgctcaagttcatactcagtagaattggcctgggttgcccagcagggatgtaggagaagtccttcttgataagaccacagttcccctcaca

SEQ ID NO: 223591 - DNA, 324 bp, Homo sapiens
caagttcatactcagtagaattggcctgggttgcccagcagggatgtrggagaagtccttcttgataagaccacagttcccctcacatgaggatgctgggcaacaaggctcaaatggacaattcccagagccagcaaaggactgggatgcataggagacactaaatacacactattaaggtaaaaaatatccatagagaccttctttccaattacccactccccaaccctcacttttttttttaaatcagtgaggaccacatgttcaaatacattaagtgatatgttcaaatagattaagtagtatagctccttggcagaaagg

SEQ ID NO: 223592 - DNA, 625 bp, Homo sapiens
cagtttgccagtattttattggggatttttgcatcaatgttcatcaaggatattggtctaaaattctcttttttggttttgtctctgcccagctttggtatcaggatgatgctggcctcataaaatgagttaaggaggattccctctttttctattgattggaatagttttagaaggaatggtaccagttcttccttgtacctctggtagaattcggctgtgaatccatctggtcctggactctttttggttggaacctacagatagaacctacaggagttgatgatatgtaagagaagtgacaattgtttaagatgacttttaattttctagcttgaacaaccaatgccattatccaagatagagaagacagtaaaaaagaaagcatasctatggaataccgtgatagagaggatagcattatatattggagagtttgaagcaactacataacataaaaatgagcttgttcagccacatttagaaatatttcctggatctcaggagaatggcaggctctggaaatatagatctaaatatcatcaacacatcagtaactaaggccacagaagtagatgacatcattcaaaaaagagcatatcaagtaaaaaaggagaagagagct

SEQ ID NO: 223593 - DNA, 602 bp, Homo sapiens
ctgtacaggaaggagaggtaagatggaaagattggtggaggccagacagaggcccttatatgccaggctaaagactgaatacaattttataggcaatgaagaatcataaagcacttttgagcaagagagtggcatgatcaaaattgtgctttaagagaatgttcatggcgcaaagttatagacttgatcagaaaatggaagattcatagttagggaaattagccactatgctatgatactgtcactgaaataatgaagtgaacaaaatggtaagagcagacatggaaaagaggaaatggagaaaagagaaatgacgtgttgtttctccaattcactcrtacaattggaagtacaagatgagaatatatcaaataaaataaaatgatttatagccttgtgctagattgtgcagtcaaaataaggtctactggtattcagagagatgcctttgagagctagagtagcaaggacaaaattcagaaatgtgagatatgaatgcattccaggagagtagaacagcatgtgagaaggcacaggaacagaacaaagatggtgcaagtgcagctcaaacaagctcatcagaggagaggatacatctctgc

SEQ ID NO: 223594 - DNA, 567 bp, Homo sapiens
ctccaaaagaagaaatggggtcggactagagcccaacattaatgctggaggctgcaacttcaattccttcctcagacgagctgtcagattcgttggtgggtgtggggaaccacaaagaaaagaaatgcttttttttttatattgaaatgttatatttaattatagatattaagtctcgtacgctataatttagatgtataatttcagtacatgatgagttttatattgtacaagaaactgttaaaacaccaaaatttgggttttgtatctgaaatgtgttatttacagttgtagcccttgttttgagagctaatatgccatgtgtttcaayttatttttgccttagctctggttgaagtatgaatttattttaaaatggtttcactggatctgtggtcagtttttcaaaatggagaacaaacgtcagcaggccagaatgaatagacaactcttcaggaattactttagccacattaatgattccatttcaattgtcctggagtgtttccatccagaagttactacactttgaaatgtcactattgagtactgcatcatggccatttt

SEQ ID NO: 223595 - DNA, 578 bp, Homo sapiens
ctgaactcacaccaccagtgttacgagcaatacatgtacccagtttaattgcatttccaaacatcatctctaaaaaccttccatgggtagtattcacaaattttttcaaagtatagaaataggatctatctgacctctaaaaataaaaatattttaartcagaaaattaattacaatttttatttgcattggtactatttgagtataagaaaaaagaccagcataaaacataaatactctaggagaaaattaaggcaatgcaaagtaattgctttttcttaattattagctttgtagtacctctaactgccaaacatgttagctacttgagagagagcctgaagagtcaaaaaataataagcaataagtaacgtagaacatttataaatttacaagatgaattgctatgaaataatttgatttagaaaaaagttggtaacttacaaataacttcctataaacaacataagaaagcaagattaatctgtactgtattttaagagcccagagaaaaaattccattttagaaaaatctgtaattctccagaaagtctgcatatagctttcaaagaggagtt

SEQ ID NO: 223596 - DNA, 506 bp, Homo sapiens
gaattctccaagagccgtgtgtgcccttcttagtatatcatatcagaagacatgctatcaatttgccccattactgggtgtgttaactgtgatcattgggttaagatggtacctgccaggatcttccactgcaaagttactattttcccctttgtaattaataaacatcttgtgaggagataatttcctatagaaatcctgttgatcrtccaactttcacccactgattttagtgttcattgattcttccctgaataaattagtactataataattgccaatggtggttttctaattccatctttccttcagtagttggcattcttctgtaaggaaaagctttcgcttctctgttcatccactcatctatgtacttatttatatcaccatgggctcctggattccggtttacacacttccattttctgccttttctctctgcttaatataaggattaatgagaactccctgattcccaggaagaaaatgtcagcagagctttctta

SEQ ID NO: 223597 - DNA, 505 bp, Homo sapiens
tgtgcccttcttagtatatcatatcagaagacatgctatcaatttgccccattactgggtgtgttaactgtgatcattgggttaagatggtacctgccaggatcttccactgcaaagttactattttcccctttgtaattaataaacatcttgtgaggagataatttcctatagaaatcctgttgatcatccaactttcacccactgattttagtgttcattgattcttccctgaataaattagtactataataattgccaatggtggttttctaattccatctttccttcartagttggcattctcctgtaaggaaaagctttcgcttctctgttcatccactcatctatgtatttgtttatattaccatgggctcctggattccggtttacacacttccattttctgccttttctctctgcttaatataaggattaatgagaactccctgattcccaggaagaaaatgtcaccagagctttcttaggcggaatgaagagaatt

SEQ ID NO: 223598 - DNA, 505 bp, Homo sapiens
tgtgcccttcttagtatatcatatcagaagacatgctatcaatttgccccattactgggtgtgttaactgtgatcattgggttaagatggtacctgccaggatcttccactgcaaagttactattttcccctttgtaattaataaacatcttgtgaggagataatttcctatagaaatcctgttgatcatccaactttcacccactgattttagtgttcattgattcttccctgaataaattagtactataataattgccaatggtggttttctaattccatctttccttcaatagttggcattctcctgtaaggaaaagctttcgcttctctgttcatccactcatctatgtayttgtttatattaccatgggctcctggattccggtttacacacttccattttctgccttttctctctgcttaatataaggattaatgagaactccctgattcccaggaagaaaatgtcaccagagctttcttaggcggaatgaagagaatt

SEQ ID NO: 223599 - DNA, 505 bp, Homo sapiens
tgtgcccttcttagtatatcatatcagaagacatgctatcaatttgccccattactgggtgtgttaactgtgatcattgggttaagatggtacctgccaggatcttccactgcaaagttactattttcccctttgtaattaataaacatcttgtgaggagataatttcctatagaaatcctgttgatcatccaactttcacccactgattttagtgttcattgattcttccctgaataaattagtactataataattgccaatggtggttttctaattccatctttccttcaatagttggcattctcctgtaaggaaaagctttcgcttctctgttcatccactcatctatgtatttrtttatattaccatgggctcctggattccggtttacacacttccattttctgccttttctctctgcttaatataaggattaatgagaactccctgattcccaggaagaaaatgtcaccagagctttcttaggcggaatgaagagaatt

SEQ ID NO: 223600 - DNA, 505 bp, Homo sapiens
tgtgcccttcttagtatatcatatcagaagacatgctatcaatttgccccattactgggtgtgttaactgtgatcattgggttaagatggtacctgccaggatcttccactgcaaagttactattttcccctttgtaattaataaacatcttgtgaggagataatttcctatagaaatcctgttgatcatccaactttcacccactgattttagtgttcattgattcttccctgaataaattagtactataataattgccaatggtggttttctaattccatctttccttcaatagttggcattctcctgtaaggaaaagctttcgcttctctgttcatccactcatctatgtatttgtttatatyaccatgggctcctggattccggtttacacacttccattttctgccttttctctctgcttaatataaggattaatgagaactccctgattcccaggaagaaaatgtcaccagagctttcttaggcggaatgaagagaatt

SEQ ID NO: 223601 - DNA, 571 bp, Homo sapiens
ctgcctctttctgattaccctgcaccccatcatccactccaatctgtcctctacatagcggctaaatagatctttaaaagctcaaacctkcctagacagtaacgcctttctaccttggcctgccatttaggggtctttctgatggaattccagcttaactttccagccttacaggtaaaaattcaccttcgtgttccctaagcatcagtcaaaggaggcctttgcccaatccactccctcaggtgtattcattcattctgccaaccactgttgagcacctaccttgtccagtgcctccatggggcactaagaatacagacagggattaggtgtagaccttgtccttaggcaacatgtggatttgtgggagatgcagattcaattgcagtggtgtgaaaagggcttttagagaagtctagggttagagggattggggaaggggctgtgagagccctaacccagcctgggtttggtggggaaggttttctggaggagagagcatacagtgaggcctcaaaggatgagaaaactggccagacaggcaaaggaaccttatctattaaacagtact

SEQ ID NO: 223602 - DNA, 410 bp, Homo sapiens
gaattcactcactcagcctagaagactcaaattccaacctcagtggccactacagcagatcacattttcacattgggatacagagacttcctagagaggtgcaggtctgaggagagaaaagggccagaagakcttcctgctcagggaaactgaggtaggcagcagtttcctgagatgacactgagcatctcagaggaggcatcaggagcatctgagtagagacaatgtttgagagaactctggaggctcccgaaccttcgtcctgtgtctgtatccacaactgctacttcaggtgggtcttcaagggaactagccgtaaactctgaagtggagaaggacttgcaaggtcaggttgtctacaaggaatggagagttgggaggccagaactcctcccagaaaggagcccagg

SEQ ID NO: 223603 - DNA, 488 bp, Homo sapiens
acctttcagcaagtcccaggcttgtgtgacatacacacctctcactgcactaccatgctgctgggagggacagaaggtctgggaacccccactggctttcctcatctgcttgactgcaccctccctctctgtcctctccccgccccagagtcctacacacagcgctagcttcctctccctgtttcctccctgcagagcccatttaaagccagagcctttgcagatattgtgaccctaagggtcctgtcaccagttctgcagcaatctcagaagggagtggatgttagggaaaagatctccctgcaaagagcacrtgcaggacatccatggccaaatacccacagtcagaacttcccagcctgggtttcctcagctgagtgatttttttttttttttttcctgaaggatcagataatacacatctaggaggaaatgggcatgaagactgattggttcacgctaacacaaacacaggctgctatacgccc

SEQ ID NO: 223604 - DNA, 584 bp, Homo sapiens
aatgaatgcaaatctgtcaacctctaaaggagaaaaaaatatccaagtttattcccttctgacaataggacagaggcatcttattcatgggaccagagttccaccaccgtttgtagagaaactcacctgactgggcatcatagccatacctgatgaagttttaataacctgatatgtttaaagctgaattcaagttaacagaggcctgaagatattagagttgattagggaaagtmcaaaagagaaagaaagaaaattaaatctgagaaagagaaataaaaatgataatcaaattttacagtgggcaattttgttctatttctctgtctcaaagtagaggtgaaagtagaatttccttttattctttagaaaatccacaactggcccaggaggccaggcatgtactcagttcccacctcaagacttcatgtatagcgttctcctatttttaaaagtggatttctgtaaaatgtttcataatgtggattggtttctttggggtctgcctctgcactatagctgcattaaaaaagacattaataacttttccgttaatgggtttttcagagtctccaaagactcac

SEQ ID NO: 223605 - DNA, 364 bp, Homo sapiens
caacatattggcagattgtttgttcttatctgaggttcggggagttccctggagttttaaaatatatgctttctcataagcctcatgtggaagttactgttttaattcttctcccccaccatgctccttgttctcttctttgggacaaactccycacatcctgctgcaggctctccagcttctccagtctgtaagcagctccagtcactgctatactgtagtcagacttctttaaatttgaattctgctaacatttgtaacctcagtaagattggggtggattgagttttgtccctggaaatgccacatagatccagcaccaggtattatggacaaagaagcagagcgtgggatttttcatatt

SEQ ID NO: 223606 - DNA, 364 bp, Homo sapiens
caacatattggcagattgtttgttcttatctgaggttcggggagttccctggagttttaaaatatatgctttctcataagcctcatgtggaagttactgttttaattcttctcccccaccatgctccttgttctcttctttgggacaaactccccacatcctgctgcaggctctccagcttctccagtctgtaagcagctccagtcactgctatactgtagtcagacttctttaaattwgaattctgctaacatttgtaacctcagtaagattggggtggattgagttttgtccctggaaatgccacatagatccagcaccaggtattatggacaaagaagcagagcgtgggatttttcatatt

SEQ ID NO: 223607 - DNA, 598 bp, Homo sapiens
aatgtgattttggccagagcaaacctttttcactatcaaatcatccatgtatagcagcgtctgcaaaagtgtttgacaaaggaagtcacatccatttccttttcactgttaacctagcagagcttcctagaccaaaattttattctgcaagagagctgcaaygacaggaatatctatttgggtttaaataggaagacatttgatcatcctgatcaacgtttgggatctagtgattcccaggttcaccttctgcaaggaaatcccttatcagagcatatcttgacgcttcatggcagggattttactggaaatgaatgttttattctcttaatcattttctccctcatgccaggtctcactaatccagcttacagatagaactccatatttactaatccttttgtgtgtaacccatttttaaaaacagcatcaaactggacactcaaatgtcattatatacatgtgatattttatgcagaacagacttctaaaatgcagaaaagagtcttgattaaaatggaaaccttttaaataatcacagggtataaaattaaatggaataagtctgaagtaatgcaagtcaaccaaaacagcttta

SEQ ID NO: 223608 - DNA, 605 bp, Homo sapiens
acttaggttttgaattctgctgtgaaagagtgggcaaaatcttcccagatacttatgtcttttccagagttgtctttggggattctctatagccacagctaccacaatgtgaggcaacagggattcaggaagaaggctttgatcagtgccacccatttacccaaacccggaaacacacagtccaagccatgtgtagccagcagggtgctgttaattactcttattaccttaataactagagaaccctggaataatacattttttacttgtgaattaaaaatggcaatgcattggctgtgatgctgtcagaatgaaatctgcattaccaaaattctgtgmgtcagaagattaattatatttgtacaatctttttgtgttagtaataaattgtaaaagtacatggagtcttacttaggaagtaattttgagttattatctcaaatggaatgctgctaattttgttggtccagtcaatgtactgattgcagtacttcttctgctttatttttcagagacggagtcatattaaaatcttttggaaatagaaccaaacattgtttaactgttaggttaaccttcactgagtcaattatattcctaatgaa

SEQ ID NO: 223609 - DNA, 506 bp, Homo sapiens
ttttaacatacacatgtccatttcttcttcctggaaattattttaagcccttaatcttgggtaatgttggatccttgagaactagggacgtttaaaactttactgtttctaggttaataaaaagtaagccaataaaaccaatgactattgccttttattttcaaattagtttctatgtcagtgacctacaagtgacaggaatgtcctttgatatgtgtgataaaatctagtttaagagagaattctaattccggagattgcaatccccaagagtggcagtttttgactgaaattgaatgagctaaaattctaaaaatcttagctytccaaattttagtccattgcttcagttttttttgagaaattgctgctttatttagtgatatcatcaaaatccactccaccctttatttctttatgtccttggttctcaaaacttgagtatgcttcagaatcacctggaaaagttgttgaaacacagagttccaggacttactttgagcttc

SEQ ID NO: 223610 - DNA, 593 bp, Homo sapiens
ttgctgcaaccttctactttacctggcttatatctattcttttttttttcccttgagacggggcttcactctgccccagctggagtgcagtgtcatgatcatggctcactgcaaacttgacctgctgggctcaagtgatcctcctaccttagcttactgagtagctgagaccacaggcatacaccaccatgcccagctttttatttttttgtagaggcgtggttttgccatgttgtccaggctggtctcgaactcttgagctcaagcaatccacctgcctcgacctcccaaagtgctgggattacaggcatgagccaacgygctcagcggcttacatctattctttattgcagtttcaggaaaagtttaaaaatagtcaccatttttcttttaaacaaccaattagattccaccaaataactagtcagctgttttaaagaaatgatggttttcattagattatattgtttaaattttactttacaaattgcattgtatatcaagatctttctaaccagaggacaaatggtgagtatgggtttggtccctttttttcatttttgctggctctaacttagttattggaacaattc

SEQ ID NO: 223611 - DNA, 603 bp, Homo sapiens
cattataagtacaaaagcagccactgaaaggcaaagtgggagactggggacatggagggaggtgggtgtggtgcatgaccgaaatgatgttgtagaaatactttggctactggatgaagaataaattggagggggttccagagtggaagccaggagaccagtgaggaagctgttgcttttagagaaactgaggttccttgaaaaaaatatataataagtgatagaaacttcctgttcaaatatgtccaggccctgggggaggagaagcttcttcctattacttattattgtctggtgctatgttatgttaattaatttatataattgctgatctgttcagtgtcttgtctctccttttagaaagtaagcttactgagggctggaatggtgccttattcactcctgtccccagtacaaagccatgtctkccacatggattcccaaaaaatatttgatgaatgaatgaatgaatggaatgaaaagggtagaaaagaatacttgacttggaaaatgtatgcacacgcaccaatggaaacagacacctacttctaagaagttgtgatggtctcaaactgcagataattttgtccatgtgttcctcct

SEQ ID NO: 223612 - DNA, 406 bp, Homo sapiens
cttggggctctctgaaaccttttggcagcccataatttcttcgtgattgagtagttgcaagctaaaaaattgctttccttctcaatgccattttgttagacatttttaatgaagtagcaaatttgtggctcaacaggaaaagctcgctgacagcatattagaatttataagcccagccgacatatctagttacttcgtttttaggttaytgcacctgtataacatacatgtattggcagatacattactaatgcaaatacctttgcagacacctgcatgctgttttcttgcatgttcataatggcttcagaaatcttgacatctatcgggtccatgaccgactcaatgttgaatggcccctccagtcgctctgccaccaagagcattgcatctgttaaaatacagg

SEQ ID NO: 223613 - DNA, 574 bp, Homo sapiens
ctgctgtttccagtgaaagataattagagttttctgggggagggggatggctgataaagggacatccagaataaaaaagaaaaaaaaaaaaaagcagttttctgaaggaaaagcttcagtaaagtttagactggtgtcaggaatgataagaggccaagaagctcaagggaattcagcgattctttctgcaaatgctggaaaaactccctcctgtgaatctccagaggtatgtagagagtatatgtaagaaataatgcattatatctgcacacagtgtatgttcaacatataatctcttccacacttacagaaaattactttccgatgctcactaaatgagaagggttacaagagataagagggtggtctgygttcccaaggcagctgctgggaaaagaagggtgttatttaaaatgattgtaagtgactatcttcctagattgtacattgtgcccccttctccagttgattctctataacctagatagtcaaaggcaatactgacattgagaactgccctgtaataatactgcgtttatctcaacggttcttcttttttttatttaataagaga

SEQ ID NO: 223614 - DNA, 547 bp, Homo sapiens
actttaaatcccaattcttcagcttctacataaggttgtgtttcttagaggagacctccctgggtccttatgaagtgaccctcaattacaacaaaagagaagacttgaaacatttttgcttttctctctgttaaagtttatagactgtttgggctggagtggagtaaaggctggtcttatcacagtttatgaactgaggctttttaaagtggagtcctagggttctgaccactatgtgtgaatgagccagctccagagaccagctggcagaacagargacgtggaagtgaataactaactttcaaagaccagatgctggtgttccctgccagctgaggggcctgaacactcttggaagtcttctatgtgtcacatttagtctcagactgggattctcatatcaatttggttaatttaaaaaggtaaggtaagagactaggaattagtaagaatgtggacaacttttcaaaatttataataataactgttgatatttacatagtattttgcacaatgtgaagtactttcttgtgtgtatttcatggtg

SEQ ID NO: 223615 - DNA, 387 bp, Homo sapiens
gacactatctgcaactatttaaccctttctttgtcgatatgctttgtcactaataggcaactctgtctctataaggataaaaattacacttgaaaagattctactagtggaagcccatggtacttattcaatatattctggattaatccatgaattaactgtaaattcctctgctttggcttttctctttgttgaattaaagttgttcctgttttatcctaagctctcagaacattccaagaaatttccttttttggaaaamtatgggctcctagcagtcaagtgggactgggatatgaaaataaaatattcttaaattaccactactattattacatttataaaacaagtctattaactggtctatatttatagaatctcaaacgt

SEQ ID NO: 223616 - DNA, 437 bp, Homo sapiens
acacattcctaaataaccgatgtgtcaaagaagaaataatcaaaagggaaatacaaaatattttgagatgaataaaggcacaaataccaaaatatawgcagttaaggcacttagaaacttatacgtgtaaatgtttgtatttaaaaagaggacttcaaatcaacaactaaacctcccaccttatgaccctggaagcaaaaaagcaaactaaacataaaacaagcagaaagaaaaaaataaaaagaattatagaagaacttaatgaaatagacaataagaaaacaactgtgaaaacacaataaaatcaaaagccagttctttgaaaaggtcaacactactaacaagcctgtacctagactgattagcatattaatattattatctcaacagatacacaaaatgtctttgacagaaactaacactttttataagaagca

SEQ ID NO: 223617 - DNA, 437 bp, Homo sapiens
acacattcctaaataaccgatgtgtcaaagaagaaataatcaaaagggaaatacaaaatattttgagatgaataaaggcacaaataccaaaatatatgcagttaaggcacttagaaacttatacgtgtaaatgtttgtatttaaaaagaggacttcaaatcaacaactaaacctcccaccttatgaccctggaagcaaaaaagcaaactaaacataaaacaagcagaaagaaaaaaataaaaagaattatagaagaacttaatgaaatagacaataagaaaacaactgtgaaaacacaataaaatcaaaagccagttctttgaaaaggtcaacactactaacaagcctgtacctagactgattarcatattaatattattatctcaacagatacacaaaatgtctttgacagaaactaacactttttataagaagca

SEQ ID NO: 223618 - DNA, 417 bp, Homo sapiens
tacatggcgtatagtcctgtcttaaaggttttatatccattatgacactattcttatcttcattttacagagaaggmatcataggcacagagttataagtatgttgaagaatgttacaaaaccggcaagagacctaggatccaagcacaagacgtctgtcttcgtgcaagttcatataaacattacaatctcattaaagaatatttttttaggagggaggtgagacaagacggcagaacagaaatctccacagatcatcctcctacccctaccacaaggatactaagttaacaaacaactacacaggaaaaagcatcttcctaagagctaaaaatcaggtgagcactcacagtacctggttttaacctcgtatcactgaaagagacactgaaaagacagaaaaacagttccgagtct

SEQ ID NO: 223619 - DNA, 418 bp, Homo sapiens
cctgtaaatttgggcattacatcagatagtattttattamgttttgaaagttctcagcttactgcacccttgttgtaagtggggatggatgataaatccacaggtacatgcattttctcaatttgtaaatattgtaagtacaattgcaccatgacaggcatcagcaaattttttttatattaaaaagctttttttttctttttagaaattcagagaacatagagaaggaggaacgcaaatgatcagactgtgttttgacggaaaagctgagtagttcacacattatagtcacaattatcttggtaaagtcactctctgtgagagaaggggtggaggtctacagtggaatttttaaggtgtagataatataataactaatggacatttggataaatcacatatggagtttaaattacgt

SEQ ID NO: 223620 - DNA, 427 bp, Homo sapiens
ggaatgcatgaaggccttttccccattgtcttggctatcagcatctggctttcattttaattatgcaactctctagcaagtgtttgctccacagcctgctcaaattcttctcctggaaaaagcttttttctttctttgtcacatggccagactgcaaattttccaaatttttctggtctgcttcctgtttaarcataaattccagctttaagtcatttctttgctcctggatctgagtatagaagcactgaggccacaccttgaatgctttcctgcttaaaaatgtcttccatcaggcaccctaaatcatcattcttaagtttgaacttccacaaattcctagggcatgaacagaatgcagccatttaaccagtctctaagaaatttcaaacttttcctcatctttctgtcttcttctgagcccccc

SEQ ID NO: 223621 - DNA, 376 bp, Homo sapiens
aggccttatgtctcccagtgcttgaaggcrtacccaacacaactttcaggacaatagtataggatccaataataaagaggaagttaccaaaaataactaatgagcttagagtgtagcaaaacagttggattcttggggcagaaacacaatccaatgcaaatagtggccctgggtcacacacaacatggtcaataatgtttgggccacagaagggcatctgagagatgagaaaatggggatcaggaaccacagaaagccacaaacccagcacagtatggccagtttggcacagagatgcccagtcatgatattaggatagtgcaagggccggcagatagcaaggttctgatcaaaggccatcacagtcaaaagcaag

SEQ ID NO: 223622 - DNA, 376 bp, Homo sapiens
aggccttatgtctcccagtgcttgaaggcgtacccaacacaactttcaggacaatagtataggatccaataataaagaggaagttaccaaaaataactaatgagcttagagtgtagcaaaacagttggattcttggggcagaaacacaatccaatgcaaatagtggccctgggtcacacacaacatggtcaataatgtttgggccacagaagggcatctgagagatgagaaaatggggatcaggaaccacagaaagccacaaacccagcacagtatggccagtttggcacagagatgcccagtcatgatattaggatagwgcaagggccggcagatagcaaggttctgatcaaaggccatcacagtcaaaagcaag

SEQ ID NO: 223623 - DNA, 561 bp, Homo sapiens
ataggcaacagtgatgaggtaagcaaactcaagatgtgttcaagtaatttcaaggactccaattgacctggaacttatagcctgtaaggtcaactgagggtaaattgtgaagagacttaagtacaggctggaagttgtttttgtttgtttctttgtmtttttgttgttgttgttgttgttgttcaggataatcagaagttttggggtgagaggctatgacaaaatataaactaaattttaagatgagtaagttggtagtagtgcacactgacaaatgagaagaggagaggagaccacaaatctacttaagattcattttcaagagtcctaatagaaggtcaaaagggcccagaccagggatagcaaatatttttttctttgtgtactcattgtaatcactccatcatatctacctagaacctctgtaataacgaactgtttaatccagatttcatggtaaagagtaccacatcgtatcagtcattgatgtctgtcattggaaaaggaagtaaagaataatggcttacccttgtctcaaccaaacaaaatgctgacagaaaa

SEQ ID NO: 223624 - DNA, 443 bp, Homo sapiens
gcacatctggccagcttcattctgagggaataacctggttatttatcacttcattggagaaagggagatgtctgaaaactaatccacacatatagtgcaatggaggcatgggtggtgtgatgcccacctctgggaaatgcacagagttcaggcacaaaggtttatgtaagtccactcctaatttgcagggtggagaaactgacttttgattatacacactagttttatggttatataatattaagaaatctgtaaggaaaaaaaaaaacaagtcaagagaacctaaaagcctggaacatcctgtagggccagaaagtaaggaagtgctaaacacttacaaacacacacacgtcaaagggtcacagaaattaactgmcaagtggccatggctggaacaagttaagcaaaaacatgaaaaacagagtactgggttataattcaaa

SEQ ID NO: 223625 - DNA, 512 bp, Homo sapiens
ggacatgctggctggagctctccagctgacacagagcagggttctgtgctgtcttcttacaaagtggaatttgacaatcattgcaccatgccttggaacatcctgaaagccagcataaacacatcctctaatcccgggacatcastttccgatcccactcggaatccagaacgacctccactgacagcaggactcctacatcaacgctgtctgttacgagaaacagctccattggtttgcaacgttcttcccctacctggtgctcttgcacacactgttctttgcagcctgcagcaacttatggcttcactaccccaggtaccagctccaagcttgagcattttgtggccatcctttataagtgcttcgattctccacggaccacctgcaccctgtcagaaacagtggccgagcagtcagtgaggcctctgaaactctccgagtccaagattttgctttcgtcctcagggtgttcaactgacatagattccagaaagcagtcattgccccac

SEQ ID NO: 223626 - DNA, 512 bp, Homo sapiens
ggacatgctggctggagctctccagctgacacagagcagggttctgtgctgtcttcttacaaagtggaatttgacaatcattgcaccatgccttggaacatcctgaaagccagcataaacacatcctctaatcccgggacatcagtttccgatcccactcggaatccagaacgacctccactgacagcagkactcctacatcaacgctgtctgttacgagaaacagctccattggtttgcaacgttcttcccctacctggtgctcttgcacacactgttctttgcagcctgcagcaacttatggcttcactaccccaggtaccagctccaagcttgagcattttgtggccatcctttataagtgcttcgattctccacggaccacctgcaccctgtcagaaacagtggccgagcagtcagtgaggcctctgaaactctccgagtccaagattttgctttcgtcctcagggtgttcaactgacatagattccagaaagcagtcattgccccac

SEQ ID NO: 223627 - DNA, 555 bp, Homo sapiens
gctcatcataacttatgttccatattttttccacaaacatcactctttaaattgactgttcagtaaacatgtaggcttttacaggatataagcctaccagtgtgtctattccttcgcaaaaatcttgaagtttctggcttcattttataccattttggatgtactctacagtctgacctcctcctacaggctgtggtggatgcttgaggagatccatgaagcaatattccttgaggtgttaagagaaaaaaagcaactatagtgacatccctgagtcaagaatgactttgccttcatccttcatctggctaatcagtatgatcctttttattccagacgcttctccatattcctatcagaggtcagtgagaacaaactgaaacagatcaacctcagtaaygaatggacagttgagaaactgaaaaacattagcttgtggaaaatgtccaagacaagatagaactgcatctttttatgctcaacagtcttccagacaaatgtctttgagttcaccgaaatggaggtgctaagcctggagcagaccctggaggtgaa

SEQ ID NO: 223628 - DNA, 429 bp, Homo sapiens
ggttgacaaatattaactcataaatgactgaacacatatgtcacagactcagcactgctacgaatggatgaaactattcatggtgagccctacattgattaacgtctactgttatcccgcgtgtgggaaataaaaactagtctcggcttaggagtatatattttctcattgtgtgctgtggcagtcccagaaaaattctgagcagaaacataatgcagagaagctattattttagaaaaactagtaatttaaccatgaaaaagagacataagcaatagagatggagctgaggaatgaataaaacagaaaacaaacatgtaccaaaaagctrgaaattcttggggactgagaatgtctaaagtatgcatagaaatagtttcaaagattacctactgaattgaggatactaaaataaaagtctcaaaatcc

SEQ ID NO: 223629 - DNA, 429 bp, Homo sapiens
ggttgacaaatattaactcataaatgactgaacacatatgtcacagactcagcactgctacgaatggatgaaactattcatggtgagccctacattgattaacgtctactgttatcccgcgtgtgggaaataaaaactagtctcggcttaggagtatatattttctcattgtgtgctgtggcagtcccagaaaaattctgagcagaaacataatgcagagaagctattattttagaaaaactagtaatttaaccatgaaaaagagacataagcaatagagatggagctgaggaatgaataaaacagaaaacaaacatgtaccaaaaagctagaaattcttggggactgagaatgtctaaagtatgcatagaaatagtttcaaagattacctaytgaattgaggatactaaaataaaagtctcaaaatcc

SEQ ID NO: 223630 - DNA, 618 bp, Homo sapiens
aagaaaccatcaagaagtggggggctggccatgctggagcagtagacaaatgtgtgtgtctaaatagggactgctctgtgttctcacagatgaatgaggtaatgctgggaattccctctgcagggaactggctgactgacatgcagttccacaaatgcacgtttgtctcattatcttttttgtatagtttattaaagtattaatatagtttcaataagtaagtatttttaggttgcaaaatgaactcatctttatattaaattcacaaaaaaactgaatctgaagaatataactaaaaggctgtgtatttaacatttagtgtcaccttttcaacttctgaaatactgttcattggtaatttgttctcatttataaatcacattgtattcatttcgatagaatgyatatatctgtgctcttgaattaatttttatcttatatttgtcttttgaaagaagtaaattatggcataaaaatggaaaaggtattactgaactttacatactgttacattaaaatccattagtctatcttgcactttgaatggaaattataccaatgcataattttgtaacatcatccactcatcctttggaaaatattggttcactaagttct

SEQ ID NO: 223631 - DNA, 598 bp, Homo sapiens
attataattcttttcccgaagtgtttctagcaagttttaccttttcgtttttccttatgaacttagaataaactgacataattaaaatatcatgttagtattttgatttggatcaccttaaatacataaattaacaaaaataatttttatctttttgatttatcacctttggaatatggtaagaaacaaactcattattctgagaattgatacataartggaataaataaagcatttatcttattcttcctatttgaatagtacctcaggataaccaaataattgatgagagactattattctttgtatcaaaattcagctaataaataacaaaagagtgatagaattggaataccatctgtttacaacccctaatgcaataacagatctgggcaatgatcatctgtgactgttgaaaccgttaggtgaaagcctgatatgtgacattaaaatggatgtagaccaagctgttaagagctttgttgactattcctttttcatactcctgaaatccttgggttatatcgtcctttccttctttcctgattattctcttgtgttcttctgatcaccgccgattattaacagatatcactta

SEQ ID NO: 223632 - DNA, 440 bp, Homo sapiens
gggatctccctatgttgcccaggctggcctcaaactcctggctcaactgatcctyctgcctcagcctcccatgtagctgggacaggcattcactgccatgccgggctccatcatgtcttaacctcatgacctatgcagtagttatggtttaaattgtgtcccccaaaaagatgtgttgaaatcctaaccccaagtacatttgaataggaccttatttggaaattgaatctttacagatgggattagttaagttaatgaagtcatgctgtgttagggtgggctctaatccagtgactgctgtccttataaaagaagggaaatttggacacagacacaagtcggacatgcacagagggaaaatgatatgaagacacagaggaagaactccaagtgtagatggaggttgggactatgcagctgcaagccaagccacacccagg

SEQ ID NO: 223633 - DNA, 446 bp, Homo sapiens
tacaggtatgagccactgcacctggacaaaaattctttattttaaatatttgtgggtacatcatgttgtaatgttggtcattccatacagaggaataaagatggaagtctttaccatctttatcagagtaatcatttggtaattgacaaaaaggataaagaattggccagtttctatacctgagatttactgaatatttgaagttattattggaatcagtggtgatttctgagaagtgaaggctaaagattttatggtccctgcattctctactcaaaaacagagcacttgctttacgcagacttgtctttcaaagaccctgaggatccccagcttgagaaagtacagatttgagggcggaagtctccctagccgaggccacawtcatatctatgcacacaatagcctagactctgatttcagaaacaaagttactaggttccaca

SEQ ID NO: 223634 - DNA, 419 bp, Homo sapiens
tgtaaaaacttgtggaatctgagaaaggtctgtagacttgttaacagtattgtaccagtgacatgtcctggttttgatattttaccacagccatgtaacatgttactagtgggggaagctagctaaagggtatactgggctctttgtgctatttttttcaattttctgtgagtctataataatttcaaaaataataaatgtgatatatacgctttaattttaagagaaatagtgtcatcagaagttctgaggttaaggtacaaaacayatgcaattgacagtattcaagagttttggacttacaaaaatgacaatttcatatggtatcctaatactataaaatgtgtaaaatgcagttatacttgggtttattgccaatagacttgtttttgctaactagaaaacaaacaaaaaacccc

SEQ ID NO: 223635 - DNA, 589 bp, Homo sapiens
gggcaaactgggagtgtagataggagcacagaagcttcagtaggcaaggaggcatgaaacctgaaagccctgcttgctttctcagcaagacggctggtagcctggggcaagttgtcagccctgaccactggctgcctggaaataaactcaatgctatttagcggggcatggtaggagacgagtcatttgggctgcgtgggagctggatgagacctgtaactgctggatttcccccacttccctggcaacctacaggatgcagcagaggccaccataatccccctgggaacataactccatttgcctgaaagccacatccccatctcccacagcagccatacaagccccgcccaaggacagtctgaactcagacacacctaaayctgcagtcacctgatggtctttctctacctgccctagtagccaaagacaaaggacataatctcttgggagatctatggtcctgtgcattgtctgagaaactggaatacttttccaggcaaccctagggcaagcttatatcctccctttactgccacagctgatgctctcttgaaagtgccaccacctggctggagaccaaccaaca

SEQ ID NO: 223636 - DNA, 418 bp, Homo sapiens
gaattttcagaatgcttgaggtttttaaaaaaggaaaaartaacaaatccataaagccttctgaatgggggtacaaaggaaatgagactgaggaggagtgcaggtttcatacaaaagaacaaggatgaaaatggttttggattctcaatagaaacactgaaaactagtagacattgaagaaagtttttaaactaagagagaaaaaactgcttcaaacctggaagtttatacccagccaaattctaaatcaagtatgagggtagaataaagacattcttggtctcataaaatttaccactcatgtattttttcctaggaatcaactgcagcatatgcataagtaaaatgatggaatagaccaaaaaacaaaacaaaaccaaaccaaaaaaaacaccaaacagtaaacaacatggaattc

SEQ ID NO: 223637 - DNA, 418 bp, Homo sapiens
gaattttcagaatgcttgaggtttttaaaaaaggaaaaaataacaaatccataaagccttctgaatgggggtacaaaggaaatgagactgaggaggagtgcaggtttcatacaaaagaacaaggatgaaaatggttttggattctcaatagaaacactgaaaactagtagacattgaagaaagtttttaaactaagagagaaaaaactgcttcaaacctggaagtttatacccagccaaattctaaatcaagtatgagggtagaataaagacattcttggtctcataaaatttaccactcatgtattttttcctrggaatcaactgcagcatatgcataagtaaaatgatggaatagaccaaaaaacaaaacaaaaccaaaccaaaaaaaacaccaaacagtaaacaacatggaattc

SEQ ID NO: 223638 - DNA, 627 bp, Homo sapiens
aactaaactgatgacatgttcaatgaattaccataaaggaggggcaaatattatggttcttaaggaatccgtaatatttgtggcttgtctctcacttggggcatatactatggggagaagatatggcgggaaggcagcttctgtaagacagcatatgcaatcactgctccagagttccagaccagactcctgctagcagccagagctccctgaagacaccgggtggttcttcttmgagagtgtttcaccctttcagccctggattcaaatctgagacttagaacaggttccttgctgccatcgtccatggttctgatccacctggacacaaaagccaggctgtgtcggagactgaggaggaatgaagggaccaactgtcatgcttccctgtagcctcatctctacttgttccaggtcctgactcctgtttgggttccatgtcttctgtgactctcagaaccccaaaatattatgtgctgtcgaccgcctacaattcctcacaattgactgcatggaccaacacttcttatacttactgaagagacagacatactgcaaattcagtgtatttaagaatgttgtggaatactcatgcctctctccttcagtgttctgatttttttattg

SEQ ID NO: 223639 - DNA, 492 bp, Homo sapiens
cttctcacatagcaaaaataaggttttcttctttttttttttaatttttttaagagacagcattgctatcagtggtgacagctccccggtggatgcggggcctgccatacataacctccctctggactccaccttgacttcctggtctgctgcttaagcataaggcaagctgatgtgtggagcaggaaatgtgatgctaccatccttcctcctctgggtggaaagtgggaaatggaaatctatgaacctgaaataggtcatctgtggatttaggtgatagacccataagcgagaaagcaactaaaaggtctgcgaaaacttgacccccctttcacaaatgccagagaaacttcaycctacagggaggctgccaccaggattattaaatggctttgcctgtgctctttgcttctgtggcagaaatgttacttgctttgtaaaataagaaatatggcttgctttccttgatgtttgaataattctgcattatcc

SEQ ID NO: 223640 - DNA, 629 bp, Homo sapiens
tcattgttgatttgttaacattgaactcatgacaacagcactataactcaggcttgaatgaagctatctagcacacatattttctccatgaggcacatcactgttttcttgcccttaggaacatcagacagcacttcagcactactcctgggggccatttttttatttttaatttttgtggctacataatagatgtacatattatagcatacatgagatattttgatacagacatgcaatgtgaaataagcacacatggaaaagagggtatccatcccctcaagcatttatcctttggagttacaaacaaatcaattacattctttaagttattttaaaatgtacaattaaagtattattgattatagtcaccctactgtactatcaaatggtagggtttattcattctttctgaacattattttgtttacccgttaatcatccccaccttcctgccagcccctcactacccttgccattctctggtaaccatccttttactctatgtstatgagttcagttggtttgctttttagatacaatgcgtgagaaaatgtaaagtttgtctttctgtgcctggcttatttcacttaatgatctccagttccacccatgttgctgcaagtgac

SEQ ID NO: 223641 - DNA, 621 bp, Homo sapiens
ttcaaaaaaaatctaattgttcccttgcctactggttgaaaacatcatgaaacaaaatttatgctactaatagaaaaacagcatatacacaaattcatccagatggtgtgaaaagactagtaaatctagaactaaccacacagttagtaaacagacagacatagagactaaaaactagacaaaatgcttaaataaataaaggatatggtcatcttttccacaaacttatcgtgttgattttctgcttgggggaatttcttgatgtcacgttccagatgaacaatttgttgttccattgatgcaaggttgctcttgagaatttgagctgaaactaaagaacagtgtgcaaaggatttagaatattttaccaagtgttccacaaaacatctaaaagragacattatcagttaaagtctttttttttaaatgtgggaaatagttccatgaagtcaactcacatttttctgaattactgcttataaaaattctactctccatgaaataaatgaaaatgtgtaatacagtataccaaattatcatgtttaatatgggaatgtcaccattttactcagccattagttcaaatgaatccatttcaatttaaatttattgacggaattc

SEQ ID NO: 223642 - DNA, 580 bp, Homo sapiens
gagaccagtctctgagtgcctcaacatcctttgttggttttcttaatcaagcccacacccctgtaattagtcctttcattaatgtattgtatttgattaatcttgttgaatcctgctacttgccaggattccaactgacacaaactaaatttaatgtatttgtagagaacacttcatatcacaattgaggtaaagtcctcctatcccccatggcgagcactgaattaaaagagwaaacagcagaactcattaacagagattcataattcaccaaggaattaccaatgaagcttaagaataggaaataccattttgaaggcatcttaagatccccactgcactatgaatctaaaggagaaaaagtgtcaaagttttaaatcaagggatgcactcacaggaagaaaatccccacattaacaacgcaaaaggcaaataaatgatacccagtctttacataaagcacagagacttgatactatcacttggttggactgcaataactatttgtctcttctctccccattattgatgcaacaaaatttttgaagcacttcctttgaagagccacaaatttgctata

SEQ ID NO: 223643 - DNA, 658 bp, Homo sapiens
tgtcttttaattattaaacctctatttattaaaaagaaattaggccaggcacagtggctcacgcctgtaatcccagaactttgggaggccgaggtgggtggatcacctgaggtcaggagttcaagaccagsctggccaacatggtgagaccacatctctactacaaatacaaaaattagtcgggcatggtggcaggcacctgcaatctcagctacttgggaggctgaatgaatttacaggtaggaaggcacacattatataagttaaaattcagttcaactatgagtgacagaaaaccctaatgagtggtagcttaaacatacaatgtttactccctcaaacaaaatgtctgcctgatatgtagctgatgtgaggctccatggtgtcagggtcccaggtttcttttatctatggctttgccatctttatcacatgaaccataatgactgcttgagtttcttatggtctaaaatggtttcttgagtttcctatccccatccagtcaggaagaaaaaaaaaaaaaaaaaaaaggaatgactgatgaagcgcttgcttttattttaagaacacttcctgcaagttgcacataccaattctgtttgcattcttttggccacaacttacctacttggccatgcctagcttcaagagaagagaa

SEQ ID NO: 223644 - DNA, 642 bp, Homo sapiens
tttaatcaccaaaatcaccatctaataaatttcatctatttttttaaataataaatttggacttcataagtaaaggctgccactctacttccaaagacaatactaagagaatgaaaagacaaactaaagactaggagaaaatgttacaaaatcacaacttttatctgattttaataacttctatatggaatatattaagaactctcaaaactcagttataagaaaattaaattcccaattaaaaatgggcaacgaacttcaacaaaaaataggcaggtggtaaataagaacatgaaaacatgctcagtacctgtagtcattaggaaaatgaaaatttaaaccacaatgagatcactataattaaaaaaaaaacaaacaactgaccatgcctagggttgttaaggttgtggagtaagtggggctttcatacactgttagtagaaatgtgaaattgttcatccactttcaaaaatggttagwttcttcttttaatgagcagcttttaaaaaacgtacttttaaaagagctttcttcagatataactcacatgctacatgattcacccatttcaagtatatacaattcaatgttttttagtatatccacagatacatgtaatcatcaccacagtcaattttagaa

SEQ ID NO: 223645 - DNA, 420 bp, Homo sapiens
atgtatagaagtgttcacaatagtctttgaggatcttttccatttcagttgtaatataacctttgttgtttctaatcatgcttatttggatcttctctctcttttctttttaaatctatctagctatctattgatcttgtgtmtcctttcaaaaaaacaacttttgatttccttgattctttgtatgaatttttgggtctcaatttcattcagttctgctctggttttggttatttcttctgctagctttggggttagtttgttcttgcttttttagtgagggaagagatttaatacagtgttttatgttgcagagagttcatgaaataaatatgaaaagcaatcaatagacttggaagtcatgaggccacttgtgacctcagacaggatagtctgcatagactgtggaaggtaaaacct

SEQ ID NO: 223646 - DNA, 446 bp, Homo sapiens
aaaacaggagccatctaggacaggtggtgcttggctatggcaaagaggagggaacttaagcccaacgggtcagtaaatgatggatttgagccttctcttctattggattagtagatcccaacagtcaatacagtggggggttggaaaaaccttcctgtgtttcatgatacccgaatgccaatgtcatgaatggcaaatgctagcatcccaataayggtgtgcccttcatgaaaccccatccaaagattcagccccttctcttaatgttcaagcacctgttcctgcagaatcgggatatgaagagaggctggcaaaggccacaaaccaggtacttctgcagcttgcgggcgggtggaggttggggaggtttctatgctgtccacactacactgtcacactaactctattaaccctttcctacctagagataatgatatgagaaaaga

SEQ ID NO: 223647 - DNA, 573 bp, Homo sapiens
taacagaaaaaaaacagatttaagtatgtgcatacgcacaggagttcacaaagaaatgtgactcaaggaagcagttagaatttggggttatatactatcttaggctagacaaaagcaaagtgatctggggcttctggggaggagataaattataggaaggtgaataggaaatgtacaggaaataagggtcatttagtaaggtttgttatgtggataagagacatcctgggtgctaagagttgcctccagagtagttttcttgctggtacaggagagggagacacctttacaaatggaaatttgtaaattttcaaagrgaaatttatgtcctacttttagacagaaaaggggaaggcagagagctaattgctttcaaatcaaaacaatgcttatgccaaagtggtatattttggggtggcagattctggtccccttcactatctcactgtctgtctggtggataaatacgtgttgagtggcagactaacagaagagtctacatgtaccacaacccctcgtaggtaagagctttcagctcagtggcagctgtgccatgtccatttaaccaagctt

SEQ ID NO: 223648 - DNA, 573 bp, Homo sapiens
taacagaaaaaaaacagatttaagtatgtgcatacgcacaggagttcacaaagaaatgtgactcaaggaagcagttagaatttggggttatatactatcttaggctagacaaaagcaaagtgatctggggcttctggggaggagataaattataggaaggtgaataggaaatgtacaggaaataagggtcatttagtaaggtttgttatgtggataagagacatcctgggtgctaagagttgcctccagagtagttttcttgctggtacaggagagggagacacctttacaaatggaaatttgtaaattttcaaagagaaatttatgtcctacttttagacagaaaaggggaaggcagagagctaattgctttcaaatcaaaacaatscttatgccaaagtggtatattttggggtggcagattctggtccccttcactatctcactgtctgtctggtggataaatacgtgttgagtggcagactaacagaagagtctacatgtaccacaacccctcgtaggtaagagctttcagctcagtggcagctgtgccatgtccatttaaccaagctt

SEQ ID NO: 223649 - DNA, 417 bp, Homo sapiens
gttctcactgatagatgggagctaagctatgaggacgcaaaggcgtaagaacaatacagtggactttcggaacttgggggaaagagtgagatgggggygagggataaaaggctacaaatatgttgcagtgtatactgctcgggtgataggtgcaccaaaatgtcacaaatcaccactaaagaacttatgtaaccaaatatcacctgtaccccaataacttatggaaaaaaataattaaaagaaaaagaaagaaatgtgaactatgcatacatttaagaaagatagaaaaaagttagtaagataattatttccaccatttttggtgaatcactgagtgacagcttcggttgtggtggtggtgggttaaatcagagaataaatgtttgcataatgaacattgcaaggagtgtaatcacc

SEQ ID NO: 223650 - DNA, 546 bp, Homo sapiens
acaggaacacaatatagaaaatcaatgaagcaaaactaaattgttttaaaaatcagtgaaatcaataaaactttagcaagcctggcaaagataaaaaagagagaagacacaaattaccaatctcaaaaataaagcataggatatcactacagatcytgcagccattaaaggaatataaaggaatactatgagcaactgtgtgttcacaaattcaaaaacttaggagtggaacaatttctcaaaatccacaaactaccatactcaatcacaataaaatagacaacctgaatagttctataaccactgggtgaaaaatgattttgtaattaaagggctcctgaatgatttcactggaaaattctatcaaacattttaaaaagaattaataccaattttacacaatatcttccaaaaaacagcagaggtgggaacacttgccaactcattttatgagactaatactacccagataccaataaccatacaaagacagtaccaaagaaaagaaagaacaaaaaaactacagaatacctctcataaacaaaa

SEQ ID NO: 223651 - DNA, 546 bp, Homo sapiens
acaggaacacaatatagaaaatcaatgaagcaaaactaaattgttttaaaaatcagtgaaatcaataaaactttagcaagcctggcaaagataaaaaagagagaagacacaaattaccaatctcaaaaataaagcataggatatcactacagatcctgcagccattaaaggaatataaaggaatactatgagcaactgtgtgttcacaaattcaaaaacttaggagtggaacaatttctcaaaatccacaaactaccatactcaatcacaataaaatagacaacytgaatagttctataaccactgggtgaaaaatgattttgtaattaaagggctcctgaatgatttcactggaaaattctatcaaacattttaaaaagaattaataccaattttacacaatatcttccaaaaaacagcagaggtgggaacacttgccaactcattttatgagactaatactacccagataccaataaccatacaaagacagtaccaaagaaaagaaagaacaaaaaaactacagaatacctctcataaacaaaa

SEQ ID NO: 223652 - DNA, 546 bp, Homo sapiens
acaggaacacaatatagaaaatcaatgaagcaaaactaaattgttttaaaaatcagtgaaatcaataaaactttagcaagcctggcaaagataaaaaagagagaagacacaaattaccaatctcaaaaataaagcataggatatcactacagatcctgcagccattaaaggaatataaaggaatactatgagcaactgtgtgttcacaaattcaaaaacttaggagtggaacaatttctcaaaatccacaaactaccatactcaatcacaataaaatagacaacctgaatagttctataaccactgggtgaaaaatgattttgtaattaaagggctcytgaatgatttcactggaaaattctatcaaacattttaaaaagaattaataccaattttacacaatatcttccaaaaaacagcagaggtgggaacacttgccaactcattttatgagactaatactacccagataccaataaccatacaaagacagtaccaaagaaaagaaagaacaaaaaaactacagaatacctctcataaacaaaa

SEQ ID NO: 223653 - DNA, 541 bp, Homo sapiens
gggcatgagagcccaaagtggctgggtgacagtcttaatttccagttcaatgggattattgttatgactcctggtgaaagcattcctccctctgcaactaagatcgctagccagcagagcataaaatcacaggaacgggaagcaaaagttttactagtgggtcactaggggcaatagtgagtggagccactcccatttccatcccttgattcttggatccatgaatcttggctatcagataaacagcaccatatattggacatttattcagagaatatacaaccttctgaagaaccttgcccccagccctgcaaggtattactacctagctgatgctgtaactgagtcttcaaaaggcctttccactgtactatcaagtcagctgcttcaggattgtggagaacatgataagactaatgaattccatgaatctggcccattgccacacttcttttgctatgaagtgagttccttgatcaggagcaacactgtayggaataccatgacaatggataaggcattctataagtccatggatggt

SEQ ID NO: 223654 - DNA, 494 bp, Homo sapiens
gtacatctgttgagggatgagtttctagcttaaattatattgatcaagtagatagtgacagactctccttgaccaaactttagtcaggctcccctgaattcttttcccaaatgggcctcaacttttggacttccatgtccatctttgcatcactcaactttagcaagaatcctgctacatcagtttggccagaaactgcccccccaactcaatatctgatcaccctcaatatctgatcgggttccttgtccttcaccatcccccaggtgatttgtgatccccctggcctgtcttcagtaagaatcttgttaggccagtttagccagaaatcccccttacccctgatgtttcctcttagtaatttcccawccactgatccccatggaccctgctccctggcaataaattcctacagtttttgttgtattcaaaatggagtccagtcctatactgaagtctcttttcccctatggcaatagtcctagataaaatct

SEQ ID NO: 223655 - DNA, 482 bp, Homo sapiens
tccttatctacattctaaaactctgaggacatgtcaagctttaccaaaaactccctcaagctgtatcccagagacagaattgggtaggtctatacgtttctacagctcagcacctggggcagaagcagatgtcagtctctccatatggaaggcaacctctgttattctgagttatctcgtggaccctctcttagcttgaggtggtagtggtgatgtccatatcaaagtgacgaagtgctctctactgcaagattttcctattaacgttttttttcaaagaaggaatctgcaacctactctcacataggttggagggggataatccaaagatttgttggccacctcatggttgcattttccaaaatatgtagaaacaccatgtcaaaatatgaatgtaccaggaattaatgggatacaaatagaatatttgtatccttyccattttagccttgtatctgcctctgggttagttatccagtatt

SEQ ID NO: 223656 - DNA, 614 bp, Homo sapiens
ggagtctaggcatctgcacacaggctgcagtgcccaacctgggaacagtgctgggggctgctttcctccagcttcactgcctctcttccaagaagtaatgctgtctccagttcttattcactgtgatgttcctctgtttctcaaaagaaactctctaactagattaggtggaaccatcagccatttcacatggttcaacctaataaaatgaaacaatctgacaccggttttataaaggatgggcttttgagaggagacagctggaaataggggggtagatatttaaataagaggactttasgggatttggggttgggaagaaaggcttcacatcactaattacactagcctagagcaattttgtcttaaagacagaggaagtttcctgactcagccatttcacagttgcagttgcccctgtccaaaaagtaactgcgacaccaagggtaaaattccttttagtttttctttctgtgggtggagtgagcagcagcaaccaaccgctagaaaaattcttgagctgtcacatgcattttggtctctggcttctaggaagaaatgcagtgaaggccctgatgctgtgtgcctgctgagcctggaaatcagtctttaaa

SEQ ID NO: 223657 - DNA, 614 bp, Homo sapiens
ggagtctaggcatctgcacacaggctgcagtgcccaacctgggaacagtgctgggggctgctttcctccagcttcactgcctctcttccaagaagtaatgctgtctccagttcttattcactgtgatgttcctctgtttctcaaaagaaactctctaactagattaggtggaaccatcagccatttcacatggttcaacctaataaaatgaaacaatctgacaccggttttataaaggatgggcttttgagaggagacagctggaaataggggggtagatatttaaataagaggactttaggggatttggggttgggaagaaaggcttcacatcactaattacactagcctagagcaattttgtcttaaagacagaggaagtttcctgactcagccatttcacagttgcagttgcccctgtccaaaaagtaactgcgacaccaagggtaaaattccttttagtttttctttctgtgggtggagtgagcagcagcaaccaaccgctakaaaaattcttgagctgtcacatgcattttggtctctggcttctaggaagaaatgcagtgaaggccctgatgctgtgtgcctgctgagcctggaaatcagtctttaaa

SEQ ID NO: 223658 - DNA, 387 bp, Homo sapiens
tgacatgtgacaaatggtgctgcttcatagccttagagccacaaaatcattgtgtcctcaatatcagagcaggcccagcaaaccccatagtctcccctgcatccccaggcttttttatattggagacttgagttaacttggcaaccttttctgaggttgacttttttcaaattattattgttattattattattwtttttttttttttttagtagagacggggtttcaccgtgttagccaggatggtctcaatctcctgacctcgtgatccgcccgccttggcctcccaaagtgctgggattacaggcgtgagccactgcacccagcctattattgttattattaagagacagggtctcactctgctgcccaggctggaggcagtgg

SEQ ID NO: 223659 - DNA, 387 bp, Homo sapiens
tgacatgtgacaaatggtgctgcttcatagccttagagccacaaaatcattgtgtcctcaatatcagagcaggcccagcaaaccccatagtctcccctgcatccccaggcttttttatattggagacttgagttaacttggcaaccttttctgaggttgacttttttcaaattattattgttattattattattttttttttttttttttagtagagacggggtttcaccgtgttagccaggatggtctcaatctcctgacctygtgatccgcccgccttggcctcccaaagtgctgggattacaggcgtgagccactgcacccagcctattattgttattattaagagacagggtctcactctgctgcccaggctggaggcagtgg

SEQ ID NO: 223660 - DNA, 562 bp, Homo sapiens
gaagcacatctaccttgccttgagaaagatgcaactcaatgttggcttccttagctccgtgccactcagcattgcagcaccgaaaggaaaactgtttcctctctactctcccactactctcaattcttccaamaacagatgtgggttgttttcccccccaacagcaagcagttctccagttctctgcagatgctaatgccacgtcctgcaattcaattctgaccttatctacctggagttagtgcagacccaacaggttgaaggctgagtcccaaaagactgtccccacttcagatgccagtcgcacaagtgatgagtctccaggttatcctcaacttctgtccaactcaactacagatcagaggttcccatggccccctactcaggttctataatttgctagaagggctcataaaactcaagagaacagccgacttactagatgactagtttattataagaggatacaactcaggaacagccagaggagagagggatgggagagggtgcagaacatccatgccgtatctaggtacgccacccttccagcacggccctgggg

SEQ ID NO: 223661 - DNA, 562 bp, Homo sapiens
gaagcacatctaccttgccttgagaaagatgcaactcaatgttggcttccttagctccgtgccactcagcattgcagcaccgaaaggaaaactgtttcctctctactctcccactactctcaattcttccaacaacagatgtgggttgttttcccycccaacagcaagcagttctccagttctctgcagatgctaatgccacgtcctgcaattcaattctgaccttatctacctggagttagtgcagacccaacaggttgaaggctgagtcccaaaagactgtccccacttcagatgccagtcgcacaagtgatgagtctccaggttatcctcaacttctgtccaactcaactacagatcagaggttcccatggccccctactcaggttctataatttgctagaagggctcataaaactcaagagaacagccgacttactagatgactagtttattataagaggatacaactcaggaacagccagaggagagagggatgggagagggtgcagaacatccatgccgtatctaggtacgccacccttccagcacggccctgggg

SEQ ID NO: 223662 - DNA, 562 bp, Homo sapiens
gaagcacatctaccttgccttgagaaagatgcaactcaatgttggcttccttagctccgtgccactcagcattgcagcaccgaaaggaaaactgtttcctctctactctcccactactctcaattcttccaacaacagatgtgggttgttttcccccccaacagcaagcagttctccagttctctgcagatgctaatgccacgtcctgcaattcaattctgaccttatctacctggagttagtgcagacccaacaggttgaaggctgagtcycaaaagactgtccccacttcagatgccagtcgcacaagtgatgagtctccaggttatcctcaacttctgtccaactcaactacagatcagaggttcccatggccccctactcaggttctataatttgctagaagggctcataaaactcaagagaacagccgacttactagatgactagtttattataagaggatacaactcaggaacagccagaggagagagggatgggagagggtgcagaacatccatgccgtatctaggtacgccacccttccagcacggccctgggg

SEQ ID NO: 223663 - DNA, 557 bp, Homo sapiens
acatctaccttgccttgagaaagatgcaactcaatgttggcttccttagctccgtgccactcagcattgcagcaccgaaaggaaaactgtttcctctctactctcccactactctcaattcttccaacaacagatgtgggttgttttcccccccaacagcaagcagttctccagttctctgcagatgctaatgccacgtcctgcaattcaattctgaccttatctacctggagttagtgcagacccaacaggttgaaggctgagtcccaaaagactgtccccacttcagatgccagtcgcacaagtgatgagtctccaggttatcctcaacttctgtccaactcaactacagatcagaggttcccatggccccctactcaggttctataatttgctagaagggctcataaaactcaagagaacagccgacttactagatgactagtttattataagaggatacaactcaggaacagccagaggagagagggatgggagagggtgcagaacatccatgccrtatctaggtacgccacccttccagcacggccctgggg

SEQ ID NO: 223664 - DNA, 595 bp, Homo sapiens
tcttgctggaatggataggaatactgtagcacagtatgttctaacacaattgtgttccaagaagttccaagctattaaaacaacaacaacaacaacaacaacaacaacaacaacaacaaaatctgatttaagacaatagttttgatggtagaaaaaaggattwggggatagacagtttcaaacttgccataacacgtttactgttccctataagtatttacataattcttatttttgtaatgtagctacaagttacagattggactccttgttccactctttcctccttctcaacactgtacttgactagcttaagaaaaaaatatagttataaaccttaaatatcactcacagacccatcatttcattacatctagtatttgcatgagaaagggcttttctttaccaagaccagctattaccagcacagattattacacctccttaacactctataataaaccaaggcaactcatacaaagcttctgagttgcagaaacatcagctatttttcctaagtgcttggtcttggataacaacagcaatacaatcaacagagttctgtgcagggcaaaactggatgcttaatccatca

SEQ ID NO: 223665 - DNA, 602 bp, Homo sapiens
gtagccttgccagtcgcaaatacttacagaatgaatggatgatattggtaaaggaatgtgcaragagacataaataagccaattgggaagtccataatatggaatgcaaagtaacagaaataatatgttttaaacagttaatgtttattcaaaacttacctgtggggttgggtgcagtggctcacgcctgtaatcccaacactttgggaggccgaagtgggtggatctcttcttaaagtccagagtttgagaccagcctggccaacatggcgaaacctcgtctctactgaaaatacaaaaattaactgggtgtggtggcatgcgtctgtattcccatctactcaggaggctgaggcaggagaattgcttgaacccaggaggcagaggttgcagtgagctaagagtgtgccattgcaccccagcctggacatcagagcaacagagcgtgactccatgtcaaaacaacaacaacaaaaaccttacatgtgccagacactatacttagcactttacatatgttacttattcctcactcttacgccatgaaagatgtgctattagtattagcttcatgagcatgtcgcctgtgctgagaagggctc

SEQ ID NO: 223666 - DNA, 590 bp, Homo sapiens
aagcttcatgaaagtagggatttgtgttgcctctgtcactgctgaatccccaagacctagcacagggcttggcacatgaagacgatattgctctgttatacacctctatgaacataacaagcctcactcttcccactccactaccacaaccctagtcaagtcactcacctgtactgcgtagactcttacggtgcctttgtaattagtctctctgcttatacccacttcygctagcccctctatattccagtggccaggttcatcttcagacatacagcagatcgtttcattcctctatctagaagacttcaatttctttctattccacttaaaatccatgctccttacctgtataatgtggcctttgcctatgcctttaaacacatcctgtaccagaataaatatttgtagctaacagaataaagtatgtgtctgtcacatcaaaccttggatgacaccggctgttaagcaggtaaaaatacaacttctgtggctttggtgagtgttccatggattttgtcacatataatataacatgcatatttcctaccagtgggaaatgccatcatgagtgaaacagcacccgtgcc

SEQ ID NO: 223667 - DNA, 504 bp, Homo sapiens
aaatattgctatagaaaacgcatgtagaaggcaggcaccgcggctcatgcctgtaatcccagcactttgagaggctgaggtgggtggatcacctgatcacctgaggtcaggagttcaagaccagcctggccaaagtggcaaaaccccatctccactgaaaatacaaaatcaactgggtgtggtagcaggcgcctgtaatcccaactactcaggaggcaaggctggagaatcacttgaacccgggaggcggaggtttcagtgagcttagattgtgccattgtactccagcctaggcaacgagcaaaacatcatytaaaaaaaaaaaaaaaaaattaaactgccttcaagaccctactattcgcaacagcattaataaaaatattgccagtattaacatttttaaagcagtttatgatatagaatgcacttatccaaaatgatctgtttttaaaccaaacctatttgattggtataactatccttactatttaaagaaaaaaaaaa

SEQ ID NO: 223668 - DNA, 592 bp, Homo sapiens
gaattctcagtgacaggccactagcacacgtatgcacaggcgtgcaggatggaaactcactagtcaggggtgggtggagaagctgcaaggaagaagacaggctgtttgtctcttcttggttcctggttcgtgatccttgtacggcatcaggggtgttcgcagatcctttttgtgaggtagaaggagagaactgagaaaatcccctcctgggaataattttaastaactacaattatttttaaacatttagaagctaatgtttagtttaatgaccaaaataatgaaaatactacaaaaaaggccattgtgtgatttcatttttaaaaattctgtctccagagaaaatatttgcttagctacagatgccaaagatgtcctctcaggagtagtttaactgtgcagtagaacattattaaggaaagcataaatctagcgttgcgtgaaaataaaaactgcaatgattaaattgaaggctactttttaaaaaatggagaccagatgcaaccaggcaaagtgccatctgtgaaggctttgtggcttcaaggccacaaaaataaaatgtggcacaaaaggatgcactagaagttccaac

SEQ ID NO: 223669 - DNA, 389 bp, Homo sapiens
ctggttaccctgctgcgcaactcattccgataggcacatcaagtattctccaccacgattcccattgggctgaaactccctaatgtaatcatccctaaaaactgggcagcttacactgctttaaaaattgccacataacttaatattgactrtagtaattgttttgactaatgcgcttgaaaatacttacctttaattcagtctcttccatttcctgagacccagattggctctcaggagaaaactgcattgcaatgcgtggcactggaattgcttacttctcacctctgggaagtgtggcttctgtcttgtactgtagtgttgttcttcagttcctgttattgattacaaatgacattggcaataatcatcacacagatgcaagctaa

SEQ ID NO: 223670 - DNA, 710 bp, Homo sapiens
gtacctatattctggattttctcagcttatatttcatgaagataaaattttctacgttttaagttctagcattatttcccacttgtatgtatattgggctcatctactttttatacttttaatttgggtagtatcaaacatgtgagtagatttaaaacgctattttaaatggagtggaaaaagcaatggaaaagaaatcctggtgtgcaattaaaggagggtggtgtggtttgtttctcctcctcaccagcaaatctgcgggccatccatccagggagggcaaggcctgggcccttctgctcggccgtcagcgtggggcgtggtcctgatgaagtagcccttgtactctgaatctcagactccttggctacaaggaagatggtatgattccaattgtctgagtacctagattatttaaactcatagaggcagcaggtaccatgctgatcccgggggcaggaggagggggaagtgggttattcacactaatggtacagagcctcagttagggcaggtgaaagttctggagattggtataacaatatgaatgtattaggttggtgcaaaagcaattgctgatttagaagtaatggcaaaaccagcaattacttttccaccaacctaatacttaatgccaaaaagctgtaccgttamaatggttacaatggtaaattgtatgttatccacatttaactgtaattttaaaagga

SEQ ID NO: 223671 - DNA, 529 bp, Homo sapiens
aaaaaatagatataacttttagcagtggaagattttttagacactaggaataaaaggatatatgagaatctgccaatcaagtggtggatatgaacaggtaaggaacaaaagagaatatcaatataatggaataagcaaaggagatacagcacctgttctgagggagttcagtgaaacatgtttaaacaaatgtagggatttaacagcttcctggatgaggcagtgcttgagaaggattttgagggattttaccaataatttagtgaagaagagtgaggctgctctaattgatgatgaattcgcataaatgaagacaaggagctgaaaagaaaaatgatcaagtgttgtgtgcgcagtgaaggatcagtgatgatactggattgagtgcagggaacatggcaggaacaataggagatggcgaagaaggtgatgtgggatggattctacaggccttttgattattatcttatttttttattattattataytattattattattattattattattattattatttgagac

SEQ ID NO: 223672 - DNA, 553 bp, Homo sapiens
aagttaccattgacttctgtatattgcaatcttgtattctacagtcttcctataatcactttttgtttgcaggagttttcttttttgtggattctttcagatattattattatgctttttttggcaaatgtatttaaccaacccgtaacactccttagaataaaagatttttggaataaaaaagatcacaattctccacccaagaatgtcaggtgaagttaggacatcagtcattcttggaatgggagggactggtagaagacttgacccttttttgtccctttttctagggttttccgaggaccataagaattcaaaaacactcttaagaacccagctcctccccggaggttgcagtgagacgagawtgtgccactgcacttcagcctgggtgacagagtaagactctgtctcaaaaaaaaaagaacccagtccctcccacttggcccttagacccaggtctccagccaaatgccaattagaatcttgtccttcgagtatgtaagatgagcagctccttcctgcccctacaccaacttagctcttttttctt

SEQ ID NO: 223673 - DNA, 589 bp, Homo sapiens
tagttgtgactacccagatagtgttggttacttcctctgctgtccttcttaggcaacttataagcagatctgggagagtatttcagttgctgctgtgtgcccacacatgtgtgcgcacacaatttctcacactctgccctgtttctgtatccatctggctgtcctgctagactgacaccctcaggggagatctcttttgtgccttattcaacttagattacccagtgcttagccaaatgctatacacctagtggtgtttaataaatgtttgctgaatgaaggagcaaggagtcttgattcaagttcagatcctggactagagtgtgagttttaaaagcccattctattaatctgctcccagtatctccatctatatgtcactgggattggatgagaatgccctgtaagggtcctgtctgctgttacatttgatggttgtggggttctctcrtagcttcctttagtcacagccaacatgcagtgctaggaactgaggagaaagacaaacatggatgctctgcattgtgcaatgtgagagaatctcgtggtaaaatttaagacgcatgtcacctgactccagcaaaaactg

SEQ ID NO: 223674 - DNA, 589 bp, Homo sapiens
tagttgtgactacccagatagtgttggttacttcctctgctgtccttcttaggcaacttataagcagatctgggagagtatttcagttgctgctgtgtgcccacacatgtgtgcgcacacaatttctcacactctgccctgtttctgtatccatctggctgtcctgctagactgacaccctcaggggagatctcttttgtgccttattcaacttagattacccagtgcttagccaaatgctatacacctagtggtgtttaataaatgtttgctgaatgaaggagcaaggagtcttgattcaagttcagatcctggactagagtgtgagttttaaaagcccattctattaatctgctcccagtatctccatctatatgtcactgggattggatgagaatgccctgtaagggtcctgtctgctgttacatttgatggttgtggggttctctcatagcttcctttagtcacagccaacatgcagtgctaggaactgaggagaaagacaaacatggatgctctgcattgtgcaatgtgagagaatctcrtggtaaaatttaagacgcatgtcacctgactccagcaaaaactg

SEQ ID NO: 223675 - DNA, 458 bp, Homo sapiens
tgtttcctgccacgcttttatttgtagctaactttcctttatctgtattgttcctgtcttgctcctgtttgattccactccctaaaatttctcctcagtttgagtccctgtccatttactctgagtaatctgagaaaccactgaagaatttcaaccaaagaagtgatacaatctaacttatgccttaaaaggatcactctggcctctctgttgaacaaagaatgcaggaaagaagacagaaggaaacagggagatgggttaggaaacaattacagtacctgtactgacagattttatacatgagagaactgrggcagatggttaaatcaccttctctagctctccaactgctaagtgatggagacagcattcaaatctaggtattcaactccagaatctggagtaaatatccaccatttgaggatgttcaacacattttatttatttatttattttca

SEQ ID NO: 223676 - DNA, 393 bp, Homo sapiens
gagtactatacacacatacaaccccgaccccgccacagtcttttattatttgcagggaaagtgtctgcaagccagcatattaacctgttaacagtggttctaaaatctctaaagagagaactaagggggacttccactttctaaatcatatattctacaatgtgtacattttagaaacaagcaaattacatccacaataacaaaaacaattaagattttaaacttcatttaaattctagtgccaaagcacttcaatatttataaaactatttaaattctgagctctgggcccaatgttcacattaacaaatctggtaactcctccaggctttatttattcctgatccataaaatgaggctaaaartgcttttccttctactgcttagggttat

SEQ ID NO: 223677 - DNA, 406 bp, Homo sapiens
ttcaattacctcccactgggtccctcccatgacacgtggggattattacaattcaaggtgagatttgagtggggacacagagccaagtcagatcagttgcattttctgccatgggaaatgggtgggcaaatgaaggcacgagtgccctgaatttgatgtccctggacctaggggcatacccaggggccggaaggagcatctcccakcagcatgggatgttttatcactgaccttgtgtagaattgccaacacatgttatgagagaaaggagatggactgtgagctggtgtcactacagtttctaaattctctataggcaaggcctgtctcattgatgctccagggcaggccactcccactgcccctccccacttagtgcccgcacatgtgtgtgctctgccatggg

SEQ ID NO: 223678 - DNA, 545 bp, Homo sapiens
ctcaccaccgcgcttcaattacctcccactgggtccctcccatgacacgtggggattattacaattcaaggtgagatttgagtggggacacagagccaagtcagatcagttgcattttctgccatgggaaatgggtgggcaaatgaaggcacgagtgccctgaatttgatgtccctggacctaggggcatacccaggggccggaaggagcatctcccagcagcatgggatgttttatcactgaccttgtgtagaattgccaacacatgttatgagagaaaggagatggactgtgagctggtgtcactacagtttctaaattctctataggcaaggcctgtctcattgatgctccagggcaggccactcccactgcccctccccacttagtgcccgcacatgtgtgtgctctgccatgggtctccccaccggtctcccagagcctctgtgtccttgggggttctggctcttctcttccatgcctccacttttgagcctyagaacttcagacactacagaggcccagagggaaggaggagagcaggg

SEQ ID NO: 223679 - DNA, 513 bp, Homo sapiens
caaactatatacttaaaaagtgccattgttcttgagaaagtggcttattgagggtccctcagatgcctgcagttgatgtaygcagcgatgacttgcaccgggaaggacgggttcgccaaaaggcaccatgacttggttttgtcctcaccaattttttcctaaaataacatttgtgcacatttacttgcttatttttttaactggatctcctcgcttcaactcttctcagaaaagggttttaccacagggatgctgtcatcttcatgggtctcagaaaattgaggccaagcctattgggcacttggcctctggaacaagcagcaggacataggaaaatccatttgacatcctgctggtacctcagcttgaccccagtgagatgccagccattagagtgtgtggttaaaacccaggaacccagcaacgtgggcttgtaattggttgtagatttttgttctaagtagccaattaactcagtaattcatgctagggacctcttgaaatgacagcctg

SEQ ID NO: 223680 - DNA, 513 bp, Homo sapiens
caaactatatacttaaaaagtgccattgttcttgagaaagtggcttattgagggtccctcagatgcctgcagttgatgtatrcagcgatgacttgcaccgggaaggacgggttcgccaaaaggcaccatgacttggttttgtcctcaccaattttttcctaaaataacatttgtgcacatttacttgcttatttttttaactggatctcctcgcttcaactcttctcagaaaagggttttaccacagggatgctgtcatcttcatgggtctcagaaaattgaggccaagcctattgggcacttggcctctggaacaagcagcaggacataggaaaatccatttgacatcctgctggtacctcagcttgaccccagtgagatgccagccattagagtgtgtggttaaaacccaggaacccagcaacgtgggcttgtaattggttgtagatttttgttctaagtagccaattaactcagtaattcatgctagggacctcttgaaatgacagcctg

SEQ ID NO: 223681 - DNA, 482 bp, Homo sapiens
gaagctctaggagaatccttccctgcctcttctagtgtctcatggctcaggtgtcctttggccgcttcacttcagtctccgcctctgtcttcacacagccttcctctcttttcagtgttttgtcttctgtctcttataaggacactgccgctgaatttatcyagacaatccaggataatctcattttgagatccttagttatatctacaaaaactctgtttccaaataaagtcacattcacagattctgggggttaggatgaggatagccaatatttggaggacattgtgttcagtggacatatctttttaagggctgccactcagcccactacaaattacattttaaaaattattcttctcctgtttcctcccttctgaatgttagtcaccattgagcactctctcactatgttcccattaccatgtgaagtgctttttacctgagttagtattagtaattccactaatgtagcctacatg

SEQ ID NO: 223682 - DNA, 539 bp, Homo sapiens
agattatcttagtcttccctcactcaactagaaggaaacttatgcaagtacattgcttgaagatgaggccaaaggtagaaaatgaattacattacagttaaacaattcagtattatcctctgaaaggtaggaggaactcagctcatgtatgattagcacctaccagcaacaaattaggataatttggaatggtttcctaaatgcaacagatggaaatgtctctsttaagaatattgaatgagaaggagtaaaatgagactccatttgtgagaatgaatagcatctccttgcctccctcatcattctgttcaatgtcactctgcaacattttctactgagatgttctgaagtcaaatgcctgagacactttcaaaaagacatccttggtattctggattttgatgagtacagtgatcagttgttattattttagatgctgcttggtggcttcttcccttgatgttctgggctgaaattttgtgattattaacgtagtggagaatgctaatggtgatgaaatgaggtatcaatgtttggtt

SEQ ID NO: 223683 - DNA, 240 bp, Homo sapiens
catgggttttcagccctcaggtcttagaactacgccactagctttcctgtatctccagcttgcaaacagcagatgatgggacttttcagcctccatactcgtgggagccaataccttataataaatctctttctagatatctctccatctctatctctakgtctatctctatcttatctctatttccatctctatctatctatctctatttccatttctatctctatctctatctctatc

SEQ ID NO: 223684 - DNA, 529 bp, Homo sapiens
tcactgtactaggcagaacaggccagacttgcgtggttcttaaccttggcaactcattgcaatcacctagagagctttccagatgactgatgactgcgtcccacccctagaggttctgattcattggtgtagggtgaggccaggcatccagctatctaaaagctgcccggtgattacaatgtatagtaagggctgagaaccagtgggctcgaggaatcctcaattggcttcagatgagctgagtgacggtgtaccttyttcaggtgggttgtgttatgcctggtgagaaaaactggactgattctcttataatctggactttttggccactgtaactgccttttaaacagctgcctactagttatgttgccagatgttgtttaatctttgtacctcagtttgcccatcgatacaatgggagataatcataatttcttaccttttggggttgtcctggggattagtaagataatttgtaaaatgtttagaacagttgtcagcactgagccgaagctatgtggcacttcct

SEQ ID NO: 223685 - DNA, 529 bp, Homo sapiens
tcactgtactaggcagaacaggccagacttgcgtggttcttaaccttggcaactcattgcaatcacctagagagctttccagatgactgatgactgcgtcccacccctagaggttctgattcattggtgtagggtgaggccaggcatccagctatctaaaagctgcccggtgattacaatgtatagtaagggctgagaaccagtgggctcgaggaatcctcaattggcttcagatgagctgagtgacggtgtaccttcttcaggtgggttgtgttatgcctggtgagaaaaactggactgattctcttataatctggactttttggccactgtaactgccttttaaacagctgcctactagttatgttgccagatrttgtttaatctttgtacctcagtttgcccatcgatacaatgggagataatcataatttcttaccttttggggttgtcctggggattagtaagataatttgtaaaatgtttagaacagttgtcagcactgagccgaagctatgtggcacttcct

SEQ ID NO: 223686 - DNA, 588 bp, Homo sapiens
ggggttcatagatggtacccgctctctgtgtcttcatatggtggaaggaagagcaaggcagctctctagggcctctaagggcaccaatcccatttatgatggctycaccttcatgacctaatcatctcccaaaggctccatctcttcataccattatcttggggattcagatttcaacacataaattttgggtgcacacaaacaatcagaccatagtagtgggtgtcactgtaaggaaattctctattaacatgtaaactctgtctccatgtagtagacaggaaagacagtaggtcatgggggtatagaaggatatggactttggatcatctgggacccaagttcaagtctcagccttttcacctacaagctgggtggtcttgggcaagttacttaacctctctgagactcagttttctctttcacagaaagatctttatctatctcacaaggttgttgtgaagacagagatattgttgagaagccactaaaattctgatttggcttacgttgtgtactggctatacaaaagtttattgttgtcatagaacttataatgttggggaaagatgaaccaaaaaagacaac

SEQ ID NO: 223687 - DNA, 299 bp, Homo sapiens
aaaaaaaaaaaaaaaaaaaaagcagatgaagttcaacctagggaaacagagacctcatgaaggtcaaccacccgcctaaagtcacatatttgkttactgccagacctagggctagaacccagcttcctgattctagttctgtatcttatctcctgtcatttctgcatctcccatcttaacccgctttgtttatggataaatcccagaagagaaatccttgcctctaagggatgcagaattttggtaagggctttcaaaatagagccctttctcaaagaatgagaattgctaaagaaaag

SEQ ID NO: 223688 - DNA, 299 bp, Homo sapiens
aaaaaaaaaaaaaaaaaaaaagcagatgaagttcaacctagggaaacagagacctcatgaaggtcaaccacccgcctaaagtcacatatttggttactgccagacctagggctagaacccagcttcctgrttctagttctgtatcttatctcctgtcatttctgcatctcccatcttaacccgctttgtttatggataaatcccagaagagaaatccttgcctctaagggatgcagaattttggtaagggctttcaaaatagagccctttctcaaagaatgagaattgctaaagaaaag

SEQ ID NO: 223689 - DNA, 393 bp, Homo sapiens
ctcaggaggctgaagttggaggatcactggagtccatggggttgaggctgcagtaagctgtgaccataccactgcactccttgggcaacagagcgagaccatgtctcaaaacaaagttgagatcctttattgagatgggaaatctttaattatctttttttctggatacaaggccatggttgctcaagtgcttcaaggaatggtagataggaaaatgttgatagtaagttcttgaacacctgggaaattccaagagtatatgttaggaatgcatttagcggcaaagagaaggcagactacaragggttgaactagtgggtattattttctcccatatgaagtccagaggtagaagtccagacccagtgctgtcagagacctgggattgctctc

SEQ ID NO: 223690 - DNA, 482 bp, Homo sapiens
ctggtttaaatgcctctgacaactccactttcttcctttgcctggctcacttttgagtcatctgttttgagtgttgtgtttctgagggcattgccttggtggtgttatagcagggagtaggggcctgcactgtgaataatggttaggggctgggatgctgtgcagctggacctctcagccttcartgtgcgtctgaaccacctgtggagcttgttagactgcagagagtcagttctgaaggtcttggtgaggccaatgctgctggtccggagcctacactttgaacatagaggaaacaaatctagccttttaaaactctgattcaaaagcaggggtatgaggccaggcttggcagctcatgtgggtaatccccgtgctttgggagcctgaggtgggaggatcactagagggcaggagttcaagatcagcctgggcaacatagtgagacccctgtctctacaaaactaaaattttttttaaaa

SEQ ID NO: 223691 - DNA, 265 bp, Homo sapiens
tttgccccaggggacatgtggcaatgtctggagacattttggttgtcattcctgggggctgctactgacatctattgggtagaagccagtgatgctgcatgctacaatgcactgatcccctcaagaaagaattatccagtcccaaatggcaatarggctgaggttgaaaagtcctgttctagacgcagagttatttttggtcccttagggtttattaaataatcaaataatctggtgttgggtgagttaatcagacccataaatt

SEQ ID NO: 223692 - DNA, 565 bp, Homo sapiens
tattttgggataaaacattttgattttcttccttatctcataatgttatgccagggtcagattggaaagtaagccatgatatatggggttaaataaaacccatctgatgagaatttatggtttgtagggaataactccctcgasttcctagataggaatttgggcaagataaaaaaaaatcagagcttagtcctcagtcttcagaaaaatgtcatcctaactgatgcctagaccaagagaatgcagccacagctttcatcttgatttctgtacttgagaatatgttttcttccatggaaactcttctaaattcataaagtggacttcacagaggcttgagagtgttgcccaagaaaagtgcctttgagatgacagagaatggggagatttttagcttaatgaatagtaggcactcaaaaatgtgctaagtcagtgcatgatgtaggatgctgcaaataaacatttattgagcatctgccataagccagggactctgcgaggctcaggccagaggggtcacgaacagaaaagtaaattctgggtcagtggccttaagaacactgag

SEQ ID NO: 223693 - DNA, 593 bp, Homo sapiens
tgcgaggctcaggccagaggggtcacgaacagaaaagtaaattctgggtcagtggccttaagaacactgagataaatgggagagaagagcttgtaagcaaagaatcacaacttgggatgatgagcatggcaggatgttttgaaatcttaaccagttcctgttttctacctctctcaatacttgagctgaggtgatgtgactgccgcaggtagtcccaatatccagactgccctgtcatggaacagtgcactttgtagttggacccacggttttccagcttaagatgttttctagccaacttggcggctttaggragactggagaaaaaacagaatgtaagaagttgcttcaaagttttaaatgatgctcagatagaagggaatacagtaaagagtacatttcaactcattctacggatggaatgaggaggaagtgaggagccagtctgcacactggactcttgagaggaataccctcccttttccccttttccttcttcctggtgatgggaaggagaatgggatggcgggggctcttgaaacagtcttggataataagttagaagctgtgtgttgatgctggcagaatgacaa

SEQ ID NO: 223694 - DNA, 503 bp, Homo sapiens
tccagactgccctgtcatggaacagtgcactttgtagttggacccacggttttccagcttaagatgttttctagccaacttggcggctttagggagactggagaaaaaacagaatgtaagaagttgcttcaaagttttaaatgatgctcagatagaaggsaatacagtaaagagtacatttcaactcattctacggatggaatgaggaggaagtgaggagccagtctgcacactggactcttgagaggaataccctcccttttccccttttccttcttcctggtgatgggaaggagaatgggatggcgggggctcttgaaacagtcttggataataagttagaagctgtgtgttgatgctggcagaatgacaaatgagaaaccatcctagcattgttccgacagttgtggagctaccataccagctctgagctgcctaccttccccaccacctttttttttttttttttttttttttttttaaaaaggtaggctcttgctctg

SEQ ID NO: 223695 - DNA, 503 bp, Homo sapiens
tccagactgccctgtcatggaacagtgcactttgtagttggacccacggttttccagcttaagatgttttctagccaacttggcggctttagggagactggagaaaaaacagaatgtaagaagttgcttcaaagttttaaatgatgctcagatagaagggaatacagtaaagagtacatttcaactcattytacggatggaatgaggaggaagtgaggagccagtctgcacactggactcttgagaggaataccctcccttttccccttttccttcttcctggtgatgggaaggagaatgggatggcgggggctcttgaaacagtcttggataataagttagaagctgtgtgttgatgctggcagaatgacaaatgagaaaccatcctagcattgttccgacagttgtggagctaccataccagctctgagctgcctaccttccccaccacctttttttttttttttttttttttttttttaaaaaggtaggctcttgctctg

SEQ ID NO: 223696 - DNA, 483 bp, Homo sapiens
agatctggtcttgctatgttgcccaggctggtctcaaactcgtggcctcaagtgatccttctgcctcaggctcccaaagtgctgggattacaggcgtgagccactgtgccaggcttctccctgcattttcacatgggaaaaaagaaacctctctctttcatatgccactgctattttggatctctgggtccagcagctaaacctgtatgcaattaaatatgctcaactcctgtgtccttatccctcagctacactgatcccagtgagggagtagagacatggtaaatatcaaagatgaccttggtgtgtctgagaccagagayacgcttgttccctatcccttggcaaagcctggggatatggtcctacaatgcataggagtaaaagcatgccggtccggctcatctaggcttttgtgccttggacaccctcacagtgtttcctgaggcctccgcagggttaagaggcatcaggatgattttg

SEQ ID NO: 223697 - DNA, 483 bp, Homo sapiens
agatctggtcttgctatgttgcccaggctggtctcaaactcgtggcctcaagtgatccttctgcctcaggctcccaaagtgctgggattacaggcgtgagccactgtgccaggcttctccctgcattttcacatgggaaaaaagaaacctctctctttcatatgccactgctattttggatctctgggtccagcagctaaacctgtatgcaattaaatatgctcaactcctgtgtccttatccctcagctacactgatcccagtgagggagtagagacatggtaaatatcaaagatgaccttggtgtgtctgagaccagagatacgcttgttccctatcccttggcaaagcctggggatatggtcctacaatgcataggagtaaaagcatgcyggtccggctcatctaggcttttgtgccttggacaccctcacagtgtttcctgaggcctccgcagggttaagaggcatcaggatgattttg

SEQ ID NO: 223698 - DNA, 483 bp, Homo sapiens
agatctggtcttgctatgttgcccaggctggtctcaaactcgtggcctcaagtgatccttctgcctcaggctcccaaagtgctgggattacaggcgtgagccactgtgccaggcttctccctgcattttcacatgggaaaaaagaaacctctctctttcatatgccactgctattttggatctctgggtccagcagctaaacctgtatgcaattaaatatgctcaactcctgtgtccttatccctcagctacactgatcccagtgagggagtagagacatggtaaatatcaaagatgaccttggtgtgtctgagaccagagatacgcttgttccctatcccttggcaaagcctggggatatggtcctacaatgcataggagtaaaagcatgccggtccggctcrtctaggcttttgtgccttggacaccctcacagtgtttcctgaggcctccgcagggttaagaggcatcaggatgattttg

SEQ ID NO: 223699 - DNA, 483 bp, Homo sapiens
agatctggtcttgctatgttgcccaggctggtctcaaactcgtggcctcaagtgatccttctgcctcaggctcccaaagtgctgggattacaggcgtgagccactgtgccaggcttctccctgcattttcacatgggaaaaaagaaacctctctctttcatatgccactgctattttggatctctgggtccagcagctaaacctgtatgcaattaaatatgctcaactcctgtgtccttatccctcagctacactgatcccagtgagggagtagagacatggtaaatatcaaagatgaccttggtgtgtctgagaccagagatacgcttgttccctatcccttggcaaagcctggggatatggtcctacaatgcataggagtaaaagcatgccggtccggctcatctaggcttttgtgccttggacacsctcacagtgtttcctgaggcctccgcagggttaagaggcatcaggatgattttg

SEQ ID NO: 223700 - DNA, 391 bp, Homo sapiens
gaattcctcagacagggagttttgcctctggctgstctgctggatatttgctctcctcagtttcttctgaggcctctctccttggcttgtagatggccaccttctggccatgtcctcccctggtcttttgtatgtgcctgcatatccttggtgtctctctgtgtgttcacatttcttcttcttgtgaggacttgagtcaggttggatgagggccccccttaacgacctcatttttacttaatcacctctttaaaggcctaatctcccaatacattcacattctgaggtcctgggagtcggggcttcagcataggaattttgaggggacacaattcaccaaaaataaaattgtgagctccccatccaattgaacagatgctcctcctggcca

SEQ ID NO: 223701 - DNA, 578 bp, Homo sapiens
ttttgctaatagggaagtctaattacttctgaattcctcagacagggagttttgcctctggctggtctgctggatmtttgctctcctcagtttcttctgaggcctctctccttggcttgtagatggccaccttctggccatgtcctcccctggtcttttgtatgtgcctgcatatccttggtgtctctctgtgtgttcacatttcttcttcttgtgaggacttgagtcaggttggatgagggccccccttaacgacctcatttttacttaatcacctctttaaaggcctaatctcccaatacattcacattctgaggtcctgggagtcggggcttcagcataggaattttgaggggacacaattcaccaaaaataaaattgtgagctccccatccaattgaacagatgctcctcctggccaaggggactccagggaaacctgaaaaagggaattcctggtcgtgataggaagggaggtcagacatcccattattccccctctcttttggggtttaggtaccactgaccaacattcagagatgatcagactgacaatgcagactctttggcaataagat

SEQ ID NO: 223702 - DNA, 544 bp, Homo sapiens
ctaatggcagttgcttacagtgagtgattattactacagggcaatactctcttctttgtgtgtttatgtaagagaagtgtgctcttgggcacttagaaggtatggaatgagggataagactccagtgggggatgggcggctgattggctttctgttgtccaccagaatgtccttgcaataaagtgtactgtaaaggcattttcatgtctcatcccatagtgtttccctcttttgtgatccaggattcagtataaaaataggatccttgattttgaggaatttcttctgtcttccatctgtgcctgcatattaggccctaaaaattgcatgttttcctggtcctgttctttaaagsgttccaccctaaagccagtaatccaattaagaaacatatctttaaggaaatctccatgtgtaagacagtctgcttttcctggctatcttaactgagcttttactcacaccatttttccttggtttgagtaaaatataaattctctatttcataccacctaagagttttccctttagaaatgcaaacttg

SEQ ID NO: 223703 - DNA, 632 bp, Homo sapiens
gatgataagcccagatttttcttgcctactattttaaaagtgatttactaataagttcattttttttggtaattgcttaattatagcattattgtatttttagtgctcataaatgcaatcaaatctttttgcatttgtgttccatttacaaaatttccagagtacatacaaagtacatattagtgaactgaactgcttaggctatacaatttcaattagctgaaatcagccaccaaatggtggataagcttattggaaaaatatatacgatgctaaatttttgaaataaaggtgttttaaaatgactttccttcactttcaaaaagttgtgaatggcaaaagagaataaaaatgcctaatgcatcagaacttattaagaagtrtaaggaaactatcatagttaggccactagccttccttggtattatttttaactaattaaagaagagtattacttcagtgattctttgtgatcctgttttgagtcttaaattttattaaatttatttatacttttattatcataatgaagcttgcaaaaacagaaagtctcatttttcattgattaagtcccaataactcgtccaaagttaagctttaataacacgtaaatgctgctgaagagtaagata

SEQ ID NO: 223704 - DNA, 557 bp, Homo sapiens
cctacccaaatgagaagaaccagaaaaccacccctggtaatatgacaaaacaaggctctttaacaccccgcccccaaaatcacactagttcactggcagtgagtggatccaaaacaagaagtaatccctgatttacaggagattagttattaagcttatcagggagggaccagagaaaggcaaagcccartgcaaggaaatccataaaacgataaagaagtgaagggagaaatattcaaggaaatagatagcttaaagaaaaaaatcaataaaaaattcaggaaactttggacacacttttagaaatgggaaatgctatggaaagtctcaccagtagaattgaacgagtagaagaaagaaattcagagcttgaagacaaggtcttctaattaaaccaatccaacaaagataaagaacaaagaataagaaaatatgaataaagcctctaagaagtctgggattatgttaaatgactaaacctaagaataatcggtgttcctgaggaagaagagacttctaaaagcttggaaaacatatttgggggactattcgaagaa

SEQ ID NO: 223705 - DNA, 607 bp, Homo sapiens
gtctgctcattccaccttctgcctgctttttctagctgtgctggcagccaaggggatggtgcccacccagactgcgggtgggtctgcctctcctagtccactgattcaaatggtagtctcctctagcaacaacctcaagatacacccaggaaaattactttgcatccttcaagccagtcaagttgacatttaatattaaccatcacaccatcttagtcaatcttcaaaaacacactatgtaattgatataaattttaaaggagaaggacacaccttagcccaggtgartgcttccaaagaaaggggaaatgcacaacggtttttagacaatgatgctgttgccgcatatgaattatgttttcattttctattgtcttgaatatggcaaagaggaaaatcaggtgacaaattgctagttagcgagcaactgagacattcaatttaatgtgggaactgtgaaggtgaatgaatgattatataaaaactcttctaaattatcataatcatgggagggggccaactcacaagttttgaagaccgtttattaaattgataataggtagacatcaagtagtaatacatagctttaaaatgagaccattagcaa

SEQ ID NO: 223706 - DNA, 607 bp, Homo sapiens
gtctgctcattccaccttctgcctgctttttctagctgtgctggcagccaaggggatggtgcccacccagactgcgggtgggtctgcctctcctagtccactgattcaaatggtagtctcctctagcaacaacctcaagatacacccaggaaaattactttgcatccttcaagccagtcaagttgacatttaatattaaccatcacaccatcttagtcaatcttcaaaaacacactatgtaattgatataaattttaaaggagaaggacacaccttagcccaggtgaatgcttccaaagaaaggggaaatgcacaayggtttttagacaatgatgctgttgccgcatatgaattatgttttcattttctattgtcttgaatatggcaaagaggaaaatcaggtgacaaattgctagttagcgagcaactgagacattcaatttaatgtgggaactgtgaaggtgaatgaatgattatataaaaactcttctaaattatcataatcatgggagggggccaactcacaagttttgaagaccgtttattaaattgataataggtagacatcaagtagtaatacatagctttaaaatgagaccattagcaa

SEQ ID NO: 223707 - DNA, 607 bp, Homo sapiens
gtctgctcattccaccttctgcctgctttttctagctgtgctggcagccaaggggatggtgcccacccagactgcgggtgggtctgcctctcctagtccactgattcaaatggtagtctcctctagcaacaacctcaagatacacccaggaaaattactttgcatccttcaagccagtcaagttgacatttaatattaaccatcacaccatcttagtcaatcttcaaaaacacactatgtaattgatataaattttaaaggagaaggacacaccttagcccaggtgaatgcttccaaagaaaggggaaatgcacaacggtttttagacaatgatgctgttgccrcatatgaattatgttttcattttctattgtcttgaatatggcaaagaggaaaatcaggtgacaaattgctagttagcgagcaactgagacattcaatttaatgtgggaactgtgaaggtgaatgaatgattatataaaaactcttctaaattatcataatcatgggagggggccaactcacaagttttgaagaccgtttattaaattgataataggtagacatcaagtagtaatacatagctttaaaatgagaccattagcaa

SEQ ID NO: 223708 - DNA, 607 bp, Homo sapiens
gtctgctcattccaccttctgcctgctttttctagctgtgctggcagccaaggggatggtgcccacccagactgcgggtgggtctgcctctcctagtccactgattcaaatggtagtctcctctagcaacaacctcaagatacacccaggaaaattactttgcatccttcaagccagtcaagttgacatttaatattaaccatcacaccatcttagtcaatcttcaaaaacacactatgtaattgatataaattttaaaggagaaggacacaccttagcccaggtgaatgcttccaaagaaaggggaaatgcacaacggtttttagacaatgatgctgttgccgcatatgaattatgttttcattttctattgtcttgaatatggcaaagaggaaaatcaggtgacaaattgctagttagcgagcaactgagacattcaatttaatgtgggaactgtgaaggtgaatgaatgattatataaaaactcttctaaattatcataatcatgggagggggccaactcwcaagttttgaagaccgtttattaaattgataataggtagacatcaagtagtaatacatagctttaaaatgagaccattagcaa

SEQ ID NO: 223709 - DNA, 443 bp, Homo sapiens
atactcattttattttaactttagtaatggaaacagtgcagtattgttgtgaaaacatataaatggatcaatgaaacgagcagagtgtcaaaaagcagactgacatatacataatatgttatgcaggataatggttccccaagagttccacatcctaatcccccaaacctatgaaaatgttatctctaaggaaaagagaattcaggktgcagactgaattaaaattccgagtcagttgactttaaaatagggagattattccagatcatctaggtgggcccaatataatcacaacaatgcttcttaaaagtggaagaagaaaacagaagacagagagaaaagtgactattgaaggcaagagcattggcctgcccctgctggctttgaaggtggagaatgtggtcttgacacaatgtgattggtctccaaaagccaaaaaagca

SEQ ID NO: 223710 - DNA, 614 bp, Homo sapiens
tgctaatatgtaataaatctgtttgaattatctcattgttattgagtcatttttagtagcttatgccttcctaggaatttatttacttacaaagttacttaatttattagcatatgtttttttcttaatagtactcctttttaattctttctttttgtcttgtaaggtcaataataatgctctctctgtaatttctaatttcagtagtattaaagtccttttaaattttctaatttagtaaaaaattgtcaattttcttgaacttttcaaagaagcagattttggtttcattaattttcttgattgttcttttattctccatttcatttgtttcttttgtaatctttattattttcattttttaacttgttttaagtttttattgctgtttttttycccctgtgtctcaaggtgcaagactatgataatgattggacatctatcttctttttcaactgaggtatttacagctataaattttcctctaactgcggatttaactgcatctcatgaattttgctcatgttatattttcatttcaattcagctcaaaataatttctcttttctctttgatttcttctttgacccagtggtcaaagaagtatgtttatt

SEQ ID NO: 223711 - DNA, 506 bp, Homo sapiens
tacttccattctcccttaagatgatgttagtcccagtgctggggcctgagtagaaaggtgactcaaggataatgccaaattgttcttttttctgtccccaaactgaattacccaccatagttcaccagtgtaaatgtgctatatgtgcagtagcctttcctgaaattggagaattaaaaagagaattataatttagggggaaaagtcttcaaaatatgttccaaacagactgctaaaaattggttcctcactattaccctttattcctcagggtaaacttatcagaggtgaggtgaaggaatgtgtaaataaaacttgtacatttgcctactaataatagtgccttatttaagaatttgctttccaaatgcaacaaaagcaaagataaatagatgtgacttaactaaactaaaaagcttctgcacagcaaaagaaacaatcagcagagttaacagacaagccacagaatgggagaaaaycttcacaatctagaaattcgacaaagg

SEQ ID NO: 223712 - DNA, 554 bp, Homo sapiens
tagtgtttggcacactgatgggcacctattaggaatttggctggtgaagaaaataatgcagactacacaataaataagatgaatggagcaaagagattagagaagtagagaacaacttcaaaaagtcaatttgaagacataatcaagtatagaaaataagaaattttcctagatgagggmatttataatctgcagatagaaagaacacgctgtaattatgacaaagaatcaacataggcatgcttccaggtgaaattcacaattaagaaataatcttatggccagtaagacataaattgcaggtcaccactaaggggaataaatcaagttaatttaattcttccacaacaatattcaaaggctttgtaacatctaccaatatctgaggagaaatataagtgttactctagaaatttacacccatccaagtttaatgaaagcagaaaaacaatgaaaatgcaaggtatacacaaaaggactccaaagttataacagctaagagctcttcttgaggatggaggaaagaaaatactacttgataatcaaatatatac

SEQ ID NO: 223713 - DNA, 593 bp, Homo sapiens
acaaactgtggcacatacatatagtaggattccactcatcagtacaaagaagggagctattcacaactgcaaaagtctaayagtcatgacaacaagtgtaggaactctctgtactacctttgcaacttgtctctaaatctagaatgatcccagaatagcaaaattatttgagtgaacacaaattaaaatatgtctagagttcttaagtgttttttaattgtaatatcataaatgttttaagctgaaaaacacagtggaagttggctaagattctgctttttgtaagtgagaaaactgagatacaaagtgatgaaacagaaagctgcaaagtcactgttaatattttaattcgtggtaactaccaattatagtattctaggtgataaatttatttaaagattattttagaacaatttttatctttggaaaccaggatttatttataattttaattatttagtttttttctggtttcctacttattaatttggtcaaaaatatttactgaacaccacattatatgccagctcttctctgggcactgaggatacgatatctgactcagcattttgtaagcaaatgagggctggaaa

SEQ ID NO: 223714 - DNA, 623 bp, Homo sapiens
attgtattgcagtgtagtttggattgggaggtgagtctaaaccaacattcttgttttccgaaggcccactcgtgacatatgaacttacatgatgcagagggaatgtttgggataattaggaaactgataggatgactgagttaaaagcaattagcccmtcgtgtgcagctactttgagactgaaaataaatgatcacaatgtaattataacatcccttttcctgtcctacaaagccagatgagaatagtaatctcggaaatgaccagtgtaagttgtaggcaagccatgcctatgtgaagaccattgtgttttcagaggctattagatgagtcaaggaccctacctgatttctgctgtaatgagattgtgtaatacgtactctgtgaagcatccaggtttcgtgggctctaatgcatatagagtcttggaagaaatctttgaggaaaagaatttaaaattgtaaattgttgcaaggggtttatgcagatgagggtcccacatgttttcttcatgctaaagccacctttgcaattatttctaaaatacacactgaggaatacttagaaataatgaggcatggatagagatctaaaatactgagacagtacctgaggtgagctag

SEQ ID NO: 223715 - DNA, 629 bp, Homo sapiens
gtgtgtgtgtgtgtgtgtgtgtgtgtgtgtgtacttacacagttggccctccatatctgcaggttccacatttgttgattcaaccaaccatggatcaaaaatatttggaaaaaatttgcatctgttctgaacacatacagactttttttttaacttatcattccttaagcaatacactgtaacacctatttaaatagtatttacactgctttaggtattataagtaatctattataatttaaagtatacaagaagatgtgcacaggttatatgcaaatactatgccattttatattagcaacttgagcattcttggattttgataactgcagaagttcctggaaacgattcccgacagatacagagggatgactgtaaatatatgtgtgtatgcatatttatttatttgttttatatcttaaatcattttcaacaatctctttagttcattcatttgaggcactattttcatgtctgtgtgtatgtggtaaatatcctccctttaaattatmattgtaaaattgattatttctgttttttgtattaaagagaaaaaatttttcaaatacttacaatttttaaagaatcagctcatatacaaatttgaattgtattaatcttttttttgt

SEQ ID NO: 223716 - DNA, 603 bp, Homo sapiens
tggttaatgtgagtcaccctctgaaagacagatttgtttttacagagtaatgaatttaggtattcaagattgcaagactgaattccaaacccttttgtagacttcattttggcctaatgatggaacacagaagtgtacamgtgagaatgaagggacaaaatttgtttttttattctatcatatgatcactatatccaaaaatgacgatataagtttggtgctttctacagaggcggagtaaggcacttctttatacagtttaaagcattttttaaaagttacctactgtgttttaaaacttaagtacatttaaagtttttgttaaggtattttaaagtatgattaatcattaaagtgctagcaagataaccagagttatgtactattttgcctgtaggaggaaaccatctttctcttctgatctgtttgttctataagaagtactttataagagcacagaaagagagattgtagaaaaatcttgaaaaattgttagaaatgaataataatgtgtacaaaaaatgattaatgattaatgaatgctgggattctaaaaagagctctgggaacaacacggtgaacaagaggaacaggacaaaggac

SEQ ID NO: 223717 - DNA, 603 bp, Homo sapiens
tggttaatgtgagtcaccctctgaaagacagatttgtttttacagagtaatgaatttaggtattcaagattgcaagactgaattccaaacccttttgtagacttcattttggcctaatgatggaacacagaagtgtacaagtgagaatgaagggacaaaatttgtttttttattctatcatrtgatcactatatccaaaaatgacgatataagtttggtgctttctacagaggcggagtaaggcacttctttatacagtttaaagcattttttaaaagttacctactgtgttttaaaacttaagtacatttaaagtttttgttaaggtattttaaagtatgattaatcattaaagtgctagcaagataaccagagttatgtactattttgcctgtaggaggaaaccatctttctcttctgatctgtttgttctataagaagtactttataagagcacagaaagagagattgtagaaaaatcttgaaaaattgttagaaatgaataataatgtgtacaaaaaatgattaatgattaatgaatgctgggattctaaaaagagctctgggaacaacacggtgaacaagaggaacaggacaaaggac

SEQ ID NO: 223718 - DNA, 603 bp, Homo sapiens
tggttaatgtgagtcaccctctgaaagacagatttgtttttacagagtaatgaatttaggtattcaagattgcaagactgaattccaaacccttttgtagacttcattttggcctaatgatggaacacagaagtgtacaagtgagaatgaagggacaaaatttgtttttttattctatcatatgatcactatatccaaaaatgacgatataagtttggtgctttctacagaggyggagtaaggcacttctttatacagtttaaagcattttttaaaagttacctactgtgttttaaaacttaagtacatttaaagtttttgttaaggtattttaaagtatgattaatcattaaagtgctagcaagataaccagagttatgtactattttgcctgtaggaggaaaccatctttctcttctgatctgtttgttctataagaagtactttataagagcacagaaagagagattgtagaaaaatcttgaaaaattgttagaaatgaataataatgtgtacaaaaaatgattaatgattaatgaatgctgggattctaaaaagagctctgggaacaacacggtgaacaagaggaacaggacaaaggac

SEQ ID NO: 223719 - DNA, 596 bp, Homo sapiens
catttattaataactgatacttttttcagacttatcaacagaatctgtcatagtaattaaaattctgttttaaaaccttcattttgtagtatttccacagaactgtagatacttgaaagagaagagaccattggattcatctaaaaaatgctgtccaatggaaatgtaatgttagtcacaaaggcaagtcacatatatcaataaactttctatagctaccttaaagtgaacatgtgcaattaactttaagaatatatttcatgtaactcaacagctaaaaatatttttatttcaaaatataatcaatgcaaaaacactaagatattttgtatttttttgttgttgttgttctacgtctttcaaatccatggtatattttatagtacatctccatttggaataagtatttcccagtgctgatagctacatgtttctattgcccaccatattggatggcaaagatctacagcatctcattaccttgatattcagatgtgagaatacttttttgaagtgagtcagayaaaagaaggctataaatgtcatatattttgataagcactgttgacaattcatatccacccatttcacagcca

SEQ ID NO: 223720 - DNA, 460 bp, Homo sapiens
tttatttctttagtctttattcagatttacaattaggtttccataagtgatggatgtgccctggtgaatcacctttcctccattttaaaagaatctgaatccattcaaggtcccttcttgattgcaaattcaaccagttaaattgtttttactcatcacaatcrtgcagttctgctcttagaacctacttagcaggctgtaaagagcactcaactcaagcttcaggctgtttgtgtgatattaatccccagactggatacaaggtgacaatgtttcctgacatatgttttctatttttatactattgttctatttttttgtttcaacaaccatttctcaattatattttaataaagcaatattagtatatttggatatgaaagattcattggcattaattttctaatgtgaaaaagcgatttccattgtaaatacagaagttaaaatcagcatttgggaa

SEQ ID NO: 223721 - DNA, 523 bp, Homo sapiens
gctatttcaaaccctcatcattcccttcaaaaaccaatcagttcacttcacagtgaataaccttgttttattcttattctagaggtttaccaggaaaaaaaaagtcctcagctccttatctgtcttcatagaaatctatctacattcattctcttccctttagcmctccactgaatctcagagaaagaagcatcttttcaaacctctccagcctcattctctgaaattttcttaccatgtatttttccctcagtctatacacattcaaaaatttttctaaaaataaatattgggccgataaagtcacccaatcactaatcaacatttgcctcacccttctgctttattcccccactcttccagtcaacttttttgaaaaactagcttactattcttttgaaaaacagactacacttcttactctcattcagtttccagccccttaccataaagcttcatgctaaacacatcaccaaaactgagctgaatgtggtcagtatttactagctaaaagtaaatatca

SEQ ID NO: 223722 - DNA, 523 bp, Homo sapiens
gctatttcaaaccctcatcattcccttcaaaaaccaatcagttcacttcacagtgaataaccttgttttattcttattctagaggtttaccaggaaaaaaaaagtcctcagctccttatctgtcttcatagaaatctatctacattcattctcttccctttagcactccactgaatctcagagaaagaagcatcttttcaaacctctccagcctcattctctgaaattttcttaccatgtatttttccctcagtctatacacattcaaaaatttttctaaaaataaatattgggccgataaagtcacccaatcactaatcaacatttgcctcacccttctgctttattcccccactcttccagtcaacttttttgaaaaactagcttactattyttttgaaaaacagactacacttcttactctcattcagtttccagccccttaccataaagcttcatgctaaacacatcaccaaaactgagctgaatgtggtcagtatttactagctaaaagtaaatatca

SEQ ID NO: 223723 - DNA, 411 bp, Homo sapiens
cagcaaccattaggcagacgctcaagtaagcaggtggtttttgtcagtggagggcctacaagtggacaaaccagagcatggggaggaggaaaaggcaataggtacacaataggtaaaggtttggccaggcagtctatatgggtgtagtatggcagcaggatacagraacaagttcagcaggacatctgtcctgagaaggttgagcagaaggcaatacccaaaatcaagaagaaacaaagctcagcacaaggcttgttcaccaagattgagcaaaatctacttattagtacttcagtaaaaggccagagcagaaccaccagcaatttgtattatatgctactcattcaatgctcttcaaaaccccttgaagagtaccaggtctaagggaggggaggtggcaggaggattgtt

SEQ ID NO: 223724 - DNA, 564 bp, Homo sapiens
actttattttatgtttgcaattagtgacttgttgtcatggaaaccacgcttcagatgattcttgaacttaaatggctgaatgtgatcaggcagatgccctcctcttttttaggctcagtagtcaatgtctctctctttggttattctgataacagaatcacatgaaacatctataaacatgcaaaataatagcatggggcaacatcaattaaaactgaatattcaatcattcattctttaattaaggctctttcctcctttcctgaagctgtaacctttcaagtrttaaaacagacataagaactaaatcatttagtaaaagaaatcttttctaattaactgtttgcgatacactaatgaagaaaaacaggatttgaaattcctttttggtttttaatgttttgatatagaaagaaaagtgaaagggcttcatttggaaagtctattcaaggtaaaaaactatggtttgaggctgtagcctctctctgtgtgtttcttttgtctctgcgtgagggagggttggggtttatcacggaaacagcatagcccactcatggtttctgg

SEQ ID NO: 223725 - DNA, 605 bp, Homo sapiens
ggcctgtgcccctgggctgtcactttcactaatgcttcttagttttgttttgtttagttttgttttgtttctcaaatgagacaggaaggctagaggggactaaagttgggtatttcccttcctctgggtctattagggtctggtaaaatccaagtcagttaaggtctgggaaaattttttccttaaagggagcccttgttaagaagcctgaaatgctctgggcattttcaaaatggtcacttttctccctcccttactggaagataaggtgattttgtttttcattgatatctcactaagaatcttgtgaggctactcaaggtaaaactcataaaagtgtgagggcacccccaaggctgccagaagtttttctttcttaagctagtccacgtttactcttcagcaattagtcaactaccctttaagaactcctaaccagtgctggtgctagctgaggtttctgttyctggtaagctgtgattctctatgtctttcatattttggggatggtgctttgtcctgtgacctcaattttctgaaggatgtaagaagagttgttgattctcattttgctcagcttttcagcttttttttttttttcttgt

SEQ ID NO: 223726 - DNA, 605 bp, Homo sapiens
ggcctgtgcccctgggctgtcactttcactaatgcttcttagttttgttttgtttagttttgttttgtttctcaaatgagacaggaaggctagaggggactaaagttgggtatttcccttcctctgggtctattagggtctggtaaaatccaagtcagttaaggtctgggaaaattttttccttaaagggagcccttgttaagaagcctgaaatgctctgggcattttcaaaatggtcacttttctccctcccttactggaagataaggtgattttgtttttcattgatatctcactaagaatcttgtgaggctactcaaggtaaaactcataaaagtgtgagggcacccccaaggctgccagaagtttttctttcttaagctagtccacgtttactcttcagcaattagtcaactaccctttaagaactcctaaccagtgctggtgctagctgaggtttctgtttctggtaagctgtgattctctatgtctttcatrttttggggatggtgctttgtcctgtgacctcaattttctgaaggatgtaagaagagttgttgattctcattttgctcagcttttcagcttttttttttttttcttgt

SEQ ID NO: 223727 - DNA, 414 bp, Homo sapiens
catggtggcaagataaagaaagagcacaggggaaactgccacttttatttatttttatttttttgagacggagtttcactcttgccgcccaggctagagtgcaatggtgtaatcttgactcactgcaatctccacctcctgggttcaagtgattctccagcctcagcctcccgagtagctgggattccaggtgcatgccagcaagcccagctaatttttgtatttttagtagagacagggtttcaccatgttgtccaggctggtctcaaattcctgacytcaagtgatccacccaccttggcttcccaaagtgctaggattacaggggttagccaccacacccgacagaaactgccacttttaaaccatccgacctcatgagaactccctcactatcataaaaacagcatgagg

SEQ ID NO: 223728 - DNA, 521 bp, Homo sapiens
gcatgattctgttttgtttcaactatccggctytgctttaatgacttggaagaaacagcagattccgattcccttttgcaaatattttagcacttaaacattgtcattcacacagttgttacatcgataacaaagcaagcctgagccctgcttgagcaaggtctgttcctggggaaatagcctgtctgtttccactctgcctcatctgccatattttagttgctaattggagatggaaatgttgccaagttttcttcttccctaggaattgatcttttgggtgaacgtaagccttaaccccttaagctttatcaccatgctttctctaccttatcaattcaaatggatttagcatgtattatcggtatttagatcttgattttctttctacttcattctcctttaaagcaatctgtctagctgaaaacctcttgttagaagagattatatgattgttttttggttttataaactgtttgaagaagtggctgcacacttgaggatttaaaatgatgtctcaa

SEQ ID NO: 223729 - DNA, 521 bp, Homo sapiens
gcatgattctgttttgtttcaactatccggctttgctttaatgacttggaagaaacagcagattccgattcccttttgcaaatattttagcacttaaacattgtcattcacacagttgttacatcgataacaaagcaagcctgagccctgcttgagcaaggtctgttcctggggaaatagcctgtctgtttccactctgcctcatctgccatattttagttgctaattggagatggaaatgttkccaagttttcttcttccctaggaattgatcttttgggtgaacgtaagccttaaccccttaagctttatcaccatgctttctctaccttatcaattcaaatggatttagcatgtattatcggtatttagatcttgattttctttctacttcattctcctttaaagcaatctgtctagctgaaaacctcttgttagaagagattatatgattgttttttggttttataaactgtttgaagaagtggctgcacacttgaggatttaaaatgatgtctcaa

SEQ ID NO: 223730 - DNA, 440 bp, Homo sapiens
tggtgcctctgttggccgacgctacccagaaggcagccagtgagagagtccataaggtgtagtttttagtaggtacttcctgagcttgaaagtagggcagatgaagtggggaaggggatgaaaagtggaaaatatccagaacagttggtttttagatcactgaagtgttagcattattggtgtctaaataacaaaattactataaagggattatattttttaacccctcatgagaaagaagctagaagttctatattttattttatagaaggcgggatgtaaagatgactattagcagggttttcttcttgctgggcaaaaatgttcaaaactttacctaatagtctaatactcctgtaggaaattagtttccaaaggactttccactgayagtatctcattgaattccaactaaagccctaagagggaggtattatctt

SEQ ID NO: 223731 - DNA, 477 bp, Homo sapiens
tctttttttgcaaaattaattaacgacaacagatgcagtcatctgcaagatgttttccaaacaacactaagagcttcttttctgtttttatcattatccctttgcagcatccgaaacattatgtattgtttcagcatgaaaaacacaatatctcacttcaacttcccttgttagctttaagactcttttccagtgccagatatttgggtaagagtgtttatggtatggaacagaatgtcgattatcattgttgtaaccaaagcttatgttggtcatttggaacattattttgtagaggatgsatgtgctacctttttactgtaactgttttttttttccagttgaaaccctataatctgagtcatggttcaaacaaacagtatttcaaatactgtttatcaaaaattttaaaagagtaactgaggctggctgtaatttaactgtgaatttgattttcattgctgatttacagagagg

SEQ ID NO: 223732 - DNA, 356 bp, Homo sapiens
acttggaacatgctctataccagagttcactgatattaacctaatggctatttttaaaattaaagttccttatctttgggggcttttccagaaaatccagcaattactttttcaaatatccattatttcttcagggacgtattttataagaaacagaagaaaatataagcattagatattttggtgtatataaattacyacagcaatctctgtagtattttcctgtaagttcttatcaaagcaatttagggcaaacaattggaaagtgagaattaaatgtgatcatctttcttagagaagtgagttcacaatgccaaaaaatccattttattgaatttccgcccctcagaactgac

SEQ ID NO: 223733 - DNA, 578 bp, Homo sapiens
ggaaagggaggcccagcaagacatccaaggacactggctagcaatgtgtagaactaggagttgtacacaggatgatttgmtttaaaaccctcactctttccataggacgatgttgtctttgagtgctgcaaatagttagggacatctcaacacagctaggtttgttttagagcttggtgaaaccatgtaaaagtgtttagatgaccagaatggcttgaatcaaattgacctggtattctcaaggctggaaaatatttcattgcttattactctctctctcttttttttttcatggccagcagagaattggtttcattcacatattcaatttataacataattcagcaattacgctagttgctggggtcttcggcacatcacgtagaattcttaagtcagggtggcgtcccccggctctgcagtctgactggcatggcttgataccacacagctcttccaggactcactctttctcagtcatctaacttgaattctccaaccctcaaactattcccctttcagatcaggatagtgacacttcaaatcacagtgttgccaggaggctcaaaagactccat

SEQ ID NO: 223734 - DNA, 578 bp, Homo sapiens
ggaaagggaggcccagcaagacatccaaggacactggctagcaatgtgtagaactaggagttgtacacaggatgatttgatttaaaaccctcactctttccataggacgatgttgtctttgagtgctgcaaatagttagggacatctcaacacagctaggtttgttttagagcttggtgaaaccatgtaaaagtgtttagatgaccagaatggcttgaatcaaattgacctggtattctcraggctggaaaatatttcattgcttattactctctctctcttttttttttcatggccagcagagaattggtttcattcacatattcaatttataacataattcagcaattacgctagttgctggggtcttcggcacatcacgtagaattcttaagtcagggtggcgtcccccggctctgcagtctgactggcatggcttgataccacacagctcttccaggactcactctttctcagtcatctaacttgaattctccaaccctcaaactattcccctttcagatcaggatagtgacacttcaaatcacagtgttgccaggaggctcaaaagactccat

SEQ ID NO: 223735 - DNA, 550 bp, Homo sapiens
gattattaattcagcattagatttactgaatttgagataatggcagggcattcagtaggcccaaggaataatttagctagagagatgagaccagatctggaaagaaatatcagaactaaaggaataaattttgaaattgtctgcatggagatgatagttggagtcatgcaaggtcttccaggaagaaaagaaatacaggggttaaaggcaaaattttaatgaatatccatggaggtagaatgggaagaggtcaaggaacaagtagacatgactgagtagtatttagacagaagctctaccagaaaaatgcagtgccacagaggccagatgaatgaattccaattctacaactatcaaagatgtactaaaacaacaacaacaacaacaaacaaacaacamaaaaccatggatttgatcatgggaaaattactggtgaattctgagtattatctggggtagaaggcagatgatgggattgacttagccaatgagaaaaggaaggcagcacgtgtagggctccaagaagtttaatactgaaagaaagggaaga

SEQ ID NO: 223736 - DNA, 553 bp, Homo sapiens
tgcttatcaatgaataaatggatatccctcttattaaaataagctaacagaagaatttcttaaccacatttgttgaatgattaaatcctattctttgaagtgtcaggctgtccttagagagatttaattcaaaggttctggaaaataagatagaatttcatatatgaaatggtttttaaaaatcgaggtggtagaacacctaagataatccctttaggataatttcaagttatatttccttagttaatggctattaatccttaaaaatcaatgcaagcaccatctccactgaaaagcctgtcttcactcccagtctaagtattcaacacacacacacacacacacacacacacacacccctgaacttctgtggctctatgggaatatttctttcatagcactcttctcactgttttgaaatacactgagatcctttccacagtctctaagttcmgttaggatagcaacattgtcttattcttctaatgattgctaattcctaacatagtatttggcacttagtagatgctaaataagttttcgtcgaaatgac

SEQ ID NO: 223737 - DNA, 329 bp, Homo sapiens
tttggtaaacatataactgtgttatccatctgtgcaacctccatatatctttaaaacaccgcaatccacagaaaactgtctttaaaaacaaacaatgtgaaaagtatacaaatgtttgatttatttttctgaagagagaccttcccaggaaaaaagtttactgcaatatattcaaggtatgtggtttgtcttgggtgaagagtggtgagggtgaacagggagtcatttttctgcagtcttcactgttatagttctagtcatatttccaaaaatgtttatgattttcgaagtttttwaaaaaaagttagatttgccatgtacaaatcctg

SEQ ID NO: 223738 - DNA, 351 bp, Homo sapiens
ttgactgaaatctttctgcaaatttctgctggytgaacatgactgaaatctatttcctaaactggagttcactctcctcatgatgaattcagaaaaataattgggcacctgaataaaggatttcttctactgagattttcagacatatccaatgattatctatatctttgtcagactaaaattcaccagatgacgtaaatgaaattcacaaatattatttttcagaaaaacaatataaagtatcttccacacttataaatgtattataccagcttattaggccttctaattgtcttaggaaaattgcaacgatgtactaactagttttcttgccacttgactatctaatca

SEQ ID NO: 223739 - DNA, 351 bp, Homo sapiens
ttgactgaaatctttctgcaaatttctgctggctgaacatgactgaaatctatttcctaaactggagttcactctcctmatgatgaattcagaaaaataattgggcacctgaataaaggatttcttctactgagattttcagacatatccaatgattatctatatctttgtcagactaaaattcaccagatgacgtaaatgaaattcacaaatattatttttcagaaaaacaatataaagtatcttccacacttataaatgtattataccagcttattaggccttctaattgtcttaggaaaattgcaacgatgtactaactagttttcttgccacttgactatctaatca

SEQ ID NO: 223740 - DNA, 565 bp, Homo sapiens
ctatggcagctacagccttacaaaatatatttcttaartaagaagacttcaaaatcaaaataactcatgcatccacaggctgcagaatggatattgcattagcaggcatggaaacattaatctccttgtacatcttcttcagagctctttggtgactaggtcaatgggaagtaatattttgaaagagatctttttaaaatttaatttttttgagaaagtgtctcattctgtcaccctagctggagtgcacgggcatgatcatgcctcactgcagcctcaacaatctgaactcaagcaatccttctacttcagcctcccaagtagctgggactacaggtgcacaccaccatgcctgactaaattattattttttttgtagagatcgggtctcactttgtttcctatgttgctctcaaactcctgggttcaagtgattctcccagtttggtctcccaaagtgctgggaatacaggcatgagacactgtgcccatccaggatcttttttttctgagcagtaggtcttaatagggggcttaaaatattcagcaaatcataccataaaca

SEQ ID NO: 223741 - DNA, 479 bp, Homo sapiens
gtaaactaagttttcctgcaggtttcccacagaactctgcactctaacttttagaagagtatagaacctctttgcaaagcagaagtttattgtttcaagagtattatgatgtaaaaaaggatattgattctctaagggataaacattgttctgtggaagggccagttttagcacagacttaggtggggaaaaatcatttctaagtataaaatccagagagaatgtggctatgtaggtaggggttggaggatactacacaatggaataagagtaaatggggaccagagagaaatgattatccatgagcatctccatgyagtcttagaatatctcactatccccgcaaagagggcaaactttgaggtgtatagttctaacaccaacaatggtgaaaatgcattataaaagaaagactttgagatgggcatactttttatttctaaataataatctacagtgtatgtaccttttcaaaatat

SEQ ID NO: 223742 - DNA, 485 bp, Homo sapiens
acaataatagtatgaaatattacgcagtcattaaaagtaatgaataggagccaaccaggttaatttggagagctttccttaagttgctattgactgagaaaatcaagatacagaaaaaacatgtttccatttttacaaaacaaagctgatctctgttgatgctggtgtatattatttaaggatagaagaaatttggagaattttacctgagtgaaggaaggtaagtagtaaaataaaagatgcggtatygaagtcagaaggaaacagcaaaattagaatataataataattaccctttatacaatcatatttatgaatttatataaaatcatattaatgcaagtgtgtttaggaaaacaatattaaaataagaacctaggctttgaaaaaattattcatgtgggagggtataatttggtaataaatctgaaaataaaaacattctgtagtatggattacctgagatactcatttggtgagtaaaa

SEQ ID NO: 223743 - DNA, 543 bp, Homo sapiens
caactgaaagctttatcaatagactggacaaagtaraaaacataatttcagagcttgaagactggtcttttgaactaatccagtcagacaaagataaagaaaaaagattttttaaaagtgaagaaagtcagaaatatgagattatgtaaagtgatcaaacctacgaattactggcatgccctagagagaaagagaaaaagaaaacagcctggaaaacatatttgatggaataattcaagaaaatttcttgaatcttgctagatagacatctaagtacagtaaagccagacagcacctgtgagatactataaaaaatgaacattaccaaggcatatactcaccagactgtccaaggtcactgtcaaagaaaaagccctaaaggcactggagaaaaaggccagatcacatacaaaggtagccccatcaggataacagcagacttctcagcagaaaccttacaagccagcagagattgaggtatctattttcagaattcttgaagaaaataaattataatcaaaagattcatatcctgccgaacta

SEQ ID NO: 223744 - DNA, 559 bp, Homo sapiens
aaggaatttcaaaatacaactgaaagctttatcaatagactggacaaagtagaaaacataatttcagagcttgaagactggtcttttgaactaatccagtcagacaaarataaagaaaaaagattttttaaaagtgaagaaagtcagaaatatgagattatgtaaagtgatcaaacctacgaattactggcatgccctagagagaaagagaaaaagaaaacagcctggaaaacatatttgatggaataattcaagaaaatttcttgaatcttgctagatagacatctaagtacagtaaagccagacagcacctgtgagatactataaaaaatgaacattaccaaggcatatactcaccagactgtccaaggtcactgtcaaagaaaaagccctaaaggcactggagaaaaaggccagatcacatacaaaggtagccccatcaggataacagcagacttctcagcagaaaccttacaagccagcagagattgaggtatctattttcagaattcttgaagaaaataaattataatcaaaagattcatatcctgccgaacta

SEQ ID NO: 223745 - DNA, 559 bp, Homo sapiens
aaggaatttcaaaatacaactgaaagctttatcaatagactggacaaagtagaaaacataatttcagagcttgaagactggtcttttgaactaatccagtcagacaaagataaagaaaaaagattttttwaaagtgaagaaagtcagaaatatgagattatgtaaagtgatcaaacctacgaattactggcatgccctagagagaaagagaaaaagaaaacagcctggaaaacatatttgatggaataattcaagaaaatttcttgaatcttgctagatagacatctaagtacagtaaagccagacagcacctgtgagatactataaaaaatgaacattaccaaggcatatactcaccagactgtccaaggtcactgtcaaagaaaaagccctaaaggcactggagaaaaaggccagatcacatacaaaggtagccccatcaggataacagcagacttctcagcagaaaccttacaagccagcagagattgaggtatctattttcagaattcttgaagaaaataaattataatcaaaagattcatatcctgccgaacta

SEQ ID NO: 223746 - DNA, 593 bp, Homo sapiens
ttgttttatattttattatactggaacagctcgtgtccttggtcttttgcctcagcacctgggtggcttgccgcccacaggctccacccccctagtttttcttttaacatggaaattcagaaatttaaaatttctgtctcaaaatctgtattacaaagagattcccatgtgtttcctaagccattctatgaagaatatatttaaaactcttcatctaattgagcatacacgtttttcctcaagtaacaaccagctccagaagcagagactgttaataaccatgtggtaagactttaatttcaaacactttttgccctgtattataaaaaatattcacagagcatctttgtatcatagtttaaagtwtcaaatttcagaagtttttgtatttcattgtttacataatcattttaaagatcctgcaccactgtgagctactgaatgttacgaaacatattcttgtgtatcctaatgtacctaaggtcttgcatgtaagaagtgttttaatcatttttgaacatgaagaaatgagcagacaagtaaatttctatataatagaatgttataggtagtataacatgcacaagatatct

SEQ ID NO: 223747 - DNA, 605 bp, Homo sapiens
tagatctgtacttctccatgtaccttactgtagttaatatcataagaatgacaytcataaatattatctcctaagtatgtctaatgaaaaaatttgggaagaaatgtgaaatccttttgtaaactgtgaagtgtgtatacaagtgtaggacaaaatgatcacggtgggattcagcgatttagtaaatattgaagattctttttgtaaacctgaacaatgaaatggcagtagtgtcgaaaaaaaaaaatagaaatttagaacaggcatgtcgatttctactttggtttatgttaagtttcagcagactatgactgggaatatcctaagggaatctagtgatttggcacttgagacctttctgatgagattgtaagtgtttttgaccttggaagaatttctgttcttgactcctgactgtgtgctaggcagtgagacactgaatgtacaagatgaggcttatgatagagtagtaagagcagaaaatcaagtaaagaacaaacacttctaagtcactataaatgcttcctataaagaaaacagagaatgttaggttagggcacattgaagaagtgcgtagttaggatgggggccggaatgggagtaga

SEQ ID NO: 223748 - DNA, 558 bp, Homo sapiens
gataaattcctggaaacacaaacctcccaagaatgaatcaggaagaaactgaaacctgaactgaccaatcttgagttgcaaaattgaagcaggaataaaaaccaactaagcaaaaaaagtccaggattagatagatttacagctgaattctaccagatgtacamagaacagctgataccaattctactgatactattccaaaaaatagagaaactcctccttaactcatctatgaagtcagcatcatcctgatatcaaaacctagcaaagacacaacaaaaaaagaaaactacaggccaatatccctgatgaacttatacacaaagattctcaacaaaatattaatactagtgaacttaatctagcagcacatccaaaagttaattcaccataaaaatgtaggtttgattcctggaatcaagtttgtttcaacatatgcaaatcaataaatgtgatttaccacataaacattaaaaacaacacctataggatcatctcaatggatgtagaaaaagcttttgataaaattcaacttcccttcatgttaaaaaccctcaa

SEQ ID NO: 223749 - DNA, 558 bp, Homo sapiens
gataaattcctggaaacacaaacctcccaagaatgaatcaggaagaaactgaaacctgaactgaccaatcttgagttgcaaaattgaagcaggaataaaaaccaactaagcaaaaaaagtccaggattagatagatttacagctgaattctaccagatgtacacagaacagctgataccaattctactgatactattccaaaaaatagagaaactcctccttaactcatctatgaagtcagcatcatcctgatatcaaaacctagcaaagacacaacaaaaaaagaaaactacaggccaatatccctgatgaacttatacacaaagattctcaacaaaatattaatactagtgaacttaatctagcagcacatccaaaagttaattcaccataaaaatgtaggtttgattcctggaatcaagtttgtttcaacatatgcaaatcaataaatgtgatttaccacataaacattaaaaacaacacctataggatcatctcaatggatgtagaaaaagcttttgataaaattcaacwtcccttcatgttaaaaaccctcaa

SEQ ID NO: 223750 - DNA, 387 bp, Homo sapiens
actgtaacagagaatgttcaatgatctcagctaygctactgataagcatgagaagagttgagtcagagacagggtaattaaagcttatgcttccatgggctagagagaacctgcatccattctcctaacatctgtctacttattcctgctgctgccatgtccatacattggccggatagagcaattgggtcagagaggggcaggaaaggcatgggagaaggttaggaaccaaggggaagaagaggtagatgccatcaacacctccttatcttcctgctcttttgaagtccatgaaatctactcatcccatacccttctcctaggcaaccctattgtctgtcaaggttcaagactcagtcacaccttcttcagatatttcagcatcac

SEQ ID NO: 223751 - DNA, 375 bp, Homo sapiens
ctggctttcccatctgaaccatgtgggtgctgctgtgatgctgggaatgggtcagccacaggaggaaaaccaccctcagaatcctactatagcctgaaagatagactaggaagacaaaaagacaaacaaaaacaaaagtgtcttttttttattgttttattactttttatttgacaagtaaaggactccaaaagtctctatgcaatygttgagacactgtatgaagccagcctcgaagcccatcccaggtggggcgctcagtgagaatttcctgtgtgctgcccggccttgtgggtagccccggccaaggaatcctctcttcacccaagtgcgggtgttgggatgttcccttagcttcctcagccaaggaaataa

SEQ ID NO: 223752 - DNA, 594 bp, Homo sapiens
ccttagcttcctcagccaaggaaataaacgcttgttaaaaacaagcttaggactttagcatatttaaactgttttattatactcaaagttacagattggtttaaggagctggtaaaaattactttagcactgcaattattagttttttagataacattccagaaaacactgaatgagcatatcttaaggttactggaattaatctttaatgcaatattgaatagactcggtccagttttcctcaagtatcgtattttagaaacccgtggcatggctggtgaggagcggtcagcctcgtcaaggaggaagtcctatcagcagagattcacctttcggtttggaataacatcgtgasatctttttgtacagttttcttgagtattgaaattggcccaattattcattgaagtccaattcacattctggcttttcaactcgtacattttgtggaatagtgagactcatttgcaagaagtaacacactgtgtttctggatgacattctcatctgaatgcaaagcacaatgagcaaagttaagacagtaccgacttcctggcttctgctgcacctgtgactgttgtcgcctgcacccca

SEQ ID NO: 223753 - DNA, 594 bp, Homo sapiens
ccttagcttcctcagccaaggaaataaacgcttgttaaaaacaagcttaggactttagcatatttaaactgttttattatactcaaagttacagattggtttaaggagctggtaaaaattactttagcactgcaattattagttttttagataacattccagaaaacactgaatgagcatatcttaaggttactggaattaatctttaatgcaatattgaatagactcggtccagttttcctcaagtatcgtattttagaaacccgtggcatggctggtgaggagcggtcagcctcgtcaaggaggaagtcctatcagcagagattcacctttcggtttggaataacatcgtgagatctttttgtacagttttcttgagtattgaaattggcccaattattcattgaagtccaattcacattctggcttttcaactcrtacattttgtggaatagtgagactcatttgcaagaagtaacacactgtgtttctggatgacattctcatctgaatgcaaagcacaatgagcaaagttaagacagtaccgacttcctggcttctgctgcacctgtgactgttgtcgcctgcacccca

SEQ ID NO: 223754 - DNA, 594 bp, Homo sapiens
ccttagcttcctcagccaaggaaataaacgcttgttaaaaacaagcttaggactttagcatatttaaactgttttattatactcaaagttacagattggtttaaggagctggtaaaaattactttagcactgcaattattagttttttagataacattccagaaaacactgaatgagcatatcttaaggttactggaattaatctttaatgcaatattgaatagactcggtccagttttcctcaagtatcgtattttagaaacccgtggcatggctggtgaggagcggtcagcctcgtcaaggaggaagtcctatcagcagagattcacctttcggtttggaataacatcgtgagatctttttgtacagttttcttgagtattgaaattggcccaattattcattgaagtccaattcacattctggcttttcaactcgtacattttgtggaatagtgagactcatttgcaagaagtaacacactgtgtttctggatgacattctcatctgaatgcaaagcacaatgagcraagttaagacagtaccgacttcctggcttctgctgcacctgtgactgttgtcgcctgcacccca

SEQ ID NO: 223755 - DNA, 540 bp, Homo sapiens
tcgaccctgaaagatgctttctgctgcctctgctcagaattaatacagaactgggcaacagaacacttttaaggtggatcttaggatcataagccctttttggctgccaaaaccatctctcctgtaacaccttacagttattctcactgttgcttactgagacttttatgagggttaggttttccaggcatgggtggagacaaggaggcaggctgcagcagggcttggagatggaaacactcagcatgacggcgatygcccagggagttacttcttagcatggagacatatgtacttcttgtgaaatgttcactttctcagttcagcaaatctccttcctatggatgaatttttaggcagaaattcatatagtgcctccaggtgtccaggagcctgccacactactcctttaaagtcaaaatgagttgctgcaccctatataataagcaagattcttgaaaaatcactggaaagaggcttattttagatatctgggcctcattcaagatactgtgcaataatgtctggcgtgagcatctt

SEQ ID NO: 223756 - DNA, 566 bp, Homo sapiens
ctggagcttgaatctaaagctcatgttctctgcactgcaaaattcatgtctctcagctctttctttctaaaaaccatcccttataacatccccacytccttcaaatactgtcaatgcacagcaatttgaaattattttcttattaaggatttaaaattgtttgcaatagtttttatctattgaggatgggctttttactttttttaaaagccatctataagaagatatatctgtactttggataggccagttggacaagagttacatcaaagtgcatgaccacagacagttgtgtgcaccaaatcaccaaatgtaacaccatgccatcatgttcctgtgccctcccctaaacaaacagaaaaagctgaggaagttcttagagaacgagatgacacttttcacaaataacaaatgcttccctgagggattttcagttatatgcatcactgctcattctatatatgtcttcacagaagaataactaccatttcttatagtgcaaatgaaacaaacttggtctgatttcagtctggaagctcattatgtgacacatggtggccattagt

SEQ ID NO: 223757 - DNA, 566 bp, Homo sapiens
ctggagcttgaatctaaagctcatgttctctgcactgcaaaattcatgtctctcagctctttctttctaaaaaccatcccttataacatccccacctcyttcaaatactgtcaatgcacagcaatttgaaattattttcttattaaggatttaaaattgtttgcaatagtttttatctattgaggatgggctttttactttttttaaaagccatctataagaagatatatctgtactttggataggccagttggacaagagttacatcaaagtgcatgaccacagacagttgtgtgcaccaaatcaccaaatgtaacaccatgccatcatgttcctgtgccctcccctaaacaaacagaaaaagctgaggaagttcttagagaacgagatgacacttttcacaaataacaaatgcttccctgagggattttcagttatatgcatcactgctcattctatatatgtcttcacagaagaataactaccatttcttatagtgcaaatgaaacaaacttggtctgatttcagtctggaagctcattatgtgacacatggtggccattagt

SEQ ID NO: 223758 - DNA, 589 bp, Homo sapiens
aattctggctttcatttctctttagggtagcttcagtttgtaacaatgacctcttcctatttgtctctttctttgctatattagacatcttattgtaactttcgttgcaaagaaaattcactttttcattagctctcttagtctcaccaagaatgtttgagattttcttcagccgtgtggcttgttctcctggaaagattatttcatgtgcgtttgtcatatcctcttatttttttctataatatttttggaagatgtctaggggaaaggggattccaagttgtcttggagcacttcctgctctggtctcctatcactttgcaatcataagcacctcccttgctgttgtttctttcccttaggagaggaggcctgtatgccctagaggaaatttctgtgtgttataggtttctcttggatgattctgcattttttttcttttcagttcaccttgaaacttacttgatcagtgtctgccaagttgattrtcatttatattttctatactgccctgctgtcttccctgattgattcctgaaaaaaaggagggaaaaagcatattgcccttcagctttaatttgcctgctgt

SEQ ID NO: 223759 - DNA, 574 bp, Homo sapiens
taatacatataaaggaatttagaaaagtggcacatagtaagtgtgtgatatgcttgctatcaatggtttattattactggtattatattttcaaaaagttgctttaaaaaagcctgtggtgataggatgggaaacatcaaaatcctcagatctccacaaagcatagttgaaatactgtagtaatttctaaagaataaagtggctattctctttattttttgaaagcagagttactgtgaaaattactttattctrttgacattacccttcctgaatatgtgaacaacaaaaggaattatccaagtattctcaagcccatatagaaataactttttaaaattcattcagtagtaaatcagcaccatctagtggctccttgtaaattcgtctgtccatttaccactaaatagtcctactttatgatgtatgaaaaatgcaataatgcaaaagcataatattttcttctcctcgatggtattttgttccatgttattttcataggtgaagtacaagaaagacattcaaaatatgcatgatccagtttcagatctcccaaatttgttgtttttagacc

SEQ ID NO: 223760 - DNA, 574 bp, Homo sapiens
taatacatataaaggaatttagaaaagtggcacatagtaagtgtgtgatatgcttgctatcaatggtttattattactggtattatattttcaaaaagttgctttaaaaaagcctgtggtgataggatgggaaacatcaaaatcctcagatctccacaaagcatagttgaaatactgtagtaatttctaaagaataaagtggctattctctttattttttgaaagcagagttactgtgaaaattactttattctattgacattacccttcctgaatatgtgaacaacaaaaggaattatccaagtattctcaagcccatatagaaataactttttaaaattcattcagtagtaaatcagcaccatctagtggctccttgtaaattcgtctgtccatttaccactwaatagtcctactttatgatgtatgaaaaatgcaataatgcaaaagcataatattttcttctcctcgatggtattttgttccatgttattttcataggtgaagtacaagaaagacattcaaaatatgcatgatccagtttcagatctcccaaatttgttgtttttagacc

SEQ ID NO: 223761 - DNA, 558 bp, Homo sapiens
gaactgtactttgtttgtttcgtttaccgaaggtcagcatactgggaagcaattgccatcacatctcagacctttttgcatattttcccgcattgttctgagcctgcatgtgcgcagacgagtcgattggtatgcagattgtctgtcattaaagccatttggaaatcagctttgtcactggtttagtgttggaacttcagatcctagaagccaccactggaaagctctgtgcactctgaaagggaaggtgtgtggccctgctgagcccaacctcggggctggaggaagaagctgaccttgaccttgagccaaagcaatgccccaggacgctgagacgccacacctccaataaagaaaaactgtgaatggcagaagcrgggaactactgggaaggggctaacaaggagaaagcagtgctcagaaccgccacccactctcagggtcactcagcacagtcagctcccatcagtcaggcagccgaggccacaggtcaggaggccacgggcctgtggacaacccatattccagacctcggcatttcacccacatgaccccacc

SEQ ID NO: 223762 - DNA, 558 bp, Homo sapiens
gaactgtactttgtttgtttcgtttaccgaaggtcagcatactgggaagcaattgccatcacatctcagacctttttgcatattttcccgcattgttctgagcctgcatgtgcgcagacgagtcgattggtatgcagattgtctgtcattaaagccatttggaaatcagctttgtcactggtttagtgttggaacttcagatcctagaagccaccactggaaagctctgtgcactctgaaagggaaggtgtgtggccctgctgagcccaacctcggggctggaggaagaagctgaccttgaccttgagccaaagcaatgccccaggacgctgagacgccacacctccaataaagaaaaactgtgaatggcagaagcagggaactactgggwaggggctaacaaggagaaagcagtgctcagaaccgccacccactctcagggtcactcagcacagtcagctcccatcagtcaggcagccgaggccacaggtcaggaggccacgggcctgtggacaacccatattccagacctcggcatttcacccacatgaccccacc

SEQ ID NO: 223763 - DNA, 558 bp, Homo sapiens
gaactgtactttgtttgtttcgtttaccgaaggtcagcatactgggaagcaattgccatcacatctcagacctttttgcatattttcccgcattgttctgagcctgcatgtgcgcagacgagtcgattggtatgcagattgtctgtcattaaagccatttggaaatcagctttgtcactggtttagtgttggaacttcagatcctagaagccaccactggaaagctctgtgcactctgaaagggaaggtgtgtggccctgctgagcccaacctcggggctggaggaagaagctgaccttgaccttgagccaaagcaatgccccaggacgctgagacgccacacctccaataaagaaaaactgtgaatggcagaagcagggaactactgggarggggctaacaaggagaaagcagtgctcagaaccgccacccactctcagggtcactcagcacagtcagctcccatcagtcaggcagccgaggccacaggtcaggaggccacgggcctgtggacaacccatattccagacctcggcatttcacccacatgaccccacc

SEQ ID NO: 223764 - DNA, 624 bp, Homo sapiens
ctgtacaataaagtacttccacagataggctattttctgcttaatggttattattaaaatggaaagagataaaaccaagataaagaagtgaatacatgtgaagatcataaaagagaagatgaaaagggaggaagaaaagttttgtttttttgtttgtttgtgttttttgagatggggtctcactctgtcacccaggctgtagagtagtgatgtgatcacagctcacttcagcctcaaactcctggactcaagcgatcctcctgcctcagcctcccaagtagctggacatacgccaccatgcccagctgatttttttttttccctacagacaggatcttgctacattgcccaacctrgtctcaaattcccagtctcaagcaattatcttgtctcagactcccaaagcactgggattatgggcgtgagcactgcaccatgctaagaacatgttaagaggctcaccaaatctgaaactggaaaagaggaaatatacgtaaatacacaaagattagagtaaatgaaaggaagaaatgtacccacaagaaacgttgaagagtactcaaaaagaagttcactgggggggatgtacgcagagtgcgtgaaagaagagaatatgattaagtg

SEQ ID NO: 223765 - DNA, 624 bp, Homo sapiens
ctgtacaataaagtacttccacagataggctattttctgcttaatggttattattaaaatggaaagagataaaaccaagataaagaagtgaatacatgtgaagatcataaaagagaagatgaaaagggaggaagaaaagttttgtttttttgtttgtttgtgttttttgagatggggtctcactctgtcacccaggctgtagagtagtgatgtgatcacagctcacttcagcctcaaactcctggactcaagcgatcctcctgcctcagcctcccaagtagctggacatacgccaccatgcccagctgatttttttttttccctacagacaggatcttgctacattgcccaacctagtctcaaattcccagtctcaagcaattmtcttgtctcagactcccaaagcactgggattatgggcgtgagcactgcaccatgctaagaacatgttaagaggctcaccaaatctgaaactggaaaagaggaaatatacgtaaatacacaaagattagagtaaatgaaaggaagaaatgtacccacaagaaacgttgaagagtactcaaaaagaagttcactgggggggatgtacgcagagtgcgtgaaagaagagaatatgattaagtg

SEQ ID NO: 223766 - DNA, 596 bp, Homo sapiens
caataattatggcagtctctttaattaattgcttgatctatttgtgtaaaatctttccctccccatcctccaattcaagaaggtgactggttggaggggccaggtacgctcattaatgatggcgtgatagaggaagaaagggggtcctcagagcttcacctggtcatctgaattctcactgggcctctgctgcagaggagccagactgagtttctccctgaactgctgaccacagaggaacaaatggacctgtctggccatttgagatcatgtgctggcaccgactgctggaacccaagatccgagctatttattctcatctttaagtcctcacccaaaatgaactctctcctgcatgagggcctctgctggttcaccagggccctcagcatctccacctctcctccttgggacttggagttacataagtccctggggtccagaatggcagacctgggctcctggtaccacctacaytcactcaggcaccatgatggccacggtgccaagcctacacctatgatttccctaagggcttgagtcttcactacagtagctcaaaggagcaaaggtttctgcagaccatccataccaat

SEQ ID NO: 223767 - DNA, 538 bp, Homo sapiens
  misc_feature (1)...(538): n = A,T,C or G
actcttttgtgctaagaaggcaaagcagacatttggcttctaaaatattcggtaatgcttcaaatattttctagatgtctgggcctgggctggagtctcttagaaggatccaacctgaccccattatctgaagtayttaatttgaatgccactcaatacagtattggggcaagcatttcttttcttatttaaggttattgctgagctatggttgtttacatgcggctgaaaaagatgatttgtttatctgaaattctttctgctactacagccaccagcagctgttcctttggaagcagatagtgatattggactttgtttgcaactttgcctcttagacaccttgtctacattgcagctttttgcttttattcactcagttgcctaatccagaaaactggacaccattcttgacttcttctcctttgcattgcgtctaatggtccatgtagacaagtgagccatttctttctcttatcctgtcctagngacgtcatttccactatagaaacctgtcactggtaggactgtaaattaa

SEQ ID NO: 223768 - DNA, 615 bp, Homo sapiens
tcggaggaaagggtgggaggagagtgagggataaaagactacacattgggtacaatgtacactgcttgggtgatgggtgcaccaaaatctcagaaatcatcactaaagaacttattcatgtatycaaacaccacctgttccccaaaaaccattaaaataaaaaataatttttttaagaaacagtctgcatgtcacagatgagctcaatatataggcttttataaatctaccaaatcaggaaaacttggattgactgagtcagttttactgaattgagaattggtggcacacagaacagcaaatccaggtcttgccacttaatccatctgaacactgcttcctccttttccaaaatcccttaatgaaaaatcccttttcagtaagggatttttcacatttcaatatcccttatggaatatcgattcaatatcccttgttgaaatgtgaaaatgctttatacatttcacagtgctttgtacatacacagtattagtactaccctttttaaaatcattaaaattcttgcttcactaattttaaaacttacattactcagactaacttcttgcatacctctagtctatgcaactgtgtcaattttcccagctaaagaga

SEQ ID NO: 223769 - DNA, 600 bp, Homo sapiens
caaatacaggcaaaatctcatgtaaatgaacattaaggccaatgttattcaatggaaccaaaattgtaaccagagaaaacagcaataaaccgaaggcagaggtgttcctcagtggaggaagaacaaatacaggtgagtctttctccaaaatggcagcctagagccccgggagaacatgtggaggaatgaaggagttggttcccaccagccaccctacacatacacatgtatgtgcacacatcatgtgtgcaaacagacacacaaactctatggggccagtagatgagagcctttagcaccagcaggtgttaccatcccttctccccctacctcacccctacctctggcctggactcaacacttaccccaggtatctggccttaaggccaaggagagggtgccagaccctgggccctgctgggcatccctattccaagactggcctggatgaaaacaatccatctcaaatcacttcgggaaatgggtaggcttatgggagaaagtcayacaaagattaaaaaacaaagtaagttcccccagaagttcaagttttaatttttccatctaagtttcccttttctcaaggcagttgcccctcta

SEQ ID NO: 223770 - DNA, 539 bp, Homo sapiens
ccaaccattgtgagcaccttaagaaagagattgataaattcggatttgggctgaagagagcatgtaaggtgttcaggagtgcagcactttaatccatactgcgagtctggaggaacagaagtcagtgacgggtgtcttcccacattggaagttctgtctcatgaaataggctcttttcataaggccacatagaygcagctagggggagatagattggggtttcagtaaagaaagaaattttaatctgaactttcaaaatttagaggctgtggtggccaaggttgagttctctttcagtggaagtttttgaaaaactagatggcagtccagagagggcattaaacattgttagttataccagatgacatttttttttttttggatgacaagattcaatgactttagttgtaaaaatccgacttatcacattaatcctttagataggtatattatccaagtggaatgggtggttaatactgtttataaaagccaatgaagagtttaagctcacaagaatgtttagtaaactcatttattca

SEQ ID NO: 223771 - DNA, 514 bp, Homo sapiens
gggcattatgtctgcattcaaacagtgtcagattttggagcttcaggtttttagagtagagattttcaacccatagtacagaagctcctcaacttatgatggggttacatcccaataaagccattgtaaattgaaagcattgtaagatgaaaatgtatttaatatacccaacctaccaaacatcacagcctggcctaccttaaacattatccgatcacttacattagcctactggtgggcaaaatcgtctaacacaaagtcttataataaagtattatatatcccatgtactgcgtattgccaacctgggaaaagatcaggattcaaaattcaaaattcagactgtgttgaaattgcaatrgtttcacaccatggtgaagtcaaaaaattacaagttgaaccattgtaagttgggggtctatcagtatataagaatatttcagacaatgtgaaaagtctcattgataaaaaaatattttattcatattgatactacttgccactagtagtgcaa

SEQ ID NO: 223772 - DNA, 590 bp, Homo sapiens
aagggcagaagacaaaatacatgtgagtaccaagctgcaaaatatttaaaaattctatgacatcacattcagactcaaataatttgaaacaaatgtgattattaactgctgagaaaaatccaagtctaagtcaaattgtatgacagactgagagggtgaggtggaggtgggagggagaaaaaaccaggaatgagaagacctagattatagtcttagtccagtttttaatggtgaagtctgaacaaactgttttctctgagcctcagttttctcttataaaacgtgctggtttctgccaagactgctgtgaatactatgtgaaaactctaggacactctaaaaaccaagataaagcagtaaaaatagcactcatcagccaaagttccctgaaaagaatttggagatgtagttatttgtgtggtgagaagataaatgctataaacaactctgacaccagattataattactggttttctttcaaagaaagagccttctaaggaatcayaggacccaaacttgacaacgtcttggttcctattgttatagggattcctgttaggaggatcaggaggccaaatcagggagcaaa

SEQ ID NO: 223773 - DNA, 420 bp, Homo sapiens
aattctggagaagaccacagtgagtgttaatgggctgaatgaagatgtcagcagggctgacttcttccagaggcccctaagagcatccagtccctgcctctccccactccatgaggcagatggtgtgccctggctccgggccacaggctgcattctctgcttccctcatcacattgcctccccctccttctacttcttgcttttcttttataaggacccttgtggttctgactagggcgtactcagataattcaggataaccttctcacctcaggatctttagcttaatcacatctgcaaagtccatttttttcccaaataaggtgacattcacaggttctagggatrggatgtggacatctttggaggagagggcattattctttctgccacacagaacatttgaaagattagctttgg

SEQ ID NO: 223774 - DNA, 544 bp, Homo sapiens
ctgtcagggccaaggggaaggcatagcctgaccctctctggaattaatgccgtcccgaggcctccaycttcattggctagggttttctcagttgcaagctaacctcaggaaatgagtttaagcatactccccaatgagctcattagggccagttgtcctggccaatgagaaaagtgcaggggtgggacttaatatgtaaatggcgcattgggtccggtgaaagcaaattcctcttaggtcccccttcaaagaagaacaagcctgcacactgttcacactgcaagtgatgatttggtttcagcaagagacatcacactaaagtgtgtgccctccatttgaaatcagtttgttgttttctttgtaattaaactgcaaattgatccttctttttgagttgtatgtaagctgaacatgaaaagtgttttgtatcttggttgcatgtttgcagagatctaagtgaatctaatattaaggtaacactggggtccctcaggattcttttcctttaagtgaggtcctagacattattcatggctgaaataaa

SEQ ID NO: 223775 - DNA, 426 bp, Homo sapiens
gatggacagacagataaatagtagaacccttctgcttacatgtaatttcatatattcttaaaacatggagagatgggttttgttaccatagttggcaagtgaggaacctgaggcatttggaggttaagtaatttgccccaaaccacatcgctagaactgggcaggacaggcccccagctctgttgaccacaaattccagggatttcctctccagaccctccagctggttctactggaagcaaacaatgccgtgctaaccagcctcagctctttctcactgggatgctggactgctggaggtgagamtgctgagttttggccaagagggtaatataggcctgttaggatatgctagtgaggccagctcccatgctaacagcagggactcaaccatggtgacaaatgatgaatggacacctggaattc

SEQ ID NO: 223776 - DNA, 480 bp, Homo sapiens
  misc_feature (1)...(480): n = A,T,C or G
tattgagttgtttgagttccttatatattctggttattgatctcttgttggatggataatttgccaatattttctctcattccataggttgtctctttactttgttaatgrttttctttgttgtgcagaagctttttagctaaagtaaagtaatcccatttgtctgtttttgcttttgttgcctctgctttttaggtcttatgcccaaaatctttgcccagatctatgtcctgcagcctttgttttttgttttcttctattagtttcatagcctcaggtcttacatttaagtctttaatccaatttgagttaatttttgtatatggtgagagatggggatctagtttcattttttttggcatatagatatcaagttttcccatcactatttattgaagagactgtccttgccccagtgtatgtccttgatgactntgtcaaaaatgagttggctgtaaaatcatagatttatttctgggt

SEQ ID NO: 223777 - DNA, 476 bp, Homo sapiens
tcaaccaagtctgagggaatagggctgcactcagtaggtgctcagtcgatgctcagaaagtgtgatgctggcaggaagtgcaaaaaccgggagaacccactttttaccactgaggtcgttgtgagtataaagtgaatagccctgaaaccgttagagcagttttgtgctaaatgacttgttgcagcctgagtataacccggggaagttaatttagtctgacagggggacacagaccctcmaggtggagggcaagaaggaacaggtgaggtcccgccatgtgggaccgtgggcgggtcacttttcctcactgtacttgcaacaccttgtctgtgaaacaaggttagacaaggctattgcctgttaaagcaggcttcacggaggagacagcctggagcaggaccttgaaggctgtgtaggagttggatttgccagccggtctcctgggcgttggggggtggtggcgggtgcgggggccg

SEQ ID NO: 223778 - DNA, 357 bp, Homo sapiens
ttcatacatctggtaccaagcgcttgatttacacaaatggtatttttcccaattctaacatgctgccagccccaagcttacccgcattatttttccaactacattttcgttsagatcctgcacttccaggctgtttcagtggcatgtcagatcaggatgccacacacagcctggtacaacgcccaggtcaagaaaccacactatttgaccaggttactctccttacccaagtctctgaccccaaattcctttttcctctctttcaagtacccacaatgagaagaaatcagaaatacatgcataggttttacgaaactgggacttagagaattagctcaatgtgggcacagaaagtaa

SEQ ID NO: 223779 - DNA, 448 bp, Homo sapiens
taaatatgaaaaatgtttaatacttatggcctaataaataacaccttcagatcaatcatgcactcgttccttcaacaaatatttgggctgccattagctgccaggaactgtgctgggctagggctgctgctcatctgtatgctgcacttgtgcaaactagaacagggtgccctccctggacagataaagcagggcccatgtctccaaatgcccacctcagctggtacccttgggtctggaggcttttcctacagtaacaaatgagagtgagtstctagggagttcagattctagtgagggggacgggcaaacacattcaattttcaacgttttctatatgactataaaaaatcagatttccacacaccacacttgttctcatgtaaatctccacctcattgaacactggttactacaatcatcaatttgaacttaggctgaggcatcc

SEQ ID NO: 223780 - DNA, 463 bp, Homo sapiens
atatattttaaatatgaaaaatgtttaatacttatggcctaataaataacaccttcagatcaatcatgcactcgttccttcaacaaatatttgggctgccattagctgccaggaactgtgctgggctagggctgctgctcatctgtatgctgcacttgtgcaaactagaacagggtgccctccctggacagataaagcagggcccatgtctccaaatgcccacctcagctggtacccttgggtctggaggcttttcctacagtaacaaatgagagtgagtctctagggagttcagattctagtgagggggaygggcaaacacattcaattttcaacgttttctatatgactataaaaaatcagatttccacacaccacacttgttctcatgtaaatctccacctcattgaacactggttactacaatcatcaatttgaacttaggctgaggcatccacctgag

SEQ ID NO: 223781 - DNA, 558 bp, Homo sapiens
tcaccacagtgtattatctaaaatgtccagttttcaaaaaaaaaattataagacatacaaagaaatgggaaaagtacaacctgtacagggttagggtgggggagaaaaaaataatgttttatgagaaagtccagatgtcaatgatttcaaagcaggtattatagatatgttaaaaaactaaagaaaacaatacttaaagaagtaaaagaagatatgatgacaatatcatcatgtggagaataaaaataagagatagaaattattaaaaaggacaatggaaatttgaagttgaaatgtgtgatagctgaaatgaaaaataatctcttaataattaatgacagcaagaacaagagaagaaggaatagagttttatagaagtaacatttctrcatttcactggaattaagctaggagaaatctaaagtaaattctgataaattaaaatgtatattgcaatcctagagcaaccattaagaaaataactaaaaactatagtgaaaaatcattaaaggaattagttaaaatgttacactagaaaatactcacttaatgaaatag

SEQ ID NO: 223782 - DNA, 558 bp, Homo sapiens
tcaccacagtgtattatctaaaatgtccagttttcaaaaaaaaaattataagacatacaaagaaatgggaaaagtacaacctgtacagggttagggtgggggagaaaaaaataatgttttatgagaaagtccagatgtcaatgatttcaaagcaggtattatagatatgttaaaaaactaaagaaaacaatacttaaagaagtaaaagaagatatgatgacaatatcatcatgtggagaataaaaataagagatagaaattattaaaaaggacaatggaaatttgaagttgaaatgtgtgatagctgaaatgaaaaataatctcttaataattaatgacagcaagaacaagagaagaaggaatagagttttatagaagtaacatttctacatttcactggaattaagctaggagaaatctaaagtaaattctgataaattaaaatgtatattgcaatcctagagcaaccrttaagaaaataactaaaaactatagtgaaaaatcattaaaggaattagttaaaatgttacactagaaaatactcacttaatgaaatag

SEQ ID NO: 223783 - DNA, 561 bp, Homo sapiens
acagattacagtttacatctatatctttgtttacctctttctgtaaaaaactgatatagctactccatcatcagagtgtaagctcattgagaaaaagccttaatcccatttctgtatgtctaagacatcatgcactatcttgaacacaaaacatgtttgtgagctgaaataatacttttacacccaaaaaggtttaattatataccacataatgtatgtaagcattcaagcattttcaccttgttttttttttataaagttcaaagattttaaatgttcgtagtcaaagatcaacactcctgtcctctataggatggtttgttccctaatggctatgcagaataaaaagttctatggtactctcctgcgayactggcaggtcagatattttcactcactggcagtaacacctcaaagtgtcattcaggcctgaggatggtccctttctatttgggaggtgttcggaccatccatattcttaaacaggctcactcaataattacacagcactatgtatctgaagacaaaaaattaataactcttctaattagtgcaaagaga

SEQ ID NO: 223784 - DNA, 409 bp, Homo sapiens
tgaattctttcttgcctttggcattaacatgtaggccataacccacagatgaatattaatcacattctataattatcctttcagttataaacatataaatataaatatataaaccagtgcctatatctagatataggtttrtgtatatttaaagagataattatacgtataattatatatgtattatgtaatatgtgttacatataatcagtgctatttcaattatactgctctgacttttaaaagttagtcattgctaccctgtcagagaataaaactaattaactttcagaaatttgggaatagaaatgagcttggcttactcatgaacaggaaaatatttggtctggcttgagcaaaggttacttgacgagaatataaaaagtcaagttgaatagattgggtgaag

SEQ ID NO: 223785 - DNA, 447 bp, Homo sapiens
ctccagggggataaaaattaaattacaagaaacaatttcaaaacagctcaagaatgcatataaataattaccaagttgaagttctgtaaatttttctagagttgtagaaggaaagagtaatcaatttaagagcttttttgctaattcactgcttaaaatattaagaggaattagctttgaagatcagttacctgtctccttggggtagagaccactcaccactaaactgcacacattcttctcctcaagccttgggaaagtcctgacagcaatcagacccctttctacacatccaaacagaagatatagccccacacaragcaaggtagtcacaccatttccactcactctattctcaggctacctcctagatatagtcatgaccagcctctgctccatctcagaaacatcagacttcatttgttcactctctgaccacactctctt

SEQ ID NO: 223786 - DNA, 630 bp, Homo sapiens
gcagctgtgttacaggcactrtgtaagaaacttgtacacatatattatctcatttaatctgcccaacagccttgtataatagtaattattcttctcattaaaaagttaagcaaaattctatgtttcaagtgtcacagagatagtgacagagccattttcaaatccccagtccctcatttttacatccttatagaaaatgtgattaagccataatattgattgaatggagatgaattttttctcttcttggtgcttcagataatgtaattgactgaagtagtacatgctctaaccctttactccttctcttttgtatgtaactttgctggaattaagttgtgaaataattatggttttcatagtttctggtaatgtctgaaaaattactaatatatagattgtgaggtctgaactgataaaattagagagagagagagagagaaggagaaagataaatatagatatagctattaaaaacaataagaatcagtcagatttgaccgtaaatggataaaagactaattctgccaagaatcatagagattcgacatttgtatagccttaggaatgtgtctgtaaattttagcaacacagagaattagactagaagaaagttgtaacaaagggaaa

SEQ ID NO: 223787 - DNA, 630 bp, Homo sapiens
gcagctgtgttacaggcactgtgtaagaaacttgtacacatatattatctcatttaatctgcccaacagccttgtataatagtaattattcttctcattaaaaagttaagcaaaattctatgtttcaagtgtcacagagatagtgacagagccattttcaaatccccagtccctcatttttacatccttatagaaaatgtgattaagccataatattgattgaatggagatgaattttttctcttcttggtgcttcagataatgtaattgactgaagtagtacatgctctaaccctttactccttctcttttgtatgtaactwtgctggaattaagttgtgaaataattatggttttcatagtttctggtaatgtctgaaaaattactaatatatagattgtgaggtctgaactgataaaattagagagagagagagagagaaggagaaagataaatatagatatagctattaaaaacaataagaatcagtcagatttgaccgtaaatggataaaagactaattctgccaagaatcatagagattcgacatttgtatagccttaggaatgtgtctgtaaattttagcaacacagagaattagactagaagaaagttgtaacaaagggaaa

SEQ ID NO: 223788 - DNA, 376 bp, Homo sapiens
tccaaagcaatctgcaaacactatctgtcttcttcatacccttttcctttacaatctcactgagagaactttctcccactatgtcatacctaactcaatttgtagcgtgaagataacatcaatgtttgtaattccacagctaagattgggttagatcaatgatgtccagtaaaactttctcaatgatgcagatgtctcatatttstgctcttcaatatggtaggcactggacacttgaaatgtggctattgcatctggggaactgaatttttaattttcattaatttaaatttaaatagctgtatgtggctagtggatactccactggacaacaaagtataagtctaggcccaagaatatcaaattatactgtaag

SEQ ID NO: 223789 - DNA, 617 bp, Homo sapiens
ctttttatctgtctcagttttcttcattctgcttcagtcacactgaacagtcacactgccctctctgctgttccttaaatatgttaggcatcttttaactgcttcttgctgtattgtctgcctagaatgctctcctgtcatrtatctacatggcagtttcttatgctttcatcatgtctttagtcatctattcaatggagtcttccttcaacattttatatcttcctaccctcttaattcttatctttagcacatacaattcaatactataattctgctcctttaccttatcatctattcctcaaactagaatgcaaactccatgagtacagaaatctctgttttgtttattactacatttccaaagcctagaatagtgcctggcaagccatgactattcaattaaatatttagtaactaataaataatcaaactcaattgttagttggttaaattacaaataaaactaataatgtatgttctaggatattttctttcaaagaccaaataagtaaatttaacatactttgtaaaatgaattagagggaagaagagtcaggaaactagttaaaacactcagcttgtgcaaatgtgaagcaatacagatttggaaccaa

SEQ ID NO: 223790 - DNA, 617 bp, Homo sapiens
ctttttatctgtctcagttttcttcattctgcttcagtcacactgaacagtcacactgccctctctgctgttccttaaatatgttaggcatcttttaactgcttcttgctgtattgtctgcctagaatgctctcctgtcatgtatctacatggcagtttcttatgctttcatcatgtctttagtcatctattcaatggagtcttccttcaacattttatatcttyctaccctcttaattcttatctttagcacatacaattcaatactataattctgctcctttaccttatcatctattcctcaaactagaatgcaaactccatgagtacagaaatctctgttttgtttattactacatttccaaagcctagaatagtgcctggcaagccatgactattcaattaaatatttagtaactaataaataatcaaactcaattgttagttggttaaattacaaataaaactaataatgtatgttctaggatattttctttcaaagaccaaataagtaaatttaacatactttgtaaaatgaattagagggaagaagagtcaggaaactagttaaaacactcagcttgtgcaaatgtgaagcaatacagatttggaaccaa

SEQ ID NO: 223791 - DNA, 610 bp, Homo sapiens
tgcctacaactctagttagagaagcagagatgagacaatgttcttttcctcaaagatcttagtctagcatctggttgtaactggaaaccccaaattactgtagctaataagtttctaataagcataaataattattaataagcttgctatttaatacttcttaatctttcaaatactatacagaatacctaagaataatatctctcagcacaatttcccagacatttgaggcagtgatttggtgaacaaaatctatatataagaaaaaagtttaaaaagtatatagcacaattttayagttttggggttgtgatagcatggccattcggcaaatttcgactgctccattttttagaataaaagaatcagaaataataagaggatcattccacagggcggtctaaaagtagaaatagcttctgaaaaaggtaaatctaatatcatttgcagtttagcataacccaggaagtgaccactaaaagatccttttgaaatttcctgaacctttgctcctgcccaacatattatttctgtttgtttttctatatgaatatcaacaaaacccttaaaatggaaagaatcaccagggaagtgagatctgagagatacg

SEQ ID NO: 223792 - DNA, 610 bp, Homo sapiens
tgcctacaactctagttagagaagcagagatgagacaatgttcttttcctcaaagatcttagtctagcatctggttgtaactggaaaccccaaattactgtagctaataagtttctaataagcataaataattattaataagcttgctatttaatacttcttaatctttcaaatactatacagaatacctaagaataatatctctcagcacaatttcccagacatttgaggcagtgatttggtgaacaaaatctatatataagaaaaaagtttaaaaagtatatagcacaattttacagttttggggttgtgatagcatggccattcggcaaatttcgactgctccattttttagaataaaagaatcagaaataataagaggatcattccacagggcggtctaaaagtagaaatagcttctgaaaaaggtaaatctaatatcatttgcagtttagcataacccaggaagtgaccactaaaagatccttttgaaatttcctgaacctttgctcctgcccaacatattatttctgtttgtttttctatatgaatatcaayaaaacccttaaaatggaaagaatcaccagggaagtgagatctgagagatacg

SEQ ID NO: 223793 - DNA, 463 bp, Homo sapiens
ctcaaggttacagaaagatgggggcatgagcacttcaataactgctcagaggagctctaaatcttgaagcaaatccttgaaatataccaaaatagaacttccttaaagcataaatctcacaggatctacaaaacaataacacaattaaaaaaagatattcaggcaacaactagcacaatgaatagaatagtacctcacatctcaatgctaacattgaatgtaagtggcttaatggtcctcttaaatgatacagcatggaagaatggataagaattcaccaaccaagtatctgctgtcttcaagagattcacctaacacataaggactcacacaaacttaaggtaaagaggtggaaaagatataccatgtgaatggaygccaaaagcgagtgggagtaactattcttatatcagacaaaacagactttaaagcaacaagagttaaaaaagacaaagagaaacat

SEQ ID NO: 223794 - DNA, 537 bp, Homo sapiens
gtaggtgctagataaatataacaatagctacgcttcctaatacagttggtagtaaactaggttagtggttccctgacctgtgtgtattagaattacctgggtaacctaaaacaaaatcaggtctattgaatctccaaataatccatagatactgacatagcttatccactgcattaaacatggcttagtgctctattagatgttttatttaaaaggtattkaatattcttagcaaccgtataaggtaaatgttaacagctctattatgcaaataacagtaacagctaacattttctatatgtttattgtataccaaagttctaagtacttttcatgcattaactgataagaggaaaaaaaagaagtgacttgcctgagacctggaaggaaacacgtgaaaaagcttgaatttggactcattttttttttttcaactccagaacttttttcactgagtcatgttgtcttccaggaaataaaattatttgttaactcatggcaaactgtgacattttcacattagttaaaagcatccta

SEQ ID NO: 223795 - DNA, 591 bp, Homo sapiens
tccctgtttacgataaactaataataaacatttgttaaatttgaagactggaaataatgtacatgaaacaattgtgaataacttggcatgtctgtggagtttttcataccagatgctgttaagcttcgcatggcagaatgatctgagaatgagtcatcactgactcatggatccagcttgtttcacctgcagcgctcactttaagtcacaatgaccttttctgactacttgtaatggcagcacagtggggactgcagttcctggagagtgcaccattaatagagtagttagccagtactgttttgttgtccctcggagtaaaagggaaagtgaagcaagagaacagagatttaatactacatattttttcactcaattgagaaatacaactgaaaaaawatatatatccttataaaacttactgttttaaaagcgcagtccttgcaagttgatttgggtgttttcagatagtgaaaaacttttaaaagatattaaattattacttttacttatgaagaataaaaggtaacatagagacatagaaatcaagaaatcctcgagtattttctttagaaacaccccgattagaga

SEQ ID NO: 223796 - DNA, 559 bp, Homo sapiens
ttgctcagctggtttgtgaaattctgaacaatataaggtgttcacataatattaatgtgatattccagtaattattttgactaaggtagagaaaggaataaaaaagcacattaaatagaagtcctggagtagctttatcttatacatctgaccgaccatttttatttttgtaattaagccccaaattaggtccagagaaatgtccagacctcttggagattattacgctctggttatgagctaattccaggagatttatagtgttactctggtctgcaaatcaaagtgagggttgatggaggtcaagtgatgagttctgacactaatctacctcatacaaaacaaaatgagacatcaaayccatcctgtatttattttccccgttctgagtatcttaatccattcaggctgctataacaaaacagtataagctaggtagcttataaataacacaaatttatttctcatatttctctttatttggctgattaatctatcattacattctcaggtatttcaggctcctgtgctgatggaattccccatgactttgggtcca

SEQ ID NO: 223797 - DNA, 559 bp, Homo sapiens
ttgctcagctggtttgtgaaattctgaacaatataaggtgttcacataatattaatgtgatattccagtaattattttgactaaggtagagaaaggaataaaaaagcacattaaatagaagtcctggagtagctttatcttatacatctgaccgaccatttttatttttgtaattaagccccaaattaggtccagagaaatgtccagacctcttggagattattacgctctggttatgagctaattccaggagatttatagtgttactctggtctgcaaatcaaagtgagggttgatggaggtcaagtgatgagttctgacactaatctacctcatacaaaacaaaatgagacatcaaatccatcctgtatttattttccccgttctgagtatcttaatccattcaggctgctataacaaaacagtataagctaggtagcttataaataacacaaatttatttctcatatttctctttatttggctgattaatctaycattacattctcaggtatttcaggctcctgtgctgatggaattccccatgactttgggtcca

SEQ ID NO: 223798 - DNA, 531 bp, Homo sapiens
gggtgtaagagaaaaatataaaagtatggagagagagagagaaagaaagagagagagagagacagagagggagagaaaragagagagagagactgtgagagagataagttaagcagatgggcacattcctgttgcactaaatgagccacacatcctggtgagaatgtgagatgagatacttgaatctattcttccactctttattctcagtcacctcctatctctcaaagcacattgtatgagtatcacaaaaaatttggcgtgatataatgttcaacacatattttttccacaatctgatcctgaagcctaagccaactactttataacttgctcaactgaagcaatacttttttcaatctaaagaacaaactagctatgttgaacttgtgtgtgtattcatcaactggagatattctttattaatctccaaaacattgtttttaaagtgatttctaagggtaatttggctatctgtgatgttcaacttatgttttgacttcagaacctaattcccatagagactatgaa

SEQ ID NO: 223799 - DNA, 531 bp, Homo sapiens
gggtgtaagagaaaaatataaaagtatggagagagagagagaaagaaagagagagagagagacagagagggagagaaagagagagagagagactgtgagagagataagttaagcagatgggcacattcctgttgcactaaatgagccacacatcctggtgagaatgtgagatgagatacttgaatctattcttccactctttattctcagtcacctcctatctctcaaagcacattgtatgagtatcacaaaaaatttggcrtgatataatgttcaacacatattttttccacaatctgatcctgaagcctaagccaactactttataacttgctcaactgaagcaatacttttttcaatctaaagaacaaactagctatgttgaacttgtgtgtgtattcatcaactggagatattctttattaatctccaaaacattgtttttaaagtgatttctaagggtaatttggctatctgtgatgttcaacttatgttttgacttcagaacctaattcccatagagactatgaa

SEQ ID NO: 223800 - DNA, 596 bp, Homo sapiens
aggtagtattgggttacatgagtaagttctttgggggtgatttgtgagattttggcatacccatcacctgagaagtatacactgcacctaatttgtggtcttttattcatcgtccccttcccacccttttccccctgagcccccaaagtccaccatggctttattatgcctttgcatcctcataacttagctcccacatttgaatgagaacacatgatatttggttttccattgctgagttatgtcacttagaataatagtctccaatctcattcaggttgctgtgaatgccattaattcatttctttttagggatgggtagtattccattatatatatatatatatatatatatatacayacacacacacacacacacacacacacacatatctcacagtttctttatccactcgcgttgattgatgggcatttgggttggttccatgtttttgcaattgcaaattgtgctgctgtaaacatgcatgtgcaagtgtcttcttccatataatgacttcttttcctctggacagatacctagtagtgggattgctggatcaaatggcagtactacttttagttctttaaggaatctc

SEQ ID NO: 223801 - DNA, 603 bp, Homo sapiens
tttggttgttgctagtgctcagagaagagaatttgttaaccaagcacactccataaaatgtataccctggagaatttttgtaaaatttttctgacagtgatattagcatagctgacatagaaaatctgacgtaataacatttccagtgataatctcaaaaattatatccaaataagaacagacctacacacatagatatagcttatgttaaaatcctaacattttaaacttgatatcagaaagtccttccaattatgcaaaacttttcacttctgttttaaattttaaggtaattctcatagtaacttccatacactgctgcaaatggtacacaaacatttcaaaagaatttttaaatatgttgcaaagacattatacaaaatttagcagaaatgctgcaagtcatagtgaagacaartctttcatggagaactaaaattgtacatagccagaaattttaaatttgaaaaacatatatatatatatatatatatatatatatatatatatatatatatatatatatataaattgagtgctccgaggggggagaaggtattgttaacaaatccttctgaaaaataagtaaattattgagattaa

SEQ ID NO: 223802 - DNA, 640 bp, Homo sapiens
aatacaaaaaacattagccgggcgtggtagcaggcccctgtagtcccagctacctgggaggctgaggcagaatggcgtgaacccaggaggtggagcttgcagtgagccgaaatcgcgtcacagcactccagcctgggcgacagagtgagactccstctcaaaaaaaaaaaaaaaaaaaaaaaaaatcatgtgctcctgtcatgcaaaataactgcccagccagtaactacatttctcagatttggttgtatctaaataggccatgagacgaatgatcatcaatggaatgggagcagaagtgatgtatgtgtcttctggttgaaggtgattaaggtgtcaatgtgccttttccattcattcttccttcaggatggttagatgaagaagcacctaaacctctaaagcagcgatcactaaccccagatcacaaaccgctaccagtccatggcctgttaggaactggcctgcacagcaggaggtgagctgtgggtgcatgagagaagcttcatctgtatttacagcctgtttctatcactctcattaccacctgagctccacctcctgtcagatcagtgacgggcattatattctcataggaatgcaaactgtattgtgaactgtatgtgagggatttaggttg

SEQ ID NO: 223803 - DNA, 556 bp, Homo sapiens
cagcgatcactaaccccagatcacaaaccgctaccagtccatggcctgttaggaactggcctgcacagcaggaggtgagctgtgggtgcatgagagaagcttcatctgtatttacagcctgtttctatcactctcattaccacctgagctccacctcctgtcagatcagtgacgggcattatattytcataggaatgcaaactgtattgtgaactgtatgtgagggatttaggttgtgtgcttcttacgagaatctaatgcctgatgatctgtcactgtgtcccatcacccccagatgggaccatttagttgcaggaaaacaagcgaagggctcccactgattctacactcccactgattctacattatggtgagttgtataattatttcattatatattacaatgtaataataatagaaataaagtgcacaataaatgtaatgtgcttgaatcatcccgaaaccatcccttgcccctggtccatggaaaaattgtcttccacgaaaccagtccctggtgccaaaaagctcagggactgctgctctagaggatgga

SEQ ID NO: 223804 - DNA, 554 bp, Homo sapiens
atacaaataaatttgggcaacgttgtataaccacagtagtatattaacctgtctgagaaactgcagtttaattttgtttaatatggaattcccatagaacagatctactttataaaattccaaattagactttcaaacttttagactttcaagccagatttttttccagtgatggccacataacrgtttcctgcaaaatctgccaagatttgcttttccatcagaataatataggaaatcaaatttttattctatgttgactaatttccaattacttttaactttatatatttaaaatattgtttactataaagaataccaaatagataaaatactgaagtgtacaatataataagctctagtttctacaattgcaactcttgggcaatctcattttatgtatttctctacctattttatccaaaccatcaggttatcctgaagaaaatatcaaatattattttacttgtaaaagttttagcaagaatctctaaaattcttataaatctgtaagactgttttagtcagatttattgatgtataattcacatgct

SEQ ID NO: 223805 - DNA, 554 bp, Homo sapiens
atacaaataaatttgggcaacgttgtataaccacagtagtatattaacctgtctgagaaactgcagtttaattttgtttaatatggaattcccatagaacagatctactttataaaattccaaattagactttcaaacttttagactttcaagccagatttttttccagtgatggccacataacggtttcctgcaaaatctgccaagatttgcttttccatcagaataatataggaaatcaaatttttattctatgttgactaatttccaattacttttaactttatatatttaaaatattgtttaytataaagaataccaaatagataaaatactgaagtgtacaatataataagctctagtttctacaattgcaactcttgggcaatctcattttatgtatttctctacctattttatccaaaccatcaggttatcctgaagaaaatatcaaatattattttacttgtaaaagttttagcaagaatctctaaaattcttataaatctgtaagactgttttagtcagatttattgatgtataattcacatgct

SEQ ID NO: 223806 - DNA, 554 bp, Homo sapiens
atacaaataaatttgggcaacgttgtataaccacagtagtatattaacctgtctgagaaactgcagtttaattttgtttaatatggaattcccatagaacagatctactttataaaattccaaattagactttcaaacttttagactttcaagccagatttttttccagtgatggccacataacggtttcctgcaaaatctgccaagatttgcttttccatcagaataatataggaaatcaaatttttattctatgttgactaatttccaattacttttaactttatatatttaaaatattgtttactataaagaataccaaatagataaaatactgaagtgtacaatataataagctctagtttctacaattgcaactcttgggcaatctcattttatgtatttctctacctattttatccaaaccatcaggttatcctgaagaaaatatcaaatattattttacttgtaaaagttttagcaagaatctctaaaaytcttataaatctgtaagactgttttagtcagatttattgatgtataattcacatgct

SEQ ID NO: 223807 - DNA, 429 bp, Homo sapiens
ccctaatggtttagataattagccagcctgcttggtccaaatctatagaataaaactgagcaccctaaaaatccaccctaataactattcttatcacataaacatgcaagatgcaccctttgcaactgtccttcaatatatcattcagattaatgaccttttttctatgcctctggtttcctaatgatttgttgtactactccttaaggattggttattccrcatatttcaacctggactgttttattgtcccaaccacaaaagaaaaaggaaagatacattcaaatcttgtgattttttacccatagaaattgctggatcactgccagcctttggtcctgacacccaatcagagctgcccacatcttttgctgttataacagaggtaagtttgttgtccttttgttctttaactaggaacaaagtctc

SEQ ID NO: 223808 - DNA, 568 bp, Homo sapiens
agtcaaaatgctttcagctcaatacaaaattccagaatccattgcaacatcagaagacagggctgggaagttgagcatgagcatttccatgctttgtcctgaaagagatatgtcacttttgatctttttacattaggcaaaactagccatatggtctcttctaacctcaaggaggtgtgaaagtgtaattcttcatgtacctggaagaaaaagagaactgaatatattggtgggtgctaatattggctcccacagttttcatcatgactaccacttctggctgtacatycttgggaaaattactaaacccttttgagtctcagattcctcattgtaaaatgggtataataattttatcttgtagtaatttataagtttgaaatgagataaatctttaaagaattggacagagagtcccacacatagtatttattcaattaacaatggtcattttagttcagagggaaaaagtcagctcttaccatctagtcttgaattacccaggtttattatctatatagacaagaatcaatacccttaagccaaatattcccatcactgtatattt

SEQ ID NO: 223809 - DNA, 619 bp, Homo sapiens
aagtacaaaggtaaaatggaagctacagtccacttaaatgaaagttgggctatgttaatacatgacctccttatctatctattatgttgtctttgccctctgcacttctgagactaaaatcctgcacccaatggccaaaatctcccttggttccccactctctccaatgattgagactggcccagatgctttgccaagccagcactgaggagtgccatgactgtgtgactgctgccagcctgctcctaaggaaattcttggggatgatgycagtcattttgctgtgcccctggcaaaactgaccaccaagtcaccacacactgtgctcctaagtccattgctaaaccagagtcggcagacattttcctctctgcattatccatccaactcccacctgtgacatcacctgggtatgattttcctgtgaagaatcacttgctttcaagtcacaaaatctggctaatgtatataaatttgggcaaacaatagggaaaatatgtcacctaaaaattagtttgattatagtattttacaaagcctcttcttccccacagcctaaaagtagaccaggataacaaaactgtccaagccaaatgagatgagtattgtagtactgtag

SEQ ID NO: 223810 - DNA, 577 bp, Homo sapiens
cgtagtgatgcaggaattctctcgaccccttcattggacttgtgacgggggtgccccacttactcagcccaccacactcaaccccttatgagaggragaatgctagcaagtgagtgtgggatctggccagctgctttgggcaccaggaggaacaagctccatgtgggccctgtggcagcacccaggtgggagtgcctgcaacccctgaggccccagagggcatattataatgctctcttagccctgtcatccatggacagcagtgtgttatcagctcagttatacctttgcctcatcacatggggtggctgtcctctgccagcaagagcaaaggaccattgtgacagccttttttaggtacctgcactcggtgagtcccaagattttgtccagtgcccaagaagaatgaggtcacactgacaaattgagggacagtgaatgcagagaattgctttgagtgatgaaagtggctctcagtgggagctgaaaaggggacaagacagacaggtaatcttcccccatagtctggctgtctctggccagctcttctctgaagtccagccatccctctgaaatc

SEQ ID NO: 223811 - DNA, 467 bp, Homo sapiens
gaacatccacctttggagacaactgcaaaaatgatagaaagagtgggaactgtcttgtttcctctttgtccccagtgtctgcacaagggtaggacacaataggcatttgctaaatgttgattgaatgaagcagagctaacaaagctattttgtcggtcgggcgtygtgacagcactttgggagacggaggtggatggatcaactaaggtcaagagtttgagaccagcctgaccaacatggtaaaacccagtctccactaaaaatacaaaattagctgggcatggtggcaggggcctgtaatcccagctactcgggaggctgaggcaggagaattgcttaaatccgggaggcggaggttgcactgagccaagattgtgccattgcactccagcactccagcctgggcaacaagagtgaaactctgtcaaaaaaaaaaaaaaaaaaaaaaaaagctattttgtcccatt

SEQ ID NO: 223812 - DNA, 467 bp, Homo sapiens
gaacatccacctttggagacaactgcaaaaatgatagaaagagtgggaactgtcttgtttcctctttgtccccagtgtctgcacaagggtaggacacaataggcatttgctaaatgttgattgaatgaagcagagctaacaaagctattttgtcggtcgggcgtcgtgacagcactttgggagacggaggtggatggatcaactaaggtcaagagtttgagaccagcctgaccaacatggtaaaacccagtctccactaaaaatacaaaattagctgggcatggtggcaggggcctgtaatcccagctactcrggaggctgaggcaggagaattgcttaaatccgggaggcggaggttgcactgagccaagattgtgccattgcactccagcactccagcctgggcaacaagagtgaaactctgtcaaaaaaaaaaaaaaaaaaaaaaaaagctattttgtcccatt

SEQ ID NO: 223813 - DNA, 467 bp, Homo sapiens
gaacatccacctttggagacaactgcaaaaatgatagaaagagtgggaactgtcttgtttcctctttgtccccagtgtctgcacaagggtaggacacaataggcatttgctaaatgttgattgaatgaagcagagctaacaaagctattttgtcggtcgggcgtcgtgacagcactttgggagacggaggtggatggatcaactaaggtcaagagtttgagaccagcctgaccaacatggtaaaacccagtctccactaaaaatacaaaattagctgggcatggtggcaggggcctgtaatcccagctactcgggaggctgaggcaggagaattgcttaaatccgggaggcggaggttgcactgagccaagattgygccattgcactccagcactccagcctgggcaacaagagtgaaactctgtcaaaaaaaaaaaaaaaaaaaaaaaaagctattttgtcccatt

SEQ ID NO: 223814 - DNA, 317 bp, Homo sapiens
gacctttttgtcaccggggaccagttttgtggaagacagcttttccatggactrgggaagggttgggggatggtttccagatgaaactcttccacctcagatcatcaggcattagttagattctcgtaaggaacatgcaacctagatccctcgcatgcacagttcgccatagggttgtgatcctatgagaatctcatgcccccgctgatctgacaggaggcagagctcaggcagtaatgctgcctctcctgccactcacctcctgctgtgtggccctgttcccaacgaccacagaccagtaccaatccacagcctgg

SEQ ID NO: 223815 - DNA, 317 bp, Homo sapiens
gacctttttgtcaccggggaccagttttgtggaagacagcttttccatggactagggaagggttgggggatggtttcsagatgaaactcttccacctcagatcatcaggcattagttagattctcgtaaggaacatgcaacctagatccctcgcatgcacagttcgccatagggttgtgatcctatgagaatctcatgcccccgctgatctgacaggaggcagagctcaggcagtaatgctgcctctcctgccactcacctcctgctgtgtggccctgttcccaacgaccacagaccagtaccaatccacagcctgg

SEQ ID NO: 223816 - DNA, 393 bp, Homo sapiens
gcgtgtgtaggaaacaaaaggggaagagccccttataaaaccatgagatctcaygagaactcactatcatgagaacaggataacagcatgggggaaagcattcccatgatttaatcacctccctcccgtcagtctctccctcaacacctggagattacaattcaagatgagatttgggtggggacacaaagcctaaccatatcaacaacataaccacagtttgctatcgtgtgctcagggccactattcaccactagagttaatcaagacaaagttaactgtccaattcaagtttctttcaagcaagcaaaacaaaaaacagaaggacccagcagctgtctactttcctttctatcccctgacttttctgaggccaatactgaggacaaacct

SEQ ID NO: 223817 - DNA, 579 bp, Homo sapiens
cacctctgactaatttcttctcactcttctctggcctcctttgcttttcttcaaatgtgtcaagcacattgccacctaagggccattgcacttgctgcttcctcttcctgggactgacttcccctgtctgcatggggagcctttgtttctttcaagtctctgcttcaatggcgctacttacaccttctctgaccactccccacaacccctccagcctactctgtctctttttctccacagcattttccactttttggcatatttcttcttttctcgttttgttttattttcaatttcctgtctgttttacctagaatgtaaaatcctgacatacgagtgtaactatttggcgagtgaatgggctatgcaatttagggcttgttggaaccctcaataacatcacctctttcccaacaaggctatctcttccacctaaactttagattttcccttacagtccaattaccatatatgtgtatcttctcattaccctgtatgtagatcctcagctcaatggtgtattcgaggatccaggctctgtccccttcccstttgccatcctcagtaattagctgcatt

SEQ ID NO: 223818 - DNA, 472 bp, Homo sapiens
attccttttcatcctctttactagctgaaaaattataaataacattcctattttttcagtggtcacccttaagaggtgctgtttagagaaatacrcaaggaaaaggtatgagaaattagaaagaaatagtagtatttagtttgacatggattacaatggtgatagtttccgcaatataaaatatatcctgggccatagaacaagcctcaaaaaatttaaaagaattggaatcatacaaaatacagtttctgcaacagaattcaactagaaacaatacaggaattatgtatggaaaatcccccaaatacttgaaaattaaacaacacgagacaaccaatgagtgaaagaggaaattagaaaatagtttgaattgaatgaaaatgaacacaatatatcaaaatgtatagaggcagctaaagaagtacttaaaggaaaacttacagcattatatgtttgtattagaaaataagaa

SEQ ID NO: 223819 - DNA, 548 bp, Homo sapiens
attttttaaacaaatgcccacaggaggaatgtgtctttttcatctttgactctctgccacttagaggtattagtttcttattgccgctgcaacaaaatagcacacatttagtgactgaaaacaacacaagtttattacgatatctctggaagtcagaaatccaaaacggccttcattaggctaaagtcaaagtgtcagcagaactgctttccttttaaaggctgcaggggagaccctttccctgctttttccaggttccagagacttcttgcatttcttggctcatgtccgcttcttccgtcttcacagccagcagtgaagcatcttcaaatttctgtctatgactctgacctcacttctgccatctcatctccttctctgagtctaactctccttctctctctctctctctatttatttattttttgagatggagtttcgctcttgttgcccaggctggagtgcaatagcgcgatctyagctcactgcaacctccgccttcccgggttcaagcaattctcctgcctcagcctcctgcgtagctggga

SEQ ID NO: 223820 - DNA, 614 bp, Homo sapiens
tgataatataatcttatgggacctcattacacatgtggtttattgactgaattttcattatgtggtgcatgactgcatatatgaatacttccttcaagcatatttccaatgtggtcttcctatgatgaatcttctaagacttttgtatgcctgagaatatttttattgtattctcatatttgaatgaaatctttactggatatatgtattagycttttatcacattgccataaagaactccctgagactgggtaatttataaagaaaacaggtctcattgactcacagttctgtaggctgttcaggaaacatggctggggaggcctcaggaaacttacaatcatggcagaaggtgaagaggaagcaggcacgtctcacatggcccgagcaggagaaagagagagaagggggatgtgctacacactttcaaacaaccagatttcatgagaactctcctactatcacaagtacagcaagaaggaaatcggcctccatgatccaatcagctcccaccaggcacctcctccaacattggggattataattcgacatgagatttgggagggaacacaaatctaaaccatatcaatataaaattctaagctccatgtcct

SEQ ID NO: 223821 - DNA, 614 bp, Homo sapiens
tgataatataatcttatgggacctcattacacatgtggtttattgactgaattttcattatgtggtgcatgactgcatatatgaatacttccttcaagcatatttccaatgtggtcttcctatgatgaatcttctaagacttttgtatgcctgagaatatttttattgtattctcatatttgaatgaaatctttactggatatatgtattagccttttatcacattgccataaagaactccctgagactgggtaatttataaagaaaacaggtctcattgactcacagttctgtaggctgttcaggaaacatggctggggaggcctcargaaacttacaatcatggcagaaggtgaagaggaagcaggcacgtctcacatggcccgagcaggagaaagagagagaagggggatgtgctacacactttcaaacaaccagatttcatgagaactctcctactatcacaagtacagcaagaaggaaatcggcctccatgatccaatcagctcccaccaggcacctcctccaacattggggattataattcgacatgagatttgggagggaacacaaatctaaaccatatcaatataaaattctaagctccatgtcct

SEQ ID NO: 223822 - DNA, 403 bp, Homo sapiens
ctcatatttgaatgaaatctttactggatatatgtattagccttttatcacattgccataaagaactccctgagactgggtaatttataaagaaaacaggtctcattgactcacagttctgtaggctgttcaggaaacatggctggggaggcctcaggaaacttacaatcatggcagaaggtgaagaggaagcaggcacgtctcacatggcccgagcaggagaaagagagagaagggggakgtgctacacactttcaaacaaccagatttcatgagaactctcctactatcacaagtacagcaagaaggaaatcggcctccatgatccaatcagctcccaccaggcacctcctccaacattggggattataattcgacatgagatttgggagggaacacaaat

SEQ ID NO: 223823 - DNA, 614 bp, Homo sapiens
tgataatataatcttatgggacctcattacacatgtggtttattgactgaattttcattatgtggtgcatgactgcatatatgaatacttccttcaagcatatttccaatgtggtcttcctatgatgaatcttctaagacttttgtatgcctgagaatatttttattgtattctcatatttgaatgaaatctttactggatatatgtattagccttttatcacattgccataaagaactccctgagactgggtaatttataaagaaaacaggtctcattgactcacagttctgtaggctgttcaggaaacatggctggggaggcctcaggaaacttacaatcatggcagaaggtgaagaggaagcaggcacgtctcacatggcccgagcaggagaaagagagagaagggggatgtgctacacactttcaaacaaccagatttcatgagaactctcctactatcacaagtacagcaagaaggaaatcrgcctccatgatccaatcagctcccaccaggcacctcctccaacattggggattataattcgacatgagatttgggagggaacacaaatctaaaccatatcaatataaaattctaagctccatgtcct

SEQ ID NO: 223824 - DNA, 575 bp, Homo sapiens
ccaaattaccttttgtatttctgtggtgtcaggtgtaatgtctccagtttcatttctaattgactttatttgaatctacttcttttcttagttaatctagctaatagcctatcaattttgtttatcttttcaaagaaccagctttttgtttcattggtatttggtattttttgttgttattgtttcaatttcatttagttctgctctgatctttgttatctcttttcttctgctagctttggatttagtttgttcttttttctctagtcccttgaggcatgacattaggttatcaatgtgtgatctttaagactttttgatgtaggcatttagtgcttaactttcctcttagcactgctttcgctgtatcccagaggttttgataacttgtgtcactattttcattcatttcaagggatttttaaatktccacctggatttcattattaacccccaaaacattcaggagcagatcatttaatttccatgtatttgtatgcttttgagagatcctttggtagttggtttctagtttattccactgtggtctgaaaagatacttgatatgatttcga

SEQ ID NO: 223825 - DNA, 536 bp, Homo sapiens
gagctgagaagtatccatgaccctgagggctgcgctccaactgctgcagcagcccctgtcccttctgcgtaagagccactctcaaaatgcagctagagtctcaaatacttcaaatccaagtacatcttaatttaacaamaaaaaaaaaaggacttcactccccaaactggccatttcaccttcctccttaacatgctttcattttcttttctttttttgttttttgaggcagggtcttgctctgttgcctaggctggagtgcagtggcatgatcctggctcactgcagtggcatgatcctggctcactgcagcctcaacctcccggactcaatctatcctccccactcaacctcccaagtatctgggagtacacgtataagccaccacacccagcccttaacatgctttcgtagctttccattacccttagaatcaagactctattgaggcaaatgcaccatgacttgcctcaagcccagcactttcctattcttgccaggcctccagcttttcctgagccctcgcctctccctca

SEQ ID NO: 223826 - DNA, 483 bp, Homo sapiens
ctgcaaacatacagtagtattaagttatctgacttcctgtgtgacagaagccctaaatggtagcccatttgtttcaggcaattacctgaaaaggagctctaggcatttgtgcttatgcctgtgaaccttctgtgtccctcgagtacraggaccctggggcactctgtaagccaatctcagtcttctgtaccacgcacccaagaaagagagaaaggaggaggcgtgtggtatttattccaggtgacactgatcaccaaatcttgactgttctaaggggaaaataacaataaaagcaacaactggaagaacacaacccctcaggacagctaccaccatttgtgatagtaaagctgtgatctgagaagtaggcaaacagcacagttcatacatatactacctaaaccactcttcactgctgtgagacgtcaaggaggaaaaatgggaatatcgttaatgtaacatggcagtgggtaagagctatct

SEQ ID NO: 223827 - DNA, 483 bp, Homo sapiens
ctgcaaacatacagtagtattaagttatctgacttcctgtgtgacagaagccctaaatggtagcccatttgtttcaggcaattacctgaaaaggagctctaggcatttgtgcttatgcctgtgaaccttctgtgtccctcgagtacaaggaccctggggcactctgtaagccaatctcagtcttctgtaccacgcacccaagaaagagagaaaggaggaggcgtgtggtatttattccaggtgacactgatyaccaaatcttgactgttctaaggggaaaataacaataaaagcaacaactggaagaacacaacccctcaggacagctaccaccatttgtgatagtaaagctgtgatctgagaagtaggcaaacagcacagttcatacatatactacctaaaccactcttcactgctgtgagacgtcaaggaggaaaaatgggaatatcgttaatgtaacatggcagtgggtaagagctatct

SEQ ID NO: 223828 - DNA, 634 bp, Homo sapiens
tagcgggtttagggagctgctgcttcaggggtcgtccatcatcgcggtcccacttcctgtgctcgccctccctgtttgtgctcccgcctgactttggatgcagggatcccttgttcccctcaatgcccttggtgcctctaaggtctgacttgggtatcagaggacaatgatatcctctggggcctgcgttatgggtccagggcctcaggaaccgggcttcacaggggctgrgagaagcagtgaagaccttccatgctagaccccttgctgcctccctgagaagttcgctaggactcctttcacactagctcccaggattcctcctcccacatggcctgctctccctccactttaagcacctccccaccccaagggagcagcatagtacttcttaccccactctcacttaaatttgtccacagtgtctctatctagcatctggagggtccaggcctgtgctgcccttgggaagctcccaggctagctgggagcagtgaaggtggggcagttagggttggctgcagaaagggagtcctgcagaatgagatttggagaggcagagggacagatgctctgggctgggagagtggtgtgagcaaagattctgaaatagacaatatagccagccaggcag

SEQ ID NO: 223829 - DNA, 634 bp, Homo sapiens
tagcgggtttagggagctgctgcttcaggggtcgtccatcatcgcggtcccacttcctgtgctcgccctccctgtttgtgctcccgcctgactttggatgcagggatcccttgttcccctcaatgcccttggtgcctctaaggtctgacttgggtatcagaggacaatgatatcctctggggcctgcgttatgggtccagggcctcaggaaccgggcttcacaggggctgggagaagcagtgaagaccttccatgctagaccccttgctgcctccctgagaagttcgctaggactcctttcacactagctcccaggattcctcctcccacatggcctgctctccctccactttaagcacctccccaccccaagggagcagcatagtacttcttaccccactctcacttaaatttgtccacagtgtctctrtctagcatctggagggtccaggcctgtgctgcccttgggaagctcccaggctagctgggagcagtgaaggtggggcagttagggttggctgcagaaagggagtcctgcagaatgagatttggagaggcagagggacagatgctctgggctgggagagtggtgtgagcaaagattctgaaatagacaatatagccagccaggcag

SEQ ID NO: 223830 - DNA, 504 bp, Homo sapiens
tgttctcatggtgcctgcagagccacgggatagaaagaaagacagcagttctccacaatgtctctctttcccttgctgcccactctgtcctctccttggacaccttccttggctttcaggtcattgctgctgtctccctcccgacctctgcctgctcaccatctccagtgactgctctgaatccaggtctacctcatgcctttctgcctagctcccacggctgaactttttcgtccttgtcccccagttccaaattccagaggcagagggagagaaaggtctgaccaacctggtctgccatcttgagccaagctactgaagtcctaggtttctggctggtctgtgggggttcctccacctttgatcyggttagctgtaatggtggggcctcctccctcagcagctgatgtgggtagcaagattcctctcaggagggactcagttgtgttaggttgggattaccctcatgaatggtgcagagtgctggagggttgcttgggttag

SEQ ID NO: 223831 - DNA, 522 bp, Homo sapiens
ctgtttcattttccttcccagccttgctacccttcttcctttaggcctccttccatttgtcacccagcgtgcccttggcagattcccaaggttatggtcactacagaaacagtggtcttgcctgattacagtaaggaaagggaaacactaaaagattacagaaggtagcatgacagaattagaagaattattatattacayatctgtaattctagcactttgggaggctgaagtgggaggatcgcttgagctgaggagtttgagaccaacctgggcaacacagtgagaccccgtctctacaaaaaattttttctaaaaaatcagtgggttgtgatggtgcatgcctgtagtcccagctatgcaggtggctgaagtgggaagatatcttgagcctgggaggctgaggctgcagcgagctatgattgtgccactgtatacctgcctggtgacagagtgagaccctgtctcaaaaaacaacaacaaaaagaattattaaattacaagtatttgaaatctccttgc

SEQ ID NO: 223832 - DNA, 522 bp, Homo sapiens
ctgtttcattttccttcccagccttgctacccttcttcctttaggcctccttccatttgtcacccagcgtgcccttggcagattcccaaggttatggtcactacagaaacagtggtcttgcctgattacagtaaggaaagggaaacactaaaagattacagaaggtagcatgacagaattagaagaattattatattacatatctgtaattctagcactttgggaggctgaagtgggaggatcgcttgagctgaggagtttgagaccaacctgggcaacacagtgagaccccgtctctacaaaaaattttttctaaaaaatcagtgggttgtgatggtgcatgcctgtagtcccagctatgcaggtggctgaagtgggaagatatcttgagcctgggaggctgaggctgcagcgagctatgattgtgccactgtatwcctgcctggtgacagagtgagaccctgtctcaaaaaacaacaacaaaaagaattattaaattacaagtatttgaaatctccttgc

SEQ ID NO: 223833 - DNA, 582 bp, Homo sapiens
tgatactagctgtgggtttgtcatatatagtctttattgttttgaggtacccagtttgttgagcatttttatcataaagggatgttaaattttatcaaatgctctttcagtatctattgaaatgatcatatgatttttatcttttgttctgtctatgtgatatatcacgtttattgatttgtgtatgttgaaccatccttgcatctctgggatgaatcccacttgatcatggtgaatgayctttttaatgtgttgttgaatttggtttgctattttgttgaggatttttgtgtctatgttcatgagggagattggctcatagttttctttttttcttgtgtccttgtctggttttggtatcagggtaatgctggctttgtagactgagtttggaggtattccctcctcttcaattttttttaagtgtttagtagaattgacattagttctttaagtgtttgttagtactcagcagtgaagccatcagatcatgagcttttctttgatgggagactttttattatggctttgatctcattacgattatgggttgttcaggttttctatttcctcaagatttaa

SEQ ID NO: 223834 - DNA, 574 bp, Homo sapiens
tgactgagtgaatactttttgtgggccatatagaggtgtggtttggctcatcctgggtctaattctctccaacccttagttaagggggctgtaatgactcaagctttccattttcccatcctggaatgaggggtggattaggaggagctggaggggccaaagatggtctctctctctctctgttgggctggagactgggcacatccctgccyttcttgtcctcagttttccccttttacatgacatgaatgaagaaggtcatctccaaggcctctgcttggagagagggagactggctgttttcctggtcctccaagaccatggtgatagagggtgctcctgatagcagctgctcttggctgaactcttagagaggcaggcagacaggcttatgggacttagaaagaggtcacctcaatgggcagtggccttagagggagggttggcaagcagagctggatgaggatgggatacaggaagccaagggctctgcagcccagctcccagccaaatcccatggctatgtgggtcctgtctacctgagcacataggtgggctcaggggggctagaatg

SEQ ID NO: 223835 - DNA, 563 bp, Homo sapiens
atactttttgtgggccatatagaggtgtggtttggctcatcctgggtctaattctctccaacccttagttaagggggctgtaatgactcaagctttccattttcccatcctggaatgaggggtggattaggaggagctggaggggccaaagatggtctctctctctctctgttgggctggagactgggcacatccctgcccttcttgtcctcagttttccccttttacatgacatgaatgaagaaggtcatctccaaggcctctgcttggagagagggagactggctgttttcctggtcctccaagaccatggtgatagagggtgctcctgatagcagctgctcttggctgaactcttrgagaggcaggcagacaggcttatgggacttagaaagaggtcacctcaatgggcagtggccttagagggagggttggcaagcagagctggatgaggatgggatacaggaagccaagggctctgcagcccagctcccagccaaatcccatggctatgtgggtcctgtctacctgagcacataggtgggctcaggggggctagaatg

SEQ ID NO: 223836 - DNA, 350 bp, Homo sapiens
tttcttttggattggttactagagattcactttgttcctttgattgtcatattttcctgattcttcacatttcttataggtttgcattgttgtctaaatatttgaagaagcagatacttctctcagtctttatggacaaattttgatcgggcgagagctttaccagttcagtgcttaatttgaagcaacatggtgactgaccactgagggagtrcattgcaagactaaagcaagggtctcttcactcccttccctcccacctaaaggaaaagcctcgtttatggtttttcccaataaccagaatagttctggctttaagagatgccagccccttttcttagttactaatt

SEQ ID NO: 223837 - DNA, 350 bp, Homo sapiens
tttcttttggattggttactagagattcactttgttcctttgattgtcatattttcctgattcttcacatttcttataggtttgcattgttgtctaaatatttgaagaagcagatacttctctcagtctttatggacaaattttgatcgggcgagagctttaccagttcagtgcttaatttgaagcaacatggtgactgaccactgagggagtgcattgcaagactaaagcaagggtctcttcactcycttccctcccacctaaaggaaaagcctcgtttatggtttttcccaataaccagaatagttctggctttaagagatgccagccccttttcttagttactaatt

SEQ ID NO: 223838 - DNA, 205 bp, Homo sapiens
tatttacagtataatagctgaaacaagaaggtagagtgtttatcttattcaatctcagctgggaatgtgcataytgggaacctcaaatttttgccactgtgcacatatccacaactacaaaagcactgcattaatttaggggttacaaatagattttagcaggtcagcaaatttacaaatatagaatctatgaataatgaagacc

SEQ ID NO: 223839 - DNA, 389 bp, Homo sapiens
actttaatggaaaatttccctaaatataatgtgtagagctcctaaacaagaatcgaagataacttgccttactgactcagggtcatcattttaataatcaagtcaacaatgctaaaattcaataaaaccttttagatgtataaatgtatgttcttaaatttaaaagccccagttggcaacaattcttaaggtttctgctttatttaccttgtgttttttgtctcttattggtgtttttttaaaccaacagctcaatacatcttgtttgtatgaccttgcagaattaagtaaagtttacggctctgggttttctcgtctgtaaaatgaagaarctgtatttctaatgtccccctaggtctaaattctatttcttttctaactgtcactgt

SEQ ID NO: 223840 - DNA, 572 bp, Homo sapiens
aaacaacaaaaagttaataagcaggggtatgaagttaaaaagtagagtttttattagttttatttttgcttgtttatgtaaataaataatgctgttatcaggttgaaataatgggttataagatagtatttgcaagcttcatggtaacctcaaaycaaaaaaaaacatacaatgaatacacaaaaaataaaaacgaagaaattaaatattaccaccagagaaaaatcaccttcactagaggaagtcagaaagacagaagaccagaaaacaaacaacaaaatgacagtagtgagcccttacttatcattaacaacatgaaatgtaaatgaactaaactctccaatctaaaatacagactgactgcatgaaaaaacaagacccattgatatgttacctacaagaaacacacttcacctacaaagacacacacagactgaaagaaagagagggaaaaatatattccatgccaatggaaatcaaaagagcaggagtcactacagttatatcatactaaatcaatttcaacaaaataactataaaaaagaacaaagtcattatataatgaaaaagag

SEQ ID NO: 223841 - DNA, 562 bp, Homo sapiens
tcctagttgtaccaaagataaaagttcaggaaaaagggggcaagaagagaagcagagaaaagatcatgactgaacctcagaatccaaattacaaagcagaagttataagggtcataagaagcagacaccatgacagggaaaagacagatggtaatcataggatgcmagtgaaaagagaccatgaggctacctccacacatagtggtcagtaaggagctctttggagtcttcactggattagaatatagcctgtcggggggtggggggctaggggagggatagcattaggagaaatacctaatgtaggtgacagactgatgggtgcagcaaaccaccatagcatgtgtatacctatgtaacaaaactgcacattctgcacacataccacagaacttagtaattaaaaaaaaaaaaaagagtatgtggaagaaaaaaagaaaataggattgcataaatgattttcatgggggcccatgtacttagtttattatagcagtgaagattgagtaaaatcagttagaaaatttaaagtttctacatgatgtatctacaacaatctgta

SEQ ID NO: 223842 - DNA, 419 bp, Homo sapiens
cgttttgaaaagcaggataggaaaagctagagcttgaagtttctcaggttgctgttggaaagaaattcttttatcttcattttgaagccgagcaagaatcaaataaccctgcaagacaatttaaagaggaagagcaagttgctggtttttaaggaaaaagtacagtctttagaatctggggagaaagagagtgcaaatttcagccctgttaaatttggattttggaaatcgtggtagtcgtgtcactcttttatagcaagaatgctgattcctctgtgcatgctctggacttgtgatgcccctgacgtgaatacgtttgactctcttttrtaagcatgtacacttattgtgagctctttgctcagaggaatattaaaaaatcttcagtgttgaaaacatgtttaacttccatagctaag
